United States Patent Application Publication US 2024/0327476 A1 - sequence listing, part 126

SEQ ID NO: 239583 - DNA, 1065 bp, synthetic construct
  misc_feature 1..1065: note = Description of Artificial Sequence: Synthetic coding sequence
  source 1..1065: mol_type = other DNA
atgcctcgaagttctagatccccgggagatccaggcgcactcctcgaggacgtggcacacaacccacgcccacgacgcatcgcccaaagagggaggaacacctccaggatggcggaagatactagtcctaatatgacttggtttacatgctttgcatgctccctaagaacccaggcgcagcaggtgttgttcaatacatgtaggtgtaagcttttgtgccagaagttgatggagaagactggaatactcctactgtgtgcctttggattctggatgttttctatacatctgccctccaaaatgaaagtgtggcaggacgactccatcaacggccctctgcagtcgttgcgactataccaagagaaggttcgccatcatagtggcgaaatccaggatcttcgagggtccatgaatcagttaattgcaaaattgcaggaaatggaggcaatgtcagatgagcagaaaatggcgcagaagattatgaagatgatccacggggactatattgaaaaacccgacttcgccctgaaatctatcggcgcttctatcgacttcgaacacacaagcgtgacgtataatcacgagaaagcacactcctactggaactggattcaactctggaattacgctcaacccccagacgtcattctggagccgaatgtgactccaggaaattgttgggcttttgaaggtgacagaggacaggtaaccattcaactcgctcagaaagtgtatctttccaatctgacgctgcaacatatcccaaagacaatttccctctcaggaagccttgacaccgccccaaaagacttcgtcatttacgggatggaaggctcccccaaggaggaagtctttctcggcgcatttcagttccagccggagaacatcatccagatgttccccctgcagaaccagcctgctcgcgcttttagtgctgtgaaggtcaagatttcttccaactggggtaaccccggatttacatgcttgtacagggtcagagtacatgggtctgtggcaccgccaagggagcagccgcaccagaatccataccccaagcgagactag

SEQ ID NO: 239584 - DNA, 459 bp, synthetic construct
  misc_feature 1..459: note = Description of Artificial Sequence: Synthetic coding sequence
  source 1..459: mol_type = other DNA
ggggctctgttagaggatgtcgcacacaatccccgtcccaggcggatcgcccagagaggcagaaacaccagccgaatggctgaagatacctcccccaacatgaatgacaacatcctgcttcctgtgagaaacaatgatcaggcattaggcctcacacagtgtatgcttggctgtgtgagctggtttacatgcttcgcctgttctctgcggacccaggcccaacaggtcctctttaatacttgccgctgtaagttgctttgccaaaagctgatggaaaaaacagggatcctgcttctctgcgccttcggggtgagccagggacccgctcagtctcaggtggaggtgtcactcggtcccggaaccgactacagaactctggggaagaccttgcattgccatgttacccagttcccccatctgcccgatgggtgttgctgtgagaattatgagatgaagtag

SEQ ID NO: 239585 - DNA, 387 bp, synthetic construct
  misc_feature 1..387: note = Description of Artificial Sequence: Synthetic coding sequence
  source 1..387: mol_type = other DNA
atgtccgagggcggtggccaggttagctgcatcttcgcagccccaacccggctttgccgctggcccgctttaatagaatgtggtgtcaacctcacacagcctttgtgtgaatggatgattcaagtcgcacgcgatcgaacactctctctagcctgggaggtagcctccctgctcacactgtcttccagtgaggtcggcttagagggagtcggcactatctggccttcatcctattcgtcagaagagtcttctaggaacggagccgagcaggggagacaactttctattgagggacctttccagggacagaactgtcccagccatccagcagcagccttgccccttcctatgaggggagaatctcaggccacttcttgtcaggtatag

SEQ ID NO: 239586 - DNA, 3975 bp, synthetic construct
  misc_feature 1..3975: note = Description of Artificial Sequence: Synthetic coding sequence
  source 1..3975: mol_type = other DNA
atgtccagacggaagcaggcaaaacctcagcacttccagagcgatcctgaggtggcttctctgcccagaagagacggggacacggaaaaagggcagccgtccaggccgacaaagagcaaggacgctcacgtgtgtggccgttgttgcgccgaattttttgagctctcagatctcctcctgcataagaaaaactgtacgaagaatcagctcgttctgatcgttaacgagaacccagcatcaccaccagagaccttctctccatctcccccaccggataaccctgacgagcaaatgaatgacacagttaacaagaccgaccaggtggattgttctgatctgagcgagcataacgggctggatcgcgaggaatctatggaagtggaggctccggtggctaacaagagcggctccggcactagttcagggtctcactcctccaccgcgccaagtagttcctcaagctcttctagctcatccgggggaggtgggtctagctcaaccggaacttctgccatcactacatcactgccacagctgggcgacttaaccactctggggaacttctccgtcataaactctaacgtaatcattgagaacttacagagcacgaaggtggcagttgcccagtttagtcaggaggcccgttgcggcggagcctcggggggtaagctcgctgtccctgcgctgatggagcagcttctggcgctgcaacagcaacagattcatcagctgcaactcatcgagcagattcgacaccaaatcttactattggcttctcagaatgccgatctccccacgtccagttctccctcccagggtacactccgtacctctgccaatcctctgtccacgctgagttcccacctttcccaacagttggcagctgcagccggattagcgcagtcattagcatcccaatctgcctcaatatcaggggttaaacagctgcccccaattcagctcccccagagtagcagcggtaatacgatcatcccatcaaactccggttccagtccgaacatgaacattctcgccgcagcagtaactactccttcctctgaaaaagttgcatctagcgcgggtgcttctcacgttagcaatcctgctgtttcctcctcctcgtcgcctgcatttgccatatcaagtcttcttagccccgcatcaaacccgctgcttcctcagcaggcaagcgccaattctgtgttccctagtccgctgccaaatatcggtacaacagccgaggacctgaatagcctaagtgccctggcacagcagcgaaaaagtaagccacctaatgtgactgcctttgaggctaaatccacctccgatgaagccttctttaagcataagtgcaggttttgcgctaaagttttcgggagtgattcagccttgcagattcacttgaggagtcacacaggagaacgaccctttaaatgcaatatctgcggcaatcggttttctacaaagggaaacctcaaggtccacttccagcggcataaagaaaagtatccgcatattcagatgaacccctaccctgtgcctgagcacctggacaatatacccaccagcacagggataccctatggaatgtctatcccccctgagaagcctgtgacgtcttggttggacactaaaccagtgctgccaacgttgacaacatctgtaggccttcccctcccgccaaccctgccgagcttgatccccttcatcaagacagaggagcctgctcctatacctataagtcactccgccacgtctcctcctgggagcgtgaagtctgactcaggcggacctgagtccgccacacgcaacttgggtgggctacccgaagaagcagagggcagcaccctccccccaagtggagggaagagcgaagagagtggtatggtcacaaactcagtacctacagcctccagtagtgtcctgtccagcccggctgccgactgcggccctgccggttccgcaaccacctttactaatcctctgttgccacttatgtcggaacagttcaaagcgaagtttcctttcggcggactgttggatagtgcacaggcctccgaaacaagcaagctgcagcaattggtggagaatattgataaaaaagcaaccgatcctaatgagtgcattatttgccaccgtgtactgtcctgtcagtcggcactcaagatgcattaccggactcataccggcgagcggcctttcaagtgcaaaatttgcggcagagctttcacgacaaaaggaaacctcaaaacacattactctgtgcaccgcgctatgccacctctgagagtacaacactcttgtcccatttgtcagaagaagtttacaaatgccgttgtactccaacaacacatcaggatgcatatgggcggacaaatccctaatactcccgtaccggattcatattctgagagcatggagtctgacactggctcattcgacgagaagaacttcgacgatctggataactttagtgacgagaacatggaggattgccctgaggggagtatccccgacactccaaaatctgccgacgcttctcaggactccctgtcttcaagccctttacctctggagatgtcctctatcgccgcacttgaaaatcagatgaagatgattaacgccggtcttgctgagcagttgcaggcaagtctgaagtccgtggaaaatggaagcatagagggggatgtactgaccaatgactcatcttccgtcggcggagatatggagtcccagtccgccggttcccctgctatatcagagtcaacttcttcgatgcaggccctatctccatccaactctacgcaggagttccacaagagtccatctatcgaggaaaagccacagcgggcagtgccaagtgagtttgctaatggcctgtcccctactccagtgaatggaggagccctcgacctaacatcctctcacgccgaaaagatcatcaaagaagacagtctgggcatcttgttcccttttcgcgatcggggtaagttcaagaacaccgcttgcgacatttgtggcaaaacgttcgcctgccagagtgccctggacattcattaccgatcgcataccaaggagagaccgttcatctgtacggtgtgcaaccgcggattctccactaagggaaatctgaaacagcacatgctgactcaccaaatgcgggatctcccatcccagctttttgagccatccagcaacctggggccaaaccaaaatagcgctgttatacctgcaaactccctcagctccctcataaagacagaggtgaacggcttcgtgcatgtttctcctcaggactccaaggacacaccaacaagtcacgtgccgagcggtccactctcttcgagcgccacttctccagtgctgctgcccgcactgccacgccgaactcctaagcaacattactgcaacacttgtgggaagaccttctccagcagctctgccctgcaaatccatgagcgtactcacaccggggagaaaccattcgcatgtaccatctgtggaagggcatttacaactaaggggaacctgaaggtacacatggggacacatatgtggaatagcacgccagccaggcggggtcggcgtctgtcagtagatgggcctatgacgtttctcgggggtaaccctgtgaaattccccgagatgtttcagaaagacctcgctgctaggagcgggtcaggtgatccgagttccttctggaaccagtatgctgccgctctgagcaacggtctcgccatgaaagcgaatgaaatctcagttattcagaatggaggaattccacctattcccggatctctgggcagcggcaacagttctcctgtctccgggctgaccgggaaccttgagcggctacagaactccgaacctaatgcaccgctggctggcttggagaaaatggcctccagtgagaacggcacaaacttcagatttactagattcgtggaagacagtaaagagatagtgaccagctag

SEQ ID NO: 239587 - DNA, 3684 bp, synthetic construct
  misc_feature 1..3684: note = Description of Artificial Sequence: Synthetic coding sequence
  source 1..3684: mol_type = other DNA
atgaacgacaccgttaataaaacggaccaggtggactgcagcgacctttcagaacacaacggactggaccgagaggaaagtatggaagtggaggccccagtcgctaataaatctggctctggcacttctagtgggtcgcattctagcaccgccccttcatcgagctcctcatcctcgtcatcttctgggggaggtgggtcatccagcactgggaccagcgcaattactacaagtcttccccagctcggggatctgacaaccttgggcaacttctcagtgattaacagcaacgtgataattgagaacctgcagtccaccaaagtggctgtggcccagttcagtcaggaggctcgctgtggtggtgctagtggaggtaagctggctgtgcccgcactgatggagcagctccttgcattgcagcagcaacagattcaccaactgcaactgatcgaacaaatccgacaccagatcctgctcctggcgtcacaaaacgcagatctgccaacatccagctcaccatcccaaggaaccctaagaacttcagccaatccactgtccacgctatcctcacacctgtctcaacagcttgcggcagcagctggcctggcacagtccctggcctctcagtctgccagcattagcggtgtcaagcaattaccaccaatccagctaccccagagtagtagcggcaacacaattattccatccaacagtgggagttcaccgaacatgaatatcctggcggctgctgttacaacaccaagctccgaaaaggtggcaagtagcgcaggtgccagtcacgtgagcaatcccgctgtttctagctcctcctctcccgcattcgctatctctagccttctgagcccggcatccaacccactgctcccccagcaggcatctgctaactctgtatttccatcccccttgcccaatatagggacaaccgccgaagacctgaatagtctgagcgccctggctcagcaaaggaagtctaagcctccgaacgttactgcttttgaagcgaaaagcaccagcgatgaagcattcttcaaacacaagtgccgattttgtgctaaggtgtttggttctgatagcgccttacagattcatttgaggagccacaccggtgaacgtcccttcaagtgtaatatttgcgggaacaggttctccaccaaggggaatcttaaggtgcactttcaaagacataaagaaaaatatccacacatacaaatgaatccttaccctgttcccgagcatctggacaatatacctacctctacaggcattccttatggcatgtctattccgcctgaaaaaccggtgacatcttggctggacactaagcctgtcctaccaaccctgactacctccgtggggctgccactcccgccaacactaccgagtctgatccctttcattaaaaccgaggaaccggctccaattcccatttctcattctgctacttctcctcccggatccgtaaagagcgactccggagggcctgaatctgctaccaggaacctaggaggcctgcccgaggaagcggaaggaagtactctgcctccaagtggtggcaaaagcgaggaatctggaatggttacgaattctgtccccactgcaagtagctcagttctgtctagccctgctgctgattgcggaccagcgggatcagctactactttcacaaaccctctactgcctcttatgtccgagcagttcaaggccaagttcccatttggaggactgctcgacagcgcccaggcatcagaaacctccaagctgcagcagctggtagaaaatatcgacaagaaagccaccgaccctaacgagtgtatcatttgtcaccgcgtgttgagctgccagagcgccctgaagatgcactaccgaacgcacactggggagcgaccatttaaatgtaaaatctgtggaagggcattcaccactaaaggcaacttgaagacccactacagtgtgcatcgcgctatgcccccactccgggtgcagcacagctgtcctatttgtcagaaaaagttcaccaatgcagtggtccttcagcaacacataagaatgcacatgggtgggcagattccaaacaccccggttccggattcctattctgagagcatggagtccgataccggttcgttcgatgagaagaattttgacgatctggacaatttctcagacgaaaacatggaggactgcccagagggctccatccctgatacgcccaaatccgcagacgcttcacaagactcattatcctcaagtcccctccctcttgagatgtcctctattgctgctttggaaaatcagatgaaaatgatcaacgccggacttgccgaacaactgcaggcttccctgaaaagcgtggaaaacggaagtatagaaggagatgtactgactaacgacagttcttctgtcgggggagatatggaatctcagtctgccggttctccagccatttcagagagcactagcagcatgcaagcgctttctcccagtaacagcacccaggagttccacaaatctccaagcatcgaggagaagccacagcgggctgttccgtcagagttcgccaatggcctatctcctacacccgtgaatgggggagctctcgacctcacatccagtcacgctgagaaaatcattaaggaagatagtcttggaatcctttttccctttcgcgaccgaggaaaatttaaaaacactgcttgtgatatctgcggaaagacctttgcctgtcagagcgcgctagacattcactacaggagtcacaccaaagagcggccattcatttgcaccgtttgcaacagaggcttctcgacaaaaggcaacttaaagcaacatatgctcactcaccagatgagggatctaccatctcagctatttgaaccctcttccaatctaggcccaaaccagaattcagctgtgatcccagccaacagtctgtcttccttgataaagactgaagtgaacggattcgttcacgtctctccccaggatagcaaagacactccgacatcacatgtaccttccggacctctgtctagcagtgcaacatcccccgttctcctccctgcactaccgcgaagaacaccgaagcaacattactgtaacacttgtggaaagacgtttagctcgagttctgctctccagatccatgagcgcactcataccggagaaaaaccctttgcctgcacaatctgcggcagggccttcacgacaaagggaaatttgaaggtccacatgggtacccacatgtggaattccaccccagcgagacgaggacgcagactctctgtggacggtccaatgacatttctcggcggaaaccccgtaaagtttccagaaatgtttcaaaaggatctggctgcacgaagcggctccggggacccgtcgtctttctggaaccagtacgccgcagctctgtcgaacggcctggccatgaaggctaacgaaatcagtgtcatccagaatggaggaatacctcctatccctggatctctgggcagcggtaattcttcccctgttagtggactcaccggaaatctggaacggctccagaattccgaacctaacgctccgctcgcgggtttggaaaaaatggcttcctccgagaatggaaccaattttcgtttcaccaggttcgtggaggatagtaaagagatagttacttcctag

SEQ ID NO: 239588 - DNA, 3867 bp, synthetic construct
  misc_feature 1..3867: note = Description of Artificial Sequence: Synthetic coding sequence
  source 1..3867: mol_type = other DNA
atgtcccggaggaagcaggcgaagccacagcacttccagagcgatccagaggtagcctcgttaccccgtagagacggagatacagagaagggacagcctagccgacctaccaagagcaaagacgctcacgtgtgcgggcgttgctgtgccgaattttttgagttatctgatctgctactgcacaaaaagaactgtacaaaaaaccagcttgtgctgattgttaatgagaaccccgcaagtccccctgagacgttctctccctccccaccccctgataatcccgatgagcagatgaatgacaccgtcaataagacgggttcccactcatctaccgcccctagcagttcctctagttcaagcagcagttccggcggtggcggaagttcctcaactgggacgtctgctatcaccacctcccttccccaacttggtgatctaacgactctgggcaacttttcagtaatcaactcgaacgtcatcattgaaaatcttcagtccactaaggtcgctgtggctcaattttcccaggaggccagatgtggaggagcctctggcggtaaactcgcagtacccgcactgatggagcagctgcttgctctacagcagcagcagatccatcagttgcagctgattgagcagatcagacaccagatcttgcttctggcaagccagaacgccgacctccccacctctagctccccctcacagggtaccctacgaacatcagctaatcccttatccaccctgtcaagccatctgagccagcagctcgcggctgccgcaggtctggcccagtctttggcatctcagtctgcctctatatctggcgttaaacagctgcccccaattcagctacctcagtcgtcctctgggaacacaatcattcctagcaatagcggtagctccccaaatatgaatattctcgcggcagctgtgactaccccgtcatctgaaaaagtcgccagtagcgccggagcaagccatgtctccaatccagcagtgtcatcttcctcaagtccagcgttcgctattagcagtttgctgagtccggcttccaacccgctgctacctcaacaggccagcgctaacagcgtgttcccttccccattgccgaacatcggcaccactgcagaagacctgaacagtctgtccgccctggcacagcagcggaagagcaaacctccaaacgtcacagcattcgaagcgaaatcgacgtctgatgaagccttcttcaagcacaaatgcagattctgtgccaaggtctttggtagcgactcagccctgcagatccacctgcgcagccacaccggcgaaaggccttttaagtgcaacatttgtggtaaccgctttagtaccaaaggcaatctcaaagtgcatttccagagacataaagaaaagtatccccacattcagatgaatccgtaccccgtacccgaacaccttgacaatatcccaacatctactgggatcccctatgggatgtctatccccccagagaagcccgtgacttcttggcttgatacgaagcccgtcctgcccaccctgaccacctctgttggactgcctctgccgccaactcttcctagcttaatcccttttataaagaccgaagagcctgcccctattcccatcagccactccgccacaagcccacccggatctgtgaaatctgattcaggaggaccagagagcgcgacacggaacctgggaggcctgcccgaagaagcagagggaagtaccctgcccccaagcggcggaaagagcgaggagtcaggtatggtgacaaacagcgtgcccaccgcatcgtcctccgtgcttagtagtcccgctgccgactgcggtccagccggtagcgctactacgttcaccaaccctctcctgcccctgatgtctgaacagttcaaggcgaagttcccattcggaggactcttggattcagctcaggcgtctgaaacctcaaagctgcagcagcttgttgagaatatagacaagaaggccacagatcctaatgagtgcatcatttgtcatagggtcctctcttgccaatccgccttgaagatgcactacagaacacataccggtgaacgcccatttaagtgcaaaatctgtggacgggcttttactaccaagggcaatctcaagactcactactccgtgcacagggcaatgccacccctcagagtgcagcatagttgtcctatctgtcagaagaaatttaccaatgctgtggtcttacaacaacacattcgaatgcatatggggggtcaaattcccaatactcccgtccccgactcctactcagaatcgatggagtccgatactgggagcttcgatgaaaagaattttgatgacctggataacttcagcgacgagaacatggaagactgtcccgagggctcaattcctgacacacccaaatctgcggacgctagtcaggatagcttgtcctcctcccccctgccactcgaaatgtcaagtatcgcagctctggagaaccaaatgaagatgattaacgctggccttgcagaacagctacaggctagcctcaagagtgtggagaacgggtccattgaaggtgatgtcctgacaaacgactcttcttccgttgggggagatatggaatctcagtccgctgggtcacccgctatcagcgaaagtaccagcagtatgcaagcactcagccctagtaacagcacgcaagagttccacaaatctccgagcattgaagagaagccccagcgcgctgtgccgagtgaattcgcaaatggcctgagcccgaccccggtgaatggtggtgccttggacctgaccagctctcatgctgagaagataatcaaagaggattcacttgggatactatttccttttagggacagaggaaaatttaagaatacagcctgcgacatctgtggaaagactttcgcgtgtcaaagcgccctggatattcactatcggtcccatactaaggagagaccttttatatgtactgtatgcaatcggggattttcgacaaaaggcaatctgaaacagcacatgctgacccatcagatgagagatctccccagtcagctgtttgaaccgagtagcaatctgggacctaatcagaatagcgcagttatccctgcaaattcactgtcctctctgatcaagaccgaagtcaatggatttgtgcatgtgtcgccccaggattccaaagatactccaacatctcacgtaccctcaggcccattgtcttcttctgcaactagccccgttctcctgccggcactaccaaggagaacacccaagcaacattactgcaacacctgcggtaaaacctttagctcctcctctgctcttcagatccacgaacgtactcacactggtgaaaagcctttcgcatgtaccatctgcggcagggcattcacaacaaaaggcaatctcaaagtgcacatgggcacgcatatgtggaatagtacccccgctaggagaggtaggagattgtctgtagacggcccaatgacgtttttgggcggaaatccagtgaaattccccgagatgtttcaaaaggacctagccgctcgaagtggctccggggacccttcatctttttggaaccaatatgctgcagccctcagtaatggcctggccatgaaggcgaatgagatctcagtcattcagaacgggggaattcctccgattcccggatctctggggtcaggtaactcctcccctgtctctggcttgactgggaatctcgaacgcctgcagaattcggagccaaacgccccactcgcaggacttgagaagatggcttcttccgagaatggaactaattttcgttttactagattcgtggaggactccaaggaaattgttacctcctag

SEQ ID NO: 239589 - DNA, 444 bp, synthetic construct
  misc_feature 1..444: note = Description of Artificial Sequence: Synthetic coding sequence
  source 1..444: mol_type = other DNA
atggttcacatgggcacgcacatgtggaacagtacccctgccaggagaggccgaagactgtccgtagatggaccaatgacattcttgggcggtaatccggttaagtttccagagatgttccagaaagacctggccgcacgaagtggcagcggggatcctagttcattttggaaccagtatgccgctgccttaagtaatggtttggccatgaaagcaaatgaaataagcgtcatacagaatgggggaattcccccaatacctggctctctcggatcaggcaacagtagtcccgtatcaggcctaactggcaatctggaacggctccaaaattcggagcccaacgcgccattggccggtcttgaaaagatggcctccagcgagaatggcaccaactttaggtttacgagatttgtcgaggacagcaaagagatagtgacttcatag

SEQ ID NO: 239590 - DNA, 3024 bp, synthetic construct
  misc_feature 1..3024: note = Description of Artificial Sequence: Synthetic coding sequence
  source 1..3024: mol_type = other DNA
atgagtcggcgtaaacagcgaaagcctcagcagctcatctcagactgcgagggaccttcagccagcgagaatggcgacgcttccgaagaagaccatccacaggtgtgcgcaaagtgttgtgctcagtttaccgaccctaccgaatttctggcgcatcagaacgcctgctcaaccgaccctccggtcatggtgatcattggaggacaggagaacccgaacaactccagtgcctcaagtgagccccgaccggagggccacaataatcctcaggttatggacaccgaacacagcaatcccccagacagtggcagctctgtgcctactgacccaacttggggccctgagagaaggggcgaggaatccccgggacactttctggtggccgctaccgggacagctgccggaggcggagggggattaatactggcaagtcctaagctcggggctactcccctgccccctgaatctaccccagctccacctccacccccacctcctccccctccaccgggagtgggcagcggccacctgaatattcccctaatcctagaggagctgagggtattacagcagagacagatccaccagatgcagatgactgaacagatttgccgccaagtactgcttctgggcagtctcggccaaacggttggcgcacctgcttccccatcggaactccccggtaccggcactgcatcgagcacaaaaccactgttgcccctcttttcaccgatcaagcccgttcagacctctaaaacactcgcatcatcctcttccagttccagctcctcttctggcgctgaaacccccaaacaggctttctttcacctgtatcatcccctaggatcccaacacccattctccgctggaggtgttggcagatcccacaaacccactcccgcaccatccccagccctacccggtagcactgaccagctcatcgcgagcccacacctcgcttttcccagtactacggggctcctggccgctcaatgtctgggggctgcacggggtctggaggctaccgccagccccggactcctcaaaccaaaaaacggttcaggcgaattgtcatacggggaagttatgggccctctggaaaagccaggcggacgccacaagtgccggttttgtgctaaagtctttgggtctgatagtgctctgcagatacatctgcgctctcacaccggcgaacggccttataaatgtaatgtatgcggcaaccgatttactacccgaggtaatcttaaagtgcattttcaccggcaccgagagaagtacccacatgtgcagatgaatccccatcccgtgccagagcacctggattacgtgattacaagtagtggtctcccctacggcatgtctgtgcccccagaaaaggcagaagaggaggcggcaaccccaggaggtggagttgagcgaaagcccctcgtggccagcactacggccctgagcgccactgagtctctgactctgttatcaacctcggccggaacagctaccgcccctggtctcccagcttttaataaatttgttcttatgaaagccgtggagcctaaaaataaagccgacgagaacacacccccagggtcagagggttctgctatttctggagtggctgagtctagcacagcgaccaggatgcaactgtcgaaactggtaacatctttgccttcgtgggccctactcactaatcattttaagtccacaggaagcttcccctttccttatgtcctggagcctctaggagccagcccttctgagacctcaaaactacagcaactcgtagagaaaatcgacagacagggggcagtggccgtgacctccgccgcatctggcgcaccaaccactagcgccccagcacctagcagcagcgccagctcaggaccaaatcagtgcgtgatctgcctccgcgtactgtcatgtccgagagcgttgcgacttcactatggccaacacggcggagagagacctttcaaatgtaaagtatgtgggcgtgcgtttagtactaggggcaatctgcgtgcccacttcgtgggtcataaggccagccctgccgcacgtgcgcagaactcctgccccatatgccagaagaaattcaccaatgcagtcacattgcagcaacacgtgcgaatgcacctgggcggtcagattccgaatgggggaactgctctgccagaagggggaggagcagctcaggagaatggaagcgaacagagtacggtttcaggcgctggaagcttccctcagcaacagagtcagcagccgtctcccgaggaagaactctctgaagaagaggaagaggaagatgaagaagaagaagaggatgtcactgatgaagactccctcgctggcaggggtagcgagtcaggaggcgaaaaggccatctcggtgcgtggggacagcgaggaggcatctggggcagaggaagaagtagggaccgtggccgcagctgccaccgcaggtaaggagatggactctaatgaaaagaccacgcagcaatcttcgctgcctccaccccctccaccagattccctagatcagccccaaccaatggagcagggtagctcaggagtgctcggcggaaaggaagaaggcggaaaaccagagcggtcaagcagtccggcaagcgctctaacacccgagggggaagctacttccgttactctggtggaagaactatctttacaggaggcaatgcgaaaggaaccaggcgagtcaagctctaggaaagcttgtgaagtgtgtggccaggcgttcccctctcaggctgccttggaggagcaccagaagacacacccaaaggaggggccactgttcacatgtgttttctgccgacaagggttcttagaacgggctactctgaagaagcatatgctccttgcccatcaccaagtgcaaccttttgccccacatggccctcagaacattgccgctctgagcctcgtgcccggatgtagccctagcatcacctccactggtttgtctccatttcctaggaaagatgatcccactattccatag

SEQ ID NO: 239591 - DNA, 1827 bp, synthetic construct
  misc_feature 1..1827: note = Description of Artificial Sequence: Synthetic coding sequence
  source 1..1827: mol_type = other DNA
atgagccgccgtaaacagcggaagccacagcagctgatctcggattgtgaagggccatcagcttccgaaaatggggatgccagtgaagaggatcacccgcaggtttgcgccaagtgttgcgcccagttcacggacccaaccgagtttctggcccaccagaatgcctgtagtaccgatcctcctgtaatggttatcatcgggggacaagagaaccccaacaattcctccgctagttcagagcctcggcctgagggccacaataaccctcaggtgatggataccgaacacagtaacccccctgattcaggctcctccgtgcccacagacccgacatggggccctgaaaggcggggtgaagaatctcccggacacttcttagtggccgctaccggaacagccgctgggggaggcggaggactgatactagcctctcccaagctcggcgctacaccactgccgccagagtccaccccggctccaccacctcctccgcctcccccaccaccacccggagtgggctctgggcacctgaatattccgttgatcctcgaagaactgagagtgctgcaacagcgccagattcaccagatgcagatgacagagcaaatctgcaggcaggttcttctactgggttctctgggccagaccgtgggcgctcccgcaagcccttcggaattgcccggaactggaacagcttcttcaactaagcctctgctgcccctattctcacctatcaaacctgttcagacctctaagactctcgccagcagttccagctcaagcagttcctctagtggtgcagagacacccaagcaggcctttttccatctttatcatcctctcgggtcccagcatccgttttccgcaggaggcgtggggagatctcataagcccactccagccccaagtcctgcattgccgggttctaccgaccagctaatcgccagcccccatctcgcgttccccagtaccactggactcctagcagctcagtgtctgggagcagccagaggtctcgaggccactgctagtcccggtcttctaaaaccaaaaaatggaagtggtgaactgtcttatggcgaggtgatgggaccactcgagaaacccggaggccgtcataagtgccggttctgtgcgaaggtgtttggttccgattctgccctccagatccacctgcggtctcacaccggggagaggccctacaagtgcaacgtctgtggtaatcgattcaccacacgtggcaatttaaaggtgcacttccacaggcatagggaaaaatacccacacgtgcagatgaacccacaccccgtgcctgaacacctggattacgtgataacgtcctctgggctcccatacggcatgtctgttcccccagaaaaggcggaggaagaggctgctacccccggaggcggtgtcgagcggaagcctttagtggcgtccaccactgccctttccgctacagagtccctcacccttctctccacaagtgctggcacagccaccgccccaggcctgcctgctttcaataaatttgtactgatgaaagccgttgagcctaaaaataaggccgatgaaaatactccaccaggaagcgagggatcggcaatttccggggtcgccgagtccagcacggctaccagaatgcaactttccaaactggttaccagcctgccttcctgggccctgctgaccaaccactttaagtccacgggcagtttcccatttccttacgtccccgaagaagttcatcagtgttgtcactctgccgctgcttgtccagacgcgcctggcggaccagacccgcaacggtggtactgcacaccatag

SEQ ID NO: 239592 - DNA, 3687 bp, synthetic construct
  misc_feature 1..3687: note = Description of Artificial Sequence: Synthetic coding sequence
  source 1..3687: mol_type = other DNA
atgtcacgaaggaagcaggctaagccgcaacacctgaagagcgacgaggagctgctaccacccgatggcgcacctgagcacgccgctcctggagaaggagccgaggacgcagacagtgggccagagtccaggtcaggcggtgaagagactagcgtttgtgaaaaatgttgtgcagaattctttaaatgggcagacttcttggaacatcagagaagttgcactaagctgcctcccgtgctgatcgttcatgaggatgctcccgctcctcccccagaggactttcccgaacctagtccagccagttcacccagtgaacgcgctgaaagcgaagccgcagaggaggctggcgctgagggagcagaaggtgaggctaggccggtggaaaaagaggctgagccaatggacgcagaaccagctggggacactcgggctccgaggccgccacctgcagcccctgctccgccaacaccagcctatggggcaccatccactaacgtcacactggaagccctgttatccaccaaggttgcagtggcccaatttagccagggagcacgcgcagcaggaggttcaggtgccggaggtggcgttgcagccgcagcggttccactgatccttgaacagctgatggctctgcaacaacagcagatccatcagctacagctgatagaacaaatccgctcgcaggtagctttaatgcaaagacctccgcctagaccttcgctgtctccagccgcagccccttccgcgccaggtccggctccctctcaattacccggactagccgcactcccgttgtctgccggagcacctgcggctgccatcgcgggttccggtccagcagctcctgccgcattcgagggagcccagcccctgtctcggccagagtcaggagcgtcaactccgggagggcctgcagagcctagcgcgcctgccgcaccatccgccgctcctgctcctgccgcacccgcacctgccccagctcctcagtcggccgcttctagtcagccacaatccgccagcacaccacccgcactcgctccaggcagccttttaggcgctgcccctggtctgccaagtccactgttaccccagacctctgctagcggagttatcttcccaaatccactagtcagcattgcagctacggcaaatgccctcgatcccctgtctgcactgatgaaacaccggaagggcaagcctcccaacgtcagcgtgtttgagcccaaagcttcggcggaagacccattcttcaagcacaagtgtaggttctgtgctaaggtgtttggaagcgattctgcgcttcaaattcacctcaggagccatactggggaaagaccctttaagtgtaatatatgcgggaaccgcttttcgaccaaagggaacttaaaggtacatttccaacgacataaggaaaagtatccccacattcagatgaatccctatccggtacccgaatatctggacaatgtccctacctgtagtggcatcccctacggcatgagccttccgccagaaaagcccgtgacgacttggctggactccaagccagttctgccaaccgtgccgaccagtgtcggactgcagttgcccccaactgtcccaggtgcccacgggtacgcagattcaccatctgccactccagcctcaaggtccccccaaaggccatctcctgccagctcggaatgcgcttccctttcaccgggattaaatcatgtcgaatcaggtgtgtcagcaaccgcggaaagcccccagagtctgctggggggacccccactgaccaaggccgagccagtgagcctgccttgtacaaacgcaagagccggtgacgccccagtgggagcacaggcctcagcggctccgacaagcgtggacggcgcaccaacttctctgggaagcccgggattgccagctgtctccgagcagtttaaagcccagttcccttttggtggtcttttggattcgatgcagacatctgagacttccaaactccagcagctcgtggaaaatatagacaaaaaaatgaccgaccccaatcagtgcgtgatctgccatcgggtactgagctgccagagcgctctaaaaatgcactaccgcactcacacaggcgaaaggcccttcaagtgtaagatatgcggccgagcctttactactaaagggaacctaaaaacacacttcggagtacatcgcgctaaaccgcctcttcgggtgcagcactcttgtccgatttgtcagaagaagttcaccaacgctgttgtgcttcagcagcacattaggatgcacatggggggtcagataccaaacactcctcttccagagggattccaggatgcaatggatagcgaactggcgtatgacgataagaatgccgagactctatcatcctatgatgacgatatggacgaaaactccatggaggacgatgccgaactgaaggatgctgccaccgaccctgccaagccccttctcagctatgccggttcttgtcctccctctcccccttcagttatctcctctatagccgctctcgaaaatcagatgaaaatgatcgattctgtgatgagctgtcagcagctgactgggctgaagtctgtggagaatgggagcggcgagagtgaccgcttgtccaatgattctagttccgccgtcggtgacctcgaatctcgttctgctggctcaccagctttgagtgaatcctcttcatcacaagcactgagcccagcaccttcgaatggcgaaagtttccgctctaaatctcccggtttaggtgcacccgaagagcctcaggagatcccactgaaaacagagcggccagatagccctgctgctgcaccaggcagtggcggagccccaggcagggccggaatcaaggaagaggcccctttttccttactgtttttgtccagagaaagaggcccttcacagagcacaccatctcttatttcgagcgccgcacctactatgatcaagatggaagttaacggccatggtaaagctatggcacttggggagggccctcccctcccagcaggggtacaagtaccagccggaccacagacagtgatgggacccggtcttgccccaatgctagctccaccacctcgcaggactcctaaacagcacaattgtcagtcctgcggaaagaccttctcctcagcatcagcactccagatacacgagcgaacacacacaggcgagaagccttttggctgtaccatctgcggccgagcttttacaaccaagggtaatctgaaggtgcacatgggcacccacatgtggaataatgccccagcccgtcgcggaaggaggctgagcgtcgaaaaccctatggctttactgggcggtgacgccctgaaattttctgagatgttccaaaaggatctggccgctagagctatgaatgtggatccgtcattctggaatcagtacgccgctgcaatcaccaatggcctagcaatgaagaacaatgaaatctcggtgatccagaacggaggcattcctcagctgcctgtttcgttaggcggtagtgccctcccaccactggggagtatggcctccggcatggacaaggctcgtaccggaagttctccaccaatcgtgtccctggataaagcgtcaagtgagactgccgcttccaggccattcacccgattcattgaagacaataaagagattggcatcaattag

SEQ ID NO: 239593 - DNA, 3903 bp, synthetic construct
  misc_feature 1..3903: note = Description of Artificial Sequence: Synthetic coding sequence
  source 1..3903: mol_type = other DNA
atgtcacgccgtaagcaggccaaaccacagcaccttaaatccgatgaggagttattaccaccagatggagcgccagagcatgcagctccgggtgagggggcagaggacgctgactctggacccgagtcccggtctggcggtgaagagacctccgtttgcgagaaatgttgcgctgaattcttcaaatgggcagacttcttggaacaccaaaggagctgtacgaagctgccccctgtccttatagtgcatgaagatgccccagctccccctcccgaagacttcccagagccctctcccgcttcttctcctagcgagagagcagaaagcgaggcggcagaggaagccggtgctgagggcgctgaaggcgaggcacgcccagttgagaaggaggcagaacctatggacgcagagccagctggcgacacaagagcacctaggcctcccccagcggcacccgctcccccaacacccgcatatggtgccccatccaccaacgtcaccctggaggccttactgagcacaaaagtggcggtcgcccaattttcccagggggctagagccgctggcggttctggcgctgggggaggcgtggccgctgccgcagtgccattgatactggagcaactcatggccctacagcagcagcaaattcatcagttgcagcttattgagcagatccggtcacaggtggccctgatgcagagaccaccaccaaggccatcactgtcaccggctgccgctccttcggcacctggtccagcaccaagtcagcttccaggattggccgctcttcccctaagtgctggcgctccagccgcagctatcgcgggatcaggcccagccgctccagccgctttcgagggagctcagcctttatcacgccctgagtcgggtgctagcacacctgggggacctgccgagccctccgcacctgctgccccatcagctgcccctgcccctgccgctcccgctcctgctccagcaccacaatcagctgctagcagccaaccacagagcgcctctacccccccagccttagcacctggttccctcctcggagccgcaccgggtttgccgtcgccacttttgccccaaacatctgcatccggggtgatcttccctaatccacttgtttcgattgcagccacagcgaatgctttagacccgctgtctgccctgatgaagcacagaaagggtaaacccccaaacgttagcgtgttcgaacccaaggcatctgccgaagatccttttttcaaacacaagtgtcgtttttgcgcaaaagtattcggatctgactccgctttgcagatccacctcagaagccataccggggagcggccatttaaatgtaatatctgcggaaaccgcttttcaacaaagggcaatcttaaagtgcatttccagcggcacaaggagaagtatccacatatacagatgaacccttatcctgtgccagaatatctcgataacgtgccaacctgtagtggtatcccctatggaatgtcactgcccccagagaagcctgttaccacgtggctggatagcaagccagtactgccaactgtcccaacatccgttgggctacagcttccaccaactgtcccaggggcacatggatatgcggactcacccagtgccacacctgcctcccgtagccctcaacgacctagcccggcttcaagtgaatgtgcttcactgagcccgggacttaaccacgtggaatccggggtgagcgccacggcggaatcccctcagtctctgttgggtggacctcccctgaccaaagccgaaccagtgtcccttccttgcactaacgccagagccggtgatgccccagtaggagcccaagcgtcagccgcaccgacttccgtggacggagcccctacctcgttaggcagccctggcctgcccgcagtgtcagaacagtttaaagcccagttccccttcggcggtcttctggacagcatgcagaccagtgaaacatctaagctacaacagcttgttgagaatattgataagaaaatgaccgacccaaatcagtgcgtgatctgccatcgagtcttgtcttgtcaatctgccctcaagatgcattaccgcacacatacaggcgaaagaccctttaaatgcaagatctgtgggagggcttttactaccaaagggaatttgaagacccacttcggagtgcacagagcgaagccacctctcagagttcagcactcctgtcccatatgccagaagaaatttactaatgctgtggtgttacagcagcacatccggatgcacatgggtgggcagattcccaacaccccattacccgaggggttccaagatgctatggatagcgaactcgcgtacgatgataaaaatgccgagacgctctcttcgtatgacgacgacatggatgagaacagcatggaggacgacgctgagctgaaggacgccgctaccgaccctgctaaacccctgctctcttacgccggttcatgtcccccttctccgcctagtgtgatctcgagcattgcggctctggaaaatcaaatgaagatgatcgacagtgtgatgagctgccaacagttaacagggctgaaatccgtggagaacggatctggcgagtccgacagattgagcaatgacagttccagcgcagtgggtgatctggaatctcgttccgctgggagcccagcactgtcggagtcaagtagcagccaagccctcagccctgctccttccaatggggagtcttttcgctctaaatctcccggactgggtgcaccagaggaaccccaggagattcctctaaagacagagcggcctgactcccccgcagcggcacctggctcggggggtgcccctggacgggcaggcattaaggaagaggccccatttagcctactattcctatcacgcgagcgaggcaagtgcccgtctactgtctgtggagtctgcgggaagccgtttgcttgtaaatcagcgcttgagatccattacagatctcacaccaaggagcggcctttcgtgtgtgcgctgtgcagacgcggatgctcaacaatgggcaatctcaaacaacacctcctgacccaccgtctaaaggagctgccgagccagctctttgacccgaacttcgccctgggtccatctcaatctaccccatccctcatcagcagtgccgctcctacgatgatcaagatggaagttaatggtcatggcaaggccatggcactgggcgagggtcctcccctccctgcgggtgttcaggtacctgccggtccccaaactgttatgggacccggtctagccccaatgttggcccctcctcccaggcggacccctaaacagcataattgtcagtcctgtgggaaaacattttcttctgctagcgcattgcagattcacgagagaacacacactggggaaaaaccattcggatgcacaatctgtggcagggcttttactactaaggggaacctgaaggtgcatatggggacacatatgtggaataacgccccagccaggagaggcagacggctgagcgtggaaaatcccatggcgcttctgggcggtgacgccctaaagttctcggaaatgtttcaaaaagacctggccgctagagcgatgaatgtcgatccgtcattttggaatcagtacgcagctgccatcactaacgggctggcaatgaaaaacaacgagatctcagtaattcagaatggcggtataccacaactgcctgtttccttggggggttcagcactcccaccactagggtccatggcttctgggatggataaggcacgtactggctcaagccccccaattgtatcgctggacaaggccagcagcgagacagccgctagtaggccgtttacgagattcatagaggataacaaggagattggtataaactag

SEQ ID NO: 239594 - DNA, 2883 bp, synthetic construct
  misc_feature 1..2883: note = Description of Artificial Sequence: Synthetic coding sequence
  source 1..2883: mol_type = other DNA
atgtcccgtcggaaacaggcaaaaccacagcatctcaagtcggacgaggagctgctccccccagatggtgcccctgagcacgccgctcctggtgaaggggctgaggacgccgattctggcccagagtcacgctcagggggagaggaaactagtgtatgcgaaaagtgttgcgccgagttttttaaatgggcggatttcctggaacaccaacgctcctgtaccaaactgccacctgtactgattgtgcacgaggatgccccacctggtttgccatcaccactgctcccgcagacaagcgcgagtggcgtgatttttcctaaccctctggtttctatcgctgcgaccgcaaacgctttagatcctctctctgccttgatgaagcacagaaagggaaagccgcctaacgtcagtgtgtttgagccaaaagcgagcgccgaggaccccttcttcaagcataaatgtagattttgtgctaaagtgtttggctccgattctgccctgcagatccacctgcgcagtcacaccggagagcggcctttcaaatgcaacatctgtggaaatcgattctcaacgaaaggcaatctcaaagtgcattttcagaggcacaaagaaaaatatcctcatatacagatgaacccatatccggtccctgagtacctggacaacgtcccaacttgctccggcattccatacggtatgtcccttccacctgagaagccagtgacaacgtggctggattcgaaacctgtgctgcccaccgttcctacgtccgtcggcctccagctcccaccgactgtgcctggagcacacgggtacgctgactccccatccgcaacgccagccagccggtcccctcagaggccctctcccgcttccagcgaatgcgccagtttatccccaggactcaaccatgtcgagtccggagtcagcgccactgcagagtcacctcagagtctgctcggcggacccccactgaccaaggcggaacccgtaagtttaccttgtacgaacgccagggccggagatgccccagtcggcgctcaggcttccgctgctcctacctcagtggatggcgctcctacctctctgggcagccccggtctgcccgctgtgtccgagcagttcaaagcccagtttcccttcgggggtctgctcgattccatgcagacgtctgaaactagtaaacttcagcaattggtcgaaaacatagataaaaaaatgacggatcctaaccagtgcgtaatctgccacagggtgctgtcttgtcaaagtgctctgaagatgcactaccggacccatacaggcgagagaccgtttaagtgtaagatttgtggtagagcctttactacaaaggggaacctaaaaacgcatttcggagtacacagagctaagccacccctgcgagtgcagcacagttgccccatttgccagaagaagttcacaaatgccgtggttctgcagcaacacatacgcatgcacatgggcggacagattccaaacacccccctacccgaagggtttcaggacgcgatggatagtgagctcgcctacgacgacaagaacgccgaaacactctcctcctatgatgacgatatggacgagaattctatggaggatgacgccgaattgaaagacgctgccaccgatcctgccaagccattactcagctacgctgggagttgtcctccgtccccaccaagtgtcatctcctcgatcgcagctctggagaaccagatgaagatgatcgacagtgtgatgtcttgtcaacagctgaccggcctgaaaagcgtggagaatggaagtggcgagtctgacaggctgagtaatgactcttcatcagcggtgggggacctagaatcaaggtcggccggaagccctgccttatccgagagctccagtagtcaagctttgtccccagccccaagcaatggcgagagcttccggagtaagtcccccggactaggagcgcctgaagagccccaggagataccgctgaagacagaacggccagacagccctgccgcagctcctggttcaggtggagcgcctggacgtgctgggatcaaagaggaggcacctttcagtctgctcttcttgagcagagagagaggaccctctcagtctaccccctcactgatttcaagcgccgcaccgactatgatcaagatggaggtaaatggccatggtaaggccatggccttgggcgaggggccaccactgcctgctggggttcaggtacccgctggaccgcagaccgtgatgggacctgggctagcgcctatgctcgcccctccccctcgtcgaactccaaaacagcacaactgtcagtcctgtggtaaaacattctcctccgcgtccgccttgcagattcacgagcggacacatacgggcgagaagccatttggctgtacgatctgcgggcgtgcctttacgacaaagggtaacttaaaagtccatatgggcacacacatgtggaataacgctcctgcacgacgcggacggcgactttcagtggaaaatcccatggcgttacttggaggagatgctctcaaattttctgaaatgttccagaaggacctggcagccagggcaatgaacgtggacccatctttctggaatcagtatgccgcagctattaccaacgggttagctatgaagaataatgagatttcggtcatccagaacggaggtatccctcaattacctgttagcctagggggatctgcccttccaccattaggctctatggcctcaggaatggacaaagcccgaaccggcagctcacctccaattgtgtctctagataaagcctcatccgagacggctgctagccggccattcacgaggttcattgaggataataaggaaattggcatcaactag

SEQ ID NO: 239595 - DNA, 516 bp, synthetic construct
  misc_feature 1..516: note = Description of Artificial Sequence: Synthetic coding sequence
  source 1..516: mol_type = other DNA
atggtgagacctcccgttgtccccaggagaccaccggcacacatctcttctgtccgtcaggcctctacccaggtcccacggaccgtgccccatacccaacgggttgcaaacataggaacgcagactaccggcccttctggcgtaggctgttgcacccctggacgtcccctattgccatgcaaatgcagttcagcagcacactccacttaccgggtgcaggagcctgctgtgcacatcccaggccaggaaccgctgacagccagcatgctcgctgcggcaccactgcatgagcaaaaacagatgatcggcgagcggctttaccccctgatccacgatgtgcatacacagctggccggaaagataacaggcatgctcctagagatcgataattccgagttgctgcttatgctcgagtctcccgagtccctgcatgctaagaagcgcaagagctcacttccctggctgccgaagggtcagtgtttctggctgtctgccctgaggccgtgcaaactgtag

SEQ ID NO: 239596 - DNA, 831 bp, synthetic construct
  misc_feature 1..831: note = Description of Artificial Sequence: Synthetic coding sequence
  source 1..831: mol_type = other DNA
atgagccgccgtaagcaggccaaacctcaacacatcaactctgaggaggatcagggtgaacaacaaccccagcagcagacaccagagttcgccgatgctgcacctgccgcaccagccgctggagagctgggccgtagtagcttgccatctacatttatccgggctccaccaacctatgtgaaagttgaagtgcctgggacattcgtgggcccaagcacactgtctcccggaatgaccccattattggccgctcagcccagaagacaggctaagcagcatggctgtactagatgtggcaagaattttagctccgcctctgctctacagattcacgaaagaactcatacaggcgagaagccttttgtctgcaatatctgtggcagagcatttacaactaaggggaatctgaaggtacactatatgacgcacggggcaaataataactctgccaggcggggacgcaagctcgccatagagaataccatggcgctgctcgggacagacggtaaaagagtatctgagattttccctaaggaaatcttggcgccttccgtgaacgtagaccccgtcgtctggaaccaatacactagcatgttaaacggcggtttagctgtgaaaactaatgaaattagcgtcatacagtccggaggcgtgccgacgctgccggtgagcctcggcgctaccagtgttgtgaataatgctacagttagtaagatggacggctcacagtctggtatctctgccgacgtggaaaagccgtcagccacagacggcgtacccaagcaccaattcccacatttcctcgaagagaacaagatcgcagtgagctag

SEQ ID NO: 239597 - DNA, 1851 bp, synthetic construct
  misc_feature 1..1851: note = Description of Artificial Sequence: Synthetic coding sequence
  source 1..1851: mol_type = other DNA
atgagcagaaggaagcaggcgaaaccccaacacataaactcggaggaggaccagggggagcagcaacctcagcagcagacccccgaatttgccgacgctgccccagcagctccagccgctggcgaactgggcgctcccgttaatcaccccggtaacgacgaggtggcatccgaggatgaagcaactgtcaagcgcctgcggcgtgaggagacacacgtttgtgaaaaatgctgcgcggaatttttttcaatttctgagttcctcgagcataaaaagaattgcaccaagaatccgcctgtgctgatcatgaacgactccgaggggcctgttccctccgaggatttctcaggcgcagtgctctctcaccaaccgaccagccctggatcaaaggactgccatagggagaacggcggtagcagtgaggatatgaaggaaaagccagatgcagagtcagtggtctacctcaaaaccgagaccgctctacctccaaccccccaagatatctcgtatttagcaaaaggcaaggtggcaaacacgaacgttacattgcaggctctccgcggtacaaaggtggccgtaaaccagcggagcgcagacgccttaccagccccagttcctggagctaactctatcccttgggtgctcgaacagatcctgtgtctacagcaacaacagttgcagcagatccagcttacggaacagatccggatacaggtgaacatgtgggccagccacgctttgcattcatcaggcgctggcgcagatacactcaagaccctggggtcacacatgagccagcaggtgagcgcggctgtggcgttgttgtctcaaaaggctggatctcaaggactgagcctagacgcccttaagcaggccaagctgcctcatgctaacattccaagcgccacctcatctctaagccctggactagcgccttttactctgaaacctgacggcacgagggtgcttcccaacgttatgtccagactgccttcagccctgcttcctcaggcccctgggagcgtactcttccaaagtccctttagcactgtggccctcgatacctccaagaagggaaagggcaagccccctaacatctctgccgtggacgtgaagcccaaggacgaggcggctctatataagcacaagtgtaggagcagcttaccatcaacgtttatcagagctccaccaacatatgttaaggttgaggtcccgggtacctttgtgggtccctctacattaagcccaggtatgactcccctgctggccgcacagcctagacggcaggctaaacagcacgggtgtactcgctgcggaaaaaacttctccagcgcctcggcgctgcaaattcatgagcggactcacaccggtgagaaacctttcgtgtgtaatatatgcggcagagcatttactacaaagggcaatctgaaggtgcattatatgacccatggcgctaacaacaactcggctcggaggggtcggaagctggctattgagaacaccatggccctcctgggaaccgacggcaagcgagtatctgaaatctttccaaaggaaatccttgccccttccgttaatgtagaccccgtggtctggaatcagtacacatctatgctaaatgggggtttggccgtgaagaccaatgagattagtgtcattcagtctgggggtgtgccaactctaccagtctctctaggggcaacatcggtggtgaataacgcaacagtgagcaaaatggacggcagccaaagcggaatttccgcagatgttgagaagccatccgcaaccgacggcgtccctaaacatcagtttccccacttcctggaagagaataagatagccgtgtcatag

SEQ ID NO: 239598 - DNA, 2781 bp, synthetic construct
  misc_feature 1..2781: note = Description of Artificial Sequence: Synthetic coding sequence
  source 1..2781: mol_type = other DNA
atggtgatggcagacgggcctaggcaccttcaacgcggaccagtgagagtgggcttttacgacatcgaaggtacactggggaaggggaactttgctgtagtaaagcttggcaggcatagaataacaaaaacagaggtcgccattaagatcatagataaatcgcagctggacgctgttaatttggagaaaatttatagagaagtccagatcatgaagatgctggaccatccacatatcattaagctctatcaggtaatggaaacaaagtccatgctgtaccttgtgaccgagtatgcaaaaaacggcgagatcttcgattatctggcaaaccacggcaggttaaacgagagtgaagctcgccgtaaattctggcagattctcagcgccgttgactactgtcacgggagaaagatcgtgcatcgagatctgaaagctgagaatttgctcctcgacaataacatgaacattaagatcgcggacttcggattcggcaacttttttaagtctggcgaactgctggcaacctggtgcgggagcccaccttatgcagcaccggaggtgttcgaagggcaacagtacgagggtccccagctggatatctggtccatgggcgttgtgttatatgtgctcgtctgtggggcactcccgttcgatggccctaccctccccatactccgccagagggttcttgaaggcaggttcaggatcccctatttcatgagcgaagactgcgagcatctgatccgccgaatgctggttctggatccatctaaacgcttgaccatcgcccaaataaaagaacataagtggatgctgatcgaagtgcctgtgcagcgccctgtgctgtacccgcaagagcaggagaacgagccgtccatcggagagttcaacgagcaggtgctgcgcctgatgcacagtttgggaatcgaccagcagaaaacgattgagtcattacagaataagagctacaaccattttgccgcaatctactttctgttagtcgagagacttaaatctcatcggagttcctttccagtcgagcagagactcgacgggaggcaacgtcgtccgtctactattgcggaacaaacagtggctaaagcccagaccgtcggcctgccagtgactatgcatagccctaacatgcgattgttgcgcagcgccctgctaccacaggccagcaatgtggaggccttttcttttccggcatctggttgccaggccgaggccgcttttatggaggaggagtgcgttgatacccctaaggttaacgggtgcctgttggatcccgtgcccccagtgctagtaagaaagggctgtcaatcactcccttccaacatgatggagacaagtatcgacgaggggctagaaaccgagggggaggctgaagaagaccccgcacatgcgtttgaggccttccagtccacacgcagcggtcagcggcgtcatacactgagcgaggtcacgaatcaactggtggtcatgccaggtgccggaaaaattttctcaatgaatgacagtccctcactggactcagttgatagcgagtatgatatgggttccgtgcagcgagatttgaattttctcgaggacaacccaagcctcaaagacatcatgctagctaatcaaccatcacctagaatgacctccccgtttatatccctcagaccaacaaatccagcaatgcaggctttgagcagccagaagcgtgaggtccacaacaggtctcccgtgtccttccgcgaaggacgccgtgctagcgacactagccttacgcagggtatagtcgcctttcggcagcacctgcagaacctggccaggaccaaagggattcttgaactcaataaagtgcaattgctgtacgagcaaatcggtcctgaggctgatcccaatttagcccctgccgctccccaactacaggatttggcctcatcttgcccgcaggaagaagtcagccaacagcaggagtcagtgagtacgctgcctgcctccgttcatccccagctgagccctaggcagagtctggagactcagtacttacaacatcgactgcaaaagccctcacttttgagcaaggcccagaatacctgccaactatactgcaaggagccaccccgaagcctcgaacagcagctgcaggaacatagactgcagcagaagcgactttttctccagaagcagagtcaactccaggcctatttcaaccagatgcaaattgctgaatccagctacccacagcctagccagcaactcccgctgccgaggcaagagacgccgcctccttcccaacaagcccctcctttttccctgacacagccattgagccccgtgctcgagccatcatctgagcagatgcagtacagtccatttctatcccagtatcaggagatgcaactgcagcccctgccttccactagcggacccagggctgcgccacctctgcctacacagttgcagcagcagcagccaccaccgcctccaccaccccctcctcctaggcaaccaggcgcagcacccgctcccctgcagtttagttatcaaacgtgcgaactccctagtgcagcaagcccagcacctgactacccgacgccttgccagtatccagtcgatggtgctcagcagagtgacctcacgggaccagattgtcctcgctcacccggactgcaagaggcgccttcctcttacgatcctttagctctctctgagcttccaggcttattcgattgcgaaatgctcgacgcagtggacccgcagcacaatggttacgttttagtgaattag

SEQ ID NO: 239599 - DNA, 1881 bp, synthetic construct
  misc_feature 1..1881: note = Description of Artificial Sequence: Synthetic coding sequence
  source 1..1881: mol_type = other DNA
atgcaacgggctgacagtgagcaaccttcaaaacgcccacgctgtgacgatagccctagaacaccaagtaatactccatcagccgaagcagattggtcccctggattagaactccaccctgattataagacctggggccctgaacaagtttgtagttttttgaggcgaggcggatttgaggaaccggtgttgcttaagaacattagggagaatgagatcacaggagctctgctgccgtgtctagacgaatcccgcttcgaaaatcttggggtctcaagtctcggagaacgaaaaaaactcctgtcctatattcagcggctcgtccagatccatgtggataccatgaaggtgataaacgaccctatacatggccacatagaattgcaccctctactagtcaggatcatagacacaccacagtttcaacgactgcgctacatcaaacagttgggcggagggtattatgtgtttcctggcgcttcacataacagatttgaacatagtttgggggtcggttacctcgctgggtgcctggtgcacgctctcggggaaaaacaaccggagctgcagatcagcgagagagatgtgctctgtgtccagattgcgggactttgccacgatcttgggcatggccctttcagccatatgttcgacggccgatttattccactcgctcgtcctgaagttaaatggacccacgagcaaggctcagtgatgatgtttgaacacctgatcaattctaacgggattaagcccgtgatggaacagtatggccttattcctgaggaagatatatgctttataaaagaacagattgtgggccctcttgaatccccagtcgaagattcgctctggccctataagggtcgccctgagaacaagagttttctatacgagattgtgtccaataagcgcaatggtatcgacgttgataaatgggactatttcgccagagattgtcaccatctaggaatccagaacaacttcgactacaaacgcttcattaaattcgccagggtgtgcgaggtggacaatgagcttcggatttgtgctcgggacaaggaggtcggtaatctgtatgatatgttccacacacggaactctcttcaccggagggcgtatcaacataaggtgggcaatattatcgacaccatgataacagatgctttcctaaaggctgatgactatatcgagatcacaggcgcaggcggaaaaaaatacaggattagcacagcaatcgacgacatggaagcgtataccaaacttacagacaatatctttttagaaatcctctactccaccgatcctaaactcaaggacgctcgggagattttgaagcaaatcgaatatagaaacctgttcaagtacgtcggcgaaacgcagcctaccggtcagatcaagatcaaacgtgaggactacgaaagtttaccgaaagaggtggcctctgctaaaccaaaggtgctgctggatgtgaaactgaaggccgaagacttcatcgtggatgtgatcaacatggactatggcatgcaagagaagaatccaatcgatcatgtgagcttttattgcaagactgccccaaatagggccatccgcattaccaagaaccaggtgtctcagctgctgcccgaaaagtttgcagaacagcttatccgagtgtactgtaagaaggtggatagaaaatctctgtatgccgctagacaatacttcgttcaatggtgcgccgataggaacttcacaaagccacaggatggagatgtcatcgcaccactcattacccctcagaagaaggagtggaatgacagcactagtgtccagaaccccacacgtctgagagaggcctccaagagtagagtgcagttgtttaaggatgatcccatgtag

SEQ ID NO: 239600 - DNA, 513 bp, synthetic construct
  misc_feature 1..513: note = Description of Artificial Sequence: Synthetic coding sequence
  source 1..513: mol_type = other DNA
atgtttgacggcaggttcattcctctcgctcggcctgaggtaaagtggacacatgaacagggttccgtcatgatgttcgagcacctgataaattctaacggcataaaacccgtgatggagcagtacgggctgatccccgaggaggatatttgctttatcaaggaacagattgtcggtccactcgagagccctgtggaagactctctatggccttacaaagggcgacccgagaacaagagcttcctctatgagattgtatctaacaaaagaaatggtatagacgtggataagtgggactacttcgcacgcgactgtcaccacctggggatacagaacaacttcgactataaacggtttatcaagtttgcccgtgtgtgtgaagtagataacgaactaagaatctgtgccagagataaggaggtgggtaatctttatgacatgtttcatacccgcaactcgttgcatcggcgagcctatcagcataaagtaggtaatattatcgacaccatgtag

SEQ ID NO: 239601 - DNA, 1326 bp, synthetic construct
  misc_feature 1..1326: note = Description of Artificial Sequence: Synthetic coding sequence
  source 1..1326: mol_type = other DNA
atggagatacgcctggacacactgagcgcctcattaggaaggagctctaccctgaataattgcaatctggaagataaattggcgtggtacgagggggaggcatatatgtggcatcactggaaaccatttccagagaaccccctttggacatgtctggattttcagattgcccaggtgggcccatgggaccactgctctagctgtatccggcacactcgacttaagagctcttgtagcgacatggatctccttcacagctggagatcatcatcctttgggaactttgatcggttcagaaataattctctatccaaacctgatgactctacggaagcccatgagggagacccaacaaatggaagtggagagcagagtaagacatccaacaacggcggtggtctgggcaaaaagatgagggctatctcatggactatgaaaaaaaaggtgggcaaaaaatatattaaggctctgtccgaagaaaaagacgaagaagacggggaaaacgcccatccatatagaaattcagatcccgtcatcgggactcacacagagaaagtgtcactgaaggcttctgacagcatggacagcctttattccggccagagttcttcttccggcatcactagctgctcagacggtacgtccaatcgcgactcattccgccttgacgacgacggtccgtattctgggcctttctgtgggagagctcgcgtgcatacagactttactcctagcccctacgacacagattcactcaagataaagaaaggggacattatagacattatttgcaaaactcccatgggcatgtggaccgggatgctaaacaataaagtgggcaactttaaatttatatatgtagatgtcatcagtgaggaggaggcagcccctaagaaaatcaaagctaacagaaggagtaattcaaagaagtccaaaaccctgcaggaattcctggagcggattcatttgcaggagtacacgagcacattattactgaatggttacgaaaccctcgaagatctgaaggacataaaagagtcccatttgattgagttaaatattgagaacccggatgaccggcgtagattgctgtctgccgcagaaaatttcctggaagaggagatcattcaggagcaggaaaatgagcccgagccactctccctgagttcggatataagcctcaataaatcccagctggacgactgtccgcgagatagcggatgttacatcagtagtgggaactccgacaacggtaaggaggatttggagtccgaaaacctgtctgacatggtccataagataataataacagaaccctccgactag

SEQ ID NO: 239602 - DNA, 618 bp, synthetic construct
  misc_feature 1..618: note = Description of Artificial Sequence: Synthetic coding sequence
  source 1..618: mol_type = other DNA
atgttaaagagaaaaccttctaatgtgagcgagaaagagaaacaccagaagcccaagaaaggagatattatcgacattatttgcaagacccccatgggaatgtggaccgggatgctgaataataaagtggggaacttcaagttcatctatgtggacgttatctccgaagaggaggcggctcccaaaaagattaaggctaatagacggtctaacagcaagaagagcaaaaccctgcaggaattcctggagcggattcaccttcaagaatacaccagtactctccttctgaacggctacgaaactctggaagatttgaaagatattaaagaaagtcatctcatcgaactgaacattgagaacccagatgatcgcaggagactcctttccgccgcagagaatttcctcgaggaagagatcatccaggagcaggaaaatgagcctgagccactcagtctcagctctgacatctccctgaacaaatcccaactcgatgactgtcccagggacagtgggtgctacattagcagtgggaattcagataacggaaaagaagacctggaatccgagaatttatccgatatggtccacaaaattatcattactgagccctcagattag

SEQ ID NO: 239603 - DNA, 1122 bp, synthetic construct
  misc_feature 1..1122: note = Description of Artificial Sequence: Synthetic coding sequence
  source 1..1122: mol_type = other DNA
atgctaaagcgaaaaccatcgaacgtgagcgagaaggagaaacaccagaaacctaaacggtccagtagtttcggcaactttgacagattcaggaataatagcttatctaaaccagatgacagcacagaggcccacgagggcgaccctaccaacggctctggcgagcagtctaagacttcaaacaatggtgggggtctggggaaaaagatgagagccatcagttggaccatgaagaaaaaggtcggcaaaaaatatataaaagccctgtccgaggagaaagatgaggaggacggcgaaaatgcccacccataccgtaacagtgaccccgtgataggtacacacaccgagaaggtgtcgctcaaggcaagtgactccatggactcactctactccgggcagtcctctagctccggtatcacctcatgctcagatggaacatctaatcgtgattcttttcggctggatgacgacggaccatattccgggccattttgtggacgagctagggttcatactgactttacacctagtccttatgataccgacagcctgaaaatcaaaaagggcgatattattgacatcatctgtaaaaccccaatggggatgtggaccgggatgctaaacaataaggtcgggaatttcaagttcatctatgttgacgtcatcagcgaggaagaagcagctcctaaaaagataaaggccaataggcggtctaatagtaagaaaagcaagactcttcaggagttcctggaaagaatccacctgcaggagtacacatctactctgcttctgaatggctatgaaactctggaagacctcaaggatataaaagagtcacacctcattgagctgaacatcgaaaatcccgatgatagaagacgtttactctcggctgcggaaaatttcctggaagaggaaattatccaggagcaagaaaacgaacctgaacccctcagcttgagcagtgacatctctctgaataagagccagctggatgattgcccacgtgactctggctgctacattagctctggaaactcggacaacggtaaggaggatctcgagtcagaaaatctcagcgacatggttcacaagatcattattaccgaaccgtctgactag

SEQ ID NO: 239604 - DNA, 1008 bp, synthetic construct
  misc_feature 1..1008: note = Description of Artificial Sequence: Synthetic coding sequence
  source 1..1008: mol_type = other DNA
atgggctcagccagtcctggattatcctcagtgagtccttcccacttactgctcccaccagatacggtgagcaggactggcttggagaaggccgcagcgggagcagtgggcctggagcggagggactggagcccatcacccccagcaacacccgagcagggtcttagcgccttctatctttcgtacttcgacatgctttatcccgaagacagctcttgggccgcaaaggccccaggtgcaagcagccgcgaggagccgccagaggaacctgagcagtgcccagtgatcgacagtcaggctcccgcaggctcactggatctggtgcctggaggtctcacactcgaggaacattcactcgagcaggttcagtccatggttgtgggtgaagtcctcaaagacatagagaccgcatgcaaactactaaatattactgccgaccccatggactggagtccatcaaatgtgcagaaatggctcctatggacagagcatcaatacagactgcctcctatgggaaaagcattccaggagttagcaggaaaagagctctgtgctatgagtgaagaacagtttagacagcgaagtcccctgggcggagatgtgcttcacgcccacctggacatttggaaatccgcggcatggatgaaagagagaacatctcccggtgccattcattattgcgctagtacttcggaagagtcatggactgattccgaagtagattcctcatgtagcgggcagcccatccacctgtggcagttcttgaaggaattgctgcttaaaccacacagctatgggcgatttattagatggctaaataaggagaagggcatattcaagatcgaagacagcgcacaagtggccaggctctggggaattaggaagaatcgacccgctatgaattacgataaattgagccgctcaatccggcagtactacaaaaaaggaatcattaggaaacctgacattagccaacggttggtgtaccagttcgtgcacccaatctag

SEQ ID NO: 239605 - DNA, 960 bp, synthetic construct
  misc_feature 1..960: note = Description of Artificial Sequence: Synthetic coding sequence
  source 1..960: mol_type = other DNA
atgggttccgcctcaccaggcctctcttctgtatcgccctcccacctactgctcccaccagatacagtctcacggacagggctggagaaggctgctgccggtgccgtgggcttagagcgacgcgactggtccccctcgcccccagccaccccagaacaaggactgtctgccttctatctgtcctatttcgacatgctgtaccccgaggatagcagttgggcagctaaggctcccggagcaagttctcgcgaggaaccacccgaggagccagagcaatgccccgtgatagactcgcaggctccggcagggagcctggacctcgtccccggtggccttacactcgaagagcactctttagagcaagtccaaagcatggtagtgggagaagtcctgaaagacatcgaaacagcgtgtaaactgcttaacattacagccgatcccatggactggagcccaagtaatgtgcaaaaatggctcctgtggaccgagcaccagtaccgcttaccccctatgggaaaagcattccaagagctggccggtaaagagctctgcgccatgtccgaggaacagttcagacagcggagccctctaggcggagatgtgctacatgcacatctggacatttggaagagtgcttccacctctgaggagagctggacagattccgaggtcgactcttcctgtagtggccagcctattcatttgtggcagttcctcaaggagctcctgctgaagccccatagctatgggaggtttattcgatggttgaacaaggagaaaggaatatttaagattgaggattccgctcaagtggcccgactgtgggggattagaaagaatagacccgcaatgaattatgacaaactgagtaggagcattaggcaatattacaagaaaggtattatcaggaaaccagacattagccagagactggtttaccagttcgtgcatcctatatag

SEQ ID NO: 239606 - DNA, 1218 bp, synthetic construct
  misc_feature 1..1218: note = Description of Artificial Sequence: Synthetic coding sequence
  source 1..1218: mol_type = other DNA
atggccgcatcaggtaaaacatcaaagagcgagcccaatcacgttatctttaaaaagatttccagggacaaatctgtgaccatttacctgggcaatagggattatattgatcacgtgagtcaggtccagcccgtcgatggtgtggtgctggtggaccctgacttggtaaaaggcaagaaggtgtatgtgaccctgacttgcgctttccggtatggacaggaggatatcgatgtgatagggctaacctttcgcagggatctgtactttagccgagttcaagtgtatccacccgtgggggcagcaagcacaccaaccaagctccaggagtccttgctcaaaaaattgggctcaaatacctatccttttttactgacttttcccgactatctcccgtgttccgtgatgctccagcctgcccctcaggattcgggaaagtcttgtggagtggatttcgaagtgaaagccttcgcaacagacagcaccgacgctgaagaggacaaaatacctaagaaatcttcagttcgcctgctgatcagaaaggtgcagcacgccccactggaaatggggccacagcccagggctgaggcggcatggcagttcttcatgagcgacaaacctcttcacttagccgtgtctttgaacaaggaaatatacttccatggcgagccaatcccagttactgtcactgtgaccaataacactgagaaaacagttaaaaaaataaaggcctttgtggagcaggtggccaatgtcgtgctgtattcatctgactactatgtaaaacccgtagctatggaagaggcccaggaaaaagtgcccccaaacagcacgctaacgaaaacactgactctgctcccattgctcgccaacaaccgggagcgacgcggaattgccctggatggcaaaattaaacacgaagataccaacctcgcctcgtccacgatcatcaaagagggtattgacaggacggtacttgggatcctggtgagctaccagattaaagtgaagctgacagtgagcggaatgaccggacgccaaaaggctagcgaggttgccaccgaggtccccttcagactgatgcaccctcagcctgaggaccctggtcagttttcctaccaggacgccaacctggttttcgaggaattcgctagacacaacctgaaggatgcaggcgaggctgaagaaggaaaaagggataagaatgatgtcgacgaatag

SEQ ID NO: 239607 - DNA, 1218 bp, synthetic construct
  misc_feature 1..1218: note = Description of Artificial Sequence: Synthetic coding sequence
  source 1..1218: mol_type = other DNA
atggctgcttctggcaagactagtaaatctgagcccaaccacgtgattttcaaaaaaatctcacgggataagtctgtgactatttacctcgggaacagggactatatcgatcatgtgagtcaagtacagcccgtggatggcgttgtgctggttgacccagatcttgtgaaaggcaagaaggtgtatgtgaccctgacctgtgccttccgctacggtcaagaggacattgatgtgatcggactgacattccggagggacctgtacttcagccgggtacaggtgtaccctcctgtgggcgcagcctccacacccacaaaactgcaagagtcattgttaaagaaacttggctcgaacacttaccctttcctgctgaccttccctgactatctgccatgcagtgttatgttgcagcccgcaccccaagattctggtaagtcttgcggggtggatttcgaggtcaaggcatttgctacagacagcactgatgcagaagaggataagataccaaaaaagtcttccgtccgcctcctcatccggaaagtgcagcatgcccctttagagatgggccctcagcctcgcgcagaggctgcgtggcagtttttcatgagtgataaacccctgcatctggccgtctcgctgaataaggagatctattttcacggcgagccgattccggtcactgtgactgtcacaaataacactgagaaaaccgtgaaaaaaatcaaagccttcgtcgagcaggtcgccaacgtcgtcctatacagctctgactattatgtaaagcccgtcgcgatggaggaagctcaggagaaagtgcccccaaactccacgttgaccaagacgctgacactgctgccgctgctggccaataacagagaacggagggggatcgcactcgacggtaaaattaagcacgaggacaccaatctggcatcttccactattatcaaggaaggaatagataggacagtcctcggaatcctcgtgtcgtatcagatcaaggtcaaactgacagtaagcggattcctgggtgagttgacaagctccgaagtggcaaccgaggtgccttttcgtctcatgcatccccagccagaggaccctgcaaaagaaagttaccaagacgcgaacctcgtgttcgaagagtttgccagacacaacttgaaagatgccggagaggccgaagaaggcaagcgggataagaatgatgtagacgagtag

SEQ ID NO: 239608 - DNA, 510 bp, synthetic construct
  misc_feature 1..510: note = Description of Artificial Sequence: Synthetic coding sequence
  source 1..510: mol_type = other DNA
atggcagcttctggcaagacatcaaaatccgaaccaaaccacgtcattttcaaaaagatttcgcgcgataaatccgtgacaatctatcttggaaaccgcgattacatcgatcatgtctcccaggtgcagccggtggatggagtcgtattggtcgacccagatttggtgaaaggcaagaaagtgtacgtgacactcacgtgtgcttttcgttatggacaggaggacattgacgtaatcgggctcacattcagacgggatctctacttctcccgggtgcaggtctacccacctgtcggagctgcttctacgcccactaagctgcaggaatccctccttaaaaagcttggatccaacacgtatccatttctgctcacattccccgattatctcccttgtagtgtcatgctccagccagcccctcaggacagtggaaaaagctgcggagtcgactttgaagtgaaagcgtttgctaccgactctacagacgctgaagaggataagattccctag

SEQ ID NO: 239609 - DNA, 708 bp, synthetic construct
  misc_feature 1..708: note = Description of Artificial Sequence: Synthetic coding sequence
  source 1..708: mol_type = other DNA
atgttacagcccgcaccccaggattctggtaagtcctgcggtgtcgacttcgaggtgaaggcctttgccacagacagtacagacgccgaagaggataagatacctaaaaaatcatccgtgcggcttctcatccgaaaggtgcaacatgcccctttagaaatgggaccccagccccgtgctgaggcagcttggcagtttttcatgtccgacaaaccgctgcacctagccgtgtcgttgaacaaggagatatacttccatggcgagcctattcccgtcacagtaaccgttaccaataacacagaaaagactgtaaagaagattaaggccttcgtggagcaagtcgccaatgtggtcctctattcatctgattactacgtgaaacccgtggcaatggaggaagcccaggaaaaggtccccccaaactctactctcaccaaaaccctcactcttctgcctctccttgcaaacaaccgcgaaagacgtggcattgcccttgatgggaagataaaacatgaagacactaacttagcctcaagtaccattatcaaagaagggatcgataggacagtcttgggcattctcgtttcctatcagataaaagtgaaattgaccgtaagcgggtttctgggtgagctgacctcgtctgaggtcgccacagaggtgcccttcaggctgatgcacccccaacctgaggaccctggaaaatag

SEQ ID NO: 239610 - DNA, 204 bp, synthetic construct
  misc_feature 1..204: note = Description of Artificial Sequence: Synthetic coding sequence
  source 1..204: mol_type = other DNA
atggcagcctctgggaagacctctaagagcgagcctaatcatgtgattttcaagaaaatttcgcgggataaatccgtgtccggagctcaagtaactatctacctaggaaacagagactacatcgaccacgtgagccaggtgcagcctgtggatggtgtggtcctggtcgaccctgacctggtgaagggcaaaaaggtttcctag

SEQ ID NO: 239611 - DNA, 633 bp, synthetic construct
  misc_feature 1..633: note = Description of Artificial Sequence: Synthetic coding sequence
  source 1..633: mol_type = other DNA
atggcaacagagactgtcgaactacacaagttgaagctagcagagctcaaacaagagtgtctggcacgcggactggagacaaagggaatcaaacaggatctgatccacagactgcaggcatacctggaagagcatgccgaggaggaagcaaatgaggaggacgtcttgggcgacgagaccgaggaggaagagaccaaacccatcgaactacccgtaaaagaggaggagcccccagagaaaaccgtggacgtggcggcagagaagaaggtggttaagattaccagcgagattccccaaactgagcggatgcagaagcgcgcagaaagattcaacgttcccgtttctctcgagagcaagaaggccgctcgagccgcacggtttggtatatctagcgttcctacgaaagggctaagtagcgacaataaaccgatggtgaaccttgataagcttaaagaacgggcacagcgatttgggctgaacgtttccagcatttctaggaaatctgaggatgatgaaaagctgaaaaagcggaaggaacgattcggaatcgttacgtctagtgccggtactggcacaactgaggacactgaagctaagaagcgaaaacgcgcagagagatttggaatcgcttag

SEQ ID NO: 239612 - DNA, 453 bp, synthetic construct
  misc_feature 1..453: note = Description of Artificial Sequence: Synthetic coding sequence
  source 1..453: mol_type = other DNA
atggaagaagagaccaaacctatcgagctgcctgttaaggaagaagagccacctgaaaaaaccgtggatgtggctgccgaaaagaaggtcgtgaaaatcacgtcagaaattccccagaccgaacgtatgcaaaaacgagctgagcgcttcaacgtaccagtgtcacttgagtccaaaaaagccgcacgcgctgccaggttcggtatttcgtccgtgcccacaaaaggactgtctagcgacaacaaaccaatggtgaatctggataagctgaaggagagggcacaacgctttgggttgaatgtttcgtccatttcccgtaagtcagaggacgacgaaaaactgaaaaagaggaaagaaagattcggaatcgtaaccagttctgccggaacaggaaccacggaggacactgaggctaagaagcgaaagcgtgcagagcggttcgggatcgcctag

SEQ ID NO: 239613 - DNA, 633 bp, synthetic construct
  misc_feature 1..633: note = Description of Artificial Sequence: Synthetic coding sequence
  source 1..633: mol_type = other DNA
atggcaactgagactgttgaactccataagctcaagctagccgaactcaaacaagagtgtttggccaggggcctagagacgaaagggatcaagcaggaccttattcataggctgcaggcttaccttgaagagcatgccgaggaggaagccaacgaggaagatgtactcggagacgagactgaggaggaagagactaagccaattgagctcccagtgaaggaggaggagcccccagaaaaaactgtcgatgtagctgctgaaaagaaagtggtgaaaattacttccgagatacctcaaaccgagaggatgcagaaacgggcagagcgatttaacgttcctgtatcactcgagagcaagaaggcagctcgtgccgctaggttcgggatcagctcagttcctacaaaaggcttgagctccgataacaagcccatggtcaacttagacaaactgaaggaaagagcccagagattcggactcaatgtgagctccatcagtaggaaatccgaggatgacgaaaaactcaaaaaaaggaaagaaagattcggtatagtgacctcttcggctggaacaggaacaacagaggatacagaggcaaaaaaacgcaagagggccgagcgttttggcattgcctag

SEQ ID NO: 239614 - DNA, 879 bp, synthetic construct
  misc_feature 1..879: note = Description of Artificial Sequence: Synthetic coding sequence
  source 1..879: mol_type = other DNA
atggccggaaaaaagaacgtgctgtcttctttggccgtatacgctgaggactctgaacccgaaagtgatggtgaggccggtatagaagctgtgggctcggctgcagaggagaaggggggtctggtgagtgatgcctatggcgaagatgacttcagccgcctggggggagatgaggacggctacgaagaagaagaagacgagaattcgcgccagtcggacaacactgaggcagagaagcgtgatccacaggaactggtggcctcattcagtgagcgagttcgaaacatgtcacctgatgaaataaaaatccctccagagcctccgggtcgctgttctaaccatctgcaagacaagatacagaagctgtatgagagaaagatcaaagaagggatggatatgaattacattattcagaggaaaaaagagtttaggaatccatctatttatgagaagctcatacagttttgcgcaattgatgaactggggactaactaccctaaagacatgtttgacccccatgggtggtcagaagattcatattatgaggcattggccaaggcacagaagattgaaatggataaattggagaaggcaaagaaggagagaacgaaaatagagttcgtgactgggaccaagaagggaacaactaccaacgcgacctcaactaccaccactacagcctcaacggctgtcgcggacgcgcaaaagaggaagtcaaagtgggactccgccatccctgtaacgaccatcgcccagccgaccattcttaccaccactgctacactgcctgcagtcgtgaccgtgacaacctccgctagcgggagcaagacaactgtgatcagcgcagtgggtaccatcgttaagaaggccaaacagtag

SEQ ID NO: 239615 - DNA, 927 bp, synthetic construct
  misc_feature 1..927: note = Description of Artificial Sequence: Synthetic coding sequence
  source 1..927: mol_type = other DNA
atggccggaaaaaaaaacgtcctctcctccctagctgtgtatgccgaggactctgaacccgagagcgatggggaggccggaattgaggccgttggctcagcggcagaagagaagggtggcctggtttcagacgcttatggtgaggacgacttctctagattggggggagacgaggatggatatgaggaggaggaagatgagaacagcagacaatcagaagatgacgacagcgagacggaaaaacctgaggccgatgatccaaaggacaacacagaagccgagaagcgagacccccaagagctcgtcgcaagcttttctgagcgggtgcgcaacatgagccccgatgaaattaagattccccctgagcctccaggtcgctgttccaatcacctgcaggacaagatccagaagctttacgaacggaagataaaggagggcatggatatgaattacattatccagagaaaaaaagagttccgcaatcccagcatttatgaaaaactgatacagttttgcgcaattgacgagctggggaccaattatccgaaggacatgttcgacccccacggctggtccgaagacagttattacgaagctctggcaaaagctcagaagatcgaaatggacaagctagagaaagccaaaaaggaacggacaaaaatagagtttgtgaccggcaccaaaaaggggaccacaacaaacgccacatccaccactactacaactgcctcgactgcagtggccgacgcacagaaacgcaaatccaagtgggactcggccattcccgtgactacaattgctcaacccacaatcttgactacaaccgccacactgcccgctgtagtcacagtgaccacttccgcatccggctccaaaaccacggtcataagcgctgtcggaaccatcgtgaagaaggccaaacagtag

SEQ ID NO: 239616 - DNA, 507 bp, synthetic construct
  misc_feature 1..507: note = Description of Artificial Sequence: Synthetic coding sequence
  source 1..507: mol_type = other DNA
atggccggaaagaagaatgttctcagttcacttgcagtgtacgcagaagattcagagccggaatctgatggggaagcgggtattgaggctgtgggatctgccgctgaggagaagggaggcctggtaagcgacgcctatggtgaagacgacttttctaggttgggcggagatgaagatggttacgaggaagaggaggacgaaaactccaggcagagcgaggacgatgattccgaaacagaaaaacccgaggctgacgatccgaaggacaacacggaggctgaaaagagggaccctcaggaattggtggcatcttttagcgaacgtgtgcgaaatatgtcacctgacgagatcaaaatacctcccgagccccctggtcggtgctccaaccacctgcaggacaaaatccaaaagctttatgagcggaagattaaagaaggaatggacatgaactacatcattcagagaaaaaaagagtttcggaacccgtcccaggggccagagaactag

SEQ ID NO: 239617 - DNA, 927 bp, synthetic construct
  misc_feature 1..927: note = Description of Artificial Sequence: Synthetic coding sequence
  source 1..927: mol_type = other DNA
atggccggaaagaagaatgttctcagcagcctcgcggtgtacgcagaggactccgagccggagtctgatggggaagccggaatagaggctgtcggctctgcagccgaagaaaagggtggactggtatctgatgcttatggcgaagacgatttctctaggttgggcggagatgaggatggttatgaagaggaagaagatgaaaactcgcggcagtccgaggacgacgattccgagactgaaaagccggaggccgatgaccctaaggacaatactgaagccgaaaagagagacccccaggaactggttgcctcgttcagtgaaagagtacgtaacatgtcccccgacgaaatcaaaattccccctgagcccccagggcgatgtagcaaccacctgcaggacaagatccagaagctttacgagcggaaaattaaggaagggatggacatgaattacatcatccagcgtaagaaggagttccgaaatccctcgatttatgaaaagcttattcaattctgtgcgattgatgagcttggtactaactatccaaaagatatgtttgacccccatggttggagtgaagactcatattatgaggctctggcgaaagcacagaagatagaaatggacaagctggaaaaggccaaaaaggagagaacaaaaatcgaatttgtaactggcactaagaagggcaccactaccaacgccactagcactacaactacaaccgcgagtacggctgtggccgacgctcagaagcggaagtctaaatgggactcggcgatccccgtaacaacaatcgctcagccgaccatattaacaactacggccaccctgcctgcggtagtgaccgtgactacatccgcatcgggatctaaaacaaccgtaatttccgcggtcggaacaatcgtgaaaaaggccaagcagtag

SEQ ID NO: 239618 - DNA, 366 bp, synthetic construct
  misc_feature 1..366: note = Description of Artificial Sequence: Synthetic coding sequence
  source 1..366: mol_type = other DNA
atgtcctttatctttgaatggatttataacggcttctctagcgtgctccagttcctggggctgtacaaaaaaagcggaaaactggtctttctgggactggacaacgcaggcaaaactaccctgctgcacatgctgaaggatgatcggctgggccaacatgtgcctacccttcacccaacctcagaagaactgaccattgcaggtatgacattcacgactttcgatctcggtggccacgaacaagcaaggagagtttggaaaaattacctgcccgcaatcaacgggatcgtgtttctagtcgactgtgctgatcacagcagactagtggagagcaaggtcgaacttaacgtctgctttgtcctttag

SEQ ID NO: 239619 - DNA, 597 bp, synthetic construct
  misc_feature 1..597: note = Description of Artificial Sequence: Synthetic coding sequence
  source 1..597: mol_type = other DNA
atgtcattcattttcgagtggatctataacggttttagctccgtattgcaattcctgggcttgtacaagaaatcgggcaagctggtgttcctgggactggataatgctgggaagaccacgttgcttcacatgcttaaggatgaccgtcttggacagcatgtacccacgctccacccgacctccgaggagcttaccatcgcgggtatgactttcactaccttcgatctcggcggacacgaacaggctcgcagggtctggaaaaattatctccctgcaattaacggaattgtattccttgtagactgtgccgaccacagtagactggttgagagtaaagtggaactcaacgccctcatgactgacgaaacaatctcaaacgtgccaatccttatactggggaataagatcgataggacagacgcaatttcagaagaaaaacttagggaaatcttcggactgtacggacagacaaccggcaaaggaaacgttacactgaaggagctgaatgcacgcccaatggaggtgtttatgtgcagcgtcctcaagcgtcagggatacggcgaagggtttaggtggttgagccagtatattgactag

SEQ ID NO: 239620 - DNA, 597 bp, synthetic construct
  misc_feature 1..597: note = Description of Artificial Sequence: Synthetic coding sequence
  source 1..597: mol_type = other DNA
atgtccttcatttttgaatggatctataatggtttttctagcgttcttcagttcctgggcctgtacaagaaaagcggcaagctggtgtttctcggtctggacaatgcagggaaaactaccctgctgcatatgctaaaggacgaccgtctaggccagcacgtgcctaccctacaccccacaagtgaagagctcacaatcgctgggatgaccttcactacctttgatctcggtggtcatgaacaggcgaggagggtctggaagaattatctgccggcaatcaacgggatcgtcttccttgtggattgcgccgatcatagtcgcttggtggagtcaaaagtggagctcaacgccctcatgaccgacgagactatttctaatgtacccatcctgatattgggcaataagatcgacaggaccgacgccatttctgaagagaaactgcgcgaaatctttgggctttacgggcagacaaccgggaagggcaatgtcactttgaaagaactgaatgcccgtcctatggaagttttcatgtgcagtgttctgaagcggcaggggtatggcgaaggcttcaggtggctgagccaatatattgactag

SEQ ID NO: 239621 - DNA, 597 bp, synthetic construct
  misc_feature 1..597: note = Description of Artificial Sequence: Synthetic coding sequence
  source 1..597: mol_type = other DNA
atgagcttcatcttcgagtggatttataacggcttctcatccgttctgcagttcctcggcctgtataagaagtctggaaaattagtttttctggggcttgataacgctggtaaaacgacactgctccacatgctgaaggatgaccgattgggccagcacgtgcctactcttcacccaacaagtgaggaacttactatcgcaggaatgaccttcacgacgtttgacctgggcggtcacgaacaggcgaggagggtatggaaaaattacctccctgctattaacgggatagtgtttctggtagattgtgccgatcacagtcgcctcgtggagtccaaggttgagctgaatgctttgatgacggatgagaccattagcaacgttccgattctgatcttgggaaacaagattgataggactgacgctatctcagaggaaaagctcagagaaatttttggcctgtatggccagacaacaggaaagggaaatgtaacccttaaggagctgaacgcccgacctatggaggtcttcatgtgctccgtgctgaagcgccagggctacggcgagggcttccgatggctctcccagtacatcgactag

SEQ ID NO: 239622 - DNA, 597 bp, synthetic construct
  misc_feature 1..597: note = Description of Artificial Sequence: Synthetic coding sequence
  source 1..597: mol_type = other DNA
atgagttttatcttcgaatggatatacaatgggttcagttctgtattgcagtttttgggcctgtacaagaagagtggcaagctcgtgttcttaggcctcgacaacgctgggaagactacactccttcacatgctcaaagatgatcgcttgggacagcatgtgccaacactgcaccccacctcagaggaactgactatcgccggaatgacgtttactacatttgacttgggtgggcacgagcaggctcgtcgcgtttggaaaaattacttgcctgccatcaatggtattgtgtttctggtggactgtgccgatcactcccgactggttgagtcaaaagtggagttaaacgccctaatgactgatgagactatctccaatgttccaatcctgatcctcggaaacaagattgaccggacggacgctatctccgaggaaaaactgcgcgagattttcgggctatacggccaaactaccggaaagggcaacgtgaccctaaaggagctaaacgcccgtcctatggaggtttttatgtgttcagttctcaagagacaaggctacggggaaggctttaggtggctgtcacaatatatcgactag

SEQ ID NO: 239623 - DNA, 354 bp, synthetic construct
  misc_feature 1..354: note = Description of Artificial Sequence: Synthetic coding sequence
  source 1..354: mol_type = other DNA
atgggcctttctttctggtggaccgtacagatcattctcgcctcatggaaccccaaactcagtttgatgatctactgcagcagcctgctgacactcgcgccaaacgccctgatgacagacgaaaccatatcaaatgtgccaattctgatccttggcaacaaaattgacagaactgatgcaatttctgaggagaaactgcgcgagattttcggcctatatggccagacaacgggaaaaggaaatgttaccctcaaggaactcaatgccagaccaatggaagtattcatgtgctccgtgctgaagaggcaaggatatggtgaagggtttaggtggctgagccaatacatagattag

SEQ ID NO: 239624 - DNA, 597 bp, synthetic construct
  misc_feature 1..597: note = Description of Artificial Sequence: Synthetic coding sequence
  source 1..597: mol_type = other DNA
atgagttttatatttgagtggatttataacggattcagctcggttcttcagtttcttggcctttataagaagtctgggaagctggtatttctcggactcgacaacgccggtaagaccaccctcctgcatatgctaaaggacgaccggctaggacagcatgtgcccactctgcatcccacctcagaagagctgaccattgctggcatgaccttcaccaccttcgatctgggtggccacgagcaggcgagacgtgtttggaagaattacctaccagccatcaatgggatcgtgtttcttgtcgattgcgctgatcactcacgactcgttgagtcaaaagttgaactgaatgcactcatgaccgacgaaaccattagcaacgtccccattctcatactggggaacaagatagatcgtaccgacgcgatcagtgaggagaaactgcgtgaaatcttcggcctgtatggtcaaactacaggaaaggggaacgtgacactgaaagaactgaatgcccgacccatggaagtcttcatgtgcagcgttctgaagcgtcaaggttacggggaaggctttagatggttatcacagtacattgattag

SEQ ID NO: 239625 - DNA, 348 bp, synthetic construct
  misc_feature 1..348: note = Description of Artificial Sequence: Synthetic coding sequence
  source 1..348: mol_type = other DNA
tgatccttctggtggactgttcagataattctcgctagctggaatcctaagctgtctcttatgatctactgctctagccttttaactttggcacctaacgcacttatgaccgatgagaccatcagcaatgtgcctattctgatcttgggtaacaagatcgaccggaccgacgcaataagcgaagaaaagttacgtgagatttttgggttgtacggtcagacaacagggaagggcaatgtgacactgaaagagcttaacgcccgaccaatggaagtcttcatgtgctctgtattaaaacgccaaggctacggagaagggtttcggtggctatcccagtatattgattag

SEQ ID NO: 239626 - DNA, 468 bp, synthetic construct
  misc_feature 1..468: note = Description of Artificial Sequence: Synthetic coding sequence
  source 1..468: mol_type = other DNA
atgctaaaggatgacaggctggggcagcacgtccccaccctgcaccccacttcagaagaattgactattgccggaatgacgtttacaacgtttgatctgggcggacatgagcaagccagacgagtgtggaagaactaccttcctgccatcaacggtattgtttttttggtggattgtgccgatcacagtagattagtggaaagcaaggtggagctgaacgcacttatgacggatgaaaccatatcaaacgtgcctatcctaattttagggaacaagattgatcgcacagacgccattagcgaggagaagcttagggagatattcggactctacggccagaccacagggaagggcaatgtcaccctgaaggagcttaacgctcgccctatggaagtgtttatgtgcagtgtcctgaaaagacagggctacggggaaggattccgctggctttcccagtacatcgactag

SEQ ID NO: 239627 - DNA, 393 bp, synthetic construct
  misc_feature 1..393: note = Description of Artificial Sequence: Synthetic coding sequence
  source 1..393: mol_type = other DNA
atgacattcaccactttcgacttgggaggtcatgtgcaagctcggcgtgtatggaaaaattacttacccgctattaatggaatagtgttcctcgtggactgtgccgatcacgagcgactgctcgaatccaaagaagaactggacagcctcatgacagatgaaacaatcgccaatgtacctatcctgatcctgggtaacaagatcgaccgtcccgaggctattagcgaggagaggctccgagagatgttcggcctctacggccagacaacaggcaaagggagcatcagtctgaaagagctgaatgccagacccctggaggtcttcatgtgtagcgtactgaagaggcagggatacggtgagggtttccgatggatggcccagtacattgattag

SEQ ID NO: 239628 - DNA, 597 bp, synthetic construct
  misc_feature 1..597: note = Description of Artificial Sequence: Synthetic coding sequence
  source 1..597: mol_type = other DNA
atgagctttatttttgattggatttacagcggctttagctccgtgctccagtttttaggtctgtacaagaagacagggaagctagtgttcctgggtttagacaacgccggtaaaacgaccctgctgcacatgctaaaggatgaccggctgggtcagcatgtgcccactctccacccgacttccgaggagttgaccatcgctgggatgacatttaccacttttgacctaggcggacatgtgcaggccaggcgggtgtggaagaactatctgcccgcaataaacgggatagtgtttttggtagactgcgcagaccatgaacggctcttagagtccaaagaagagttggattccctgatgaccgacgaaacaatcgcaaatgtgcctattctcattctcggcaacaagatcgaccgcccagaagctattagtgaggaacgcttacgggagatgttcgggttgtacggacagacaaccggcaagggatccatttctctgaaagagttgaacgcaaggccattggaggtgttcatgtgctcagtgctgaaacgtcagggatatggtgagggcttccgctggatggcgcagtatatcgactag

SEQ ID NO: 239629 - DNA, 597 bp, synthetic construct
  misc_feature 1..597: note = Description of Artificial Sequence: Synthetic coding sequence
  source 1..597: mol_type = other DNA
atgagttttattttcgactggatctactccgggtttagctctgtgctgcagtttctcgggctctacaagaaaactgggaaactggtattcctcggtttggataacgcgggtaaaacaaccctgttacacatgctgaaggatgatcggctgggacagcacgtgccaaccctgcacccaacctcagaggagctcaccattgcgggaatgactttcaccacattcgatctggggggacacgttcaggcaaggcgtgtgtggaaaaattacctaccagccatcaacggcatcgtgtttctcgtggactgtgctgaccacgaacggctactggaaagcaaggaagagctggactcactaatgacggacgagacgatagctaacgtccctattcttatccttggcaataagatagaccgcccagaagccattagcgaagagagactccgggaaatgttcggcctctacggccagacaactggtaaaggctctatttcactcaaggaactgaacgccagacccctggaagtctttatgtgctctgtgcttaaaagacagggctacggggaaggctttcggtggatggctcagtacatagactag

SEQ ID NO: 239630 - DNA, 312 bp, synthetic construct
  misc_feature 1..312: note = Description of Artificial Sequence: Synthetic coding sequence
  source 1..312: mol_type = other DNA
atgtctttcattttcgactggatctactcaggcttctcatccgtgctgcagtttctgggactctataagaagaccggaaaattggtttttctgggtttggataacgcgggtaaaacaaccctgctgcacatgctcaaggatgaccgtcttggacagcacgtccctaccctccaccctacatctgaagagctcactatcgctggcatgaccttcactacattcgatcttgggggacatgtccaggcccgtcgggtctggaagaactatctgcccgctatcaacgggatcgtctttctagtggattgtgcctag

SEQ ID NO: 239631 - DNA, 393 bp, synthetic construct
  misc_feature 1..393: note = Description of Artificial Sequence: Synthetic coding sequence
  source 1..393: mol_type = other DNA
atgacatttaccacgttcgacctggggggtcatgtgcaggcacgacgagtctggaaaaattaccttccggctattaacgggattgtgttcttggtggattgcgcggaccacgaaagattgctggagagtaaagaagagttagacagcctcatgacagatgagactatcgcaaacgtgccaatactaattctgggaaacaaaatcgataggcctgaggcaattagtgaggaaagattacgagaaatgtttggattgtacggccaaacaacgggcaaaggctcaatatcactgaaggaattgaatgccagacctctggaggtcttcatgtgctctgttctaaagcgccaaggatacggagaaggatttagatggatggcccagtacatagactag

SEQ ID NO: 239632 - DNA, 513 bp, synthetic construct
  misc_feature 1..513: note = Description of Artificial Sequence: Synthetic coding sequence
  source 1..513: mol_type = other DNA
atgagcttcatttttgattggatctactcgggcttctcatctgtcctgcagttcctcgggctgtacaagaagacaggcaaactagtattcctaggcctcgacaacgccggtaaaactacactcctgcatatgctcaaggatgaccggctaggtcagcacgtgccaacactccacccaactagcgaagagttgaccatcgcaggcatgacattcacaaccttcgatcttggaggccacgttcaggctcgccgtgtgtggaagaattaccttcccgctatcaatgggattgtcttcctggtcgactgtgccgatcacgagaggctgctggagtccaaggaggaactggacagcttaatgactgatgaaaccattgcgaatgtgccaatcctcatactgggaaataagatagatagacctgaagctattagtgaagaacggctacgagaaatgtttggcctctatgggcagactaccggcaaaggtagcattagtctgaaggagctgaatgcctag

SEQ ID NO: 239633 - DNA, 393 bp, synthetic construct
  misc_feature 1..393: note = Description of Artificial Sequence: Synthetic coding sequence
  source 1..393: mol_type = other DNA
atgacctttactacttttgacctgggaggccacgtccaggcaagacgagtctggaagaattatctgcctgccattaacggtatcgtgttcctcgtcgactgcgcagatcatgagcggctgctggagtccaaagaggaactagactcgctgatgacagacgagacaattgccaacgtacctatcctgattctcggcaacaaaatagatagacctgaggcaattagcgaggagagactcagggaaatgtttggattatacgggcagactactggcaagggttcgatcagcctgaaagagctcaatgcacgcccactggaagtctttatgtgcagcgtactcaaaaggcaaggatatggtgaggggttcaggtggatggctcagtacatcgactag

SEQ ID NO: 239634 - DNA, 393 bp, synthetic construct
  misc_feature 1..393: note = Description of Artificial Sequence: Synthetic coding sequence
  source 1..393: mol_type = other DNA
atgacattcacaaccttcgatctgggtggccacgttcaagctcggagggtttggaaaaattacttgccagccataaacggaatcgtgttccttgtggactgtgcggatcacgagaggctcctggaaagtaaagaggaactggatagtctgatgaccgatgaaacgatcgccaacgtacctattctcatcctgggtaataaaattgataggcccgaagctatatcggaggaacgcctgagagaaatgtttggcctttacggccaaacaaccggcaagggctcaatttccctaaaagagttaaacgcgaggccgctcgaagtgttcatgtgttcggtactgaagaggcagggatatggggagggcttcaggtggatggcccagtatattgactag

SEQ ID NO: 239635 - DNA, 2796 bp, synthetic construct
  misc_feature 1..2796: note = Description of Artificial Sequence: Synthetic coding sequence
  source 1..2796: mol_type = other DNA
atgcgggctcttgtgttgctgggatgccttctggcatctttactgttttccggtcaggccgaactgcaggtctcagcatccggtggaactgaggacgtcgggaaccttctggagaatcactttagcgccggagatgcttctctcgaggagaaggagcgtgcactgtatgctgacacagcccctcaagataaaaagcttcttttgcattatcccgatggacgcgaggctgagtccccaaagaaaactccagccagcgctgctagcgccggacccgatccagaggcttcactctccaacgcatcggctactgagtcaccccctcctggagaacgagacgatcgagatgccgctgggcctggggaggagaaaaatggcccacctgtggcaagcgctctcccaccaggaggcgctaaagggccagtggaggaagagtggcccgaaccttcaagtggagaggggcagggtgaggaagagacagggtttggactgcccacagagggaaccgcctctggggaggcgggaggccaggccggaggtcacgagcttccagaagaggtgcaggaggtgcagggcgatagtttggtccagggcgcagtggcaggtacggctgagcctaaggctgaaggcgcatctccgcactccgaaggagacggtgttggacctttaaacgccgaagccgaaggctcaccaggaccaggagaggaacccgctgtgccggagggcgctcctgatgtggctgcggtaggcggagagtctgagccggacatcgatacacaagcctctgaggggacggaagatcaaggtgagccaggccctgctgcagaggcatctgccgagcccggaggggcacaaagcgtgaaagccggagacaccgaagagaatcagtcgccagaaatgacagaggaggacgcggatgaagcttccagtgaggaggagtccggggacggctccggatctgaagaagagggaggcgtcccatccgaggaggaatctgaggaggactccggggatggagcgtcttccgaggaagctgaaggcgcaagcgaggaagcgacggagcctcaggaggctggcgaacctcaagaggcaagagaaccacaggaaggaggcgacctacaggaggctgaggaaagccaggaggggggagacccacaggaagcggaggagccccaggaggggggtgcccctcaagagggtggagagccccaggaagggggagatccacaggaagctagagaaccccaggaggctcgggaaccacaggagggcgcagagctgcccgaggcaaccgggacgacctcccacagggaccgtggcgctcagcctggtcccgaagagctaaacacagagagcatgggttcagagacgctggacatgaaggccgaagagcccgaagagggacatcagagagagagcccaatcatagtggcacaagaggaaaccgaagatgcgaatgaggaagcaccgctgagggacagatctcacatcgagaaaaccctgatgctaaacgaggacaaacccagcgatgactactccgcagtactacagaggcttcggaaaatctatcactccagcatcaaaccactcgagcagtcatataaatataacgaattacgccagcatgaaatcacagacggagagataacttccaaacctatggtgttgtttcttgggccttggtccgtgggaaaatctacaatgatcaattacctgctcggattggaaaatactcgctaccagctttatactggagctgaacccacaacctcggagttcaccgtactgatgcacggcccaaagctgaaaacgattgagggtattgtgatggcagcggattcagcccgaagtttcagtccactggagaaatttggccagaacttcctggagaagctgatcggtatcgaagttccccataaattactcgagagagtcaccttcgtcgatacccccggtattatcgagaataggaagcagcaagaaagaggatatccgtttaatgatgtttgccagtggtttatcgaccgcgctgatctgatttttgtggtgttcgatcccaccaagctcgatgttggcctagaactcgagatgctttttaggcagctcaagggaagggagtctcagatcagaattattctgaataaggccgacaacctagcaacccagatgctgatgcgggtctatggagcattgttctggtccctggcccctctgataaatgtcaccgagcccccacgagtgtacgtgagcagcttctggcctcaggagtacaaaccggacactcatcaggagttattcctccaggaagagatcagcctactggaggaccttaaccaggtgattgagaaccggctggaaaacaagatcgcctttatcagacaacatgcaattagggtacgtatccacgccctcctggttgataggtatttacagacatataaagacaaaatgactttttttagcgatggcgaactggtgttcaaagacatagtagaagacccggataagttttacatttttaagacgatacttgccaaaactaacgtgtcaaaattcgatctgcctaatcgcgaagcgtataaagatttttttggtattaatcccatctcatctttcaagctgctctctcagcaatgctcatatatgggcggttgctttttggagaaaatagaaagagcaattacccaggagctgcccggactccttggaagcctggggttgggcaaaaatccaggagccttgaattgcgacaaaaccggctgtagcgagactcccaagaatcgctaccggaagcactag

SEQ ID NO: 239636 - DNA, 1422 bp, synthetic construct
  misc_feature 1..1422: note = Description of Artificial Sequence: Synthetic coding sequence
  source 1..1422: mol_type = other DNA
atgagagctttggtgctactgggatgcctcctggccagccttctgttctcgggacaggcggaagagactgaggacgccaacgaagaggcacccctgcgagaccggtctcatatcgagaaaaccctaatgctcaacgaggacaaaccttccgacgactatagtgccgtgctgcagaggctgcggaaaatttatcatagtagcatcaagccccttgaacagtcctataagtacaatgagctgcgtcagcacgaaattacagacggcgagattacctctaagcccatggtgctctttctggggccttggagtgtgggtaaatctaccatgatcaactaccttctgggactcgagaatacaaggtaccagctctatacaggcgctgagcccaccacctccgaattcaccgtgctgatgcacggtccaaagttaaagaccatcgagggaatcgttatggccgctgacagtgccagatccttcagtcctttggagaagtttggtcagaactttctggagaaactgataggaattgaggtgcctcacaaattgctggagcgggtgacctttgtggacacccctggcattatagaaaatcgcaagcaacaggagcgaggctacccatttaacgacgtatgtcaatggttcatcgaccgtgcggatctgatttttgtggtgtttgacccgactaagttagacgtcgggcttgagctcgagatgttattcagacaactgaaaggaagagagagtcagattaggatcatattaaacaaggccgataacctcgccactcagatgctaatgagggtttatggggctctgttttggagcctggcacccttaatcaatgtgactgagccgccacgagtttacgtaagttccttttggccgcaggaatataagcctgacacccaccaagagctgttcctgcaggaagaaatctccctactggaggacctcaatcaggtgatcgagaaccggctcgaaaataagattgcgttcattaggcagcacgctatccgcgtgagaattcacgccctgctggtggatcggtatctgcagacctacaaagataagatgacatttttctccgacggcgaactcgtatttaaggatatcgtagaggatcccgataagttctacatttttaagacaatactggccaaaaccaacgtgagtaaatttgacctaccaaatcgggaagcgtataaggactttttcgggataaaccctattagttctttcaaattactttcccaacaatgctcttacatgggaggctgcttcttagagaagattgaaagagccattacacaagagctccctggcttgctggggtccctgggtctgggcaaaaaccctggggcattgaattgtgataagaccggctgttccgagacgcccaaaaacagatacaggaagcactag

SEQ ID NO: 239637 - DNA, 1296 bp, synthetic construct
  misc_feature 1..1296: note = Description of Artificial Sequence: Synthetic coding sequence
  source 1..1296: mol_type = other DNA
atgctcaatgaggacaagccctccgacgactactccgccgtgctccaaagattgagaaaaatctaccacagctcgatcaagccactggagcagtcgtacaaatacaacgaacttaggcaacacgagatcactgatggtgagatcacctccaagccaatggtgctttttttggggccatggtcagtaggtaagagtaccatgattaactacctgctgggcttagagaatacaaggtaccagctgtatacaggagccgaacccaccacttccgaattcactgtgctcatgcatggcccaaagctgaaaacaattgaagggattgttatggcagccgacagcgctcgatcttttagccctctggaaaaatttggtcaaaattttcttgaaaaactgatcggtatcgaggtcccacacaaactgttagaacgggtgactttcgtagacactccaggaattattgagaataggaagcagcaggaaaggggataccccttcaatgacgtgtgtcaatggttcatcgaccgcgctgatcttattttcgtggtttttgatcctacaaaactggatgtgggcctggagctggaaatgcttttcaggcagctgaagggacgagagtcccagataagaataatacttaacaaggcagacaatttagctacacagatgctgatgcgagtgtacggcgcattgttttggagcttggcacccctcattaatgttactgagcctcctcgcgtctatgtctcctcattctggccacaggaatacaagcccgacactcaccaggaactctttttgcaggaagaaatcagcctgcttgaggatctgaaccaggtaatagaaaatagactggagaataaaatcgcttttatccgacaacacgccataagagtccgaatccatgctctgttggtggacagatatctgcagacttataaggacaagatgacgtttttttctgatggagagctggtctttaaagatattgtagaggaccccgataaattctatatatttaagacaatactggctaagaccaatgtgtctaagttcgatctacccaacagggaggcgtataaagattttttcgggatcaatccgattagtagtttcaaactgttatctcaacagtgctcctacatggggggatgtttcctggaaaagattgagcgcgcaatcacacaagagctccccggtctgctgggatcactagggttaggcaaaaatcccggagctttgaattgtgataaaacaggctgtagtgaaactcctaaaaatcggtaccgaaagcactag

SEQ ID NO: 239638 - DNA, 1164 bp, synthetic construct
  misc_feature 1..1164: note = Description of Artificial Sequence: Synthetic coding sequence
  source 1..1164: mol_type = other DNA
atggccgaaaccttgttctggacacccctattagtggtactgctcgctggactgggcgataccgaagcgcaacagacgactttacatccactggtgggcagggtctttgttcatacactcgatcatgaaacattcttgtccctacccgaacacgtggctgtccctccagcagtgcatattacgtaccatgctcacctgcagggtcaccccgacctccctcgctggctcagatatacccaacgatccccccaccatccgggtttcctgtatggatcagcgacccccgaggatcggggattacaagtgatcgaggtgaccgcctacaaccgggattcattcgacacaacacgccaacggctggtcctggagattggtgatccagaaggaccactgctgccgtatcaggctgaattccttgtacgaagtcacgatgcggaagaagtcctgccaagtactccagcgagcaggttcctgtcagcgctcggtggactgtgggagcccggagaactgcaactactcaacgtcacatccgcgctggatcgaggaggacgagtgcccctgccaatcgagggcaggaaggagggagtgtatatcaaagtgggatctgcttcacccttcagtacctgtcttaagatggtagcttcccctgattcccacgcacgctgtgcgcagggacagccacccctactatcttgttacgatacgctggccccacattttcgcgtggactggtgtaatgtgactcttgtggacaagtcggtgcctgagcccgctgatgaagtccctacccctggggacggcatcctggagcacgatccctttttttgcccgccaacggaggcgccagatagagactttctggtggacgctttggtgacgctcctggtccccttgctggttgcccttcttctgacacttctgttagcctacgtgatgtgctgtagacgggagggtcgtctcaagcgggacctggccacctcggatatccagatggtccaccactgcacaattcatggcaacaccgaggaactccggcagatggcggctagtcgagaggtgcccaggcccttgtctactcttcccatgttcaatgttcacactggcgagcggctgcctcccagagtggacagtgcacaggttccactgatcctggatcaacattag

SEQ ID NO: 239639 - DNA, 792 bp, synthetic construct
  misc_feature 1..792: note = Description of Artificial Sequence: Synthetic coding sequence
  source 1..792: mol_type = other DNA
atggccgagacgctgttctggacgccgcttcttgtggttctgctcgccggactgggggatactgaagctcagcagaccacgctacacccgctggtcggcagagtcttcgtgcacactcttgaccatgagaccttcctttccttgcccgagcacgtcgcggtccctcccgcagtgcatatcacctatcacgcccatctgcagggccatcctgatttacccagatggctgcgctacacacagcggagcccacaccaccccggattcctgtacggcagcgccactccagaggatagaggtttgcaggtcatcgaagtcactgcctataacagggattcgttcgacaccaccagacagcggcttgtgctggagattggcgaccccgaaggaccactcctaccatatcaggctgaatttctggtgcgatcccacgacgcagaggaagtcctgcctagcacacccgcaagccggttcctcagcgccctcgggggactgtgggaaccaggcgagcttcagctgttgaacgtcacctccgctttggatcgcggtggccgtgtccccttaccaattgagggaagaaaagagggtttaaagcgcgatctcgccaccagtgacattcagatggtgcaccactgcactatacacggcaataccgaggagctgaggcaaatggcggcttcacgggaggttcctaggcctcttagcacccttcctatgttcaacgtgcataccggcgagaggctgcctcctcgagtggattccgctcaggtgcctctaatactggaccagcattag

SEQ ID NO: 239640 - DNA, 537 bp, synthetic construct
  misc_feature 1..537: note = Description of Artificial Sequence: Synthetic coding sequence
  source 1..537: mol_type = other DNA
atgagcgtaacagcttataacagagacagttttgataccacaagacagagactcgtgctagagatcggcgaccctgagggcccactgctcccttaccaggccgagttcctggtacgcagccacgacgccgaggaagtgttgccctccactcccgcaagccgttttttgtctgcactgggaggactgtgggaaccaggcgaactgcagttgcttaacgtgacatcggcgctcgatagagggggacgggtccctctgcccatcgagggacgaaaagaaggggtatatataaaagttggcagcgcctcgccattctctacatgtctcaaaatggtagcaagcccagatagccatgcaagatgtgcccaggggcagccaccgctcctgtcttgctacgacaccctcgcacctcatttcagagtggactggtgcaatgtaacactggttcgccgagacccaggatccgggggtggggtaggccacgggccacatccctcaccgccaagcctgccctgctgcttcctgtcccccagcttgtag

SEQ ID NO: 239641 - DNA, 792 bp, synthetic construct
  misc_feature 1..792: note = Description of Artificial Sequence: Synthetic coding sequence
  source 1..792: mol_type = other DNA
atggcagagacgctcttctggacgccactgctggtcgtgctgctggctggcctgggggacactgaggcccaacaaacaacacttcacccactggtgggaagggtgttcgtccatactctggatcacgaaacgtttctcagtttgccagagcacgtggcagtgccaccagccgtgcatatcacttaccatgctcacttacagggacaccctgacttaccaaggtggctcagatatacccagcggtcaccacaccaccccggattcctgtatggaagtgcaactccagaggatagaggactgcaggtgattgaggtcactgcatacaaccgagatagctttgacactacccgtcagagactagtcctcgagattggggaccctgaaggaccactgctgccctaccaagccgaattcctcgtccgaagccatgatgccgaggaggtgttgccatccactcccgcatcccgttttctgagtgctctgggcggtctctgggagcccggagaactgcagctgctcaacgtgacgagcgcacttgatcgcggtggtagggtcccactgcctatagaggggagaaaagaggttttgttgcgccacttaggaacaccgctcattcagatggttcaccactgtaccatacatggcaacactgaggagctccgtcagatggcggctagtcgcgaagttccccgacctctatccaccctgcccatgttcaacgttcacacaggagaaaggctgccaccaagagttgactctgcgcaggtccctctcatattagatcagcactag

SEQ ID NO: 239642 - DNA, 957 bp, synthetic construct
  misc_feature 1..957: note = Description of Artificial Sequence: Synthetic coding sequence
  source 1..957: mol_type = other DNA
atggccgctgccgcagccgctgcagccgagcagcaatctagcaacggtcctgtgaaaaaaagcatgagggagaaggcggtcgaaaggcgctccgttaataaggagcacaactcaaacttcaaagcgggatatattccgattgatgaagataggctacataaaacaggtctgcggggacgtaaaggcaatctggctatttgcgtgattattctgctctttattctggcggttataaacctgatcataaccctggtgatatgggccgttattaggattgggcctaacggctgtgacagcatggagtttcacgagtccggcttgcttcgcttcaagcaggtgagtgatatgggtgtcatccaccctttgtataaaagtacagtagggggtaggaggaatgagaatttggtcataaccggaaataatcagcccatcgtgttccagcagggaacaaccaagctgagcgtcgagaataacaagacctccatcacctccgacatcggcatgcagtttttcgatcctcgcacccagaatattttgttttcaaccgactacgaaacacacgagtttcacctgccttccggcgttaagtcactgaacgtgcaaaaggcttcaactgagcggatcacatccaacgcaaccagcgatttaaatattaaggtggacggaagagcaattgtgcgtggaaatgagggcgtctttatcatgggcaaaactattgaatttcacatgggaggcaacatggaactcaaggccgagaattctatcatcttaaatgggagcgtgatggtatcgacgacacgcctgccatcaagctctagtggtgaccaactcgggagcggggattgggtgaggtacaagctgtgcatgtgcgccgacgggacactgtttaaggttcaggtaacctcgcaaaatatgggctgccagatcagcgacaatccgtgtggcaacacgcactag

SEQ ID NO: 239643 - DNA, 747 bp, synthetic construct
  misc_feature 1..747: note = Description of Artificial Sequence: Synthetic coding sequence
  source 1..747: mol_type = other DNA
atggcagcagctgcagcagccgctgccgagcaaatcaccctggtaatctgggctgtcataaggattgggccaaacggatgtgattctatggagtttcatgagtctgggttgctacgtttcaaacaagtttcggacatgggtgtaatccatccactttacaaatccacagtcgggggacgtcgtaacgaaaacctcgtcatcactgggaacaatcagcctatcgtgttccagcaagggactacaaaattaagtgtggaaaataacaaaaccagcatcacgtccgacattggaatgcaattctttgatcccagaactcagaatattctattctcaactgactatgagacccatgagttccacttgcctagtggggtgaaatcattgaatgtgcagaaagcttccactgaacgtataacgtctaacgcaaccagtgacctgaatattaaagtggatggccgagccatcgttcggggtaacgaaggcgtatttataatgggcaagaccatagaattccatatggggggaaacatggaactcaaagcagaaaattccatcatcctgaatggtagtgtgatggtgtctacaacccgtttgccctcctccagcagcggagaccagttaggttccggggactgggtcaggtacaagctgtgtatgtgcgcagacggcaccctgtttaaggtccaggtgacctcacagaatatgggctgccaaatttctgataacccctgtggcaacacccactag

SEQ ID NO: 239644 - DNA, 873 bp, synthetic construct
  misc_feature 1..873: note = Description of Artificial Sequence: Synthetic coding sequence
  source 1..873: mol_type = other DNA
atgatgccgcaggaacagtatacacatcataggtccactatgcctggaagtgttggaccgcaggtctataaggtgggaatttacggttggcgcaagaggtgcctctacttctttgtgcttctcttgatgattctcatccttgtaaaccttgccatgaccatctggatcttgaaggtgatgaactttacaatagatggcatgggaaacctgcgaataacagagaagggtctgaagcttgaaggagactctgaatttctgcagcccctgtacgcaaaagagattcaatcacgtccaggtaatgccctgtactttaagagtgcgcgaaacgtcacagtcaacattcttaatgatcagaccaaagtcctcacacagctgattacaggtccgaaggccgttgaggcctacgggaagaaattcgaggttaagactgtgtctgggaaactcctgttctccgccgacaacaacgaagttgtggtgggcgcagagcggctgcgggttcttggtgctgaggggacagtgttccccaagtcgattgagaccccaaacgtgagggctgacccttttaaggaactcagattggaatcaccaactagatcattggtgatggaggctcccaagggagttgaaatcaatgcagaagctggaaatatggaagcgacgtgtcgcactgagttacggctggaaagtaaggacggcgagatcaagctggacgctgccaaaattaggctgccgagactgcctcacggatcttacaccccaactgggaccagacaaaaggtgtttgagatctgcgtatgcgcaaatggcagactcttcctcagccaagcgggagccggttcgacatgccaaatcaatacatccgtgtgtttatag

SEQ ID NO: 239645 - DNA, 870 bp, synthetic construct
  misc_feature 1..870: note = Description of Artificial Sequence: Synthetic coding sequence
  source 1..870: mol_type = other DNA
atgccccaagagcagtacactcaccacagatccaccatgccaggtagtgtcggtcctcaagtgtacaaggtgggcatctacgggtggagaaaaaggtgtctgtatttctttgtgctgctgctgatgatcttgatcctggtcaacctcgcaatgacaatctggattctaaaggtgatgaacttcactatagatgggatgggcaatctcagaatcacagagaagggccttaagctagaaggagattcagagtttcttcagccactatacgccaaagagattcagtcgaggcccggaaacgccctatacttcaagtctgcacggaacgtgacagtgaacattctcaacgatcagactaaagtccttacccagctgatcacagggcctaaggcagtggaagcgtatggcaaaaagttcgaggtaaagacagtgtcaggcaagttgcttttttcagctgacaataatgaggtggtggtaggcgcagagagattgcgagttttaggcgcagagggcactgtgttccctaaatccatcgagactcctaatgtcagagccgacccgtttaaagagttgagactcgagagccctacgcgcagcctggttatggaagcgccaaagggagtggagatcaatgccgaggcgggaaatatggaagcgacttgcagaaccgaactacgtttggagagtaaagacggcgaaattaagctcgacgctgccaaaatccgcttacctagattaccccatggctcctacacaccaactggcacccggcagaaggtgtttgaaatttgcgtgtgcgccaacggtcgcttatttttgagtcaggctggggctggatcaacatgtcagataaatacatcggtttgcctctag

SEQ ID NO: 239646 - DNA, 771 bp, synthetic construct
  misc_feature 1..771: note = Description of Artificial Sequence: Synthetic coding sequence
  source 1..771: mol_type = other DNA
atgatgccccaagagcagtatacacaccacagaagcacgatgccaggcagcgtgggccctcaagtgtacaaggttggcatttatggatggcgcaagaggtgtctgtattttttcgtccttcttttgatgatcctaattctcgtgaatctcgctatgaccatctggatactgaaggtaatgaattttactattgacggaatggggaatctgcggatcactgagaaaggcttgaagctggaaggtgacagcgagtttctccaaccactttacgctaaggaaatccagagcaggccaggcaatgctttgtactttaagtcagcacgcaacgtcacagtgaatattctaaatgatcagacaaaggtactcacccagctgatcactggtcccaaagccgtagaggcatatggcaagaagttcgaagtgaaaaccgtgtctggtaagctcctgtttagcgcggacaataatgaagttgtggtcggtgccgagaggttgcgcgtactcggtgcggagggtactgtgttcccaaagagcattgagacccccaatgtgagggccgacccatttaaggagcttcgcttagagtcccccacacggtcgttggttatggaggcacctaaaggagtcgaaatcaatgccgaggccggtaacatggaagccacgtgtcgtactgagctgcgcttggagtccaaggatggggaagtgcgagatgagaaggacaggtcatccaaatcctattctttcaaccgccctaccctgccaattaccggatag

SEQ ID NO: 239647 - DNA, 771 bp, synthetic construct
  misc_feature 1..771: note = Description of Artificial Sequence: Synthetic coding sequence
  source 1..771: mol_type = other DNA
atgatgccacaggaacagtacactcaccataggtctaccatgcccggaagcgtcggtcctcaggtctataaggttggaatatacggttggcgcaaaaggtgcttatacttcttcgttctgctgcttatgattctcatcctggtgaatctggcgatgacaatatggatcctcaaagtcatgaattttactattgacggtatgggaaacctaaggatcaccgagaaaggactgaaactcgagggcgactcggaatttctccagcctctgtacgccaaggagatccagagcagacctggtaatgccttgtacttcaagtccgccagaaatgtgactgtgaatatactgaacgatcagaccaaagttctcacacagctgataaccggccctaaggctgttgaggcttatggcaagaaattcgaagtcaagactgtgagcgggaagctgttattctccgcagataacaatgaggttgtggtaggcgctgaaaggctgagagttttgggtgctgaaggaacagtatttcccaaaagcatcgagacccccaatgtgcgggctgatcctttcaaggagctccggttagaatcacccacgcgcagtctggtgatggaagctcctaagggagtggaaattaacgctgaggcagggaatatggaggctacctgcaggacagaactgaggctcgagtcaaaagacggcgaggtgagggatgaaaaggataggagtagcaagagttactccttcaatcgccctaccttgcccatcactggatag

SEQ ID NO: 239648 - DNA, 1314 bp, synthetic construct
  misc_feature 1..1314: note = Description of Artificial Sequence: Synthetic coding sequence
  source 1..1314: mol_type = other DNA
atgcaactgcctcgctggtgggaactgggtgacccttgtgcatggacggggcagggtaggggcacaagacgcatgtccccagccacgaccggaactttcttgctgactgtgtactccattttctcaaaggttcacagcgaccggaatgtgtatcctagcgctggagttttatttgtgcacgtgcttgaaagggagtacttcaagggagaatttccgccttaccctaaaccgggagagatttctaatgacccaataacctttaacaccaacctcatggggtaccccgatcggccaggctggcttcgctatatccagagaactccctactctgacggagtcctgtacggctcgcctacggctgaaaatgtcgggaaacctaccatcatcgaaattactgcatacaaccgcagaaccttcgagacagctagacacaatttgataattaacatcatgtctgccgaagattttcccttgccctatcaagcggagttcttcattaaaaacatgaatgtggaggagatgctagcatcggaggtactcggtgatttcttaggggcagtgaaaaacgtgtggcagccagagaggctgaacgcgattaatattacctccgcactcgacaggggaggaagagttcccttgcccattaacgacttgaaagagggagtgtacgtgatggtcggagcagacgtgccattttcatcgtgcttacgggaggtggagaatccacagaaccagctcaggtgtagtcaggagatggagcctgtcatcacttgcgacaaaaagttccgaacccaattttacatcgattggtgtaagattagtctggtagacaagacgaaacaagtgagtacatatcaggaagtgatccgtggtgaaggcatactcccggacggtggagagtacaaaccgccaagcgacagtctgaagtcaagagattactatacagacttcctcatcaccctggctgtcccatctgccgtggcactggtgctcttccttatactagcctacataatgtgttgcaggcgcgagggcgtggagaaacggaacatgcaaactcctgacattcagttggtgcaccatagtgctattcagaagagcactaaagaactgcgagatatgtcgaaaaacagggagatcgcctggccacttagtacgctgccagtattccaccccgtgacaggggagatcatccccccactgcacacagataattacgactcgactaacatgcctctgatgcagacccagcagaacctcccgcatcagacgcagatcccacagcagcagaccacagggaaatggtatccatag

SEQ ID NO: 239649 - DNA, 1416 bp, synthetic construct
  misc_feature 1..1416: note = Description of Artificial Sequence: Synthetic coding sequence
  source 1..1416: mol_type = other DNA
atgcagctgcctcgttggtgggagcttggcgacccttgcgcttggaccggtcagggaagaggcacacggaggatgtcccctgctaccactggcaccttcctcctcacggcctttttgttatcgtgcgcagacggaattaacgggactgtgaactggaaaactcggcaggctaacaactttatcattagtcgcaaaatggcagccggaatgaaggacgtctactccatcttcagcaaagtccactctgacaggaatgtttacccgtctgctggcgtgttgttcgtgcatgttttggaaagagagtattttaaaggagaattcccaccatacccgaaacctggagagatttccaatgatccgatcacattcaatacaaacctgatgggttacccagaccgccctggatggctaagatacatccaacgtacaccatacagcgatggagttctatacggatctccaacagccgaaaacgtgggcaagcctactatcatagaaataaccgcatataaccgcaggaccttcgagaccgctcgtcacaatctgattattaatataatgtctgctgaggattttccacttccttatcaggccgagtttttcatcaagaatatgaacgttgaggaaatgctggctagcgaggtgctgggagatttcttgggagccgttaaaaatgtctggcagccagaaagactgaacgcaatcaatattacatcagccttggaccggggaggacgggttcctctgcccatcaatgatctcaaggagggggtatatgtgatggttggtgccgacgtgcctttctcgtcctgtctgagggaggtggagaatccacagaatcaactgagatgtagccaggagatggagcccgtgataacgtgtgataaaaagttcaggacccagttctacatcgattggtgcaaaatttctttagtggataaaaccaagcaggtgtcaacgtaccaggaggtgattcgaggggaaggtattctgccagacggaggagagtacaagcctccttcagactcattgaagtcccgtgactattatactgacttcctaatcactctcgccgtcccctctgccgtcgcattagtgctttttctgatcctggcctacatcatgtgttgtcgtcgggaaggagtcgagaaacggaatatgcaaacacccgatatccaactggtccatcactctgccatccaaaaatcaaccaaggagctacgcgacatgagcaagaatagagaaatcgcctggcccctgtcgaccctcccggtttttcaccctgtgacgggagaaatcatccccccactccacaccgataactacgacagcacaaatatgcctctgatgcagacgcagcagaatctgccccaccaaacccaaataccacagcaacagaccaccggcgaatgctag

SEQ ID NO: 239650 - DNA, 1356 bp, synthetic construct
  misc_feature 1..1356: note = Description of Artificial Sequence: Synthetic coding sequence
  source 1..1356: mol_type = other DNA
atgcagttgcctcgctggtgggagctgggcgatccgtgcgcttggaccggccagggacgcggaacaagacggatgtcccccgcaactaccggcacgtttctgctgaccgtgtactccattttcagcaaggtacactccgaccgtaacgtctacccgtccgcaggtgtgctgtttgtgcacgtgctggagagagagtacttcaagggagagtttccaccgtaccctaaacccggtgaaatttccaacgaccctatcaccttcaacacaaatctgatggggtatccggatcgaccagggtggttgcgatacatccagaggacgccctactccgacggcgtgctgtacggttctcccactgcagaaaatgtgggaaagcctacaattatcgaaatcacagcttacaatagaagaactttcgagaccgcaagacacaacttgatcatcaatattatgagcgccgaagatttccccctcccttatcaggcagaattctttatcaagaacatgaacgttgaggagatgctagcatccgaggtcttgggcgattttttgggagcagtgaagaatgtttggcagcccgagcggttgaatgcaataaatatcacctccgcactggaccgcggtggaagggttccactccctataaacgaccttaaggaaggcgtttacgtgatggttggcgcagatgtacctttttctagttgtctgcgggaggtggagaatcctcagaaccaattgagatgctcccaggagatggagcccgttattacatgtgataagaagtttcggacccagttctacattgattggtgcaaaatttccctggtggataagactaagcaagtatccacttaccaggaagtgattaggggagaaggcatcctcccagatggcggagagtacaagcctcccagtgacagtctcaagagccgcgactactatactgatttcctcataaccctggcagtgccaagcgcagtggccctggtactgttcctcattcttgcatatatcatgtgttgtcgccgagaaggagtcatacaactggtgcatcactcagctatccagaaaagcactaaggagctgagggatatgtctaaaaaccgcgaaatcgcttggcccctgtcaactctccctgtctttcatccagtaactggcgagatcataccccctctccacaccgacaactacgactccaccaacatgcctttgatgcagacccaacagaacctgccacaccagactcagattcctcaacagcaaaccaccggggactttcgactcacaacctttcagagatttgaagtcaacggcatccctgaggaacgtaaactgaccgaagccatgaacctttag

SEQ ID NO: 239651 - DNA, 1389 bp, synthetic construct
  misc_feature 1..1389: note = Description of Artificial Sequence: Synthetic coding sequence
  source 1..1389: mol_type = other DNA
atgcaattgccccgttggtgggaactgggcgacccatgtgcctggactggacaaggcagaggaactagacgaatgtcccccgctacaactggaacgtttctgctgacagtgtattccattttttccaaggtgcattccgacagaaacgtgtatccatccgccggagtcttgtttgtgcacgttctggaacgagaatatttcaaaggcgaatttccaccgtatccaaaacccggagaaatcagcaatgatcctataacatttaatacgaatcttatgggttatccagatcgaccaggatggctgcggtacattcagcgaactccttacagcgacggagtgctctacgggtcaccaactgctgagaacgttgggaagccaaccatcatagagattacagcctacaacaggcgaaccttcgagacggccagacataatcttatcattaatatcatgagcgcagaggattttccgctcccctaccaggctgagttttttataaaaaacatgaatgtcgaagagatgctagcgagcgaagtattgggtgactttctgggggcagtaaagaacgtttggcagccggaacgcctgaacgcaataaacatcacatctgccctcgacagagggggacgcgtgccactccccatcaacgacttaaaagaaggagtgtatgtcatggttggagctgacgttccgttttcatcttgcctccgagaagtcgaaaatccacagaaccagctccgctgcagccaagagatggaaccggtaattacttgcgacaagaaattccggactcagttctacatcgactggtgtaaaatttccctcgttgacaagactaagcaagtgagcacctaccaagaggtgataaggggcgaaggtatcctgcccgatggaggggaatacaaaccacccagtgattctctgaagtctcgggattactacaccgattttctaataactctggctgtgcccagcgcagtggccctggtgcttttccttatcctcgcctatattatgtgctgtcgacgggaaggtgtggaaaagcgcaatatgcagacaccagacatacaactcgtgcaccattcggcgatccagaagtccacgaaggagctacgggatatgagtaaaaatcgggagatcgcctggcctctttctacattacccgtttttcaccctgtgaccggggaaatcattccacccctccacacagacaactatgactcgactaatatgccgctgatgcagacccagcaatggtcctttgccccagttgctcaggccggagttcagtggtccgaccttggttccctgcaacccccaccacctagaaatcttcctcaccagactcagatcccacagcagcagacaacaggcaagtggtacccgtag

SEQ ID NO: 239652 - DNA, 2118 bp, synthetic construct
  misc_feature 1..2118: note = Description of Artificial Sequence: Synthetic coding sequence
  source 1..2118: mol_type = other DNA
atgaccgataacagcaacaaccagttagtggtgagggccaagttcaacttccaacaaaccaatgaggacgaactgtcattctcaaagggtgacgtcatacatgtgacaagagttgaggagggcggatggtgggagggaacattgaacgggagaaccggttggttcccatcaaactacgttagagaggttaaagcaagtgaaaagcctgtttctccaaagtccgggaccctaaagtccccacccaaaggcttcgatacaactgcaattaacaagtcttactataatgtggtgttgcaaaacatcctcgagactgaaaacgaatactccaaagaattacagaccgttttgagcacttacctgcgaccgcttcagactagcgaaaagttatctagcgcaaatatttcctacctgatgggcaaccttgaagagatttgcagcttccagcagatgcttgtccaatcccttgaggagtgcacgaaactccccgaggctcagcaaagagtgggtgggtgcttcctgaatttgatgccacagatgaaaaccctctacctgacttactgtgccaaccacccgtccgccgtcaacgttctgaccgagcactccgaggagcttggggaattcatggaaacaaaaggtgcatcctctcccggaatccttgtgctgacgacaggactctcaaagccattcatgcgcctggataaatatcccacattgttaaaggagctggagcgacacatggaagactatcacacagacaggcaggacattcagaaatccatggcagccttcaagaacctcagcgcccagtgtcaggaggtgaggaaacggaaagagctagaattgcagatcctgaccgaagctatcaggaattgggagggcgacgacataaagacgttgggtaatgtcacctacatgagccaagtcctgatccagtgcgccggttccgaggagaaaaacgagcgatacttattactgttccccaacgtgttactcatgctaagcgcctcacccagaatgtccgggttcatataccaagggaagttgcccaccactggaatgaccataaccaaactcgaagattccgaaaaccacagaaatgcatttgagatctctggctcaatgatcgagaggatcttggttagctgcaacaaccaacaggacctgcaggagtgggtggagcatctccaaaaacagacaaaagttacttctgtggggaatcctaccatcaaaccacattcagttccatcccacactctcccttcacaccccgttactcctagtagcaagcatgcagactcaaaacccgctccgctgacccccgcatatcacaccctgcctcacccttcccaccacggcacaccccacactacaataaactggggcccactcgagcccccaaaaacgcctaaaccctggagtctcagctgtttgaggccggctccgccactgcgcccaagtgccgctttatgttacaaagaagatctgtcaaaaagtcccaagactatgaaaaaactcctgcctaaacgaaaacccgagagaaagccctcggatgaggaattcgcatctcgcaagagcaccgctgctctggaagaggatgctcagattctgaaagtgatcgaggcgtactgtacaagcgctaagacccgacagactctcaacagtacatggcaggggacagacctcatgcacaaccatgtcttagccgacgacgaccaaccttcactggatagcctcgggaggcgttccagcctatctcgtctggagccatccgacctttcagaagatagtgactatgacagcatttggacagctcatagctatcgcatgggtagcacaagccgttcaagaaaagaatctgctcctcaggttcttctgccggaggaggaaaagatcatcgttgaggagactaaaagcaacggtcagactgtgatagaggaaaaaagcctggtagatacagtgtacgccctgaaagacgaggtgcaggagcttcgacaggataataaaaagatgaaaaagtctctggaggaggagcaacgcgctcgcaaagatctggagaagctagtgaggaaggtgctcaaaaacatgaacgaccccgcttgggacgaaaccaatctgtag

SEQ ID NO: 239653 - DNA, 876 bp, synthetic construct
  misc_feature 1..876: note = Description of Artificial Sequence: Synthetic coding sequence
  source 1..876: mol_type = other DNA
atggttcgcgagcagtacactaccgccaccgaaggcatttgtattgagcggcctgagaaccagtacgtttataagatcgggatctacgggtggcggaagcgatgtctttacctttttgtccttttattacttatcattctggtcgtgaatcttgccttaacaatctggattttaaaagtcatgtggttttcacccgctggcatgggccatctatgcgtgacaaaggatggcttaaggctggaaggggagtccgagttcctgttccccctgtacgctaaagagatacactcaagggtagacagttccctgctcctccaatcaacccagaacgtgaccgttaacgccagaaactcggagggcgaggtgaccggacgactgaaggttgggccaaagatggtcgaggtgcaaaatcagcaattccagattaattcaaacgatggcaagcctttgtttacagtggacgagaaagaagttgtcgtaggaactgataagctccgcgtcacaggaccggagggcgcactctttgagcacagcgtggaaacaccgctggttcgagcagacccgtttcaggaccttcgactcgagtcccccacaaggtctctgagcatggacgccccacggggtgtgcatatccaagcacatgccggtaaaatcgaggccctctctcagatggacatcctcttccacagctccgacggcatgctagtgctggacgctgagaccgtctgcctgccaaaactggtgcagggcacgtggggtccctcagggtcctcccagagtctgtacgagatttgcgtttgcccggacggtaagttgtatctcagtgtggcgggagttagcacaacctgtcaggagcacaatcatatatgcctgtag

SEQ ID NO: 239654 - DNA, 876 bp, synthetic construct
  misc_feature 1..876: note = Description of Artificial Sequence: Synthetic coding sequence
  source 1..876: mol_type = other DNA
atggtgcgggagcaatatactacggctactgagggtatttgcatagaacgccctgagaatcagtacgtttataagatcggtatctacgggtggcgcaaacgatgtctatatttattcgtgctgctcctcctaattatattggtggttaacctggctttgactatttggattctcaaggttatgtggttctcccctgccggaatgggccatctatgcgttacaaaagacggacttcgtctcgagggtgagtcagagttcctgttccccctgtacgccaaggaaatccatagcagggtggatagtagtctgctgctgcaatccacacagaacgtgacagttaacgctcgcaacagcgaaggtgaggtaacaggccgactcaaggtgggccctaagatggtggaagtccaaaatcagcaattccagattaattccaacgacgggaagcctttattcaccgtggatgaaaaagaagtcgtcgttggcaccgacaaactacgggtgaccgggcctgaaggcgcactgttcgagcatagcgtagagacccctcttgtcagggccgacccctttcaggacctcaggcttgaatctccgactaggagtctcagcatggacgctcctaggggagttcatatccaggcgcatgccggtaaaatcgaagcccttagccaaatggatattctgttccattcttcggatgggatgctggttctcgacgcggaaactgtgtgccttcctaagttggtgcaggggacctgggggcctagtggctcttctcaaagcctctacgaaatttgcgtgtgtccagacggcaagctttacttatccgtggccggtgtgtccacaacatgtcaagaacacaatcatatttgcctatag

SEQ ID NO: 239655 - DNA, 96 bp, synthetic construct
  misc_feature 1..96: note = Description of Artificial Sequence: Synthetic coding sequence
  source 1..96: mol_type = other DNA
atgggtatcaacacaagggagttgtttctgaacttcactattgtgttgatcacagtgatcttgatgtggcttcttgtcagaagttatcaatactag

SEQ ID NO: 239656 - DNA, 96 bp, synthetic construct
  misc_feature 1..96: note = Description of Artificial Sequence: Synthetic coding sequence
  source 1..96: mol_type = other DNA
atgggtatcaacactagagaactgttcctgaattttaccattgtgctgatcacagttattctgatgtggctcctggtgcgctcctaccagtattag

SEQ ID NO: 239657 - DNA, 96 bp, synthetic construct
  misc_feature 1..96: note = Description of Artificial Sequence: Synthetic coding sequence
  source 1..96: mol_type = other DNA
atgggtatcaacactagggagctcttcttaaattttaccatcgtgttgatcaccgtgatactgatgtggcttttagtgcgatcttaccaatattag

SEQ ID NO: 239658 - DNA, 732 bp, synthetic construct
  misc_feature 1..732: note = Description of Artificial Sequence: Synthetic coding sequence
  source 1..732: mol_type = other DNA
atgggcaaaaataaacagcctagaggtcagcagcggcaaggtggacccccagcggcagatgctgccggaccagatgatatggaaccaaagaagggcacaggagcccctaaagaatgcggggaggaagagccacgcacctgctgcggatgcaggtttccactgctgctggccttgcttcagctggcccttgggatcgctgtgaccgttgttggattcttgatggcctctatatctagctccctcctggtgagggacacacctttttgggccggtatcatcgtctgccttgttgcatacctgggcctgttcatgctgtgcgtgagctaccaggtcgatgaacggacatgtatacagttctctatgaagctgttgtattttttgctgagcgctttgggactaactgtctgcgtgctagcggttgccttcgccgctcaccactactcccagctaacccagtttacttgtgaaactactctggatagttgccagtgtaagcttccctctagtgagcctctgtcacgaacatttgtctatagggatgtcaccgactgcacctctgtaaccggaaccttcaagctgtttctcctgattcagatgatacttaatctcgtatgcggcctcgtgtgtttactggcttgttttgtaatgtggaagcaccgctaccaggttttctatgttggcgttcggatttgcagcctaactgcttctgagggtcctcaacaaaagatctag

SEQ ID NO: 239659 - DNA, 423 bp, synthetic construct
  misc_feature 1..423: note = Description of Artificial Sequence: Synthetic coding sequence
  source 1..423: mol_type = other DNA
atgctgtgcgtatcttatcaagttgacgagcgcacctgtatacaattctcgatgaaactgctttattttttattaagtgccctggggctgacagtgtgcgtgctggcggttgcctttgcagcgcaccactattcccaattaacccagttcacatgtgagaccacacttgattcctgtcagtgcaagcttccatcctcggagcctctgtctcgcacttttgtgtacagagacgtgactgattgtaccagcgtcaccggaacattcaaactgtttctgctgatccagatgattttgaacttggtctgtgggcttgtgtgtctgctcgcttgttttgttatgtggaaacatcgttaccaagtgttctacgtgggagtgagaatttgtagtttaacggctagtgaaggaccccagcaaaagatttag

SEQ ID NO: 239660 - DNA, 654 bp, synthetic construct
  misc_feature 1..654: note = Description of Artificial Sequence: Synthetic coding sequence
  source 1..654: mol_type = other DNA
atggagccaaagaaaggcacgggggcacccaaggagtgtggcgaggaggaacccagaacatgctgtgggtgtcgcttcccattgctcctggccctactgcagctagctctgggcatagccgtgacagtggttggctttcttatggcatccataagctctagcctcctggttcgggatacgccattttgggccggaatcattgtgtgcctggtggcataccttggtctgtttatgctctgtgttagttatcaggtagatgagcgtacgtgtatccagttttcaatgaagttactgtatttcttgctatccgctctaggtcttaccgtgtgtgtcctggccgtggcatttgctgcacatcactactctcagctgactcaatttacgtgtgagacgacccttgatagttgccagtgtaaattaccctcctcagagcctctgtctcgcacatttgtttatagagacgtaacggactgtacctcagtcaccggcacgtttaagctttttctccttatccagatgattctcaacctagtttgcggtctggtttgcctacttgcctgcttcgttatgtggaagcatcggtatcaagtgttctacgtcggcgttcgcatatgtagcctcactgcctccgagggaccgcaacagaagatttag

SEQ ID NO: 239661 - DNA, 387 bp, synthetic construct
  misc_feature 1..387: note = Description of Artificial Sequence: Synthetic coding sequence
  source 1..387: mol_type = other DNA
atggggaagaataagcagccccgaggtcagcagaggcaggggggaccgccagcagccgacgccgctggacccgatgatatggagcccaagaagggcaccggcgcacccaaggagtgcggggaggaggagccccgaacttgctgtggctgtaggtttccacttcttttagccctcctccagctggctcttggaatcgcagtaacggtcgttggcttcctgatggcaagcatcagctcaagcttgctggtgagggatacgcccttttgggccggaatcatagtctgtctcgtggcgtacctcgggttgttcatgctgtgtgtcagctaccaggttgacgagaggacatgtatccagttcagcatgaaaatccattgccatgatttttag

SEQ ID NO: 239662 - DNA, 363 bp, synthetic construct
  misc_feature 1..363: note = Description of Artificial Sequence: Synthetic coding sequence
  source 1..363: mol_type = other DNA
atgctgtgcgtatcataccaggtcgatgagagaacatgtatccaattttccatgaaattactgtactttttactgagcgccctgggccttacggtatgcgtgttggctgtggctttcgcagcacaccactacagccagctgacgcagttcacttgcgaaacaaccctggatagttgccagtgtaagctgcctagctcagaaccgcttagccgtaccttcgtgtaccgggatgttacagattgcacctccgtcactggaacttttaaattgttcctattaattcagatgatcttgaacttggtttgcggtctcgtctgtctcctggcatgtttcgttatgtggaaacatcgctaccaggtttag

SEQ ID NO: 239663 - DNA, 423 bp, synthetic construct
  misc_feature 1..423: note = Description of Artificial Sequence: Synthetic coding sequence
  source 1..423: mol_type = other DNA
atgctctgcgtaagctaccaagtggacgaaagaacatgcatacaatttagtatgaagctgttgtactttttactcagcgccctgggtctgacagtctgcgtacttgccgtggcgttcgcagcccatcactattctcagcttacacagtttacctgcgagacgaccctggattcatgtcagtgtaagctgcccagttcagagcctctgtccaggacattcgtttaccgagatgtgaccgactgcacctcggtgactggcacatttaagttgtttctattaattcagatgatcctcaatctggtgtgcggcctggtctgtctgttggcctgcttcgtgatgtggaagcacaggtaccaggtcttttacgttggggttcggatctgctctctcacagcatcagaaggcccacaacagaagatctag

SEQ ID NO: 239664 - DNA, 2292 bp, synthetic construct
  misc_feature 1..2292: note = Description of Artificial Sequence: Synthetic coding sequence
  source 1..2292: mol_type = other DNA
atggaccacctcaacgaggcaacccaaggaaaggagcacagtgagatgagcaacaacgtctccgaccctaaggggccaccagccaaaatcgccaggcttgaacagaatgggagccccctcggcagggggaggctaggctcaactggggcaaagatgcagggagtaccgctaaagcacagcgggcaccttatgaaaaccaatctgcgcaagggcaccatgcttcccgtgttctgtgtcgtggaacactatgaaaatgccattgagtatgattgcaaggaggaacatgcagaattcgttctggtacgtaaggatatgttgttcaatcagctcatagaaatggccctgctgtcgctgggctacagccactcatccgccgcacaggcaaaaggtctgatccaggtcgggaagtggaatcctgtgcctcttagctacgtgactgatgcaccggatgcaacagtcgcagatatgctccaggacgtgtaccacgtggtaactctcaaaatacaattgcactcttgcccgaaactggaagacctgcccccagagcagtggagccacaccacagtgcgaaatgcacttaaggacctcctgaaggacatgaatcagtcatcgcttgccaaagagtgtcccctcagccagtccatgatctcctccattgtcaattccacctactacgccaacgtatcagccgcaaagtgccaggagtttggaaggtggtacaaacacttcaagaagacaaaggatatgatggttgagatggacagtctgagtgagttatcccagcagggcgctaaccacgtaaatttcgggcagcagccggttcctggaaacaccgcagagcagcctccttcaccagctcagctttctcacggaagccagccatctgtgcgcacccccttgcccaacctgcatcctggattagtgtccacaccgatctctccccagctagtcaaccagcaactggttatggcacagttattgaaccagcagtatgctgtgaacagactgctcgctcagcagagtctgaatcagcagtacctgaatcaccccccacctgtgagcagaagtatgaataaacctttggaacaacaggtcagcacaaacactgaagtctcttccgaaatttatcagtgggttcgcgacgaattgaagcgggctggaatctcccaggcggtgttcgcacgggtcgcgttcaaccggacccaggggctgttgagtgaaatcttgcgtaaggaagaggatcccaagaccgcatcccagtcactgttggtgaacctgagagctatgcagaactttctacagctgcccgaggccgagcgcgacaggatttaccaagacgagcgggaaaggagccttaatgctgcatctgctatggggcctgctcctctgatctccacccccccatctcgaccaccccaggtgaaaacagccacgattgctaccgaaaggaacgggaagcccgagaacaatactatgaacattaatgcatccatttatgatgagattcagcaagagatgaaaagggctaaggtttcacaggctttattcgctaaagtcgccgctactaaatcacagggctggttgtgtgaattactgcgctggaaggaagaccccagtcctgagaaccgaacattatgggagaacctgtccatgataagacgctttctgagtcttccacagcctgagcgtgacgccatctatgagcaggaatccaacgcagttcatcaccacggcgataggcctcctcacataattcacgtcccagcagagcagatacaacagcaacagcagcagcagcagcagcagcaacagcagcagcaagcccctccacctccacaacctcagcaacagccccagacagggccacgactccctccacggcagcctaccgtcgcttcccccgctgaatctgatgaggagaacagacagaaaactcggccaagaactaaaatatcagtcgaggccctcgggatactgcagtcctttattcaggatgtgggcttataccctgatgaggaagccattcagacgctctctgctcagctcgatctgccaaaatataccatcatcaagttttttcagaatcagcgctattacctgaagcatcatggcaagttgaaagacaatagcggcttggaagttgacgtggccgaatacaaagaggaagagcttctgaaagatctggaagaatccgttcaggacaagaacacaaatactcttttttcggttaaattggaggaagaactgagtgtggaaggaaacacggatataaacacagatctcaaggactag

SEQ ID NO: 239665 - DNA, 351 bp, synthetic construct
  misc_feature 1..351: note = Description of Artificial Sequence: Synthetic coding sequence
  source 1..351: mol_type = other DNA
atggatcacctgaacgaagcaactcagggcaaggaacatagtgaaatgagtaataacgtcagtgatcccaagggccctccagcgaaaattgcccgactcgagcagaatggctcccctctcgggaggggcaggctaggctctacaggtgcaaagatgcagggggtgcccttgaagcacagcggtcacctgatgaagacaaacttgcgtaagggtacaatgttgcccgtcttctgcgtggtggagcattatgagaacgccattgagtacgactgcaaagaggagcacgctgaattcgttctcgtccgaaaagacatgctgttcaaccagctcatcgagatggcacttctttag

SEQ ID NO: 239666 - DNA, 675 bp, synthetic construct
  misc_feature 1..675: note = Description of Artificial Sequence: Synthetic coding sequence
  source 1..675: mol_type = other DNA
atggatcacttgaatgaagccacccaagggaaagaacacagcgaaatgagtaacaacgtgagtgatcccaaaggcccacccgctaagatagcgcgtctggagcagaatggcagccctctgggcaggggaaggctgggatcaactggcgctaagatgcagggggtccctctcaaacactcgggccatttgatgaaaacaaatttgaggaaggggaccatgctacccgtgttctgtgtggtggagcattatgagaacgctatcgagtacgactgcaaagaggagcatgctgagttcgtcctggtccggaaggacatgctgttcaatcagcttatcgaaatggccctcttgtcactcgggtattctcactcttccgctgcccaggctaagggcctcatccaggttgggaagtggaatcctgttccgctgtcatatgtgactgatgcccctgacgccaccgttgccgacatgctgcaggacgtctaccacgtggtgacgttaaagattcagctgcactcatgcccgaagctggaggacttacccccagagcagtggagtcacacaaccgtgcgcaacgctttgaaagacttgcttaaagacatgaaccagagttctcttgccaaagagtgccctctatcacagtcaatgattagctcaatcgttaacagcacctactag

SEQ ID NO: 239667 - DNA, 216 bp, synthetic construct
  misc_feature 1..216: note = Description of Artificial Sequence: Synthetic coding sequence
  source 1..216: mol_type = other DNA
atggaccatctgaacgaagcaacacaggggaaggagcactctgaaatgtcaaataacgtgtcagatccaaagggcccaccagccaagattgcccgactggagcaaaatggatcaccattaggtaggggcaggctgggatctaccggcgcaaagatgcagggcgtccccctcaagcactccggccatctgatgaagacaaatctgcgcaaagggtag

SEQ ID NO: 239668 - DNA, 27 bp, synthetic construct
  misc_feature 1..27: note = Description of Artificial Sequence: Synthetic coding sequence
  source 1..27: mol_type = other DNA
atggaccacctgaatgaagctacctag

SEQ ID NO: 239669 - DNA, 519 bp, synthetic construct
  misc_feature 1..519: note = Description of Artificial Sequence: Synthetic coding sequence
  source 1..519: mol_type = other DNA
atggatcacctcaatgaagcgacccaggggaaagaacattctgagatgtcaaacaatgtctccgaccccaagggtccacctgccaagatagcgagactggagcagaatggatcgcctctaggcagaggacgtctgggctccaccggtgccaaaatgcagggagtgcctctgaagcactcgggacatctgatgaaaaccaacttgcgcaagggaactatgctgccggtgttttgcgtggtggaacactatgaaaatgccatcgagtatgattgcaaagaagagcatgccgagtttgtgctggttcggaaggacatgctgttcaatcaactgatagagatggctttgctgagcttggggtactctcactcaagtgccgcacaagcaaaaggcctgatccaggtggggaagtggaatcctgtacctctgtcctacgtcacagacgcccctgatgccaccgtcgcagatatgctccaggacgtgtatcacgttgtaacgctgaaaatccagttacacagatag

SEQ ID NO: 239670 - DNA, 2292 bp, synthetic construct
  misc_feature 1..2292: note = Description of Artificial Sequence: Synthetic coding sequence
  source 1..2292: mol_type = other DNA
atggatcaccttaatgaggctacccagggaaaagaacattctgagatgtcaaataacgtaagtgaccctaaggggcctcctgctaagattgcgaggctggagcagaatggctcgcccctggggagggggaggctgggctctaccggggctaaaatgcagggggtcccactcaaacattctggacatctcatgaaaacgaacctgaggaagggaactatgctgcctgtattctgcgttgtggaacactacgaaaacgcaattgagtacgattgcaaggaagagcacgcggagttcgttttggtgagaaaagacatgctgtttaaccagctcatagaaatggcattgcttagcctggggtattcgcattcgtctgcagcacaggccaaaggcctgatccaagtgggcaagtggaatcctgtgccgcttagctacgttacagatgcaccagacgcaaccgtagccgacatgctgcaggatgtgtatcacgtggtgaccctgaagatccagctccattcctgtcccaagttagaggacctccctccagagcaatggtctcacactactgtcaggaacgcccttaaagatttgttaaaggatatgaatcagagcagcctagctaaggagtgcccattgtcacagagtatgataagtagcatagtgaacagcacttattacgctaatgtgtccgctgctaagtgccaagaatttggacggtggtacaagcacttcaagaagacgaaggatatgatggtcgaaatggactcattgagcgagctcagtcagcagggcgcaaatcacgtgaacttcggccagcaacctgtgcccggtaacaccgctgaacaacccccatctcctgcccagctgtcacacgggagccagccctccgtgcggacacctctacccaatttgcatcccggactcgtaagcacccccatttctccccagctggtgaaccagcagctggtaatggcccagcttctgaaccagcaatatgctgtgaaccggctgttagctcagcagagtctaaatcaacagtatcttaaccaccctccacccgtgtctcgctccatgaataagcctctggaacagcaggtcagcacaaatactgaggtgtcttcagaaatctatcaatgggtgagggatgagctgaagagggctggtatttctcaagctgtgttcgcacgcgtcgccttcaatagaacccagggactgctctctgagatcctcagaaaggaggaagatccaaaaaccgcaagccagagcctactggttaatctgagggctatgcagaattttctacagctgcccgaagcagagcgggatcgcatttaccaggatgaacgggagagaagtcttaacgcggcaagcgcaatgggtccagcgcctcttatttccacacccccatctcgtcctccccaggtgaagaccgcaaccatcgccaccgaacgcaatgggaaaccagaaaataatactatgaacattaacgcctcgatatatgacgaaattcaacaagagatgaagagagcaaaggtcagccaggccctgtttgctaaggtggccgctactaagagccagggttggttatgcgagttgctccggtggaaagaagacccaagtcccgaaaaccgaaccctgtgggagaacctgagtatgatccgcagatttcttagtcttccacaaccagagcgcgacgctatttacgaacaggagagtaatgctgtgcatcatcatggtgaccggccaccccacattattcacgtgccagctgagcaaatccaacagcagcaacagcagcaacagcagcaacaacagcagcaacaggcacctcccccacctcaaccgcagcagcagccccagacgggtccaaggctccctcctcgccaacccacagtagcatcaccggcagagtctgatgaggaaaaccggcagaaaacccgccctcgcaccaaaattagcgtggaggccctggggatactgcagagctttatacaggatgtaggactgtatccggatgaagaggctattcagactctcagcgcgcagctcgatctgcccaagtacaccatcatcaaattcttccagaaccaacgctattacctgaaacatcacggcaagctcaaggacaactccggtctagaggtggacgtagccgaatacaaggaggaggaactactcaaggatttggaggaatccgtacaggataagaacacgaatactctgttcagtgtgaagctagaggaagaattgagcgttgagggtaacacggacatcaacacggacctgaaagattag

SEQ ID NO: 239671 - DNA, 393 bp, synthetic construct
  misc_feature 1..393: note = Description of Artificial Sequence: Synthetic coding sequence
  source 1..393: mol_type = other DNA
atggaccacctgaacgaggctacccaaggcaaggaacacagcgaaatgagcaataacgtttccgatcccaaaggccctcccgctaaaatcgcacggcttgaacaaaatgggtccccactgggtcgcggaagactggggagtactggggctaagatgcaaggtgtgcccttaaagcacagtgggcatctgatgaaaactaaccttagaaaaggtacgatgttgcccgttttctgcgtagttgagcactacgagaacgctatagagtacgactgtaaggaggagcacgctgaattcgtgttagtccgaaaggatatgctgtttaatcagctaattgagatggctctactgagccttgggtactcccattcttcggccgcacaggccaaaggttag

SEQ ID NO: 239672 - DNA, 2388 bp, synthetic construct
  misc_feature 1..2388: note = Description of Artificial Sequence: Synthetic coding sequence
  source 1..2388: mol_type = other DNA
atggaccacctcaatgaggctacacagggcaaagagcactctgaaatgtcaaataacgtctccgaccctaagggacctccggctaaaattgcccgtcttgagcagaacggttcccccctcgggaggggtagactgggctccactggcgctaagatgcagggcgtcccccttaagcatagtgggcatctgatgaagacgaacttgcggaagggaacaatgttacctgtgttttgcgtggtggaacactacgagaatgcaatagaatatgattgcaaagaggagcacgcagaatttgtgctagtgcgcaaagatatgctctttaaccagctcatcgaaatggctctgttgagccttggatattcccattccagcgccgctcaggccaagggactcatccaggtgggcaagtggaatcctgttcccctgagctacgtgaccgatgcccctgacgcgacagtagcagacatgctccaggacgtataccacgttgtcaccctcaaaatccagctgcactcctgtcccaaattggaggacctgcctcccgagcaatggtctcacaccacggttcgaaacgcgctcaaggacctcctgaaagacatgaatcaatcaagtttggctaaggagtgtcctctgtcccagagcatgatctcttctattgttaacagcacatattacgcaaacgtgtctgccgctaaatgtcaggaattcggtcgctggtacaagcacttcaagaagactaaagacatgatggtagagatggattcactgtcagaactgagccagcagggggcaaaccacgtgaatttcggccagcagccggtgcccggaaatactgccgagcaacctccttctcccgcacagctgtctcatggcagccagccatctgtccggacccctctccccaacttgcatcccggtctggtgtctacccccatttcaccccagttagtgaaccaacaactagttatggcgcagcttttaaatcaacaatatgcagttaaccgtctgttagcacaacaaagcctaaatcagcagtaccttaaccacccaccgcctgtgagtagatctatgaataagcccctggagcagcaggtttccaccaatactgaggtctcttccgagatctaccagtgggtgagggatgagctgaaaagagccggaatctctcaggccgtcttcgcacgggtggctttcaacagaacacaaggattattatccgagatcttgcggaaggaagaggaccccaagactgcaagccagtcgcttcttgttaatctcagggcaatgcaaaactttctgcagctcccagaagctgaacgcgacaggatctatcaggatgagagagaacgcagtctgaatgctgcatctgctatggggccagctccactgattagtacaccaccaagcaggcctcctcaggttaagacagccaccatcgctaccgaacgtaacggcaagccagaaaacaatactatgaatataaatgcctctatctatgatgagatccagcaagaaatgaagagggccaaggtcagtcaggcgttatttgcgaaagtggcagccaccaaatctcagggatggctgtgcgagttgttgcgttggaaagaggacccttctcccgagaatagaacactatgggagaacctttccatgattcggagattcctaagcctccctcagccagaaagagatgctatctatgaacaggagtccaatgccgtccaccaccacggtgatcgacctcctcacataatccatgttcccgctgagcagattcagtcccctagcccgacaaccctggggaagggcgagtctcgcggagtctttctgccaggcttacctactcctgccccatggctgggggctgcgcctcagcaacagcagcaacagcaacagcagcagcagcagcaacagcaggccccacctccgcctcaaccccaacagcagccccagactggccctaggctgccccctaggcagccaacagtggcatcgcctgcggaatcggatgaagagaaccggcaaaagacaagaccccgaaccaagattagtgttgaggcactgggaattttgcaatccttcatccaggatgtgggattgtacccagacgaggaggcaatccagacgctgagtgcccagctggacctgccgaagtatacaatcatcaaattctttcagaatcagcgctattacctgaagcaccacggcaaacttaaggataattccggattggaagtggacgtcgcagagtataaggaggaagaactgctcaaagacctcgaagaatctgtgcaggataaaaacaccaatacattgtttagcgtaaaacttgaagaggaactgtccgtggagggaaatacagacattaatacggacctgaaagattag

SEQ ID NO: 239673 - DNA, 2202 bp, synthetic construct
  misc_feature 1..2202: note = Description of Artificial Sequence: Synthetic coding sequence
  source 1..2202: mol_type = other DNA
atggagcgcaggagcgaatctccctgtctgagggatagtcccgatcgtcgctctgggtcgcccgacgtcaaaggaccgccacctgtcaaagtcgctagattggagcaaaatggaagtcccatgggggctcgaggcagaccaaacggggctgttgccaaagctgttggaggtctcatgattcccgtgttttgcgtggtggagcagttagatgggagtctggaatacgacaatcgagaggaacacgccgagtttgttctggtacgtaaggacgtcctcttttcgcagctcgtagagacggccttacttgcacttggatactcccactcgtctgcagctcaagcccaaggtattatcaaattggggaggtggaacccactgccactgagctatgtgaccgatgcacctgacgccactgttgcagacatgttgcaggatgtctaccatgtggtgacactgaagatccagctgcagagctgcagcaaactcgaggaccttcctgctgagcaatggaaccatgcaacagtcagaaatgcactgaaggaacttttgaaagaaatgaatcaatccaccctggcaaaagagtgccctctctcgcagagcatgatatcaagcatcgtgaactccacctattacgcaaatgtcagcgcaacaaaatgccaggaattcgggcgttggtataaaaaatacaagaagatcaaggtagagagggtggaacgcgagaacctgagcgactattgtgtgctgggccaaaggcctatgcatcttcccaatatgaatcagttggcaagcctgggaaaaaccaatgagcagtccccccacagtcagattcaccacagtacacctataaggaatcaggtgcctgcactccaacctatcatgtccccaggcctcctcagcccccaactgtccccgcagctggtgcgccagcagattgccatggcccacctcattaaccaacagattgccgtgtcccgcctgcttgcacaccagcatcctcaggcaatcaaccagcagttcctcaatcacccccctatccctagggccgttaagccggagcccaccaatagctctgtagaagtttcgcccgacatataccagcaagtgagggacgagctcaagcgcgcttcagtttcacaggctgtttttgctagagtcgccttcaacagaacgcagggtctgctctccgaaattctccgcaaagaagaggaccctaggacagcctctcaatccctgctcgtgaatctccgcgcaatgcagaacttcctgaatctaccagaggtagagcgtgatagaatctatcaagatgaacgcgaaaggagcatgaatccgaacgtttcaatggtcagctccgcatcctcctccccatccagctctcggacacctcaggcgaaaacatctacccccactacagacctccccataaaggtggatggggctaatatcaacattacggcagctatttacgatgaaatacagcaggaaatgaagagggccaaggtgtcacaggctctctttgcgaaagtcgcagccaacaaaagccaaggttggctctgcgagctgcttaggtggaaagagaacccctctccagagaataggactctttgggaaaatctctgtacaataagacggttcctgaacttgccccagcatgaacgggatgtcatctacgaggaggaatcccgccatcaccattcagagagaatgcagcacgtggtgcagctgccccctgagccggtgcaagtgctgcacagacaacagtcacagcctgccaaggaatcaagccctccacgcgaggaagcgccacctccccctcctcccaccgaggacagctgcgctaaaaagcccaggagcaggactaagataagccttgaagcgttgggcattctgcaatcctttatccatgacgttggactctaccctgatcaggaagcaatccatacactatctgcccagctcgacctgccgaagcatacgatcataaagttctttcagaaccagaggtaccatgtgaaacatcacggcaaactcaaggagcacctcgggtccgccgtggacgtggcagagtacaaagacgaagaactgcttacggagtcagaggaaaacgactcagaggaaggcagcgaggaaatgtataaggtagaagcagaggaagaaaacgcggacaagagtaaggcagctccggctgagatagaccagcggtag

SEQ ID NO: 239674 - DNA, 2202 bp, synthetic construct
  misc_feature 1..2202: note = Description of Artificial Sequence: Synthetic coding sequence
  source 1..2202: mol_type = other DNA
atggagcggaggtccgagagtccttgcttgcgagattcccctgatcgcagatcaggttcacccgatgtgaaggggcctcccccagtaaaggtcgcccgtctggaacagaacggctccccgatgggcgcaagaggtaggcccaatggggctgttgcgaaggcagtaggaggactgatgattccagtattctgcgtggtggagcagttagacgggagtctggagtatgataaccgcgaggaacacgctgagttcgtgctcgtgcgtaaagacgtactcttctcccagctggtcgaaactgccctcctagcactgggatactctcattccagcgccgctcaagcccaaggtatcatcaaacttggcaggtggaatccactcccattatcatacgtgacagatgcccctgatgctacagtcgcggatatgttacaggatgtgtatcatgtcgtcaccctgaagatccaattgcaatcttgttctaaactcgaggatctcccggcagagcagtggaatcatgctactgtcagaaatgccctaaaagaactgttgaaggagatgaatcagtcaacactcgccaaggagtgccccctttcacagtcaatgatcagctcaattgtaaactcgacttactacgcaaatgtgtctgccacaaaatgtcaggaattcggcaggtggtacaaaaagtacaaaaagataaaggttgaacgtgtagaacgtgaaaatctgtctgactactgtgtgctgggtcagcggcctatgcacctgcccaatatgaaccagttagcatctttaggcaaaaccaatgaacagtctccacatagtcaaatccatcattccacacccataaggaaccaggtgcctgcccttcagcctatcatgtctcccggtcttctctctccacagctaagtccccagctggtcagacagcagatcgctatggctcacctgataaatcagcaaattgcagtgtctcgtctgctggcccatcagcatccacaagcgataaatcagcagttcttgaatcaccctcccattccaagagctgttaagccagaaccaaccaattcctctgtggaggtcagtccagatatataccaacaggtccgcgacgagctgaagcgtgccagcgtgagccaggcagtatttgccagagtggcctttaaccggactcaaggcttgctttctgaaatcctcagaaaagaggaggacccacgaaccgccagccagtctctcctggtcaacttacgcgctatgcagaattttttaaacctgcctgaggttgaaagagacagaatttatcaggatgagcgggagaggtctatgaatcctaatgtcagcatggtgtcctctgcttcctcttcacccagcagcagccggaccccccaagcaaaaaccagcacccctactacggacctgccaattaaggtggatggtgccaatatcaacatcactgctgctatatatgatgaaattcagcaggagatgaagagagcaaaggtgagtcaggcccttttcgcaaaggtggccgctaataagtcgcagggatggctgtgcgagcttcttagatggaaagagaatccatcccccgagaaccgcacactctgggaaaatctttgcacaatccgtcgctttcttaatctccctcagcatgagcgcgatgtcatatatgaggaggagtcccgacatcaccattcggagcggatgcagcatgtcgtgcagttaccccctgaacccgtgcaggtattgcacaggcagcagagccaaccagcaaaggaaagtagtcctcccagggaggaggcaccacccccaccaccaccgactgaagactcatgtgcgaaaaaacctagaagtcgcactaaaattagtttagaagccctgggcatccttcagtcttttatccatgatgtgggtctctaccccgaccaggaggcaattcacaccttaagcgcacagttggacctgccgaagcacacaatcatcaaatttttccagaaccagaggtaccacgttaaacaccacggaaaactgaaagagcatctgggtagcgccgtggacgtggctgagtataaagacgaagagctgctaactgaaagcgaagaaaatgatagcgaagagggctccgaagagatgtacaaagtcgaagctgaggaggagaatgccgacaaaagcaaggctgcccctgccgagattgaccaaagatag

SEQ ID NO: 239675 - DNA, 1848 bp, synthetic construct
  misc_feature 1..1848: note = Description of Artificial Sequence: Synthetic coding sequence
  source 1..1848: mol_type = other DNA
atggaacgacgctcagagagcccctgcctcagagatagccccgacaggagaagtggctctcctgacgttaaaggcccacctcccgtgaaggtggccagactcgaacagaatggatccccgatgggagcacgcggaaggcctaatggagcggttgcaaaggccgtcggaggcctgatgatcccagtcttttgtgtcgtggagcagttagacggctcgcttgaatatgacaatagagaagagcacgccgaatttgttctggtgagaaaggacgttcttttctctcagctcgttgaaaccgccctcctggccctcggttattcccattcaagtgctgctcaggctcaggttgagcgtgtggaacgcgaaaatttgtccgattactgcgtgctgggacagcgccctatgcacctgccaaacatgaatcagctggcctctctcgggaagacaaatgaacaaagtccccacagccagatacaccacagcacgcccatccggaaccaagtcccggctctacagccaatcatgtcccccggattactgagccctcaacttagtcctcagcttgtcaggcagcaaatagctatggctcacctaatcaatcagcagatagccgtttcccgcttactggcacaccagcacccccaggccattaaccaacagttcttaaatcacccacctattcccagagcagtgaagccagagccgaccaattcatcggtcgaggttagcccagacatctatcaacaagttcgcgatgagctgaagagggcaagcgtgagccaggctgttttcgctcgcgttgcctttaatcgaacacagggacttctcagcgaaattctcaggaaggaggaggatcctagaaccgctagtcagtccctcctggtaaatctgagggccatgcagaatttcctcaatctgcctgaagtcgagagagataggatctaccaagacgaaagagagcggagtatgaatcctaatgtttccatggtctcctcagcttcgtcttcaccttcctccagcaggactccccaggctaaaacaagcaccccgacaacggatctgcctatcaaggttgatggtgccaatatcaatatcaccgcagccatctatgatgagattcagcaggagatgaaaagggcaaaagtgagccaggcattgttcgctaaggtggctgccaacaaatcgcaaggttggctctgcgaattactgaggtggaaagagaatccctcacctgagaaccgcacgttatgggagaacttgtgtactattcggcgatttctcaatctgccccagcatgaacgcgacgtcatttacgaggaggaatcccggcatcatcacagcgaacgcatgcagcacgtcgtgcagctgccaccggagcccgtgcaggttctgcaccggcagcagtcccagccagccaaggaaagttccccaccgagggaggaagctcctcctccaccaccgccaacagaagattcttgcgctaaaaaacctcgatccaggactaagatatccctcgaagctctgggaatccttcaatcttttattcacgatgttgggctgtatccggaccaggaagcaattcacacactatctgcacaactggacctgccgaagcatacaattattaaatttttccagaatcagcggtaccacgttaaacatcatggaaagttgaaggaacacctgggcagcgcggtggacgtggctgagtataaagacgaggaactgctcacagagagcgaggagaacgattcagaggaaggctccgaggagatgtacaaagttgaggccgaagaagagaatgcggataagagcaaagcggcacctgctgagattgatcaaaggtag

SEQ ID NO: 239676 - DNA, 2202 bp, synthetic construct
  misc_feature 1..2202: note = Description of Artificial Sequence: Synthetic coding sequence
  source 1..2202: mol_type = other DNA
atggagcgccgaagcgagtcaccgtgcctgcgcgatagtcccgaccgcagatcagggagccccgatgtaaaaggacccccacccgtcaaggtagccaggcttgagcaaaatggctcccccatgggggctcgagggaggcctaatggggctgttgccaaggctgtggggggtctcatgataccagttttttgtgttgtggagcagcttgacggctccctggagtacgacaaccgtgaggagcatgccgagttcgttctcgtgcgcaaggacgtgttgtttagtcagttggtagagactgccctgctggcattggggtactcccattcatctgcagctcaagcccaggggattatcaagctgggacgctggaatcctcttcctcttagctatgtcaccgacgctcctgacgctacagtagcagacatgcttcaggatgtgtaccacgtggttactctgaagattcaattacaatcatgtagcaaactggaggatcttcccgcagagcagtggaatcacgccaccgtgcggaacgcccttaaggagctcctgaaagagatgaaccagagcacgctcgccaaggaatgccccctgtcacagtcaatgatttcttcgatagtgaactctacttactatgccaacgtaagtgctacgaaatgccaggagtttggtaggtggtacaaaaaatacaagaagatcaaagtggagagggttgaacgcgagaacctgtcagactactgcgtgctgggccagcggccaatgcatttgccaaacatgaatcagctggcgagccttggtaagaccaacgaacagagcccccatagtcaaattcatcactcaacgcctattcgcaaccaggttcccgctctgcaacctatcatgagccccggattgctaagccctcaactcagccctcagctggtccggcagcaaatcgcgatggcgcacctgatcaaccagcagatcgcggttagtcgtctcctcgcgcatcagcacccccaggccataaatcagcagtttctgaatcacccgcctatccccagggcagtaaaaccagaacctacgaacagttctgttgaagtcagcccagacatttatcaacaggtgcgcgatgagctaaaaagagcttccgtctcacaggctgtgtttgccagagtggcatttaacagaacacagggcttgctaagcgagatcctgagaaaagaggaggatccacgaacggcctcccaatccctcctggtgaatcttagggcaatgcaaaatttcctgaatcttccagaggtggagagggatcgaatatatcaggacgagcgtgagagatcgatgaaccccaacgtcagcatggtgtcgtctgcaagctcctctccctccagcagcagaacgccacaggctaaaacatcaacgcctaccaccgacttacccatcaaagtggatggcgcaaacatcaacattaccgccgctatatacgacgagatccagcaagagatgaaaagagctaaagtctctcaagctctcttcgctaaagttgccgcaaacaaatcccagggttggctttgcgagctgttgcgctggaaagagaatccatccccagagaacaggacactctgggagaacctgtgtacgatcagacggttcttgaaccttccccagcacgagcgcgatgtgatctacgaagaggagtcacggcatcatcacagtgaacgcatgcagcacgtcgtccagctgccacccgagccagttcaggtcctccatagacagcagtctcagcctgcgaaggagtctagccctcctagagaggaagccccaccaccacctcctccaactgaagactcctgcgctaagaagccaagatctcggacaaaaatctccctggaggccctcggaatactacagtcctttattcacgacgtggggctgtatcccgaccaggaggcaattcataccttgtctgcccagctagatctccctaagcacacaatcattaagttcttccaaaatcagcgttaccatgtgaaacaccacggcaaactcaaggagcacctcgggtccgcagtggacgtggccgagtacaaagatgaagagctgcttactgagtctgaggaaaatgattcagaagaagggagtgaagagatgtataaggtcgaagctgaggaagagaatgcagacaaatccaaggctgcaccagccgagattgaccagagatag

SEQ ID NO: 239677 - DNA, 2748 bp, synthetic construct
  misc_feature 1..2748: note = Description of Artificial Sequence: Synthetic coding sequence
  source 1..2748: mol_type = other DNA
atggcggaaacactgtccggcctgggagacagcggtgctgctggcgctgccgctttatcaagtgcttctagtgagactggtacccggagattatctgacctcagagtcatcgacttgcgcgcagagcttaggaaaaggaatgtggatagcagcgggaataagtccgtgctgatggagagactgaagaaagcaatcgaagacgagggaggcaacccggatgagatcgagattacctctgaggggaataagaagacttctaagcgtagttctaagggcaggaagcccgaggaggaaggggtagaggacaatggccttgaagagaattccggcgacggacaggaagacgtggagactagccttgagaacttacaggacatcgatatcatggacatcagtgtcctggatgaagcggagattgacaacgggtctgtggccgactgcgtcgaggacgacgatgcggacaacctccaagagagcctttctgacagccgggaacttgtcgagggagaaatgaaggagttgccagagcagctccaggaacacgcgatcgaggataaggaaactatcaacaacctggatacaagttccagcgattttacgatcctccaggagatcgaagagccctccctcgagcctgaaaacgaaaagatcctggacatcctgggcgagacttgcaagtcagagccagtgaaggaagagagcagcgaacttgaacagccgtttgcccaggacacgagctccgtggggccagatcgtaaactggcagaggaggaggatctcttcgactctgcgcaccccgaggaaggtgacctcgacctggcctcagagagtacagctcacgcccaatctagcaaagcagactcactgctagcagtggtgaaacgcgagccagccgagcaaccaggcgatggagagcgcactgattgtgagcccgtcggtttagagcctgctgtcgagcagtcaagtgctgctagtgagctagcagaggcctctagtgaggagctggcggaagcaccgaccgaggctccttccccagaggcacgagattctaaagaagacggcagaaaattcgacttcgatgcatgtaatgaggtgcctcccgcaccaaaggaatcatccacaagcgaaggcgctgaccaaaaaatgtcaagccccgaagacgatagtgacactaaacggctgtcaaaagaagagaagggcagaagcagttgcgggcgaaacttctgggtaagtggactgtccagtaccaccagggccactgacctgaagaacctgttcagcaagtacggaaaagtggtgggtgctaaagtggtcacaaatgccagaagcccaggcgctaggtgctatggcttcgtgacaatgagtaccgcagaagaagcaactaagtgcataaatcaccttcataagaccgagctgcacggaaagatgatatccgtggagaaggcgaagaacgaacctgtagggaagaagaccagcgacaagagagactccgatgggaagaaggaaaaaagcagtaatagcgatcgcagcacgaaccttaagagggatgataaatgtgacaggaaagatgatgcaaagaagggggacgatgggtccggtgagaaaagcaaggatcaggatgaccaaaaaccaggaccatccgaacggtctcgtgctaccaagtcaggctctagaggtacagaaaggaccgtggttatggacaagagcaaaggagtacctgtgatcagcgtcaagacctcagggagcaaggagcgcgcttctaagtctcaggacagaaaatctgctagcagagagaagaggtctgtggtcagttttgacaaagtgaaagaaccacgaaagtctcgggactccgagtctcactcacgcgtacgcgagcggtctgaaagagagcagcgcatgcaggcgcagtgggaacgggaggaacgcgagaggctggaaattgctagggaacgcctggccttccagcggcagagattagagcgcgagcgcatggaacgagaacgcctggaacgggagcgaatgcatgttgagcatgagcggaggcgcgagcaggagcggatacaccgagagcgtgaggagctgcggagacagcaagaactgcggtacgagcaggaaaggaggccagcagtgcggcgaccttacgacctggaccgcagggatgatgcctactggccagaagcgaagcgagcagcgctggacgaacgctaccactctgacttcaatcgtcaggatagatttcacgactttgaccaccgagatagagggcgttaccctgatcattccgtcgacagaagagagggatctcgttccatgatgggcgagagagaagggcagcattatcccgagcgacacgggggaccggagcgccatggcagagactcgcgcgatgggtgggggggttacggatccgataagcgcatgtccgaaggaagaggtttgcctcccccacccagaagggactggggagatcacggccgtagagaggacgacagatcctggcagggaacagctgatgggggaatgatggaccgggatcataagcgttggcagggcggagaacggtccatgtcaggtcactcgggacctggtcacatgatgaacaggggcggtatgtcagggcgaggatcctttgccccaggcggagcaagcaggggtcaccctattccccacggaggaatgcagggtggctttggaggacaatcaagggggagcagacctagcgatgccagatttacacggaggtactag

SEQ ID NO: 239678 - DNA, 2244 bp, synthetic construct
  misc_feature 1..2244: note = Description of Artificial Sequence: Synthetic coding sequence
  source 1..2244: mol_type = other DNA
atgaaagaactgcctgaacagctccaggaacatgcaatagaagacaaagagacgatcaacaatttagatacatcaagtagtgacttcaccatcctgcaggagatcgaggagccctctcttgagcccgaaaacgaaaagattctggatattctgggagagacatgtaaatcagaacccgtgaaagaagagagcagcgaacttgagcaaccgtttgctcaagatacatcatcagtagggccagatcgaaaattggctgaggaggaagacttgtttgactcggcccatccagaagaaggggacctcgacttggcatctgagagtactgcacatgcccagagttcgaaggccgactccctgctggccgtggtgaagcgcgagcccgctgagcagcccggtgacggtgagcgcactgactgcgagcccgtcggtctcgaaccggctgtggagcagtcctcagccgcatctgagcttgccgaagcttcaagcgaggagctggctgaggcacctaccgaggcacctagcccggaagccagggactccaaagaggatggcagaaaatttgacttcgacgcctgcaacgaagttccacctgctcctaaggagtcaagtaccagcgagggtgcggaccagaagatgtcaagtcctgaggacgactcagacaccaagagattgtccaaagaagagaagggaaggtctagttgcgggagaaatttttgggtctcaggcctgtcttccaccactagggccacagatcttaagaacctgttttccaagtatggaaaagtcgttggtgccaaggtcgtgacaaatgctcggagccctggtgccagatgctatgggtttgtaaccatgtcaactgccgaggaggccaccaagtgcatcaatcatttacacaagactgagctacatggaaagatgattagcgtggaaaaagctaagaatgaaccggttggcaaaaaaacctccgacaagcgagacagcgatggcaaaaaggaaaagtcctccaactctgaccggagtaccaaccttaagcgagatgataagtgcgacagaaaagatgacgctaaaaaaggggatgacggcagcggtgaaaagtcaaaggatcaggatgatcagaagcctgggccatccgagagatcccgggctaccaaatccggctcgcgcggaaccgagcgaactgttgtgatggataaaagcaaaggagtgccggtgatctctgttaaaacttcagggtcaaaagagagagcttctaaatcgcaggacagaaaatccgcatcacgtgagaagcgatccgtggtaagcttcgataaggttaaagagcctaggaaatctcgtgacagcgagtctcatagccgcgtgcgggagcggagcgaaagggaacagaggatgcaggcccagtgggagagggaagaacgcgagaggctcgaaatcgctagagaaaggttggcttttcagagacagcggctggaacgtgaacggatggagagagagaggttggagcgggaacgcatgcatgtggagcacgaacgcagacgggagcaggagaggattcaccgggagagagaggaactgaggaggcagcaggaactgaggtacgaacaggaacgcagaccagccgtgcgccgaccttacgacctagaccgacgcgatgacgcatactggccagaggccaaacgggctgcacttgatgagaggtatcactccgattttaaccgccaagatagattccacgattttgatcaccgcgaccgcggaagataccccgaccacagcgtcgaccggagggaaggctcgcgtagcatgatgggcgagcgggaaggacagcattaccccgaaaggcacggcggtcctgagcgacacggccgtgactcaagagatgggtggggagggtatggatctgacaaacggatgtccgaaggaagagggctgcctccacctccaagagggcgacgggattggggcgatcatggtcgacgcgaggacgatcgtagctggcaggggacggctgatggaggtatgatggacagagatcataaaagatggcagggaggggaacgtagcatgtctggccacagcggccctggtcacatgatgaatcgcggtgggatgagcgggcgaggctctttcgcaccaggaggggcttcaagggggcatcccataccacacggtggcatgcagggcggatttggaggacaaagtagggggtcccggccaagtgatgccaggttcacgagaagatattag

SEQ ID NO: 239679 - DNA, 2547 bp, synthetic construct
  misc_feature 1..2547: note = Description of Artificial Sequence: Synthetic coding sequence
  source 1..2547: mol_type = other DNA
atggcagagaccctgagcggccttggtgacagtggcgcagccggtgccgctgctctttcttcagcctcctcagagacgggtacacgtcggcttagcgatctgcgtgtaatagacctgcgcgctgagctgcgcaagaggaacgtggattcttctgggaataagtccgtgctcatggaaagactaaagaaagcaattgaggatgagggtggcaatccagatgagattgagataacctcggaaggcaataagaagacctctaagcgatcaagtaagggcaggaagccagaggaggagggcgtggaagacaacggcctggaggaaaacagcggagacgggcaaattgaggacaaagagactatcaataacttggatacgtccagttccgacttcacaattctccaggaaatcgaagaaccctccctggagccagagaacgaaaagatcctggatatcctcggtgaaacctgcaagtcggaacctgtaaaggaagaaagctctgagttggagcaacccttcgcccaggacacttcttcggtgggccctgatcgcaagttagccgaggaggaagatctctttgattctgcccatcctgaggagggcgatttagacctggcaagcgagtctacagcacacgcccagagcagtaaggcagatagtctcctcgccgttgtaaaacgtgaacccgcagaacagcccggagatggagaacgcactgattgcgaaccagtggggctcgaacctgcggttgagcagtccagtgctgcttctgaactggccgaagccagttctgaggaacttgctgaagcaccaaccgaagctccaagccctgaggcaagagactccaaagaggatggtcggaagtttgatttcgacgcctgtaacgaagttccgccagccccaaaagagtcttccaccagcgagggcgctgatcagaaaatgagctcgcctgaggatgatagtgataccaaaaggctctccaaggaagaaaagggcagatctagctgtggaagaaacttttgggtctccggcctatcttcaactacccgggcaacagaccttaagaatctgtttagcaagtatggcaaagttgtaggagcaaaggttgttacaaacgcgagatccccgggtgctaggtgttacggattcgttaccatgtctaccgcggaggaggcaactaaatgtatcaaccaccttcataagactgaactacacggaaaaatgataagcgtcgaaaaagcaaagaatgaaccagttggtaaaaagacctcggacaaacgggacagtgacggtaagaaggagaagagcagtaacagtgataggagcacaaaccttaaacgggacgacaagtgcgacaggaaagacgacgcaaaaaaaggtgacgatggctcaggggaaaaatctaaagaccaggacgaccagaaacccggtccatccgaaaggtcgagagctacaaaatctggcagtagaggcaccgagcggactgtggtgatggataaatctaagggagtcccagttatttcggtgaaaactagcggatcaaaggaacgagctagcaagtctcaagaccgcaaaagtgcaagcagggaaaaacgctctgtggtttcctttgacaaggtcaaagagccaagaaagagcagggatagcgagagccactcaagggttagagaacgttctgagcgcgagcagaggatgcaagcccagtgggaacgtgaagagcgggagcggctcgaaatcgctcgtgaacgactggcctttcaaagacagcggctggagcgagagcggatggaacgagagagacttgaacgagagaggatgcatgtggagcacgagagaagaagggagcaagagcgcatacatagagaaagggaggaactgcggaggcagcaagagcttagatacgaacaagagagaagaccggctgtgcgaaggccctatgacctcgacagacgcgatgatgcgtactggccagaagcaaaacgggctgcgctggacgagaggtatcacagcgactttaaccggcaggataggttccacgattttgatcatagggatcgcggaaggtacccagaccattcagtggataggagggagggctctcgttctatgatgggtgaaagggaaggacagcattacccagagcgacatgggggaccagaacgacatggccgtgattcccgagatggatggggaggatatgggtcagacaaaagaatgtctgaaggtcgtggcctaccacccccacctagaggcagaagggactggggagatcatggtaggagggaggacgatcggagctggcaaggaacggccgacggcggtatgatggacagagaccacaaacggtggcaggggggagagaggtcgatgtcagggcactcaggcccaggacacatgatgaacagggggggaatgtctgggcgaggatccttcgcaccaggaggcgcatcacgaggacaccccattcctcacggtggcatgcaaggtgggttcgggggtcaaagtcggggatcaagaccatccgacgctcggttcacgcgaagatactag

SEQ ID NO: 239680 - DNA, 2280 bp, synthetic construct
  misc_feature 1..2280: note = Description of Artificial Sequence: Synthetic coding sequence
  source 1..2280: mol_type = other DNA
atgaaggtagtaattctcaccaagttgaaacttcccccacgggagacccgaaaacatcagagggggctggccaagattgaggacaaagagacaattaataatctggacacatcgagtagcgatttcactatactccaggaaatcgaggagccatcactggagcctgagaatgagaagatcttggatatactaggggagacgtgcaaatccgaaccggtaaaggaagaatcaagcgagctggaacagccatttgcccaagatacttctagcgtgggacctgatcgaaagctggctgaagaggaggacctgtttgattcagctcatccagaggaaggggacttggacctggccagcgaaagtacggcccacgctcagtcatctaaggctgattccctgctcgctgttgtcaagagggaacccgctgagcagccgggtgatggtgagcgaaccgactgtgagcccgtcgggctcgaaccagcagttgagcaatccagcgcagcaagcgaattggctgaggcatcatctgaagaactggcagaggctcccactgaggccccatcaccagaggctagagattcgaaagaggatgggagaaaattcgatttcgacgcttgcaacgaagtgcctcccgctcccaaggagagctcgacctctgagggtgcagaccagaagatgtcatctcccgaagacgactctgacactaagcgactctctaaagaagagaagggccgttctagctgcggacggaacttttgggtctcgggactgtcatccaccacccgggcaaccgacctcaagaacctctttagcaagtacggcaaggtcgtgggggcaaaggtcgtgacaaacgcacgctccccaggggctcgatgctacggttttgtaactatgagcacagcagaggaagcgactaagtgtataaaccaccttcacaagacggagctgcacggaaaaatgatttcagtcgaaaaagccaagaacgaacctgtcggtaagaagaccagcgacaaacgcgattccgatggtaaaaaagagaagagtagcaattcagaccgctcaaccaacctgaagcgagacgacaagtgcgatcggaaagatgacgcaaaaaagggagacgacggaagcggggagaaaagtaaggatcaggatgaccagaagcccggaccctcagaacggtcccgcgctaccaagagtgggtctagaggcaccgagcggaccgtggtcatggataaaagcaaaggggtcccggtgatcagcgtaaagacttctgggagtaaagaacgggcaagtaaatcacaagaccgcaagagcgcttctcgcgaaaaaaggagtgtagttagcttcgataaggttaaagagccaaggaaaagccgggacagcgaaagccatcgggtacgtgagcgctctgagagagaacagcgtatgcaggcccaatgggagcgcgaggaaagggaaaggctggaaatcgcacgtgagcgtctggccttccagagacagcgtctagagcgggaacgaatggagagggagaggctcgaaagagaacgtatgcacgtcgaacatgagcgccgacgagagcaggaacggattcatcgcgagagggaggaacttcgacgccagcaagaactgagatacgagcaggagcggaggcctgcagtgcgccgaccttatgaccttgatcgtagggatgacgcctattggcccgaagctaaaagagcggctctggacgagcgatatcactctgacttcaatcgacaggacaggttccacgatttcgaccatcgtgacagaggcagatacccagatcatagtgtggatagacgggaaggctcacgctccatgatgggtgaaagagaggggcagcactatccagaaaggcatggaggcccagagcgacacggtcgagattcacgagacggctgggggggatatggctctgataaacgaatgagcgaggggagggggctgccgccaccaccgagggggagaagagattggggcgatcatggtaggcgcgaggacgatagaagctggcagggcacggcagatggtggtatgatggacagagatcacaaacggtggcagggtggagaacggagcatgtcaggacacagcggcccaggtcatatgatgaatcggggaggcatgtcaggcagaggatcattcgccccaggcggtgccagtcgcggacatcccatcccccacggcggaatgcagggcggatttggaggtcagtctagaggaagccggcctagcgatgctagattcactcgtagatattag

SEQ ID NO: 239681 - DNA, 2439 bp, synthetic construct
  misc_feature 1..2439: note = Description of Artificial Sequence: Synthetic coding sequence
  source 1..2439: mol_type = other DNA
atggccgagacacttagcggtctaggtgacagtggagcagctggagctgcggctctgtctagcgcctcctccgaaaccggtactaggaggctctcagacctgagggtgatcgatctgcgggcagaattgcgcaaaaggaacgtcgattcctcaggtaacaagtccgttctgatggagcggcttaaaaaagctatcgaagacgagggagggaatcctgacgagatcgaaattacctccgagggtaacaagaaaactagcaagagaagcagcaagggacgaaagcctgaggaggagggagtagaagataacggtcttgagcccgagaatgagaaaattttagacattctgggcgaaacctgtaaatctgagccagtcaaagaagaatcaagcgagctcgaacagccattcgcacaggatactagtagcgttggcccagatcggaagcttgctgaggaggaagatttgtttgactccgcacatcccgaggaaggggatttagatctggcctccgagtctaccgcccacgcccaatcttctaaagccgattcactactggccgtagtaaagcgtgaaccagcggagcaacctggcgacggcgagagaaccgattgtgaacccgtggggctcgagcctgcggttgaacagtcttcggccgctagtgagctggcagaagccagtagtgaagaattggccgaggctcctacagaagctccttcacccgaagccagagactccaaggaagatggtaggaagttcgatttcgacgcttgcaatgaggtgcccccagctcctaaggaaagctctaccagcgagggggcagaccagaaaatgtctagccctgaggacgatagtgacacgaagcgccttagtaaggaagaaaagggaaggtcatcctgcggtcgcaatttctgggttagcggactaagttcgactaccagagccactgatttaaagaacttattcagtaagtacggcaaagtagtgggtgctaaggtggttactaatgctagatcacccggagccagatgctatggctttgttaccatgtcgaccgccgaggaggccacaaagtgcattaaccaccttcacaaaactgagctccacggaaaaatgatttcggtggaaaaagctaaaaatgaacctgtcggtaaaaagacttccgacaaacgcgatagcgatggcaaaaaagaaaaatcttcaaattccgaccgcagcactaatctgaagagagacgacaagtgcgaccgtaaagatgacgcaaagaaaggtgacgacggaagcggcgagaaatccaaggaccaagacgaccagaagcctgggcctagtgagagaagtagggccaccaaatccggatctcgcggtactgaaaggaccgtggtcatggataagtctaagggcgtgccagtaatttcggtcaagacctccggaagcaaggagcgggcttctaaatcccaggatcggaagtccgcgtctcgagagaagcggtcagtagtaagtttcgataaagtgaaggagcccagaaaatccagagattcagagtcccatagccgggtccgtgagaggagcgaacgagaacagcgcatgcaggctcaatgggaaagggaagagcgtgagcgattggagattgctcgtgagcgtctggcattccaacgccagagactggagagagagagaatggagcgcgaacgtcttgaacgggaacgtatgcacgtagagcacgagagaaggagggaacaggagcgcattcacagggagagagaagagctgcgccgacagcaggagctgagatatgaacaggagcggcgacctgcggttcgcaggccgtatgatttggaccgcagagacgatgcatactggccagaagccaaaagagccgctctggacgagaggtatcactctgactttaaccgacaagaccgcttccacgatttcgaccacagggatcgcggacgctatcccgaccacagtgtggatcgacgcgagggcagtagatctatgatgggggaacgcgagggccaacattatccagagagacacggaggtccagaaaggcacggcagagactctagagacggctgggggggttatggatctgataagcggatgtctgagggcagggggctccccccaccccctcgcggacgccgtgactggggtgaccatggcagaagggaggatgatcgtagctggcagggcacagccgatgggggtatgatggacagggaccacaagaggtggcagggtggggagcgaagcatgtcggggcacagcgggccaggacacatgatgaaccggggagggatgagcggccgtggatcttttgctccgggaggggcttcgagaggacatcccatccctcatggcggaatgcagggtgggttcggaggccagtccaggggatcccgcccatctgacgctagatttacccgccgatactag

SEQ ID NO: 239682 - DNA, 2862 bp, synthetic construct
  misc_feature 1..2862: note = Description of Artificial Sequence: Synthetic coding sequence
  source 1..2862: mol_type = other DNA
atggccgaaacactgccaggaagcggcgatagcggccctggtacagcatccttgggcccaggagtggccgagaccgggacgcggcgactgtctgaactgagggtcatcgatctcagagcggaattgaagaagaggaacctggataccgggggaaataaaagcgttctgatggaaaggctgaaaaaagccgtgaaagaggaaggacaagatcccgacgaaattggcatcgaattagaggctactagcaagaagtccgcaaaaagatgcgtgaaaggccttaaaatggaggaggaaggcacggaagacaatggtctggaggatgatagtcgggatggtcaagaggacatggaagcatcactggaaaacttgcagaatatgggtatgatggatatgagcgttctcgatgaaacagaagtcgccaatagctcagctccagatttcggggaagacggcacagacggcctgctggatagcttttgcgacagcaaagagtatgtggccgcacagctgaggcagctgccagcccagccacctgagcacgcagtggacggggagggctttaaaaataccttggagacctcaagtctgaactttaaggtgactcctgatattgaggagagcttgctcgagccagagaacgaaaaaattctggacatcctgggggagacctgtaagtccgaacctgttaaagaggagtcctccgaattggaacagccctttgctcaggataccagctcagtgggtccggaccgcaagctggccgaagaggaagatctctttgatagcgcccacccagaggagggggacctggatttggctagcgagagtactgctcacgctcagtcttcaaaagccgactctctcctcgctgtagtgaaaagggaacctgcggagcagccaggtgacggcgagagaaccgattgtgaaccggtagggttggagcccgcagttgagcagtccagcgccgcatccgaactcgcagaggcatcttccgaagagctggcagaggcacccaccgaggctccatctcccgaggctcgcgattctaaagaagatggccgaaaattcgattttgacgcctgtaacgaggttccacccgctccaaaggagagctccaccagcgagggcgcagatcagaagatgtccagctttaaagaggagaaggacataaagcccatcattaaagacgaaaagggtagggtcgggtctggttcagggaggaatctgtgggtgagcgggctgtcctccacaactagggccacagacttgaaaaacttgttctctaagtatggcaaggtagtgggggcaaaagtggttaccaacgctcgctcacctggcgctagatgctatggtttcgtgactatgtctacatctgacgaagccaccaaatgcatctctcacctgcaccgcactgagctccatggtagaatgatttccgtggagaaagcaaaaaacgagcccgcaggaaaaaagctgagtgacagaaaagaatgcgaggtgaagaaggagaagctatcttccgtcgatagacatcacagcgttgagattaaaatcgagaaaaccgtgatcaagaaggaggagaagattgagaaaaaggaagaaaagaagcccgaagacatcaaaaaggaagaaaaggaccaggacgaattaaagcctggcccaacgaaccgcagccgggtgaccaaaagcggttctcgaggtatggagcgaaccgttgtgatggacaagagcaagggcgaacccgtcatctccgtcaagaccaccagccggagtaaggaaaggtcctcgaagagccaggacaggaagtctgagtccaaggaaaagcgggacattctaagttttgataagatcaaggagcagagagagcgcgaacgccaacggcaacgcgagagggaaatccgagagactgaacgccgacgcgaacgcgaacagagggaacgagagcaaaggcttgaagcattccacgagaggaaagagaaagctcgattgcagcgcgagcggctgcagcttgaatgccagagacagagacttgagcgggaaagaatggaacgcgaacgtcttgagagagaaaggatgagggtagaacgcgagcggcgaaaagaacaggagcggatccacagggagcgcgaggagctcagaagacagcaggagcagctgagatatgagcaggaacgacggccaggccgaaggccctatgatctcgatcgcagagacgacgcctactggccagagggcaagagggtagccatggaggacaggtatagagcggactttccacggccagaccaccgctttcacgatttcgatcaccgggatcggggacagtaccaggaccacgctatcgatcgcagggaggggtctagacccatgatgggcgatcacagagatgggcaacactatggggatgaccggcatggacatggcggtcctccagagcgacatggacgcgacagtagagatggatggggagggtacggctccgataaaagactttcagaaggacgcggactccctccaccacccaggggcggaagagactggggtgagcataatcagaggttggaagagcatcaggccagagcatggcaaggggcaatggacgccggtgccgctagtagagaacatgctcggtggcagggcggagagcggggtttgtccgggccatcgggacccggtcacatggctagccgcggaggcgtggcagggagggggggatttgcccagggcggtcactctcaggggcatgtggtgcctggcggaggcttggagggcggtggggttgcttcacaggaccgcggaagccgagtgccacatccacatccccatcctcctccgtatccacattttactagaaggtattag

SEQ ID NO: 239683 - DNA, 1533 bp, synthetic construct
  misc_feature 1..1533: note = Description of Artificial Sequence: Synthetic coding sequence
  source 1..1533: mol_type = other DNA
atggccgagactcttcctggttccggagatagtgggcctggcactgcctctctgggccctggagtcgctgagaccggcacacggagattgagtgagctcagagttatcgacctacgcgctgagctgaagaagagaaatctggataccggcggaaataagtccgtgttgatggaacgactgaaaaaagctgtgaaggaggagggccaggatcccgatgagatagggatcgagctggaggctacgagcaagaagtccgcgaagaggtgtgtgaagggcctgaagatggaggaggaaggaaccgaggataatggcctggaggatgactcacgcgatggccaggaagatatggaagcaagcctggagaacctgcagaacatgggcatgatggatatgagcgtgctggatgagacggaagtcgctaactccagtgcccctgactttggcgaggatggcacggacgggctcctcgattcattttgtgacagtaaagagtacgtggcagctcagcttcggcaactccccgctcagccacccgaacatgccgtaggcaatctagaaacccggcaggacgtgccaaccagctcaagtttgagggtttccgtggcagcggtgcctgttccgcatctatctgtcgaaaacgaaaaaatccttgatattctgggtgaaacgtgcaagtctgagccagtaaaggaggagtccagcgaactagaacaacccttcgcccaggatacttcctcagtaggtcctgatagaaagcttgctgaagaggaggaccttttcgacagtgcccatcctgaggagggagatctagacttagccagtgagagcactgcacatgctcagtccagcaaagccgacagcttactagccgtcgtaaaacgggaaccagccgaacaacctggagacggcgaacggacagactgcgaacccgtcggtctggaacccgctgttgaacagtcctcagctgccagtgagctcgctgaggccagctcggaagaactggctgaggctcctactgaggccccttcaccagaagctcgcgatagtaaggaggatgggagaaagtttgactttgatgcgtgcaacgaggtacctccagccccaaaggagtccagcacatcagaaggcgctgaccagaaaatgtcttcattcaaagaagagaaagacatcaaacccattatcaaggatgaaaaggggcgagtaggctctgggtctgggaggaacttgtgggtttctggcctatcttccactactcgggctaccgaccttaagaacctctttagtaaatacggcaaggtcgttggagcgaaggtggttaccaatgctcggtcccccggtgctagatgttacggctttgttaccatgtccactagcgacgaggctaccaagtgtattagtcatttgcatcgcacggaactacatggaaggatgatttcagttgaaaaggccaaaaacgaacccgcaggcaagaagttgtctgacagaaaggaatgtgaggtaaagaaggaaaaactctcttcagtcgatcgttag

SEQ ID NO: 239684 - DNA, 786 bp, synthetic construct
  misc_feature 1..786: note = Description of Artificial Sequence: Synthetic coding sequence
  source 1..786: mol_type = other DNA
atggccgagactcttcccggttcaggcgacagtggacctggaaccgctagcctgggtcctggcgtcgcagagactgggactcgccgactctccgaattgcgggtcatcgacctacgggcagaattaaaaaagcgcaatctggacaccggtggaaacaaaagtgtgttaatggaacgtctgaagaaggcagtcaaagaagagggacaggatccggacgagattggtattgagctagaggccacgtccaaaaagtcggctaagcgatgtgtcaaagcccctagccctgaggcacgagactctaaggaagacggtcgaaaattcgacttcgatgcctgcaatgaggtaccgcctgctcccaaggagtcaagtacctccgagggcgctgaccagaaaatgtccagttttaaagaggaaaaagatattaagcccatcatcaaggatgagaaggggagggtgggcagcggttccgggcgaaacttgtgggtctctgggttgagttctactactcgggcaactgacttgaaaaatctattctcaaaatacggaaaagtcgtcggtgccaaggttgtaactaatgccaggtcacctggggcacgctgctacgggttcgttacaatgtccaccagtgacgaagccaccaaatgcatctcccatctgcacaggacggagctgcatggacgcatgattagcgttgaaaaggctaaaaacgaacctgcgggtaagaagttgtccgatcgcaaggaatgcgaagttaaaaaggagaagctctcttccgtggacagatag

SEQ ID NO: 239685 - DNA, 1221 bp, synthetic construct
  misc_feature 1..1221: note = Description of Artificial Sequence: Synthetic coding sequence
  source 1..1221: mol_type = other DNA
atggccgagacgttgcccggtagcggcgattctgggcctggcaccgcttctcttgggccaggagtggctgagaccggaacccgtagactctcagagctcagagttattgacctgcgggcagaattaaagaaaagaaatttagacaccggtggcaataaatcagtcctgatggagcggttgaaaaaagccgtgaaggaggaggggcaagaccctgacgagattgggatcgagctggaagccacttccaaaaaatcagccaagagatgtgtgaagggcctgaagatggaagaggagggtacagaagacaacggcctggaggtggagaatgaaaaaattttggatattttaggcgaaacatgtaaatccgagccagtgaaagaagagtcaagcgaactggagcagcccttcgctcaggatacttccagcgtgggccctgaccgaaagctagcagaggaggaagatctcttcgacagcgcccaccctgaagagggggatctcgatctagcatctgagtctaccgctcacgcccagagcagtaaggccgactcacttctggcagtggtaaagcgcgaacccgctgaacagcccggtgatggagagcgcacggactgcgaaccagtgggactagaaccggctgttgaacaatcctctgccgctagcgaactggccgaggccagtagtgaagagctcgccgaagcaccaaccgaggcaccttctcccgaggcccgtgattcaaaggaagatgggagaaaatttgacttcgatgcctgtaacgaggtaccgccagccccaaaggagtcgtcaactagcgagggggcagaccagaaaatgtcgagtttcaaggaggagaaggatatcaagccaataattaaagacgaaaaggggagggtgggctctggttcaggccgtaacctatgggtatccggattatcctctacaaccagggccaccgacttgaagaatttattttcaaagtacgggaaggttgtcggcgcaaaggtcgtgactaacgcaaggtcccctggagctcgctgttatggtttcgtgaccatgagtacttcagacgaggctacaaagtgtatcagccaccttcatagaacagaactgcatggacggatgatctctgtagaaaaagctaagaatgaaccagccggaaagaaattaagtgataggaaggagtgtgaagttaaaaaggaaaagttgtcatccgtcgacagatag

SEQ ID NO: 239686 - DNA, 606 bp, synthetic construct
  misc_feature 1..606: note = Description of Artificial Sequence: Synthetic coding sequence
  source 1..606: mol_type = other DNA
atggctgagactggaaccaggcggctcagcgagctgcgcgtcattgacctgcgcgcagagttaaagaaacgaaatctggataccggaggcaacaaaagtgttctgatggagcgcctgaaaaaggcagtgaaagaggaagggcaggacccagatgagattggtatcgaactggaagccacaagtaaaaaaagtgccaagaggtgcgtaaaggggctgaaaatggaggaggaggggacagaggacaacggccttgaggatgattctcgggatggccaggaagacatggaggctagcctggaaaatctgcagaatatgggaatgatggacatgtcagtgctcgacgaaaccgaggtggcaaacagcagcgcacccgacttcggcgaggacggcacggacggcctcctcgacagcttctgtgacagcaaagagtacgtggccgctcagctgaggcagctcccagctcagcctccagagcacgccgtagacggagagggcttcaagaacacccttgaaacatcttccctgaactttaaggtcactcccgatattgaagaatccctgctggagcctggcacagacaagcgaaataccaccgtaatggtctag

SEQ ID NO: 239687 - DNA, 1821 bp, synthetic construct
  misc_feature 1..1821: note = Description of Artificial Sequence: Synthetic coding sequence
  source 1..1821: mol_type = other DNA
atgaaagtgaggtccgccggtggagacggagacgcgctctgcgtgaccgaagaagatttagcaggggacgatgaggacatgcccacatttccctgtacccagaaagggcgtccagggccacggtgctctcgctgccagaaaaacctttcattgcatacctctgtgcgcatcctttacctgtttctggccttgctgctggtcgccgtcgccgtgttggcaagcctggtttttagaaaagtggacagtctctcagaggatatctccttaacgcagagtatttatgacaaaaaattggtgctgatgcagaagaatctgcagggcctagatcctaaagccttgaataactgctccttttgccatgaagccggacagctgggacccgagattcgtaagctgcaagaagagctggagggcatccaaaaattattgctggcccaggaggttcaactggaccagactctgcaggctcaggaggtcctctccacgacctcgagacagatcagccaggagatgggcagctgcagcttctcgattcaccaagtgaaccaatctcttgggcttttccttgcccaggtgaggggatggcaagccacgacggcaggcctggacctatcattgaaggacctgacgcaggagtgttatgacgttaaggccgcagttcaccagattaacttcaccgttgggcagaccagcgagtggattcatgggattcaacgcaagaccgacgaggaaacactgaccctgcaaaagattgtcaccgactggcagaactacactaggttattcagcgggcttagaaccacaagcactaagacgggagaggccgtgaaaaacatccaggctaccctgggtgcaagctctcagcggatatctcagaattctgagtcaatgcatgatctcgtcctgcaggtgatgggactgcagctgcaactggataacatctcaagctttctggatgatcacgaggagaatatgcatgatctccagtaccatactcactatgcacagaaccggaccgtggaaaggttcgaatccttggaaggcaggatggcgtcgcatgagatcgaaatcggcaccatttttaccaacatcaacgccacggacaaccacgtacacagcatgctaaagtatctagacgatgtgcgccttagctgtactctggggtttcacacacatgcggaggagctgtattatcttaacaaaagcgttagcattatgctaggaaccaccgatctgctgcgagaaagattcagtctgctgtccgccaggctcgacttaaatgtgcgaaacttgtcaatgatagtggaggagatgaaagctgtcgacacacaacacggcgagattcttcgaaacgtaaccatcctgaggggggctccgggaccacccggtcccaggggattcaagggagatatgggggtgaaagggccagtgggcggacgcggtccgaagggagaccccggatcacttggtccgctcggaccccaggggcctcaggggcagcctggcgaggctggaccggttggcgagagaggccctgtggggcctcgtggattccccggattaaagggaagtaagggttcctttgggaccgggggtccccgaggccagccaggccctaaaggcgatattggcccacctggccctgaaggaccacccggatcaccaggaccctccgggccacagggaaagccagggatagcaggaaaaaccggatcccccggtcagaggggtgctatgggacctaagggggaaccaggtattcaaggcccaccaggcctgccagggccacctggtcctcctggcagccagtcattctattag

SEQ ID NO: 239688 - DNA, 1401 bp, synthetic construct
  misc_feature 1..1401: note = Description of Artificial Sequence: Synthetic coding sequence
  source 1..1401: mol_type = other DNA
atgaaagtccgctcggctggaggagacggagatgcattatgcgtgaccgaggaagacttagcaggcgatgatgaggatatgcctacctttccttgcacgcagaagggacgtcccggaccacgctgtagtcgctgtcagaaaaacttatctctgcacacctcagtgcgtatattgtatctatttctcgcgctgttgcttgtcgctgtggccgtcttggcttctttggtgtttcgcaaagtagactccctgagtgaggacatcagtctaacccagtctatatacgacaagaagttggtcttgatgcaaaaaaacttacagggactggaccccaaggctctcaataactgttcattttgccatgaagccggacagctcggacctgaaattcgaaagctccaagaggagttagaggggattcagaaactgctccttgcccaggaagtacagctggatcagaccctgcaggcgcaggaggtcctgagcacaacgagtcgccaaatcagccaggaaatgggatcctgcagcttttccatccatcaggtgaatcaatctctgggcctgttcctcgcacaggtccgtggatggcaggctacgaccgcagggttggatctttccctgaaagacctgacacaagaatgctatgacgtgaaagctgccgtacatcaaataaattttaccgtgggccaaacgtctgaatggatacatggaatccagagaaaaactgatgaggagactctgactcttcagaagattgtgactgattggcagaactacacaagactgtttagtgggctccgaacgaccagcacgaaaactggtgaagccgtcaagaatatccaggcaaccctgggcgcttctagccagcgaatttcccagaacagcgagagcatgcacgaccttgttctgcaagtgatgggcttgcagctgcagctggacaacatttcttcttttctcgatgatcatgaggaaaatatgcatgacctgcagtatcacacacactacgcacagaataggactgttgaaagattcgagagtctggagggcagaatggccagccacgagattgagatcgggactatcttcacaaatataaatgctacagataaccatgtgcattcaatgctgaagtatcttgacgacgtgcgcctgagttgcaccctgggattccatactcatgcagaagagctgtattacctcaataagagcgtctcaattatgctcggcactacggatcttctgcgtgaacgattcagcctgctcagcgcaaggctggacctgaacgtaagaaacctgtctatgattgtggaggaaatgaaagccgttgacacacagcatggagagattctaagaaacgtgaccattctgcgagggcacacactgttttctcataaccgcatttag

SEQ ID NO: 239689 - DNA, 1008 bp, synthetic construct
  misc_feature 1..1008: note = Description of Artificial Sequence: Synthetic coding sequence
  source 1..1008: mol_type = other DNA
atgggtcgctgctgcttttacacagccggaacactctcgctgctgctgctggtgaccagtgtcactctcctcgtagccagagtgtttcagaaagcggtggatcagagcatcgagaaaaaaatcgtgctacggaatggcacagaagcgttcgattcttgggagaaacctccgctacccgtttacacccaattctacttctttaacgtgacaaaccccgaagagattctgaggggggagaccccaagagtcgaagaggtgggcccttacacgtatcggagcctcgattggtggatcactgacaaatgtaacatgattaacggcaccgatggcgactcattccacccattgatcactaaggacgaagttctctacgtgtttcctagtgacttttgcaggagcgtgtacatcacattctcagactacgaaagtgtgcaagggctacccgcatttagatataaggtgcccgctgaaatcctggccaatacatctgataatgccggattctgtatacctgaaggcaattgtctgggtagcggcgtccttaacgtatctatatgcaaaaacggggcacccatcatcatgagctttcctcatttctaccaggccgacgaacgtttcgtcagtgcgatagaaggcatgcatcctaatcaagaggatcacgaaacatttgtggacattaatcctttgaccggtatcatcttaaaggcagccaagcgattccaaataaacatttatgttaagaagctcgacgatttcgtagagaccggagacatcagaactatggtgtttcctgtgatgtatctgaacgagtccgtgcatatcgacaaagagacagccagccggctgaaaagcatgatcaatactaccttgattatcacgaacatcccttatatcatcatggctctaggcgtgttttttgggctggtttttacttggcttgcatgcaagggacaggggtcaatggatgaaggcacggcagacgagagagcacctctgatacgcacatag

SEQ ID NO: 239690 - DNA, 1530 bp, synthetic construct
  misc_feature 1..1530: note = Description of Artificial Sequence: Synthetic coding sequence
  source 1..1530: mol_type = other DNA
atgggctgttccgccaaagccagatgggcagccggagctctcggcgtggccggactcctctgtgctgtgctgggcgcagttatgatcgtaatggtcccgtccctgattaagcaacaagttctgaaaaacgttcgcatcgacccatctagcctaagctttaatatgtggaaagagattccaatccccttttacttgagcgtgtattttttcgacgttatgaatccctccgaaattctaaagggcgaaaaacctcaagtgagggaaagggggccttatgtgtaccgcgaatttcggcacaaatctaacattacgtttaacaacaatgacacagtgtcgttcttggagtatcggacttttcagtttcagcctagcaaatctcatggctccgagtcagactacatcgtcatgccgaacatacttgtgctgggggcagcagtaatgatggagaataaacctatgactctcaagctgatcatgaccctggcttttactactctaggagagagagccttcatgaacagaactgtcggtgaaatcatgtggggctataaggacccccttgtgaacctgataaataaatatttccccggaatgtttccgtttaaggataaatttggcctgttcgctgaactcaacaactcagattctggtctgtttactgtgtttacaggggtgcaaaatatttctcgcatccatttggtcgacaaatggaatggtctgagtaaggtcgacttctggcattccgatcagtgtaatatgatcaatggcaccagcggtcagatgtggcccccttttatgacacccgagagtagcctggagttttactcacctgaggcctgcaggtcgatgaagctcatgtataaggagtctggagtctttgagggcatccctacctatcgcttcgtggcgccaaagactctattcgccaatgggagcatctacccccctaacgaaggcttctgcccttgcctggagagtgggattcagaatgtcagtacatgccgctttagcgctccactgttcttatcacacccccacttcctgaatgccgaccctgtgctcgccgaagcagtgacgggactgcacccgaaccaagaggctcatagtctgttcttggacatccaccctgtgacaggcatccccatgaattgttcggtgaagctgcaattgtccctgtacatgaaaagtgtggcaggtatcggacaaaccggaaagatcgaaccagtggtgttacctctgctatggtttgcagaatctggcgctatggagggagagacattgcacacattctacacacagctagttcttatgccaaaggtcatgcattacgcacagtatgttctcctggccctgggctgcgtccttctactcgtacctgtgatatgccaaatacgttcacaagagaagtgttatcttttctggagctctagcaaaaaaggctctaaagataaggaggccattcaagcatattctgaaagtttaatgacttctgccccaaaggggagcgtgctgcaggaagctaagttatag

SEQ ID NO: 239691 - DNA, 1521 bp, synthetic construct
  misc_feature 1..1521: note = Description of Artificial Sequence: Synthetic coding sequence
  source 1..1521: mol_type = other DNA
atggggtgctctgcaaaggcgaggtgggctgcaggtgctctgggcgtcgctgggttattatgtgctgtgctgggtgcggtgatgatcgtgatggtgcctagtttgatcaagcagcaggtgcttaaaaacgttaggatcgatccgagctccctgagcttcaacatgtggaaggagattcctattcctttctatctaagcgtatatttctttgacgtcatgaacccttctgaaatactgaagggagagaaacctcaagttcgcgaaaggggaccctacgtttaccgggagtttcgccacaagtctaacataacattcaataacaacgatacagtctcatttttggagtaccgaaccttccagttccagccaagcaaaagccacggatcggagagcgactatattgtgatgcctaacattctggttttgggcgctgccgtaatgatggagaacaagcccatgactctaaagctcattatgaccctcgcattcacaacattaggggaaagagcatttatgaaccggaccgtcggggagatcatgtggggatacaaggatcccctggttaatctcattaataaatatttccccggaatgttcccttttaaagataaatttgggctattcgctgagttgaacaattcagacagtggactgttcacagtcttcacaggagtgcagaacattagcaggatacatctggtggataagtggaatggtctctctaaggtcgatttctggcacagcgatcaatgtaacatgatcaacgggacgtccggacagatgtggcccccttttatgactccagagtccagcctcgagttttatagcccggaggcatgtaggtctatgaaactcatgtacaaagagtccggcgtattcgaggggatccccacatacaggttcgtggcacccaagacgctgtttgccaacgggtcaatttatccaccgaacgagggcttttgtccttgtttggagagtggcatccagaacgtgtccacatgtaggtttagtgctcccttgttcctgagccacccacactttctaaacgcagatcctgttttggccgaggccgtgactgggctgcatcctaatcaggaggcccactccctgtttctggacatccaccccgtgactgggattccgatgaactgcagcgtgaaactgcagctgtctctttacatgaaatccgtggcgggaattgggcagactgggaagattgagccagtggtgttaccattgttatggttcgctgagagcggggcaatggagggagagaccctccacacgttttacacccagctggtgctcatgcctaaagtgatgcactatgctcagtatgtcctgctggccctcggctgtgttctgctgctggtgcctgttatctgtcagattagatcacaaggtcccgaagacaccgtttcgcagcccggtctcgctgctggaccggaccgtcccccttctccctataccccgttactgcccgattctccctccgggcagcccccatctcccaccgcttag

SEQ ID NO: 239692 - DNA, 1230 bp, synthetic construct
  misc_feature 1..1230: note = Description of Artificial Sequence: Synthetic coding sequence
  source 1..1230: mol_type = other DNA
atggggtgctcagccaaggccaggtgggccgcaggggctctgggcgttgctgggctgctttgcgcagtcctgggagctgtcatgatcgttatggttcccagcctgatcaagcagcaggtactgaaaggcgcagctgtgatgatggaaaacaaacccatgacccttaagctcatcatgaccctggctttcacaaccctgggagagcgcgcattcatgaaccggactgtgggggagattatgtggggctacaaggatccgctggtgaatctcataaataaatacttcccgggaatgtttccgttcaaagataagttcgggctgtttgctgagctcaacaacagcgacagcggcctctttacagtttttaccggtgtgcagaatatctccagaattcacttagtggataagtggaacggactttcaaaggtggacttctggcacagtgaccagtgtaacatgatcaacggcacatccggtcagatgtggcccccattcatgactcctgaaagctccctggagttctacagccccgaagcatgcagaagtatgaagttgatgtataaggaaagcggggtattcgagggaatccctacctaccgtttcgttgcgcctaaaacgcttttcgccaatgggagcatttatccccctaacgaaggcttctgcccttgtctagaaagcgggattcagaacgtttctacttgtcgattcagtgcccctttatttttgtcccacccacactttttgaacgctgaccctgtgctggccgaggctgtgaccggcttgcatccaaaccaggaggctcattccctcttcctggatattcaccctgtcaccggtatcccaatgaattgctctgtgaaattacaattgtccctctatatgaagtccgtcgccggaatcgggcagactggaaaaattgagccagtggtgctgcctttgctctggttcgccgagtctggggctatggagggagagactctgcacaccttctacacgcagttggtcctgatgcccaaggtgatgcactatgctcagtatgtgctcttggccctgggatgcgttttgctcctcgttcctgtcatttgccagatcaggagccaggagaagtgttacctgttctggtcaagcagcaagaagggaagcaaagataaagaagccattcaagcgtatagcgaatccctcatgacctcagccccaaaggggagtgtgctgcaggaagccaaactgtag

SEQ ID NO: 239693 - DNA, 1659 bp, synthetic construct
  misc_feature 1..1659: note = Description of Artificial Sequence: Synthetic coding sequence
  source 1..1659: mol_type = other DNA
atgggatgttctgctaaggcccgatgggccgcaggtgcactaggtgtggccggactgctctgtgccgtcctgggggctgtgatgattgtcatggtgccgtccttgattaaacagcaagtcctgaagaatgtgaggatcgaccccagctccttatctttcaacatgtggaaggagattcccattccattttacttgagcgtctactttttcgacgtaatgaacccctcagagatccttaagggcgagaagccgcaagttcgggaaagagggccatatgtgtatagggaattccgtcataaatcaaacatcacctttaataacaatgatactgtaagttttctggaatacagaaccttccagtttcaaccctcaaagtcacacggatctgaatcagattatattgtgatgccaaacattctggtcctgggggctgccgtgatgatggaaaacaaaccaatgactctgaagttgattatgactctggctttcacaacactcggagagcgggcatttatgaatcggactgtgggcgagataatgtggggttacaaggacccccttgtgaatttgattaacaagtatttccccggaatgtttccattcaaagacaaattcgggctgttcgctgaattgaacaactccgatagtggccttttcaccgtgttcacaggggtgcaaaatattagcaggatccatctggtcgataagtggaacgggctgtccaaagttgacttctggcacagcgatcagtgcaatatgataaatgggacatccggccagatgtggccccctttcatgacaccagaatccagcctggagttttacagcccggaagcatgcagaagcatgaaactcatgtacaaggagagcggagtgttcgagggcatacccacgtatcgtttcgtcgctccaaaaacgctgtttgccaacggatctatctatccacccaatgaggggttttgtccttgcttggaaagtgggattcagaatgtttcgacctgccggtttagcgccccactcttcttgtctcatccacactttctgaacgcggatccagtccttgccgaggccgtcaccggattgcatcccaatcaggaggctcactcactgttcctagatatccatccagtgaccggtatccctatgaactgctcagtcaagctgcagctaagcctgtacatgaaatctgtcgccggtatcggccagactggcaagatagaacccgtggtactgcctctcctgtggttcgcggaatctggcgcaatggagggcgaaacccttcacactttctatacacagttggtgttgatgccaaaggtcatgcattatgcccagtatgtgctgctggcacttggctgtgtactgctcttggtaccggtaatttgccagatccgcagtcaggtgggtgccggtcagcgggctgcgcgagccgacagccatagcctggcctgctggggaaagggcgcatccgacaggacgctgtggccgacagccgcttggtcaccaccgcctgccgcagtccttcgtctctgccggagtggctccggacactgttggggtctcaggtctacgctggcatcttttgcttgccgggtggcaactacgttacctgtcctggaagggctgggacccagccttggcggaggaaccggcagctag

SEQ ID NO: 239694 - DNA, 1551 bp, synthetic construct
  misc_feature 1..1551: note = Description of Artificial Sequence: Synthetic coding sequence
  source 1..1551: mol_type = other DNA
atgtgcgcagtaggaaacgtcagaattgatccgtcgtccctgtcttttaatatgtggaaggagatccctattcccttctacctcagcgtgtactttttcgacgtcatgaacccctccgaaatcctcaaaggggagaagccacaggtcagagaacggggtccctacgtttaccgagaatttcgtcataagagcaatattacatttaacaataacgacaccgtttcattcctggagtaccgcacctttcagttccagccgagtaagtctcacgggtccgaaagcgattatatcgtgatgcccaatattctcgttctcggcgcagcggtgatgatggagaataaaccaatgactctaaaactgataatgacacttgcattcaccacccttggtgaacgcgctttcatgaatcgtactgtgggtgagatcatgtggggctataaggatccactggtgaatctcatcaataagtatttccctggtatgttcccattcaaggataagttcggcctgtttgctgaactgaataatagcgattcagggctctttacagtgttcactggggtacagaacatttccagaatccatttggtagacaagtggaacggtctgtcaaaagtggacttttggcactcagatcaatgcaacatgattaatggcacaagtgggcaaatgtggcccccattcatgactcctgaaagctcactcgaattttattccccagaagcgtgccggagcatgaagctcatgtataaggaaagcggcgtcttcgagggaatcccaacctaccgttttgttgcaccaaaaacgttgtttgcaaatggctcgatttatccccctaacgagggattttgtccttgcttggaaagtggcattcagaatgtgtctacttgccgcttttctgcccctctcttcctgtcccacccacacttcctgaatgcagaccccgtactggccgaagcagtcacgggtctgcaccccaatcaggaagcccatagcctctttttggacattcaccctgtgacgggcattccaatgaactgctccgtcaagcttcagctctcgctttacatgaagtccgtggctggtattggccagaccggcaagattgagcctgtggtgctcccacttctctggttcgcagagagcggtgctatggaaggcgagaccctgcataccttctacactcagttagtactgatgcctaaagtcatgcactatgcccagtatgtcctgctggctctgggctgcgtgctgctgctggtgccagtcatttgccagatcaggagtcaggtgggggcagggcagcgtgccgctagggccgactcccattctttagcttgctggggtaagggagccagcgatcgtacattatggccaaccgctgcatggtccccaccccctgccgcagtccttaggctgtgtcggtcaggttctggacactgttggggtctgagaagtacgcttgcttccttcgcctgcagggtggccaccacactgccagtgctcgaggggctgggcccttcgcttggtggcggtaccggcggactatag

SEQ ID NO: 239695 - DNA, 1539 bp, synthetic construct
  misc_feature 1..1539: note = Description of Artificial Sequence: Synthetic coding sequence
  source 1..1539: mol_type = other DNA
atgaacgtgcggattgatccatcttcactatcttttaacatgtggaaggaaattcccatcccattttacctgtctgtctactttttcgatgtgatgaacccgagtgagattctaaagggcgagaagccacaagtgagagagcgcggtccatacgtgtacagagaatttagacataagtcaaacatcacattcaataacaacgacaccgttagtttcctagaataccgtactttccagtttcagccgagtaaaagccacggatccgagagtgactatatcgtcatgcctaacatattggtccttggtgcagccgtgatgatggagaacaaacccatgacactaaaactcattatgacattggccttcacaacactgggcgagcgggcttttatgaatcggacggtcggggaaatcatgtggggttacaaggaccccctcgtcaatctgatcaataaatacttccccggaatgtttccttttaaagataaattcgggttattcgcagaactcaataatagtgactccggcttattcacggtttttaccggcgttcaaaacatctcaaggattcatctggtggacaaatggaacggactgtctaaggtggacttctggcatagcgaccaatgcaacatgataaatgggactagcggacagatgtggcctcctttcatgacacctgaaagcagtttggagttctattcaccggaggcctgcaggtcaatgaaactgatgtacaaggagagtggagtttttgaggggattcctacctacagattcgtggccccaaagactctcttcgcaaatgggtcaatttaccctcctaacgagggcttttgtccttgtttggagtctggcatccaaaacgtaagtacgtgccgtttttctgcgcctctttttctgagccatccgcatttcctgaatgccgaccctgttctggccgaagccgtgactggcttacaccctaaccaggaggcccacagcctcttcctcgacattcaccccgtgacgggaatccctatgaactgcagtgtaaagctacaactgtccttgtatatgaaatccgtagcaggaattggacagacgggtaagattgagcccgtggtgcttcctttgctttggtttgccgaaagcggtgctatggaaggtgaaacattgcacacattttacacccagttggtactaatgcctaaggtcatgcactacgcccagtacgtcctcttggccttaggctgcgtcctgctgctggtcccagtcatctgccaaattcgatctcaggttggcgctggccagcgtgcggctcgcgctgactcccactcactggcatgttggggcaaaggagcatctgataggaccctctggccaaccgctgcatggtcccccccacccgcagctgtgttgaggctgtgccggtccggtagcggtcattgctgggggctgcggtcaaccctggcatcctttgcttgcagagtcgccaccactctcccggtgctcgaaggcctgggcccatcactgggcggtggtacaggtggcctgtag

SEQ ID NO: 239696 - DNA, 441 bp, synthetic construct
  misc_feature 1..441: note = Description of Artificial Sequence: Synthetic coding sequence
  source 1..441: mol_type = other DNA
atgggttgttcggccaaagcccgatgggcggctggtgcccttggggtggcgggactgctttgtgctgtactgggggcagtgatgatcgttatggtgccctcgctaattaaacaacaagttttaaagaatgttcgcatcgatccaagctctctcagtttcaatatgtggaaagagatccccattccgttctatctcagcgtgtacttttttgacgtgatgaaccctagcgaaattctaaagggggagaagccccaagtgagagaaagaggcccatacgtgtacagagagtttcggcacaaatcaaacatcacttttaacaacaatgacacggtgtcattcttggaatataggaccttccaattccaaccatcaaaatcccacggcagtgaaagtgactatattgtgatgccaaacattcttgttctggttcgcctcccttag

SEQ ID NO: 239697 - DNA, 1446 bp, synthetic construct
  misc_feature 1..1446: note = Description of Artificial Sequence: Synthetic coding sequence
  source 1..1446: mol_type = other DNA
atggggtgttctgccaaggctaggtgggcagccggagctttgggagtggctggcttgttgtgcgccgtgctgggcgctgttatgatagtcatggtaccctctttgatcaaacagcaggttcttaagaacgttcgcattgatccctcttccctgtcattcaatatgtggaaggagatccccataccgttctatctgtctgtgtatttctttgatgttatgaacccgtctgaaattctgaaaggtgaaaagccccaggtgcgagagaggggaccctatgtttacagagaatttcggcacaaatctaacataacctttaataacaacgacaccgtgtcctttctcgagtacagaacatttcagttccagccatccaaaagccacggctccgaaagcgattacatagtaatgccaaatattctcgtgctgggggcagccgtgatgatggagaataagcccatgactttgaagttaatcatgaccctcgcctttacaaccctgggcgaacgagcattcatgaacagaaccgtgggggaaatcatgtggggctataaggacccattggttaacctaattaataagtatttccccggtatgtttccatttaaggataagttcggtctttttgctgaactgaacaactcagactcaggactgttcacagtcttcactggtgtgcaaaatatttcccgcattcacctggtggataaatggaacggcctgagcaaggtagatttctggcattccgatcagtgcaacatgatcaacggaactagcggccagatgtggccccctttcatgacgccggaaagttctctggagttctatagccctgaagcctgcaggtctatgaaattaatgtacaaagaatctggcgtgttcgagggaatccccacctatcgattcgtcgcacccaagaccctcttcgccaatggaagtatctaccctcctaatgaggggttttgtccctgcctggagtcagggattcagaatgttagtacctgtcgtttctctgctcctctgtttctgtcccatcctcacttcttgaacgcagacccagtgctggcggaagccgtgacaggtctgcatccaaaccaagaggctcattccctgttcttagacatccacccagtgacaggaatccccatgaattgtagcgtaaagctgcagttgtcactatatatgaagagcgtcgcaggcataggccagaccgggaaaattgaacctgtcgttttacctcttctgtggtttgccgagagcggggctatggaaggtgaaacgctccacactttttacacacagttggttcttatgccgaaggagaagtgttatctgttttggtcctcaagcaaaaaggggtctaaggacaaggaagctatccaggcctactctgagtcactcatgacatctgctcctaaaggctccgtcctgcaggaagcaaaattgtag

SEQ ID NO: 239698 - DNA, 1437 bp, synthetic construct
  misc_feature 1..1437: note = Description of Artificial Sequence: Synthetic coding sequence
  source 1..1437: mol_type = other DNA
atgggtcggtgttgcttctatacagccggtactctcagtctgctccttctggttacctccgtaacgttactggtcgcacgcgtgttccagaaagcagtcgaccagtctatcgagaaaaagatagtcctaagaaatggtaccgaggcatttgactcctgggagaaaccccctcttccggtctatacccagttctatttcttcaatgtgactaatccggaggaaattttgcggggtgagacaccccgagttgaagaggtgggcccatatacatatagagagctacgcaacaaggcaaacatccaatttggggacaatgggacaaccattagtgcagtctcaaataaagcatatgtgttcgagagagaccagtccgttggcgaccctaaaatcgatctcatcaggaccttaaatataccggttctaactgttattgagtggagtcaagtgcatttcttgcgagagatcatcgaagccatgttaaaagcttaccaacagaagctattcgttacacacaccgttgacgaacttctgtggggatacaaggatgagatcttgtctcttatacacgtctttaggcccgacatctccccctactttggcctgttttacgagaagaacggaaccaacgacggagactatgtttttctcactggagaggactcatacttaaactttactaaaatcgtggaatggaatggtaaaacaagcctggattggtggatcaccgacaagtgtaacatgatcaacggaaccgacggggactccttccaccctttgatcacaaaggacgaggtgctctatgtgttcccctctgatttttgtcggtctgtgtacattaccttttctgactacgagtccgtacagggcctgcccgcattccgatacaaggttcctgctgagattctggctaacacttctgataacgccggattttgtatccccgaaggtaattgcttgggatccggcgtcctcaacgtcagcatctgtaaaaatggggcacccatcattatgtccttcccgcacttttatcaggctgacgaaaggtttgtatccgcgattgaaggcatgcatcccaaccaggaagatcatgagaccttcgtcgatattaatcctctgactgggatcattttgaaggccgctaagcgctttcagataaacatatatgtgaagaagcttgatgacttcgtggagacgggggatatccggactatggtgtttcctgtgatgtacttaaacgaaagtgtccacattgacaaagagaccgcctctcggctgaagagtatgatcaataccacactgattattaccaacatcccctacattattatggccctcggcgttttcttcgggctggtgtttacatggttagcgtgcaagggacaaggaagtatggatgagggcactgcagacgagcgtgcacctctgatcagaacctag

SEQ ID NO: 239699 - DNA, 1710 bp, synthetic construct
  misc_feature 1..1710: note = Description of Artificial Sequence: Synthetic coding sequence
  source 1..1710: mol_type = other DNA
atgggcttgggcctcttgcttcctcttctcttgctatggactaggggcacccaaggttccgagctggatcctaaagggcagcatgtctgcgttgcgtcctcgccctctgctgagcttcaatgttgtgccggatggcgacagaaagaccaggagtgtacaataccaatttgcgaggggcctgatgcttgccagaaggatgaagtgtgtgtgaagccaggcttatgtagatgtaagcccggtttctttggagcccactgcagtagccgctgtcccggacagtattggggtcccgactgccgggagtcctgcccatgtcatccccacggtcagtgtgagcctgccaccggggcatgccagtgtcaggctgacaggtggggggctcggtgcgagtttccatgtgcatgtggtccccatggaagatgcgaccccgctactggcgtctgccactgcgaacccggttggtggagcagtacctgtagaaggccctgtcagtgcaatactgccgctgctcgttgcgagcaagccaccggagcctgcgtgtgcaaacccggatggtggggaagacgatgcagctttaggtgtaactgccacggttccccttgcgaacaggattcagggcgttgcgcttgtcgcccaggatggtggggtccagagtgccaacagcagtgcgagtgcgtgaggggccgatgctccgctgcaagcggagaatgcacctgccctcccggatttcgaggcgcacgatgcgaactgccctgtccagccggtagccacggcgtccagtgtgcccactcctgtggacggtgcaaacacaatgagccgtgtagccctgacacgggatcctgcgaatcttgtgaaccgggatggaatggtactcagtgccagcagccctgtctccccggtactttcggcgagtcctgtgaacagcagtgcccccattgccggcatggggaagcttgcgagcccgatacgggccactgccagaggtgtgacccaggctggctggggccacggtgtgaagacccctgtcccactggaacattcggcgaggattgtgggtcaacgtgcccgacttgcgtgcaaggcagttgtgataccgtgacaggcgattgcgtatgcagcgcagggtactgggggccatcctgtaatgccagttgtcccgctgggtttcatggtaacaattgtagcgtgccctgcgaatgccctgaaggactgtgtcatcctgtgtcaggaagctgtcagcccggatcaggatcccgggacacagccctgatcgctggatctctggttcctctcctgctgttattcttagggctggcctgctgtgcctgttgttgttgggccccaagatcagacctgaaggatcggcctgctcgagacggggcaacagtgtcacgtatgaaactgcaggtttggggcactctgaccagcctgggctctacacttccttgtcggtccctcagtagtcataagctcccatgggtcaccgcatcgtcctctcgaccactgcccgcagggcctctcatgactccaagtcaccctattctttctcttgagcgtcaaatgaggttcttgccgactgtatgccatcccaaaaaaggatggagcctatggcctcgacaggggcgtcagaggccagcctggctgcaggtactcagtaggcctttgcggacacctcctcggcatagtccgagcagggccccaccggcatag

SEQ ID NO: 239700 - DNA, 2613 bp, synthetic construct
  misc_feature 1..2613: note = Description of Artificial Sequence: Synthetic coding sequence
  source 1..2613: mol_type = other DNA
atggagggagccggacctcggggagcgggtcccgctcgcagacgaggagcgggtggcccaccctccccactcctgcctagtctgctgttattgctgctcctgtggatgctgcctgacactgtggcaccccaagaactgaatccgagaggcagaaacgtttgcagggcccctggctcccaagttcccacctgttgcgccggatggcggcaacagggggacgagtgtggcatagcggtgtgtgaggggaacagcacttgcagtgagaatgaagtttgcgttagacccggtgaatgcaggtgtcggcatggctattttggcgctaattgcgatacaaagtgtccgagacagttttggggcccagattgtaaggaactgtgcagctgtcacccacatggacagtgtgaggatgtgactgggcaatgtacttgccacgcgagaaggtggggggcacgatgtgaacatgcctgccagtgccagcacgggacatgccatccccgtagtggcgcttgcaggtgcgagccaggatggtggggagcgcagtgtgcaagcgcctgctactgttccgcgacatcacggtgtgatccccagacaggcgcatgtctctgccatgcgggatggtggggccgtagctgcaataatcaatgcgcctgcaactcgagtccctgtgaacagcagagtggacgatgtcagtgtagagaacgaacttttggcgcacgatgcgaccgatattgccagtgcttcagaggcagatgccacccagtagatggaacctgtgcatgtgagcctgggtacaggggtaagtactgtcgtgaaccatgtcctgcaggcttttacggacttggttgtaggaggagatgcggccagtgtaaaggccagcagccatgcactgttgccgagggacgctgtctgacttgcgagcctgggtggaacgggaccaagtgcgaccagccttgcgccaccggcttttacggagagggctgcagccatcgatgcccaccttgtcgcgatgggcacgcctgtaaccacgtaacaggcaaatgcacgaggtgtaacgcaggctggataggtgatcgctgcgaaaccaagtgctccaacgggacctacggcgaggactgtgccttcgtgtgcgccgattgcggttctgggcattgtgacttccagtccggaagatgtctttgctccccaggcgttcacgggccacattgtaacgttacctgcccccctgggttgcatggggcagattgcgcacaggcgtgcagttgtcacgaggacacttgcgacccagtcaccggggcttgccacctggagacaaatcagaggaaaggtgtgatgggcgctggcgctctcctcgtcctgctggtgtgcttgttactgtccttactcgggtgctgttgcgcctgcagaggaaaagatccaaccaggagacccaggcccaggagggagctcagcttgggtagaaaaaaggcccctcaccggctgtgcggacgcttttcccgtataagtatgaaactccccagaatacccctgcggagacagaaacttcccaaagtcgtcgtggcacatcatgacctggacaacacgctcaattgttcctttctcgaacctccttccggcctcgagcagcccagtccttcatggtcatcccgggctagcttctcttccttcgatactactgacgaaggccctgtatattgtgtacctcacgaggaagcccctgccgagagtagggatcccgaagtccctacagtgccggcagaggcgcctgcgccatcccccgtccctctcacaacgcccgcttccgccgaagaagcaattccccttcccgctagcagcgacagtgagaggtctgcctcctccgtcgaagggccaggcggagcactgtatgcaagggtcgccagacgggaggccaggcccgctagagcgagaggcgaaatcggcggactctctctgtcaccgtcacctgagcgtcgtaagcctcctcccccagacccagcgactaagccaaaggtgtcttggatccatggcaaacactccgccgctgctgctggcagggcaccatctcctccccctcccggaagcgaggctgcgcctagcccaagcaaaagaaagcgcacacccagcgacaagtccgctcatacggtggaacatgggagccccaggacccgggatcccacaccacgtcctccaggtctgcccgaggaggccaccgcccttgctgctccatcacctcctcgcgcacgtgcacgggcagcacctagacccctaggcgctcatggcagacgcaggagccctgctaaacgggcagaggccgctagcatgctggccgcagatgtaagggggaaaacacgatctttgggccgtgccgaggtcgctctgggagctcagggacccagggagaagcctgctcctccacaaaaggccaagaggtcagtgccacccgctagtcccgctcgagcgccaccagccacagagacccctgggcctgagaaagctgcaactgacctgcccgctccagagacacctcggaaaaaaaccccgatccaaaaacctcctcgcaagaagtcacgggaagcggcaggagaactgggaagggccggtgctccgactctttag

SEQ ID NO: 239701 - DNA, 2493 bp, synthetic construct
  misc_feature 1..2493: note = Description of Artificial Sequence: Synthetic coding sequence
  source 1..2493: mol_type = other DNA
atggggcttggcctgttactgcccctcttgctcctctggactcgcggaactcaaggtagtgaactggatcccaagggacagcacgtatgcgtggcctcatccccttccgcagagctacagtgctgtgctggttggcggcagaaggatcaggagtgtacaatcccaatctgcgagggcccagacgcctgtcagaaggatgaagtgtgcgtcaagccaggtctgtgtcgatgtaagcccggattcttcggcgcacactgttcctcgcggtgccctggacagtactgggggcctgactgccgcgagagctgtccatgccatcctcacggacagtgcgaacccgctactggagcctgtcaatgccaagctgatcggtggggtgctagatgcgagtttccgtgcgcatgtggcccacatggtcgttgtgatccggctacgggcgtctgtcactgcgagcctggatggtggagcagtacttgccggcgtccctgccagtgcaacactgctgcggctaggtgtgagcaggccaccggggcatgtgtttgtaaaccaggttggtggggtcgtagatgtagctttcgctgcaactgccatggatccccatgtgaacaggattcgggcaggtgtgcctgtcggccaggctggtggggccctgaatgccaacagcaatgcgaatgtgtgcgcggtaggtgtagcgctgcatcaggagagtgcacctgtcctccaggattcaggggtgcacgatgcgagctcccctgccctgccggatcacacggggtccaatgcgctcactcctgcggtaggtgtaagcataatgagccgtgcagtccagatacaggatcctgtgagtcctgcgaacccggatggaatggaacacagtgccaacagccctgtctgccagggaccttcggagagtcctgtgagcagcagtgtccccactgtcgtcacggcgaggcctgtgagccggatactggtcactgccagagatgtgatcccggatggttaggccctcgctgtgaggacccctgccccactggtacatttggggaggactgtggttcaacctgccccacatgcgtgcagggctcctgcgatacagtcaccggcgactgcgtgtgcagtgccggatactggggcccttcctgcaatgcttcctgtcctgctgggtttcacggcaacaactgctcagtaccttgcgaatgccctgaagggctgtgccaccctgtgtccggctcatgccagcctggtagcggttcacgtgacacagctttgattgctggaagtctcgtgccactattattacttttcttgggcctggcttgttgtgcctgttgttgctgggcacccagatctgatctcaaagaccggccagcccgtgacggcgctaccgttagccgcatgaaactacaagtgtgggggactctcacaagcctgggctcaactttaccttgtcgctctttgtcctcacacaagctgccctgggtaaccgtcagccaccacgatcctgaggttccgtttaatcacagtttcattgagcctcccagcgcgggatgggccaccgatgatagcttctccagcgatccggagtctggcgaagcggacgaggttccagcctactgtgtgccccctcaagagggcatggtgccggtggcccaggccggaagcagcgaggcctctctggcggcaggtgcatttcctccgcctgaagacgcgtcgaccccatttgctattccacggacttcttctctggcacgggcaaaacggcctagcgtgagtttcgcggaaggcactaagtttgccccacagagtcgcagatccagcggcgaactgtccagccccctgcgcaagccaaagcggctgtcccgtggcgctcaaagtggtccagaggggagggaggccgaagaatcaactggacccgaggaggccgaggccccagagtcctttcccgctgctgccagccccggtgactcggccacagggcatcgccgacccccactggggggtcgaaccgtcgctgaacatgtggaggccattgaaggttctgtgcaggaaagcagcggccctgtaacaaccatctatatgctggcaggaaagccccgtgggtctgaggggcctgttcgcagcgtgtttcgccacttcgggtcctttcagaaggggcaggccgaagcaaaagtgaaacgcgcaatccctaagccaccccgacaggccttgaaccgaaaaaagggttctcccggactcgcaagtggatccgttggtcaatcccccaattcagcccctaaagcgggtttgccaggtgccactggacctatggcagtccggcctgaggaagccgttaggggtctcggcgctggtacagagtcgagccgccgagctcaggaacctgtatccggttgcgggtctccggagcaggacccgcaaaaacaggcagaagaagagaggcaagaggagcctgagtacgagaacgtggtgcctatttcccgccctccggaaccatag

SEQ ID NO: 239702 - DNA, 2235 bp, synthetic construct
  misc_feature 1..2235: note = Description of Artificial Sequence: Synthetic coding sequence
  source 1..2235: mol_type = other DNA
atgggccttggcctactcttacctctgctgctgttgtggacgcgtggaacccagggttcagaactcgaccccaagggtcaacatgtttgtgttgcaagttccccctctgccgaactccagtgttgcgctggttggcgccagaaagatcaagaatgtactattccaatatgcgaaggccctgatgcctgccaaaaggacgaggtgtgcgtgaaaccaggcctgtgtcggtgtaagccaggcttcttcggagcacattgttcttcacgttgcccgggacagtactgggggccagattgtagggagagctgcccctgccaccctcatggtcagtgtgaaccagcaacaggcgcatgccagtgccaggcggatcggtggggcgctagatgcgagtttccctgtgcctgtggaccacacggcagatgtgaccccgctacaggcgtttgccactgtgaaccaggatggtggtctagtacttgtcggcgtccctgccagtgtaatactgcggctgcacggtgtgaacaggctacaggagcttgcgtgtgcaagcctggttggtggggcaggagatgctcttttcggtgcaattgtcacggcagcccatgtgagcaagactccggcagatgcgcctgtcggccaggctggtggggtccagagtgccagcagcagtgtgaatgtgtgcgtggaagatgttcagccgcaagcggagaatgtacatgcccgccaggattcaggggagcccgatgtgagctgccatgtcctgctgggagccacggtgttcagtgtgcacacagttgcggacgatgtaaacataatgagccttgcagcccagacacagggagttgtgagtcttgtgaaccaggatggaacggtacccagtgtcagcaaccttgcctcccaggcacatttggagagagttgcgagcagcaatgtcctcactgtcgacacggtgaggcttgcgaacctgacactggccactgtcagcgctgctcggggagtcgggacacagccctaatcgcagggagtctagtccctctcctcctactcttcctcgggctggcatgttgcgcatgttgctgttgggccccaaggtctgatctcaaggaccgcccagcgagggacggagcaaccgtgagtcgtatgaaacttcaagtgtgggggactctgacatcccttggcagtaccctgccatgcagaagtctcagcagtcataagctcccttgggtgactgtcagccaccatgaccctgaagttccattcaaccacagctttatcgaacccccatctgctgggtgggccacagacgatagcttttcatcagatccggaatcaggagaggcggatgaagtgccggcttactgcgtcccgccacaggaggggatggtccctgtcgcccaggccggaagctcagaagccagtcttgccgctggtgctttcccaccacccgaagatgcgtcgacaccattcgctatccctaggactagtagcctggccagggccaagcgcccttctgtgagtttcgccgaaggcactaagtttgcccctcaatcaagacgctccagtggggagttgtcaagccccctgcggaaacctaagcggctgagcaggggagcacaaagcggtccagaaggacgggaagctgaggagtccacaggtcctgaggaggctgaggccccagagtcctttcctgcagctgcaagtccaggggactctgccaccggacaccgaagacctccactggggggtaggactgtggcagagcacgtggaggcaatcgaggggagcgtccaagagagctctgggcctgtcactaccatttatatgctggccggaaagcctcggggttcagagggccctgtaaggagcgtatttagacattttgggagttttcagaaaggccaggccgaggcgaaagttaagagggcaatccctaagccgcctcgccaggctctcaaccggaaaaagggctccccaggactggccagcggttcagtgggccagtcccccaactctgcccctaaagccggtttgcctggggctactgggccaatggcggtgcgcccagaggaagccgtgagggggctgggggcaggcaccgaatcatctagacgcgctcaggaaccagtatctggatgcgggtcgcccgagcaggatccccagaaacaggctgaggaagaacgccaagaggaacccgaatacgagaatgtagtcccgatttccagaccgcctgaaccctag

SEQ ID NO: 239703 - DNA, 1710 bp, synthetic construct
  misc_feature 1..1710: note = Description of Artificial Sequence: Synthetic coding sequence
  source 1..1710: mol_type = other DNA
atgggattgggtctgctcttgcccctcctgctgctgtggacaaggggaactcagggatctgagctggaccctaagggacagcacgtgtgtgttgcctcttccccctctgccgaactgcagtgttgcgctggctggcggcaaaaggaccaggaatgcacaattcctatttgtgaaggtcctgatgcttgccaaaaagacgaggtttgtgtgaagccgggtctctgtaggtgtaagcccggtttctttggtgcccattgctcgagccgctgccccggacaatattggggaccagactgcagggaatcttgcccatgtcacccgcatggtcagtgcgagcctgccaccggcgcttgccagtgtcaggcagacaggtggggcgctcggtgcgagttcccctgcgcctgcggccctcacggcaggtgtgacccggctactggagtgtgtcattgcgaaccaggatggtggagttctacttgccggagaccctgccaatgtaacactgcagccgcaagatgcgaacaggcaaccggggcttgtgtctgcaagcctggttggtggggcaggcggtgcagtttcaggtgcaattgccatgggagcccatgcgaacaggattctggacggtgcgcctgtaggccaggctggtggggtcctgagtgccagcagcaatgcgagtgtgtccgcggtagatgtagcgccgcatcaggcgagtgtacttgtcctccgggttttcgaggggctagatgcgaacttccatgtccagctgggtcgcatggcgtgcaatgtgcacactcctgtggacgctgtaaacataatgaaccatgtagcccagacaccggaagctgtgagagctgcgaacccggttggaatggcacccagtgtcaacagccgtgtctgccaggaacgttcggggagtcttgcgagcaacagtgtccccactgtagacacggcgaggcatgtgagccagatacgggacactgtcagaggtgtgatcccggttggcttgggccacgctgcgaggacccttgtcctaccggcacctttggtgaagattgtgggagcacatgtccaacctgcgtacagggaagctgtgatacagtcaccggggactgtgtgtgttctgcaggttactggggcccaagctgtaatgctagctgtcctgccggattccacggaaataactgctccgtgccgtgtgagtgtccagaaggcctgtgccatcccgtatccggatcatgccagcccggaagcggctctagggatactgctctcattgcaggtagtttagttccgctattgcttctcttcctcggcttagcatgttgtgcctgctgttgttgggctccacggtctgaccttaaagatagacctgctagagacggtgcaacagtgtccaggatgaagctgcaagtctgggggacgctcacatcactcggcagcacactgccctgtagatctctctcaagccacaaattaccctgggtgaccgcctcttccagtcgcccactccctgccggacctctcatgacgccctcgcaccctatactgagccttgagaggcagatgcggttcttgcctactgtgtgccaccctaagaagggatggagcctttggccccgacagggacggcagagaccagcatggctgcaggttcttagccgcccactccggactcctccacgccactcaccgtcacgcgcaccgccagcgtag

SEQ ID NO: 239704 - DNA, 2595 bp, synthetic construct
  misc_feature 1..2595: note = Description of Artificial Sequence: Synthetic coding sequence
  source 1..2595: mol_type = other DNA
atggaaggcgctggtcctcgcggagctggcccagccagacgtagaggcgcaggcggtcctccaagccccctgttgccgagtctgttactcctgctcctgttgtggatgttgccagacacagtggcaccccaagagctcaacccacgcggacgaaacgtgtgcagggctcctggatctcaagttcctacatgctgtgcagggtggagacagcaaggtgacgagtgcggaattgcagtttgcgagggtaatagcacctgtagtgagaatgaagtgtgcgtcaggcctggagagtgccgctgccggcacggttatttcggtgctaactgcgataccaagtgcccgagacagttctggggccctgactgcaaagaattgtgctcatgccacccacacggccagtgtgaggacgttacagggcagtgtacgtgccacgcacggcgatggggcgcaaggtgtgagcacgcttgccagtgccagcacggtacttgccacccaagaagcggcgcttgtcggtgtgagccagggtggtggggtgcccagtgtgcatccgcatgttactgctccgccacctcgaggtgtgatcctcagacaggcgcatgtctgtgtcatgcgggttggtggggtcggtcatgtaacaaccagtgcgcctgtaatagttctccgtgtgagcagcaaagtggcaggtgccagtgtcgcgagcgaacatttggtgccagatgtgataggtattgtcaatgcttcagagggagatgccaccccgtagatgggacctgcgcgtgtgagcccggatacaggggtaaatactgtcgcgagccatgtcctgcgggattttacggtttggggtgtcgcagacgctgcggacagtgcaaaggccagcagccttgcacagttgccgagggcaggtgtctcacatgcgagcctggatggaatggcaccaagtgcgatcagccctgcgcgaccggattctacggcgaggggtgcagccatcggtgtcccccatgtagggatggacatgcatgcaaccatgtaaccggaaaatgcacccggtgcaatgccggatggatcggagaccgctgtgagaccaagtgctcaaatggaacttacggggaggattgcgcctttgtctgtgcggactgtgggagcggccattgcgacttccaatctgggcgatgtctgtgttccccaggggtgcatggtcctcactgcaacgtgacgtgccctcccggtttgcacggagctgattgtgcacaagcatgctcctgtcacgaggacacatgcgacccagttactggcgcttgtcacctcgaaacaaatcagagaaaaggggtcatgggggctggcgctttgctcgtgctgctggtctgcttactcttatcgctgctcggctgctgttgtgcctgcagggggaaagatcctacccggcgagagctcagcctgggccgaaagaaggctcctcatcggctttgtggccgattttccagaatctcaatgaagcttcctagaatcccacttcggagacagaaacttcctaaggtcgtcgttgctcatcacgatcttgacaacaccttgaactgctcatttctcgagcctccgtcaggcctggagcagccttcccctagttggagctctcgggcaagtttcagctcttttgacacaacagatgaggggccagtctattgcgtacctcacgaggaagccccagccgaaagtagggaccctgaggtgcctacagtgcctgctgaagccccagcgcctagtccagtgccactgacaacaccagccagcgccgaggaagctattcctctgcccgcaagttctgatagcgagagaagcgcatcgagtgtcgagggacctggcggagctttatatgcacgggtggctagaagagaagcacgacccgctagagcacgaggcgaaatcggaggtctatccctctccccaagtcccgaacggaggaagccccctcccccagacccagcaacaaaacccaaggtgagctggattcacggaaagcatagcgccgcagcagctgggcgagctccatcccccccacctccgggaagcgaagcagccccaagtcccagcaaacgcaaaaggactccctccgataagtcagcacacacggtggagcacggttccccaaggacgcgtgatcccaccccacgaccaccgggtcttccagaggaggctacagccttagccgcacccagcccaccacgtgccagggcccgtgctagacctggcctgctggagccaactgatgctggcggaccgccaagatcagctccggctgcatccatgctcgctgcagacgttcgcggtaagactcggagcctgggcagagccgaagtagcattgggtgcccagggaccccgagagaagcccgcaccccctcagaaagctaaacgctcagtcccacccgctagtccagctcgtgctccacctgcaaccgaaacacctggtccggagaaagctgccacagatctgcccgctccagagacaccgcgtaaaaaaacgcccatacagaaaccccctaggaagaagagtagagaggccgcaggagaattaggaagggccggtgcacctacactgtag

SEQ ID NO: 239705 - DNA, 2598 bp, synthetic construct
  misc_feature 1..2598: note = Description of Artificial Sequence: Synthetic coding sequence
  source 1..2598: mol_type = other DNA
atggagggcgcaggacctaggggtgcgggaccagcacgccgtcggggagcaggcggaccgccatctccgctgctgccatcacttctactgcttctcctgctgtggatgctccccgacaccgttgcccctcaagaattaaaccccagaggcagaaatgtgtgcagggcgcctggaagccaagtccccacttgctgcgctggctggaggcaacagggtgatgagtgcggcatcgctgtctgcgagggcaactcaacctgctctgaaaatgaggtctgtgtacgcccaggggaatgccggtgtcggcacgggtatttcggggcaaactgcgataccaaatgcccacgccagttttggggcccagactgcaaggagctgtgctcatgccacccccacggacagtgcgaagacgtgaccgggcaatgcacctgtcacgcccgtaggtggggagccaggtgtgaacatgcttgccagtgccaacacggaacttgccacccaaggtccggggcatgcaggtgtgaacccggatggtggggcgcacagtgtgcatcagcctgttattgcagcgccacaagccgctgtgatccacaaacaggagcatgtttgtgtcacgcagggtggtggggcagaagctgcaataatcaatgcgcctgtaattctagcccctgcgagcaacagtcaggacgctgccaatgccgggaacgtacctttggtgccagatgtgatagatattgtcagtgcttccgaggccgatgtcatccagtggatggcacttgtgcgtgcgagccgggttaccgcggtaaatattgtagagagccttgtcctgccggattttacggcctcggctgcagacgtagatgtggccaatgcaaagggcagcagccatgtaccgtggctgaagggcgttgtctgacttgcgaacccggatggaacggcaccaagtgcgatcagccatgtgccacaggtttttatggagaaggctgtagtcacagatgcccaccgtgccgcgatggacatgcatgtaatcacgttacagggaagtgtacccggtgtaatgcgggatggatcggcgaccggtgtgagacaaaatgctctaatgggacatacggagaggattgcgcttttgtgtgtgccgactgtggatcgggccattgcgattttcagagtgggcgttgtctgtgtagccccggtgttcacgggccacactgcaatgtgacctgtccccctggcctccacggggctgattgcgcgcaggcatgttcatgccatgaagatacttgcgatcccgtgactggcgcttgtcatctagaaactaaccagcgtaaaggcgttatgggggctggagcactgctggtcctgctggtttgcttgcttcttagcttgcttggctgctgctgcgcctgccgcggaaaggaccctacacgacgagagcttagcctgggtcggaagaaggcaccccataggctgtgtgggcgtttctcccggatttctatgaaattaccccgaatccctcttcggaggcaaaaattgccaaaagtcgttgtggcacaccacgacttggataacaccctcaactgttcttttctggagcccccatccggcctggagcaaccttccccatcctggtccagcagggcttctttctcgtcctttgacaccaccgatgaaggtcccgtgtactgcgttccacacgaggaagccccagccgaaagccgcgaccctgaggtgcctacagtgcctgccgaagcccctgctccctcacccgtgccgctgaccacccccgctagcgccgaggaagcaattcccctgccggcaagcagtgacagcgagcgatccgcttccagcgttgaaggaccagggggagccctgtacgccagagtcgcccgacgggaagctcggcctgctcgggctcgtggcgaaatcgggggtttgtccctctcaccaagtcctgagcggaggaagccgcctccccctgatcctgccaccaaaccaaaagtctcttggatccatggaaagcattccgctgcagctgccggtcgcgctcccagtcccccacccccaggctcagaggctgccccttcccctagcaaacggaagcggacgccgagtgataaatcggctcatacagtcgagcatggatcccctcggacccgagatcccactccgcgaccaccagggttgcctgaggaagccacagccctggccgctcctagccccccacgggcacgcgcacgagccgctccgaggccacttggagctcacggccgtcgtcgtagccctgccaagagggctgaagccgcttctatgctggcagccgacgtaaggggaaagacacggtctctcgggagagctgaggtggcgctcggggcacaaggtccccgagagaagcccgcaccccctcagaaggcgaaaaggtccgtgcctcctgctagcccagcccgtgcaccaccagccaccgaaacaccaggaccagagaaggcagccaccgacctcccagctcccgagactcctcgaaaaaagacccctattcagaagccaccacgtaagaagtcgcgcgaggccgctggcgagctcggaagagccggtgctccaacgctatag

SEQ ID NO: 239706 - DNA, 1728 bp, synthetic construct
  misc_feature 1..1728: note = Description of Artificial Sequence: Synthetic coding sequence
  source 1..1728: mol_type = other DNA
atgcacaaggaagcggagatgctcattggccctcagctcgatgaaaaaagatgggggtggcggttgggcgacggttctgcggctcctcctttcttgccccaggcgctttcttttttactgttgctcccactggcttcggcccttcagcctactccactgcccttccaggaactgcgcctggttggcggaccatcccgttgcaggggtagattggaagttatgcatggcggatcttggggatcggtgtgcgatgatgactgggatgtggtagatgccaacgtagtatgccgtcagctggggtgcggtctagcgctgcctgtcccgaggcctttggccttcggccaaggcaggggcccaatactgttggacaatgtcgagtgccggggacaagaagctgctcttagcgaatgtggctcccgtggatggggggtccacaactgcttccactacgaagacgtagccgtcctgtgcgacgagtttctgcccacccagccgcctactcgcaagatgcttacaagtagagcacctccaactaccctgccgaatggaaaaagtgagggctcagtgagactcgtaggcggagctaacctgtgccaagggagggtggaaattttgcactctggattgtgggggacagtttgcgacgacgactggggtctgcccgacgcggctgtcgtgtgccgacagttgggctgtggcgctgcaatggccgctacgactaacgcctttttcggctacggcacaggtcatatccttctggacaacgtgcattgcgaaggtggcgagccccgtctcgccgcatgccagagcctcggctggggggtgcataactgcgggcatcatgaggatgccggagcgttgtgcgccggtcttgggcctccaacgctcaccgctcttccatccagtgccacccgggaagactgggcatggcaaacggacccctccgcgaccggcgtggggcctcaacctagcagggaaactgcgctgctaacaaccgctgcatgggcagcagggaaaaagagcggcaggctgagactggtgggcggacccggaccctgtcgcggacgggtggaggtcttgcatgcaggcggatggggaactgtgtgtgatgatgactgggacttcgcagatgccagggttgcctgccgcgaggcagggtgcggcccagcattgggcgctactgggctgggccacttcggctacggaagaggcccagtcctcttagataatgtgggatgtgccggtaccgaggcccgactgtcggattgcttccatctggggtgggggcagcataattgcggtcaccacgaggatgccggagcactttgtgcgggtcctgaagagctcgggctgcaggtccagcaggacggcagtgaaaccaccagagtccctacacccagaccccgtgatggacacctcaggctggtcaatggcgcacaccgctgcgaggggagagtggaactgtatttaggccagcggtggggcaccgtgtgtgatgacgcctgggacctgcgggcagcaggcgtgctctgccggcagctcggatgcgggcaggcccttgcggctcctggcgaggcccatttcggcccaggcaggggcccaattctccttgacaatgtcaaatgtcgtggcgaagagagcgcccttctcctgtgctcccacatccgctgggatgcccataactgtgaccatagcgaggacgcatccgtgctttgtcagcccagttag

SEQ ID NO: 239707 - DNA, 849 bp, synthetic construct
  misc_feature 1..849: note = Description of Artificial Sequence: Synthetic coding sequence
  source 1..849: mol_type = other DNA
atgtccaacgtgactctgaggaaaatgtcaccaaccggcaatgagatgaaatcgaccacacaggggacaaccaggaagcagcaggactttcatgaggtgaataagcggcgaacattcttgcaggacaattcctggatcaagaaaagaccagaggaggagaaggacgaaaactacggccgagtcgttctaaatcgccacaatagccatgacgcccttgatagaaaggtgaatgagagggatgtacctaaggccaccatctctcggtactcaagcgatgataccctggataggtccatgtccatgtttagatccctcgaagtcaccaagctccaaccagggggtagccttaacgcgaacacctctaatacaatcgcttctactagcgcaacaactcccgtgaagaagaaacggcagtcctggttcccccctccccctcctggatacaatgcctccagctcaacaggcacaagaagaagggaacccggtgtgcaccccccaattcccccaaagccttcatctcctgtttcatctccaaatcagctgagacaagacaatcgccagattcatccacccaaaccgggtgtctacacagaaacaaatcggagtgctgaaaggaacattagcgaggagctcgataacttaataaagatgaacaaaagtctgaataggaaccaaggactggattcactcttcagagcgaatcccaaagtggaagaacgcgaaaagcgggctaaatccctggagagtttgatctacatgtccactaggacagataaggacggaaaaggcatccagtcattgggttccccaatcaaagtcaaccagagaaccgataaaaacgaaaagtag

SEQ ID NO: 239708 - DNA, 2067 bp, synthetic construct
  misc_feature 1..2067: note = Description of Artificial Sequence: Synthetic coding sequence
  source 1..2067: mol_type = other DNA
atgagtaacgtgaccttgcgaaagatgagcccaactggcaacgagatgaaatccactactcagggcacgaccagaaagcagcaggattttcacgaggtgaataaacgcaggacctttctgcaagataatagctggatcaagaaaagacctgaagaggaaaaagacgagaattacggaagggttgtgctgaataggcacaatagtcatgatgcactggacagaaaggtcaatgagagagacgtgccaaaagcaaccatttcgagatactcttccgatgacaccctggataggatctcggatcgcaacgacgctgccaagacatacaaagctaataccctggataatcaactgacaaatagatctatgtccatgtttaggtcacttgaggtaacgaagctccagccgggtggctcacttaacgcaaacacgagcaacaccatcgcatccacatccgcaacaacgcctgtcaaaaagaagaggcaaagctggtttcctccaccccctcctggctataatgcttcgagttcaacgggaaccagacgccgtgagccaggcgtccacccccctattccgccaaagccttcatcaccagtgagtagtcccaatcaacttagacaggacaatagacagattcatccgcctaagcctggcgtgtacactgagaccaatagatctgccgagaggaatattcgcagccaagatttggataatatcgtgaaagtggctacctcactgcagagatccgacaagggcgaagagctggacaacttgatcaaaatgaacaaatcccttaataggaaccaaggactggactcactgttccgggctaaccccaaggtggaagaacgcgaaaaaagagctaaatctctagagtcacttatttatatgtccacacggaccgacaaggacggaaaggggatacagtctctgggaagcccgatcaaggtgaaccagaggaccgataaaaacgagaaaggcagacagaatctcgagtcggttgctaaggttaacgcccgtatgaataagacgagcaggagatcagaggatttagataatgcaaccgaggtgaatcctaaaggtcacgagaatactaccggaaaaaaggacctcgacggtctaatcaaggtagatcctgagactaacaaaaacattacccggggacagtctctggacaacctgatcaaggtgacgccggaagtgaagagatcaaaccaggggtcgaaggacctgaataattttatcaaagtgtatcccggaaccgagaagtcaaccgaagggggacaaagcctcgactccctcatcaaggttactccagaaagaaaccggactaaccagggtaaccaggacctcgaaaatctgatcaaggtgattccttcggccaacaaatcttctgagcagggtctggatgagcatatcaacgtgtcccccaaggccgtgaagaacactgacggcaagcaagacctggacaaattgatcaaagtgaatcccgagatttttacaaacaaccaaagaaaccaagatcttgccaatttaatcaaagtgaaccctgctgtgattcggaacaaccagagtcaggacctggacaacctgatcaaagtgaagccgtcggcccttcggaacactaatcgagatcagaacctcgaaaacctaatcgaagttaacagccacgtgagcgaaaacaaaaatggctcaagtaacacaggtgctaagcaagcaggccctcaagatactgtggtgtatacgcgcacctacgtcgagaactcaaaatcacctaaggacggataccaggaaaacatctctgggaaatatattcagactgtgtactctacatctgatagatccgtcattgaaagagacatgtgcacatattgcaggaagccactgggcgtggagacgaagatgattctggacgaacttcaaatttgctgccactccacatgcttcaagtgtgaaatttgcaaacagcctctggaaaacctgcaagccggagattccatatggatctaccgccagaccattcactgcgaaccgtgttactcaaagatcatggcaaagtggataccttag

SEQ ID NO: 239709 - DNA, 2007 bp, synthetic construct
  misc_feature 1..2007: note = Description of Artificial Sequence: Synthetic coding sequence
  source 1..2007: mol_type = other DNA
atgtcgaacgtgactctgcgtaaaatgtctcccacgggtaacgaaatgaagagtaccacacaggggactactcgcaagcaacaagacttccatgaagtgaacaagagaaggacattcctgcaggataactcttggatcaaaaaacgtccagaagaggagaaagatgaaaactacggacgagtcgtgttgaatcggcacaacagtcatgatgccctagatcggaaggtgaatgagagagacgtcccgaaggccacaatcagtagatattcttccgacgataccctggatagaattagcgaccgcaacgacgccgcaaaaacttacaaagccaacactctagataatcaactgaccaatcgctctatgagcatgtttcgcagcctggaagtgactaagctgcaacccggaggttccctgaacgctaacacgagtaatactattgccagcacctcagcaactactcccgttaagaagaaacggcagtcctggttccctcctcccccaccagggtataatgcctcatcctctaccggaacacggaggagggagcccggagttcatcctcctattcctccaaagccgagctcccccgtttcatcaccaaaccagcttaggcaggataatcgccagattcaccctccaaagccaggagtgtatacagaaaccaataggtccgctgagcgcaatatctcagaagagttggacaatctaattaaaatgaataaatctctgaataggaaccagggtctggattcacttttccgggctaatcctaaggttgaggaaagggagaaaagggcgaaatccctggagagcttgatctatatgtccacacgcacagacaaggatggtaaaggtatccagtccctgggtagcccaattaaagtcaaccagcgcacagacaagaatgaaaagggcagacagaacctggagagtgtggccaaagtcaatgccagaatgaacaaaaccagtcgcaggagcgaagacttggacaacgccacagaggtgaacccaaaagggcatgagaatacaacgggtaagaaggatctagatggcctcattaaggtcgaccctgagacaaacaagaacatcacaagaggtcaatccctagacaaccttatcaaggtcactcctgaagttaagcgtagcaatcagggatctaaagacctgaataacttcatcaaagtttacccaggcactgagaaaagcacagagggagggcaatctctagattctcttataaaggttacacccgagagaaatcggactaaccagggcaatcaggacctcgagaatctcattaaagtgatacccagtgccaataaaagctcagaacagggccttgatgaacacattaatgtgagcccgaaggccgtcaagaacacagatggtaagcaggacctggataagttgatcaaagtgaatccagaaatatttaccaacaatcagcggaatcaagacctggccaatctgatcaaggtaaatccagcagtgattcgcaataaccagtcccaggacctggacaatctgataaaagttaaaccttctgccctgcgcaatacaaatcgggaccaaaatcttgaaaacctcatcgaggtaaactcccacgtctccgagaacaagaatgggagcagcaataccggtgcaaagcaggctggccctcaggataccgtcgtgtataccagaacttatgtggagaatagtaagtcacctaaagacggctaccaggagaacatttccggtaaatatattcagacagtctatagcactagcgacaggtccgtaatcgagcgagatatgtgtacttattgtaggaagcctttgggcgtggaaacaaaaatgatcttggacgagctgcagatttgctgtcactctacctgttttaagtgcgaaatttgcaagcagcctctagagaacttgcaggccggtgacagtatctggatataccggcaaaccatacattgcgagccctgttattctaagattatggccaaatggatcccctag

SEQ ID NO: 239710 - DNA, 1941 bp, synthetic construct
  misc_feature 1..1941: note = Description of Artificial Sequence: Synthetic coding sequence
  source 1..1941: mol_type = other DNA
atgtccaacgtcaccctccgtaagatgtccccgactgggaacgaaatgaagtctacaactcaggggactacgaggaagcagcaggactttcacgaagtgaataagcgtcggacattcctccaggataattcttggatcaagaaacggcctgaggaagagaaggatgagaactatggacgggttgttctcaatcggcataattctcatgacgctctggatagaaaagtcaacgagcgggatgtgccaaaggctactatctccagatactcttctgacgacaccctggatcgtatctctgatcggaacgacgcggcaaagacatacaaagcaaatactctcgataaccagctcaccaaccggagcatgagcatgttcagaagcctggaggtgactaaactgcagcctggtggatccctgaatgctaatacatccaacactatcgcttccacaagcgctactacgccagtcaagaagaaaagagagcccggtgtccatccacccataccacctaagcctagttctcctgtgagctctccaaaccagctgagacaggataatcggcaaatccatccaccaaagcctggagtctacaccgagacaaataggtcagctgaacggaatatacggagtcaggatttagataatattgtcaaagtggccacatccctccagagatcagacaaaggcgaagagctagataatctgataaaaatgaataaatcgttaaatcggaatcaaggtttggactctctgttccgagccaatccaaaggtggaagagagagaaaagagagccaaaagcttggagtccctgatctacatgtccacccgaacagataaggatggaaagggcatacagtcgttaggatcacctatcaaagtgaaccagagaacagacaagaatgaaaagggacggcagaatctggaatccgtcgctaaagtgaacgccaggatgaataagacctccagacggtcagaggacttagataatgcgactgaggttaaccctaaggggcacgaaaacacgaccgggggtcagtccctggacaacctgataaaggtgacacctgaggtgaagcgaagtaatcagggctctaaggatctgaataacttcatcaaggtgtaccccggtactgaaaagagtacagagggcggacagtctttggatagtctgatcaaggtgacacccgaacgaaacaggaccaaccagggaaaccaggatctggagaatcttattaaagtgatcccgtctgccaacaagtcaagtgagcagggcctggatgagcacatcaacgttagtcctaaggccgtgaagaacactgacggcaagcaggatttggataagctgattaaagtgaaccccgaaattttcaccaacaaccagagaaaccaggatttggctaatttgatcaaagtcaatcctgctgtcatccgaaacaatcagtcccaagacctggacaaccttatcaaggtgaagccctctgccctgagaaacaccaacagagaccagaacctggaaaacctgattgaggtgaattcccacgtgagtgaaaataagaatgggagcagcaatactggtgctaagcaggccggaccccaggacacggtagtctacactcggacctatgtggaaaattctaaaagtcccaaggatggataccaggaaaacatctccggcaaatacattcagacggtgtattctactagcgacagaagcgtgattgaacgcgacatgtgtacctactgtagaaagcctctgggcgtcgaaactaaaatgatcctggatgagcttcagatatgctgtcactccacctgcttcaaatgcgaaatatgtaaacagcctttggagaacctgcaggcaggcgatagcatctggatttaccgccagactatccactgtgagccctgttattccaagattatggctaaatggatcccttag

SEQ ID NO: 239711 - DNA, 2148 bp, synthetic construct
  misc_feature 1..2148: note = Description of Artificial Sequence: Synthetic coding sequence
  source 1..2148: mol_type = other DNA
atggctcgggaattataccacgaagaattcgctcgtgctgggaagcaggcaggactgcaggtttggaggatcgagaagctggaactggttcccgtccctcaatcagcccacggtgacttttacgtgggagatgcctacttggtccttcataccgccaaaaccagccgcggatttacgtaccatctccatttttggctgggtaaggagtgtagtcaggacgaaagcacagccgcagccatttttacagtgcagatggacgattatctaggagggaagccagttcaaaacagagaacttcagggctacgaatctaacgactttgtaagttatttcaagggcggtctgaagtacaaggctggaggggtggcaagtggattgaaccatgtgttaacgaatgatctcactgctaaaagacttctgcacgttaaggggaggagagtcgttcgcgctacagaagtgcctctgtcttgggacagcttcaataaaggagattgctttataatcgatctggggaccgagatctaccagtggtgcggaagctcttgtaataagtacgagcgactaaaagcaaatcaggtcgcgaccggaattcgatataacgaaaggaagggccgtagcgagttgatcgtagttgaggaagggagtgagcctagcgagctgattaaggttctcggagaaaaacccgagctgccagatgggggagacgacgacgacataatcgcggacatctcaaatagaaaaatggcgaagctgtacatggtgagtgacgcttccggatcgatgagggtcacggtggttgctgaggagaacccctttagcatggccatgttactgtccgaagagtgcttcattctcgatcatggggcagccaaacagattttcgtgtggaagggcaaagatgccaatccccaggagaggaaggccgctatgaagaccgcggaggaattcctccagcagatgaattatagcaagaacacgcaaattcaggtgcttccggagggcggtgaaactccgatcttcaaacagtttttcaaggattggagggacaaggaccagagtgacggatttggcaaggtttacgtaactgagaaggtcgcccagatcaagcagattccattcgacgcaagtaaacttcactcatccccccagatggcagctcagcataatatggtcgatgatggatccggcaaggtggaaatctggcgggtggagaataacgggagaattcaggtcgaccagaattcttacggagagttctatggcggtgattgctacattatcttgtacacttatccgcgaggacagattatttatacctggcagggcgctaatgccacccgcgatgaactcacaacctctgcattcttgacggtgcaattagacagatctctgggcggacaagctgtccaaataagggtatcccagggtaaagagccagtgcatctcctttctctgttcaaggacaaaccgttgattatctataaaaacggcacttccaaaaagggtggccaggccccagcgccacccacccgcctgttccaggtcagacgtaatctcgcatctatcactcggatcgtggaagtggatgtcgacgccaatagcctcaactcaaatgacgtgttcgtgctgaagttaccccaaaattctggctatatctgggtgggcaagggtgcatctcaggaggaagagaagggagctgagtacgttgcctccgtactgaagtgcaagaccttgagaatccaggaaggggaggaacccgaggagttttggaatagtcttggtggaaagaaggattatcaaacatccccactcctcgagactcaggcagaagatcacccccctagactgtacggatgtagcaataaaactggtcggttcgtgatagaggaaatcccaggcgaatttacacaggatgaccttgccgaagatgatgttatgctcctcgacgcctgggaacagatttttatttggattggaaaagatgccaacgaggtcgagaaaaaggagtcactcaaatccgccaagatgtatttggagacggatccttccggtagggataaacgcactcccattgtaatcattaaacagggccatgagcctccaacttttacaggatggttccttgggtgggacagctccaaatggtag

SEQ ID NO: 239712 - DNA, 1407 bp, synthetic construct
  misc_feature 1..1407: note = Description of Artificial Sequence: Synthetic coding sequence
  source 1..1407: mol_type = other DNA
atggctaagctgtatatggtcagcgacgccagcggctccatgagggtgacagtggtagccgaagagaatcccttcagtatggccatgctcctgtcggaggagtgcttcattcttgatcatggtgctgctaaacagatatttgtgtggaaaggtaaggacgcaaatccacaggagcggaaagctgccatgaaaacggctgaagagtttctgcagcagatgaattatagcaagaatacccaaatccaagtcctgccagagggtggagagacacctatcttcaaacagtttttcaaagactggagggacaaggatcagagtgatggtttcggcaaagtctacgtcacggaaaaggtggctcaaataaagcaaatccccttcgatgctagcaaactgcacagcagcccacagatggccgctcagcataacatggtggatgacggatctgggaaggttgaaatatggcgggtcgaaaataatggacggatacaggtggaccagaacagctatggggagttttacgggggagattgctatataattctttacacatatcctaggggccaaatcatatacacctggcaaggcgcaaacgctactagggacgagctaactacctccgcattcttgactgttcagctcgatagatctttgggcggacaggctgtgcagatcagagtgtcccagggtaaggagcctgtacatttactgtccctgtttaaggataaaccattgatcatttacaagaatggtacatcaaaaaagggtggtcaggcaccagcacctcctacaaggctgtttcaagtgagacgtaatttagcatcaataactcgaatcgttgaggtagacgtggatgcgaactctctgaatagcaatgatgtgttcgtactgaaactgcctcagaattccggctacatctgggtcggcaagggcgcatctcaggaggaagagaaaggagccgagtatgtcgctagcgtactcaagtgcaaaacccttcggatccaagaaggtgaggagccagaagagttctggaattcactgggtggaaagaaagactatcagacgagtcctctactcgagacccaggccgaggaccacccccctcgactttatgggtgctcaaacaagaccggcagattcgtaattgaggagataccaggtgaattcacccaggatgatctggcagaggatgacgttatgctgctggatgcatgggagcagatcttcatttggattggcaaggacgcaaacgaggtggaaaaaaaagaaagtctcaaaagcgcaaagatgtatctggagaccgacccaagtggtcgggacaaacggacccctattgttatcatcaaacagggccatgaacccccaacatttaccggatggttccttggttgggactctagcaaatggtag

SEQ ID NO: 239713 - DNA, 1407 bp, synthetic construct
  misc_feature 1..1407: note = Description of Artificial Sequence: Synthetic coding sequence
  source 1..1407: mol_type = other DNA
atggccaagctgtatatggtgtcagatgcgtctggttcaatgagggttaccgttgttgcagaggagaatccgttttccatggcaatgctgctgagcgaggaatgctttatactggatcatggggcagctaagcagatattcgtgtggaagggaaaagacgccaatccccaagaacgaaaggctgcgatgaaaaccgcggaggagtttctgcaacagatgaattattcaaaaaacacccagatccaggttcttccggaaggaggagaaacccccatctttaagcagtttttcaaggattggcgggacaaagaccagagcgacggctttggcaaggtttacgtaaccgagaaagtagcccagatcaaacagatccccttcgacgcgagcaaactacatagcagcccgcagatggccgcacagcacaatatggtggatgatggttctggaaaggtagaaatctggcgcgtcgagaataatgggagaatccaggtcgaccaaaattcatatggagaattctacggcggagactgctatatcattctgtacacctaccccaggggacagattatctacacatggcagggtgcgaacgccaccagggacgagctcacaaccagcgcattcctgacggtgcagctggaccggagtctcggcggtcaggcggtgcagataagagtgtcccaggggaaagagcctgtgcacctgcttagcctgtttaaggataagccactgattatatataaaaacggtacttccaagaaaggcggacaggctcccgctcctcccactaggctgttccaggtccgcagaaatctggccagtattactcgtatcgtggaagtcgacgtggacgcgaacagtctcaatagtaatgatgtcttcgtcttgaaacttccgcagaactcaggatacatctgggtcggaaaaggcgcatctcaggaagaggagaaaggggctgaatacgtcgccagtgtccttaaatgtaagaccttgcggatccaggaaggagaagagcctgaagagttctggaactctctgggaggaaagaaagattatcaaacgtctcctcttctagaaactcaggcggaagaccatccacctcgcctctacgggtgtagtaataagacaggtaggttcgtgattgaagagattccaggagagttcacccaagatgatttggctgaggacgatgtgatgctactggatgcatgggaacagatcttcatctggatcgggaaggacgcgaatgaggttgagaagaaggaatccctgaagtctgcaaaaatgtatctagagacagatccatcagggagggacaaaagaaccccaatcgtcatcataaagcagggtcatgagccaccaaccttcactggttggtttctgggatgggattctagtaaatggtag

SEQ ID NO: 239714 - DNA, 3864 bp, synthetic construct
  misc_feature 1..3864: note = Description of Artificial Sequence: Synthetic coding sequence
  source 1..3864: mol_type = other DNA
atggaacccatctatcccttcgctcgccctcaaatgaataccagattcccttcatccagaatggtgccttttcactttcccccttccaagtgtgccctgtggaatccaacacccacaggggatttcatatacctgcacttgtcttattacaggaaccccaaacttgttgtaacggagaagaccatcaggctggcctatcgacacgccaaacagaataaaaagaatagcagttgcttccttcttggttctctgactgccgatgaagacgaggagggggttacactcacggttgacaggtttgatcccggtagggaggttcccgagtgcctagagataacgcctaccgccagcctgccaggagatttcctgataccatgtaaagtccacactcaggaactgtgttcccgggaaatgatcgtgcactcggttgacgacttttcgagcgcactgaaggctttgcagtgtcacatctgtagcaaggacagccttgactgtggaaagcttctgtcccttagggtgcacatcacctcccgcgagtcgctggattctgtggaatttgatctgcactgggccgctgtcacgctcgcgaataacttcaagtgtacccccgtgaaaccaatcccaattattcccactgccttagcccgaaacttgtctagcaatctgaatatttcacaggtacagggtacttacaaatacggctaccttactatggatgagacccggaaattattactattactggaaagtgatccaaaggtctattctttgccccttgttggaatctggctcagtgggatcacccatatttacagcccccaggtttgggcgtgctgcctgaggtatatcttcaattcctctgtgcaagaacgggtctttagtgaaagtggtaacttcatcattgttctttattccatgacccataaagagcccgagttctacgaatgcttcccatgtgatggtaagatccctgacttcagatttcagcttttgacctctaaggagacgctgcatctttttaagaacgtggagccccctgataaaaatcccatcagatgtgagctgtccgctgagtcccagaacgccgagaccgagtttttcagcaaagcgagtaaaaatttctctatcaagcggagcagccagaaactgagttctggaaagatgcccattcatgaccacgattccggtgtggaggacgaggacttcagcccacgaccaatcccctcgcctcacccggtgagtcagaagatttccaaaattcaaccaagtgtgcccgagttgtctctcgtgcttgacggaaactttatcgaaagcaacccattgccaacacctctggagatggtgaataacgagaacccaccactcattaaccatctcgagcacctgaaacccctacagccgcaattatatgacgaaaaacactccccggaagtcgaggccggtgagccaagtttgcgcggaatccccaaccagttgaatcaagacaagccagccctgctccgccattgtaaggtgagacagccccctgcctacaaaaaggggaacccacacacaagaaattctattaagccatcctcgcataacggccctagtcatgatatctttgagaagctccagactgtgagcgctggaaacgtccagaacgaagaataccccataagaccaagtacactaaacagtaggcagtccagtctcgccccacagtcccagcctcacgacttcgtcttttcgcctcacaatagcggacgtccaatggagctacagattcctacccctcccctgcccagctactgcagcaccaacgtgtgcagatgttgtcagcatcactcccacatacagtattcccccctgaactcttggcagggagccaacaccgtgggatccatccaggatgtgcagagcgaagccctccagaaacatagtctgttccacccaagcggctgtccggcactatactgcaacgcattttgtagctcctcctcacctatcgctctgcgaccccagggagacatgggctcatgctcaccacatagcaacatcgagcctagcccagtggccagaccgccaagtcacatggacctctgtaatccccagccttgtactgtgtgtatgcacacacccaaaaccgagtcggataatgggatgatgggcctttccccagacgcctatcgcttccttacggagcaggaccggcaactccgccttctgcaagctcaaatccagcgacttctcgaagcacaaagcctgatgccctgctcccccaaaactaccgccgtggaagatacggtgcaagctggacggcaaatggagctggtgagcgtagaggcgcagagtagccctggcctgcatatgcgcaaaggcgtcagcatagccgtctcaactggcgcatctctgttctggaacgcagctggagaggatcaagagcctgattcacaaatgaagcaagatgatacaaagatctccagcgaagatatgaacttctctgtggacattaataacgaggtgacatctctgccaggatcagcctccagtttaaaagccgtggatataccatctttcgaagagagcaacatagccgtcgaagaggagttcaatcagcccctgagtgtgagcaattcctctctagttgtccgcaaagagcccgacgtcccagttttcttcccgagcgggcagctagccgaatccgtctcaatgtgtcttcaaacagggcctactggaggagcatctaataatagcgagacgtcagaggaacctaagattgagcatgttatgcagcctttgttgcaccagcctagtgacaatcagaagatataccaagacctgctcggacaggtgaatcatctactcaattcaagtagcaaagaaaccgagcagcccagcacaaaggcagtgattataagccatgaatgcacccgcacccagaatgtgtaccataccaaaaaaaagacccaccattccagattggtggataaagattgtgtgctcaatgcaaccctgaagcagctgaggagcctgggcgtgaaaattgactctcccacaaaggtcaagaagaacgcacataacgtggaccatgccagcgtgctggcatgcatttcgcccgaagccgtgatttctggcctaaattgtatgtcgtttgcgaacgtgggtatgtccggtctgtctccgaacggggttgacctcagcatggaggctaacgctattgccttaaagtacctgaacgagaaccagctctcccagttgtctgtgacgcgaagcaatcaaaacaactgcgatccttttagccttttgcatattaacactgaccgaagcaccgtaggactaagcttaatctcacctaacaatatgagtttcgcaacaaaaaagtatatgaaacgttatggtctactccagtcttccgacaattctgaagacgaggaagagcctccagacaacgccgatagtaagtcagagtaccttctcaatcaaaacttaagaagcatccccgagcaactggggggacaaaaggaacccagcaagaacgatcatgagattatcaactgctcaaactgtgaatccgtgggaacaaatgcagatactccagtgctacggaatataaccaatgaagtgcttcaaactaaagctaaacaacaacttaccgagaagcctgccttcctggttaagaatctgaagccctcccctgctgtgaacttgaggactgggaaggccgagtttacacagcaccccgagaaagaaaatgagggtgatatcacaatcttccccgaatctttgcaaccatccgagaccctgaagcagatgaacagcatgaactctgttggtacattccttgatgtgaagcggctcaggcagctgcccaagctcttttag

SEQ ID NO: 239715 - DNA, 3864 bp, synthetic construct
  misc_feature 1..3864: note = Description of Artificial Sequence: Synthetic coding sequence
  source 1..3864: mol_type = other DNA
atggagcccatctaccctttcgccagacctcagatgaatacccggttcccaagctccaggatggtcccgtttcatttcccaccctcaaagtgtgctctttggaaccccacaccgactggcgattttatctatcttcacctctcctactaccggaaccccaaacttgtagttacagagaaaacaatcaggctcgcctatagacatgccaagcaaaacaagaagaattcctcttgcttcctacttgggtccctgaccgctgacgaagatgaggaaggcgtaactctgactgtggatcgctttgatcccggacgggaggtcccagagtgcctggagatcacacctactgcgtccctgcccggtgacttcctgatcccctgtaaggtacacacacaagagctgtgttcgcgagaaatgatagtccattctgttgacgacttctccagcgcgttaaaagcactacagtgtcatatctgttcaaaggactctctagattgtggcaaacttttgagccttagggttcacatcaccagtcgagaatccctggactcagtggaattcgacctccactgggctgcagtgaccctggcaaataacttcaaatgcacccctgtgaaacccatcccaataatcccaactgcactcgcccgaaatttgagctctaatcttaacatttcccaagtacaaggtacatacaaatatggatatttgaccatggacgagaccagaaagttgctgctgctccttgaatccgatccgaaagtctattctctccctttggtcggaatctggttatcgggaattacacacatttacagcccccaagtgtgggcatgctgtctgcggtatatcttcaattcgagcgtccaggaacgagtcttcagtgaaagcgggaactttatcatcgtgttgtactccatgacccataaggaaccggaattctacgagtgcttcccgtgtgatggtaaaatcccagatttccgcttccagctactgaccagcaaagagacactccatctgttcaaaaacgtggagccccctgacaaaaaccctattaggtgcgagctgtcagccgaaagtcaaaacgctgaaaccgaatttttcagcaaagcatctaaaaatttttcaattaagaggtcatcacagaaactgtcctctggcaagatgcctatccacgaccacgatagtggcgtggaggacgaggatttctcccccagaccaattccctcaccgcaccctgttagccagaagatttccaagatccagccctccgtacctgagttaagcctcgtgctcgatgggaatttcatcgaatccaatcccctgcctacccctttggagatggtgaataacgagaaccccccactcataaaccacctggagcacttgaagcctctgcagccccaattatatgatgaaaagcattctcctgaggttgaggcaggcgagcctagcctgaggggtatccctaatcagcttaatcaggacaagcccgcattgttgcgacattgcaaggtcagacagcctcccgcatacaagaaggggaatccccacacccgcaacagtattaaaccgtccagccataacggtccatcccacgatatttttgagaaattgcagacagtctctgccggtaatgtgcaaaacgaggagtaccctatccggccttctactctgaactctcggcaaagcagtctcgctccacagagtcagccccatgatttcgtttttagcccacacaacagcggcaggccaatggagctccagatccccacacccccacttccatcgtactgttctacaaatgtgtgtcgctgctgccagcatcactctcacatccagtattcccctttaaacagctggcagggtgccaacacagtggggtccattcaggatgttcagtccgaagccttgcagaagcattctctgttccatccatccgggtgccctgctctttactgcaatgctttctgttcaagcagctcgcccattgctctccgccctcagggtgacatgggaagctgctctccccactctaacatcgaaccttctccagtggccagaccgccttcccatatggacttgtgtaaccctcagccttgtacagtttgcatgcacacaccgaaaacagagtctgataatgggatgatgggtctgtccccagatgcttacagattcctgaccgagcaggaccggcaacttcggctactccaggcccagatccaaaggctcttggaggcacagtcccttatgccctgttctccaaagacgactgctgtggaagatacagtgcaggccggtcgccagatggaactggtgagcgtggaggctcagtcctcaccaggactgcacatgagaaaaggggtgtccattgccgtgagcacgggggctagtctcttttggaacgcagccggtgaggaccaggagccagactcccagatgaaacaggacgacactaaaatcagttctgaagacatgaacttttctgttgatatcaacaatgaagtgacgtctctacccggatccgcatcttcactaaaagccgtggacattccttctttcgaagagtctaacattgccgtggaggaggagttcaaccaaccgctcagtgtctcaaacagttctctagtggtgcggaaggaaccagacgttcccgtgttcttccccagcgggcagctggccgaatctgtcagcatgtgtcttcaaaccggcccaactggaggggcttcaaataactccgaaacctcagaggagccgaaaatcgagcacgtgatgcagcctctgctccaccagccctccgataaccagaagatctaccaagaccttctcgggcaggtgaatcacctgctcaacagcagctcaaaggagacagagcaacctagcactaaagcagtgattatctcccatgagtgtacccggacacaaaacgtgtaccatacgaaaaagaagacacatcactcaagactcgttgacaaagactgtgtcctaaacgctactcttaagcagctcagatccctgggtgtgaagattgattctcctacaaaggtgaagaagaatgctcacaatgtggaccacgcttccgtgctggcgtgtatctcacccgaggccgttatctccggcctgaattgcatgagctttgctaacgtggggatgagcggcctaagccctaacggagtggatctgtctatggaagctaatgccattgctctgaaatatcttaatgaaaatcagctctcacagctgtcggtgacccgctccaatcagaacaactgtgaccccttttctctgctgcatatcaatactgacaggtccacagttgggctgtccctgatcagcccaaataacatgagcttcgcgacgaagaaatacatgaagcgttatggactgttgcagagttctgacaatagcgaggatgaggaggaacccccagacaacgcagacagcaagagcgagtacctcctgaaccaaaatctcagaagtattcccgaacaattgggcggacaaaaggagccaagtaagaatgatcatgaaataatcaattgttctaattgtgagtcagtgggaactaacgcagacactcccgtgctgagaaatatcacaaacgaagtgcttcagactaaagccaagcagcagctgaccgagaaacctgcctttttagtcaaaaatctgaagccatcacctgctgtaaatctgagaactggtaaggctgaattcacacagcacccagagaaggaaaacgagggagatatcacaatttttccggagtctttgcagccaagcgaaaccctgaagcagatgaacagcatgaattcagtgggcacctttcttgatgtgaaacgtttgagacagctgccaaaattgttctag

SEQ ID NO: 239716 - DNA, 3864 bp, synthetic construct
  misc_feature 1..3864: note = Description of Artificial Sequence: Synthetic coding sequence
  source 1..3864: mol_type = other DNA
atggagcccatttatccctttgccaggccacagatgaatacccgattccctagctcaaggatggtgcctttccatttcccacccagcaagtgtgccctctggaaccccactccgactggggacttcatatatctccacctgtcctattatcgaaaccctaaactggtagtcactgagaaaacgatcagactggcttatcgccacgccaagcagaataagaaaaacagcagctgcttcctgctggggtcactcactgccgatgaggacgaggagggcgtgacactgaccgtagataggttcgaccctgggagggaagttcccgagtgcctggaaattactcccaccgcatccctgcctggggactttctgattccatgcaaggtacacacacaagagctgtgtagcagggaaatgatcgtgcattccgtggatgattttagttccgcactcaaagcattgcagtgtcatatatgtagcaaagatagcttggactgtggcaaacttcttagtcttagagtacatattacatctcgcgagtctctggactcagttgaattcgacttacattgggcagccgtgactctggcgaacaatttcaagtgtaccccggtgaagcccatccctattatcccaaccgcactggcacgcaatctgtcctcgaacctgaatatctctcaggtgcaagggacatataaatatggctacctgaccatggatgagacccgtaagctgcttctgctgctggagtcggatcctaaggtgtatagcctgccccttgtgggcatatggctcagcggtattacccacatctattccccccaggtctgggcttgttgccttcggtacattttcaactcttcagtgcaggaaagggtcttctccgagagcggcaattttataatcgtgctttacagcatgacgcataaggagcctgaattctatgaatgtttcccttgcgatgggaagatacctgacttcaggttccagttgttgacaagtaaggagactttgcacctttttaaaaacgttgagccacccgataaaaatccaattcgttgcgaactgagcgccgagtctcagaatgctgaaacagaattttttagtaaagcttcaaaaaacttctccatcaaaagatcatctcaaaagctcagttctggtaagatgccaatccatgatcacgactctggggtggaagatgaggatttcagcccacgcccaattccgagccctcaccccgtgtctcagaaaatctccaaaattcagcccagtgttccagagcttagcttagtgttggatggtaacttcatagaatctaatcctttgccgacccccctagaaatggttaacaatgaaaatcctcccctcatcaatcatctggagcatctcaaacctctgcagccgcagctgtatgatgaaaagcattcacctgaggtggaggccggtgagccaagcctgcgtggtattcccaaccagctgaatcaggataagcccgcattgcttcggcattgcaaggtgaggcagccgccagcatacaagaaggggaatccccatactcgcaattctatcaagccatcatcccataatggaccttcacacgacatctttgagaagttgcagaccgtatctgcaggaaacgttcagaacgaggagtaccctatacggcctagcaccttaaattcacgtcaaagcagtctggcaccacagagccagccgcacgactttgtgttcagtccacacaactccggcagacctatggagcttcagattcctaccccgccactcccttcctattgtagtacaaacgtgtgcagatgttgccagcatcactcccacatacagtattcgcctttgaacagctggcagggggctaatacagtggggagcatacaggacgtacaatccgaagctttgcagaagcattcgctgtttcacccgtcggggtgtccggctctgtattgtaatgcattctgttcctcatcttcaccaatcgcacttagacctcagggtgacatgggcagctgctcaccacactccaacatcgagccctcacccgttgcacgacccccatcacacatggacctatgcaacccccagccctgcacagtgtgcatgcataccccaaaaacagaaagtgataacggaatgatgggcctgagtccagacgcttaccgtttcctaacggagcaagaccgccagctgaggctcctgcaggcacagatccagcgtctgcttgaagcccaatccctgatgccttgtagtcctaaaaccacggcagttgaggatactgtccaggccggacggcaaatggagctggtgagtgtcgaggcccaatctagccccggactccacatgcgcaagggcgtgagtatcgcagtgagcacaggagccagtctgttctggaacgcggcaggagaagaccaggagccagacagtcagatgaaacaggacgacacaaagatatcctcggaagatatgaacttctccgtagatatcaacaatgaggtgaccagcctgccagggagtgcatcatccctgaaagctgtggacatcccatccttcgaggagagtaatatcgctgtcgaggaagaattcaatcagcccctgtctgtgtctaactctagccttgtggtacggaaagaaccggacgtaccggtgtttttcccttctggccagctggccgaaagcgtctcaatgtgtctgcaaaccggccctactgggggagctagcaacaactccgaaacttcggaggaacctaagattgaacacgtgatgcagcccctcctccatcagccgtcagacaaccagaaaatttaccaggacctgctggggcaggtgaaccatttactcaactcttcatcaaaagagactgagcaaccttccactaaggccgtaatcatttctcatgaatgcactcgcacccaaaatgtgtaccatacaaagaagaaaacacaccattccagactggtcgacaaggattgcgtgcttaacgccacattgaaacagcttcgtagtctcggcgttaaaatagactctcctaccaaggttaagaaaaatgctcataatgtggaccatgcaagcgtgctagcatgtattagtcctgaggctgtcatctcagggttaaattgtatgtcctttgcaaacgtggggatgagcggcctctcacccaacggtgtggacctgtcaatggaggcaaatgccattgcgcttaaatatctgaacgagaaccagctgtcgcagttgagtgtgacacgaagcaaccagaacaactgcgaccctttcagcctgctgcacatcaacacagataggtctactgtcggactgtcgctgatttccccaaataatatgtcatttgcaacgaagaaatatatgaagcgctatggcctcctgcagtcatcagataattcagaggacgaggaggaaccacccgataatgctgacagcaagtctgagtatttgctcaatcagaacctgcgttcaatccctgaacagctgggaggccagaaagagccgagcaaaaatgaccacgagattatcaattgctccaactgtgagagcgtaggcacaaatgcagacaccccagtgctgcgcaacatcactaatgaggttctacagactaaggcgaaacaacagctgaccgaaaagcctgccttcctagttaagaatctcaagccgagtcctgcagtaaatctcaggaccggaaaggccgagtttacccagcaccccgaaaaggaaaatgaaggcgacatcactatctttcctgaatcgctccagccgtctgagacgctcaagcagatgaactctatgaacagtgtgggcacattcctggatgttaagcgacttagacagctgcccaagcttttctag

SEQ ID NO: 239717 - DNA, 633 bp, synthetic construct
  misc_feature 1..633: note = Description of Artificial Sequence: Synthetic coding sequence
  source 1..633: mol_type = other DNA
cagttgtacgacgagaagcattcccctgaagtggaggcgggagaaccctcgctgcgcggtatcccaaaccagttgaatcaggacaagcctgctctgctgcgtcactgtaagccctgtaccgtctgcatgcatacccctaagaccgagtccgataatgggatgatggggttgagcccagacgcatatcggttcctgactgagcaagatagacagctgagactactgcaggcacagatacagagactccttgaggcccagagtcttatgccttgctcccccaagaccaccgccgttgaagacacggtgcaggcaggtcggcagatggagctcgtgtccgtggaagcccagagcagcccgggactgcacatgcgcaagggagtgagcatagcagtgagtactggagccagtttattttggaacgccgctggggaagaccaagaaccagattcacagatgaaacaggatgacactaagatctcctccgaagacatgaatttctccgtggatattaataacgaagtcacctcgctcccgggtagcgcctcgtctctgaaagccgtcgacatcccgagctttgaagaatctaatatcgcagttgaggaggagttcaatcaaccccttagtgtatcctag

SEQ ID NO: 239718 - DNA, 3867 bp, synthetic construct
  misc_feature 1..3867: note = Description of Artificial Sequence: Synthetic coding sequence
  source 1..3867: mol_type = other DNA
atggagcccatatacccctttgccaggccacagatgaatacacggttcccgtcgtcccgtatggtcccgtttcatttccccccttccaagtgcgcgctatggaaccccactccaactggggactttatctacctccacctgagttactatagaaatcctaaactggtggttacagagaaaaccatcaggctcgcctaccggcacgcaaagcagaataagaaaaattcaagctgttttctgctgggcagtttaacggccgatgaggatgaagagggtgtgacccttaccgtggacagatttgatcccggaagagaggtccccgagtgcctagagatcaccccaaccgccagcttacccggtgatttcttgatcccatgcaaggtccacactcaagagctatgttccagagagatgatcgtgcactcagtagacgacttcagttcggccctaaaggctcttcaatgtcacatatgcagcaaagatagcctggactgtggtaagctgctgagccttagagtgcacataacctcacgcgaaagcctcgattctgtggagtttgacctgcactgggcggcagtgaccttggctaataactttaaatgtactcctgtgaaacctatcccaataatccccaccgccttagccagaaatctgtcttccaatctgaacatttcacaggtgcagggaacgtataaatatggatatcttaccatggacgaaacccgtaaactgctcctcctgcttgagagcgatcctaaagtgtattcgctgcctctggtgggcatttggctgtcaggaattacgcatatttactctccgcaggtctgggcctgctgtttgaggtacattttcaactccagcgttcaggagcgagtattcagcgaatccggcaattttattattgtgctgtatagtatgacacataaggaaccagaattctacgagtgtttcccctgcgacggcaaaatcccagactttcggttccagctgctgacatccaaggaaaccctgcatcttttcaagaatgtggagccgccagacaaaaatcccattcggtgcgaactttctgcagagagccagaatgccgaaaccgagtttttctcaaaagccagcaaaaacttcagtataaagaggtcaagtcagaagctttcatccggcaagatgcctattcacgaccatgattctggcgtcgaggatgaggattttagccccagacccatcccaagcccccaccccgtttctcagaagatcagcaagattcagcctagtgtgcctgagctttccctggtcctagatggcaacttcatagaatccaaccccttgcccaccccactggagatggtgaataacgaaaacccaccacttatcaatcacttggaacacctgaagcctctccagccccagctttacgacgaaaagcattctcccgaggtcgaagcaggagaacctagtctaagaggaatccccaaccagttgaaccaagataaaccagcccttttgcggcactgtaaggtgcggcagcccccagcctataaaaagggcaacccacatacccgtaacagtatcaaaccttcctctcacaacggcccatctcatgatatcttcgaaaaactgcagaccgtatctgctggtaacgtgcagaatgaggagtaccctatacggccatcaactttgaactcgcggcaatcctccctcgcccctcagagtcagccccacgatttcgtatttagtccccataatagtgggaggcccatggaattgcagatccctaccccaccattgcctagctattgcagtaccaatgtctgccgctgctgccagcaccacagtcacatacagtacagcccattaaattcatggcaaggcgcaaataccgtcggctctatacaggatgtgcagtccgaggccctccagaagcactcgctttttcaccccagtggatgtcccgcattatactgcaacgccttctgcagctcgtctagccctatcgcattgcgcccacagggggacatgggaagttgctctccccacagcaacatcgagccaagtcccgtcgcaagaccgccatcccacatggacctttgtaaccctcagccgtgcacggtctgcatgcacacgccaaaaacagagtcagacaatggtatgatgggactcagccccgatgcctaccggtttctcactgaacaggatcggcaactgcggctgctccaggcacagatccagagattactcgaggcccagtcattgatgccttgctccccaaagacaacagctgtagaagatactgtgcaggccggacgccagatggaactcgtgagtgttgaggcccagagttctcccggactgcacatgcgtaaaggcgtctccatcgctgtcagtaccggcgctagtctattctggaacgcggctggagaggaccaagagccggatagccaaatgaagcaggatgatacgaaaatttcctccgaggacatgaactttagtgtggatatcaataatgaagtgaccagcctccccggatctgcctccagtctgaaagccgtcgatattccctcattcgaagagagcaatatcgccgtggaggaggagttcaaccagcccctatccgtgagcaattcatcgtcactagttgtgcggaaagagccagacgtgcccgtcttcttcccttccggccaactcgccgaatccgttagcatgtgtttgcagactgggccaacaggaggagcaagcaacaacagcgagacatcagaagagcccaagatagaacacgtgatgcaaccattgttgcaccagcctagcgacaatcaaaaaatttatcaggacctgctgggacaggtaaaccatctgctgaactccagttcaaaggagactgagcagccaagtacaaaggcagtcatcatcagtcatgaatgtacgaggacccaaaacgtgtaccatacgaagaaaaagacccaccattcccggctcgttgataaagactgtgtccttaacgccacccttaaacagctgcgttccttgggcgtgaagatagatagcccaacaaaggtgaagaaaaatgcccacaatgtagatcatgctagtgtcctggcctgtatttctccagaagctgtcatcagcggcctcaattgtatgtctttcgctaacgtgggaatgtcaggtctgagtcccaacggcgtcgacctttcaatggaagccaacgctattgccctgaagtacttaaacgaaaaccagctgtcacaactatctgtaacgcgtagcaatcaaaataactgtgatcctttctctctgcttcacataaacaccgaccgttctacagtgggcctatccctcataagccctaataacatgtcgttcgccacgaaaaaatacatgaaacgttatggcctcctgcagtcctctgacaattcggaagatgaggaggaacccccagataatgcagattccaaatcggagtacctgctgaatcagaacctgcgaagtattccagagcagctggggggacagaaagagccatctaagaacgaccacgaaataatcaactgctctaactgtgagagcgtgggcactaatgcggatactcccgtgctgcgcaatattactaatgaagtcctgcaaaccaaagccaagcagcagctcacagaaaagcccgcttttctggttaagaacctcaaaccaagtcctgcagtaaaccttaggaccggaaaagctgagtttacacagcacccagagaaagaaaatgagggggatattaccatattccctgagtccctgcaaccgagcgagacactgaagcaaatgaactccatgaacagtgtgggcacttttctggacgtgaagagacttcggcagctccccaaacttttttag

SEQ ID NO: 239719 - DNA, 606 bp, synthetic construct
  misc_feature 1..606: note = Description of Artificial Sequence: Synthetic coding sequence
  source 1..606: mol_type = other DNA
atgagtttcgccaccctcaggccggcacccccaggaagatacctgtacccagaggtcagccccctgtctgaggatgaggacagaggaagcgacagctccggcagcgacgaaaaaccttgtagagttcatgctgcccgatgtgggttgcaaggggctaggcggagagctggcggtaggcgggctggtggaggaggtcccggtggcagaccgggtagagagccacggcagcgacacaccgctaatgcccgtgaacgagatagaactaatagcgtcaacaccgcattcaccgcactgcgcaccctcatccccaccgagcccgctgacagaaaacttagtaagattgagacactgcgcctcgctagtagctatatcagtcacctgggtaacgtgctgttagccggagaggcatgtggggatgggcagccttgtcacagcgggcctgcattttttcacgccgctagagcgggtagtcctccgcctcctccccctccgcctcctgccagagacggggagaatacccaaccgaaacagatatgcaccttctgtctttctaatcagcgcaagctcagtaaagaccgcgaccggaaaacagctatccggagctag

SEQ ID NO: 239720 - DNA, 642 bp, synthetic construct
  misc_feature 1..642: note = Description of Artificial Sequence: Synthetic coding sequence
  source 1..642: mol_type = other DNA
atgcaactgccactggctctgtgtttggtatgtctgctggtgcacacagcatttagggtggtggagggccagggttggcaggcctttaaaaatgatgccaccgaaatcatccctgagttgggagaataccccgaacctcctcctgagctggagaataacaagactatgaatagagctgagaacggcggtaggcctccacaccatccctttgaaactaaggatgtcagcgagtattcctgtcgggagcttcatttcacccgttacgtgacggatggcccatgtagatccgctaagccagtgaccgaacttgtatgcagtggccagtgcgggcctgcgcgactcctcccgaacgccattggaaggggaaagtggtggaggccatccggacccgacttcaggtgcatccccgacaggtacagagcccagcgcgtacaattattatgccccggaggcgaggccccaagagcccgaaaggtcagactggtggccagctgtaaatgcaaaaggctgacacggttccacaatcaaagtgaactgaaggacttcggaactgaggcagcccgaccccaaaaaggacgcaagccaagaccaagggcccgaagtgccaaagccaatcaggcagaactagagaacgcctattag

SEQ ID NO: 239721 - DNA, 906 bp, synthetic construct
  misc_feature 1..906: note = Description of Artificial Sequence: Synthetic coding sequence
  source 1..906: mol_type = other DNA
atggcaatgctggtgctagtgcctggacgagttatgcggccactgggcggacaactgtggaggttcttgcccagggggttagaattttggggcccagctgaggggaccgcaagagtgctgctgaggcaattttgtgcgaggcaagccgaagcgtggagagcaagcggacgcccaggctactgtctgggtacacgtcccctttctactgcacgaccaccaccaccttggagtcagaagggtcccggagacagcactcggccatccaaaccgggaccggtcagctggaaatccctcgccattaccttcgctatcggcggagctctgcttgctggcatgaaacatgtcaagaaagagaaggctgagaagctcgagaaggagaggcagcgacatatagggaagcccctgctggggggacccttctctctcaccacgcacacaggagaacgcaagacggacaaagactatctgggccaatggttgctgatttatttcgggtttacacattgcccggatgtatgccctgaggaattggaaaagatgattcaggtggtcgatgagattgactcaattacgaccctgcccgatctgactccactgtttatatccatcgatcctgaaagagacaccaaagaagctatcgccaactatgtcaaagaatttagccctaaacttgtggggcttactggaactagagaagaggtggaccaagtggccagggcttacagggtctactactccccaggcccaaaggatgaagatgaggactatatcgttgaccacactatcatcatgtatctcatcggtccagacggggagtttctggattatttcgggcaaaacaagcgaaaaggagaaatcgcggcatccatcgctactcacatgcgcccatatagaaaaaagtcttag

SEQ ID NO: 239722 - DNA, 813 bp, synthetic construct
  misc_feature 1..813: note = Description of Artificial Sequence: Synthetic coding sequence
  source 1..813: mol_type = other DNA
atggcaatgctggtgctggttccaggccgagttatgcgcccactaggaggacagctgtggcggttcctgccacgcggactagaattttggggacccgctgagggcaccgcacgtgtgctgttgcggcaattctgtgctaggcaggccgaagcatggcgggcttcggggcgaccaggctactgtctaggaactcgccctctgtccacggccaggccgcctcctccttggagccagaagggaccaggcgactccacacgcccttcaaagcccggtcctgtatcatggaagtctctggccattacgttcgctatcggcggagccctcctcgccggaatgaaacacgtgaagaaagaaaaggcggagaaattggaaaaagagcggcagcggcacatcggcaagcccctactagggggacctttctctctgacaacgcatactggtgagcggaaaacagataaagattacttagacagcatcaccaccttaccagacctcacccctttgtttatctctattgatccggagcgcgacacaaaggaagccatcgccaattacgtcaaggagtttagccccaaattggtcggactgacaggaacacgggaagaagtcgatcaggtggcaagggcttatcgggtttactacagtccaggcccaaaagatgaggatgaggattacattgtggaccacaccatcattatgtacctaatcggtcctgacggagagttcctggactacttcgggcagaataagcgcaaaggagagattgcggcttccattgcaacccacatgcgtccctaccgtaagaaaagctag

SEQ ID NO: 239723 - DNA, 801 bp, synthetic construct
  misc_feature 1..801: note = Description of Artificial Sequence: Synthetic coding sequence
  source 1..801: mol_type = other DNA
atgttgctcctcaccagatccccgactgcttggcacagactgtcacagctgaaaccaagagtccttccgggaaccctggggggacaggccctccatctgcggtcctggctgctgtcaagacaaggacccgctgagacggggggacagggacagccgcaaggacccggactgcgcacaaggctgctgattacgggccttttcggcgctggactcggaggggcttggttagccctgagggcagaaaaggagagacttcagcagcagaagagaaccgaagccctcagacaggcagcggtgggccagggtgacttccaccttctcgaccatcggggacgcgcaaggtgcaaagcagattttagaggacaatgggtcctcatgtattttggcttcacccattgccctgacatctgcccagacgagctggagaaactggtccaggtcgtgaggcagctggaggctgaaccaggacttccaccagtgcagcccgtgtttataacggtagatccagagagggacgacgtggaagcaatggccaggtacgttcaggattttcaccccaggctgctgggactgaccggcagtactaaacaggtcgcccaggcctcacactcctaccgtgtctactacaacgccggtccgaaagacgaggaccaggattacatcgtagaccattcaattgcaatctatctgctgaatccagacggattgtttactgattattatggcaggagcaggtccgctgaacaaatttccgacagcgtcagacggcatatggccgcttttcgcagtgttctgtcatag

SEQ ID NO: 239724 - DNA, 801 bp, synthetic construct
  misc_feature 1..801: note = Description of Artificial Sequence: Synthetic coding sequence
  source 1..801: mol_type = other DNA
atgctgctgcttacacggagcccaacagcatggcatcggctgagccagctgaaacctagagttttgcctgggaccctggggggacaggccctgcatcttagaagttggctcctgtctaggcagggtccagccgagacaggtggccagggccagccacaggggcctggccttcgtacgagactcctgataactgggttgtttggcgcagggcttgggggagcttggctcgccctgcgcgctgagaaagagcggttacagcaacaaaagaggacagaggcactgcggcaggctgccgtggggcagggcgactttcatcttcttgaccacagggggagagccaggtgcaaagctgactttcgaggacagtgggtgctcatgtattttggttttacacactgtccagatatctgcccggacgagctcgagaagttggtccaagtagtgaggcagctggaagcggaacctgggctgccacccgtccaacccgtgttcatcacggtggaccctgagagggatgatgtggaggccatggccagatatgttcaggattttcaccctcgacttcttggcctgactgggagtacaaaacaggtagctcaggcctctcactcatatcgggtgtactataacgccggacctaaggacgaggaccaggactacatagtggaccattctattgccatatacctcctcaatcctgacgggctgtttactgattattacggacgcagccggagcgcggagcagatctctgacagcgtacggaggcatatggcagctttcagatcagtgctgagttag

SEQ ID NO: 239725 - DNA, 411 bp, synthetic construct
  misc_feature 1..411: note = Description of Artificial Sequence: Synthetic coding sequence
  source 1..411: mol_type = other DNA
atgctgctgttgaccagatccccaactgcgtggcatagactgagccagctgaagccccgagtgctccctggtacgctcggcggacaggccctccacctgcgctcttggcttctgtcgagacagggtccggctgaaactggcggacaagggcaaccgcagggcccaggtctgagaaccagattgttgattaccggcctgttcggggctggcctcggtggggcatggctcgccctccgcgctgagaaagagagattgcagcaacagaaacgaaccgaagctctgaggcaggctgcggtggggcaaggtgactttcatttacttgatcatcgtggtagggccagatgcaaagctgacttcagggggcagtgggtgttgatgtactttggctttactcactgccctgacatctag

SEQ ID NO: 239726 - DNA, 411 bp, synthetic construct
  misc_feature 1..411: note = Description of Artificial Sequence: Synthetic coding sequence
  source 1..411: mol_type = other DNA
atgttgctcctaacccgcagcccaacggcttggcatcggttgagccagttgaaaccacgggtcctcccagggacactggggggacaggctctccatctgcggagctggcttctgtctcggcagggcccagccgagaccggaggccagggacaaccacagggacctggtcttagaacccgtctgcttattacaggcttattcggtgccggacttggaggagcttggctcgcattgcgcgctgagaaggagcgcctgcagcagcagaagaggaccgaggctctgagacaggccgcagtcgggcagggcgatttccacttgttagaccataggggtcgcgctagatgcaaggcggacttccgcggacagtgggtcctgatgtatttcggattcacccactgtccggatatatag

SEQ ID NO: 239727 - DNA, 801 bp, synthetic construct
  misc_feature 1..801: note = Description of Artificial Sequence: Synthetic coding sequence
  source 1..801: mol_type = other DNA
atgttgctgctgacaagatcacccactgcgtggcaccgtctgagccaactaaagccccgtgtgctgcctggcacgctcggcggacaggctttgcatctcagatcttggttgctttctcggcagggtccagcggaaacaggaggtcagggtcagcctcagggcccaggattacgaacgcggctcctgatcaccgggcttttcggtgcgggactgggtggcgcatggctggcattgagagcagagaaggaaaggctccagcagcagaagcgaacagaagccctccggcaggctgctgtcggacagggcgactttcacctcttagaccatcgtggacgtgctcgctgcaaagcggacttcagaggacaatgggtgctcatgtattttgggttcacccattgtcctgatatttgcccggatgagctggaaaaactcgtgcaggtggtgcgtcagctagaggccgaacccggactaccacctgttcagcctgtgtttatcactgttgacccagagagagacgatgtggaggcaatggcacgctatgtgcaggatttccacccccgactcttgggcttgacaggcagtaccaagcaagtcgctcaagcttcacattcgtaccgggtatattataatgcaggcccaaaagatgaggaccaggactatatagtggaccactcaatagcaatctatcttctgaaccccgatggactctttacagattactatgggaggtctcggagtgccgaacagatatctgacagcgtcaggcgacatatggcggctttccggagcgtgttgtcttag

SEQ ID NO: 239728 - DNA, 801 bp, synthetic construct
  misc_feature 1..801: note = Description of Artificial Sequence: Synthetic coding sequence
  source 1..801: mol_type = other DNA
atgctgctcctcacacgcagccctaccgcttggcaccggttgtctcagctgaaacccagggttcttccgggaacattgggtggacaggcactgcacttgagatcgtggctcctctcaagacaggggccagccgagactggcggtcagggacagccccaagggcctgggctccgcacccggctgttgatcacgggcctattcggcgcagggctgggcggagcctggttggccttgcgtgcggaaaaggaacgcttgcagcaacagaagcgcaccgaagccctgcggcaggccgctgtcgggcagggagactttcacctgttggatcacagggggagagctagatgtaaagccgattttagaggccagtgggtgctgatgtactttggctttacccactgtcccgatatctgtccagatgagctggaaaaattggtgcaagtggtgcggcagctggaagccgaacccggattaccgcctgtccagcccgtgttcataaccgtagaccccgaacgggacgatgtggaagccatggcaaggtacgtacaggattttcaccctagacttctggggctgacaggctccactaagcaggtggctcaggcctcccacagttacagggtctactacaatgcaggacctaaagacgaagaccaggattacatcgtcgaccatagcatagccatctaccttctcaatcctgatggactctttactgattattatggcaggagtcggagcgccgaacagatcagtgatagtgtccgaagacacatggccgcttttcggtccgtgctgagttag

SEQ ID NO: 239729 - DNA, 1047 bp, synthetic construct
  misc_feature 1..1047: note = Description of Artificial Sequence: Synthetic coding sequence
  source 1..1047: mol_type = other DNA
atgccgaggtcattcctggtgaaaaaagtgaaattggatgccttctctagcgcggatttggaatccgcatacggacgagcaaggtccgacttaggtgcacccctgcacgacaaaggctacctgtctgattatgtgggccctagctctgtctacgatggggatgcagaagcagctctcctcaaagggccttcccccgaacccatgtatgcggcagcggtacgaggcgagttaggtcccgctgcggctggcagcgcaccgccacctacaccccgacccgagctggcaaccgcagcgggaggatatatcaacggtgacgctgctgtgagcgaggggtatgctgctgacgcatttttcatcacggatggcagatcaagacggaaggcaagtaatgctgggtccgcagcagccccttctactgcgagcgcggctgccccagatggtgacgcaggcggtggaggcggtgctggtggtaggagcctcggttccggcccaggaggccgaggcggtaccagggctggcgcagggaccgaggcgagggcagggcctggagccgctggcgctggcggacgccacgcctgcggggagtgcggcaagacctatgctacatcttcgaacctgtcccgacacaaacagacacacagaagtttggactcacagctggcaaggagatgtcccacatgcggaaaagtctacgtttccatgccggcaatggcaatgcatctgctgactcacgatttacgccacaaatgtggggtgtgcggtaaagcttttagtaggccctggctcttacaaggccacatgcgatctcacaccggggagaagccgtttggctgtgcacactgcgggaaggcctttgcagacagatctaatctgcgggcacacatgcagactcacagcgccttcaaacactttcaatgcaaacgctgtaaaaagagctttgctctgaagtcatacctgaataagcactacgagagtgcatgttttaagggaggcgcaggcggacccgcagctcccgctcccccacagctgtctcccgttcaggcctag

SEQ ID NO: 239730 - DNA, 4893 bp, synthetic construct
  misc_feature 1..4893: note = Description of Artificial Sequence: Synthetic coding sequence
  source 1..4893: mol_type = other DNA
atgctgaagtgcatcccactgtggaggtgcaacagacatgtggagagtgtcgacaaaagacattgctccctgcaggctgttcccgaggaaatttaccgatattcacgctcactcgaagagctgctacttgatgctaaccagctcagggaactgccaaagccattcttcaggctgttgaatctgaggaagcttggacttagtgacaatgagatccagcgactgcccccagaggtcgccaacttcatgcagctcgttgagctagatgtgagtcgcaacgacattcctgaaataccagaatcaataaaattctgcaaagccctggaaatcgccgatttcagcgggaaccctctgtctaggttgcccgatggctttactcaactgcggtccctcgcccacctggcattgaatgacgtgagtctacaggctcttccaggagacgtcggcaacctggccaatcttgtgaccttggagctgagggaaaacttgcttaaatcccttcctgcctctctctctttcctcgttaagctggaacagctggatctcggcggtaacgaccttgaggttctgcctgacacccttggtgcgctgccaaacctaagagaactgtggctggaccggaaccagttgagtgccttgccacccgaactggggaacctacgccgactggtgtgtttagatgtgagtgaaaatcgtctggaggaattgcccgcagaactgggcggacttgttctgctgacggacttgcttttgagccagaacctcctccgtcgtctccctgatgggataggccaattgaaacagctgagtatactgaaggtggatcagaacagactatgtgaagtgaccgaagccatcggagattgtgagaatctgtctgaactgatactcaccgaaaatctactcatggccctacctcgtagccttggtaagctgactaagttgacgaaccttaacgtggatcgaaaccatctggaagcactcccaccagagataggaggatgtgttgccctgagcgttctgagccttagagataatcggctggccgtccttccacccgagctggctcatactacggagctgcatgttcttgacgttgctggtaaccgcttgcagtccctgccttttgcgctgacccacctgaacctgaaagccctatggctggctgaaaatcaggctcaacctatgcttcggtttcagactgaagatgatgcacggactggggaaaaagtactcacctgctatctgcttccccagcagccacccccaagcctggaggacgccggacaacagggctccctcagtgagacgtggagtgatgccccaccctcaagagtctctgtcatccagttcttggaagccccaattggagacgaggatgccgaggaagcggcagccgagaagcgcggacttcagaggcgcgctacgccacacccttcagaacttaaagtcatgaagcggagtattgagggaagaaggtcagaagcttgcccatgtcagcccgactcaggctctcccctcccggcagaagaagagaaacgtctgtccgcagagagtgggctgagcgaagattcccggccttctgcctccactgtctctgaggccgagcccgagggcccatctgccgaagcgcagggaggttcgcagcaagaagctacgacagccggtggggaggaagatgctgaagaagactaccaggagcccacagtgcacttcgccgaggatgccttgctgccaggggacgacagagagattgaggaaggacagcctgaggccccatggacactaccagggggacgccagcgccttatacggaaggatactccacattataagaaacatttcaagatcagcaagcttccccagcctgaagcagtggtggctctgctgcaggggatgcaacccgacggcgaaggccctgtagctccagggggttggcataatggccctcacgccccatgggccccaagggcccagaaagaggaggaggaggaagaagaaggctccccccaggaggaggaagtggaggaagaggaagagaaccgcgctgaggaggaggaggcctctaccgaggaagaggataaggaaggcgctgtcgtctccgctcctagtgtgaagggggtgagctttgaccaggcaaataacctcttgatcgagcccgctagaatagaagaagaggaactcactctgaccattctgcggcagacaggaggattggggatatctatcgctggtggaaaaggatccaccccatataagggggacgatgaggggatctttatctctagggtcagcgaagagggcccagccgctcgcgcaggcgtgcgggtgggagacaagctgctggaggtcaacggggtggccctacagggagccgagcaccacgaagctgtcgaagctctgcgaggcgcaggaactgccgtgcagatgagagtgtggcgcgaacgtatggtggaacctgaaaacgcggtcacaatcacccccctccggccagaggacgattattctccgagggagcgcagggggggaggcctgcggctgccgctgctgcctcctgaatctccgggacccctcagacagaggcacgtagcatgcctcgcgaggtcagaacggggtctgggcttttcgatcgcaggtgggaagggtagcacaccgtacagagccggagacgccggaatttttgtcagtcggattgctgaaggtggtgcagcacatagagcgggaacacttcaagttggcgatagagtactgagcattaatggcgtcgacgtaacggaggctcggcacgaccacgctgtctctctcttaacagccgcatctcccacaattgcccttctccttgagcgtgaagcaggcggacccttgcccccttcaccactcccccacagctcacctcccactgctgctgtggcaacaacctcaatcactacagcaacacccggtgtccccggacttccttctctggccccaagtctccttgcggctgcattagaggggccataccccgtggaggaaataaggctgcccagagccggaggccctttgggcctgtcaatcgttggcggaagcgaccactcctctcatcctttcggcgtacaagagcctggggttttcatctctaaagttttacctcggggactggccgcacggtcgggccttcgcgtaggtgaccgcattcttgctgtgaacggccaggatgtccgtgacgccacccatcaggaggccgtctctgctctgctgaggccttgcttagagctctctctcttggtgaggagagatcccgctcccccaggcttgcgcgaactgtgtattcagaaagccccaggggagaggttgggaatcagcattaggggaggcgcaagaggccatgctggcaatcctcgggatcccactgatgagggcatctttatttcgaaagtgtcacccactggggctgcagggagagacggacgattgagggtcgggcttaggctcttggaggtgaaccagcagtccttactgggcctcacccacggggaagccgtccagctgttacgctccgtaggagacaccctcacagtcttagtgtgcgacgggtttgaggcgtctactgacgcagccctggaagtgtcccccggagtgattgccaacccattcgccgctggtatcggacacaggaacagcctcgaaagtatctctagcatcgatagggagttatctcccgagggtccaggcaaagaaaaagagctgccaggacagacactccactggggaccagaggcaacagaggctgctggacgtgggcttcagccgctgaaacttgactacagagctctagccgctgtaccttccgcgggaagtgtccagagagtgcctagtggcgcagctggcggaaagatggccgagtccccatgcagtcctagcgggcagcagcctcccagcccaccctcgccggacgagctccccgctaatgtcaagcaagcatatcgcgcatttgctgccgttcccacctctcacccacctgaagacgcccctgcacagcctcccacaccaggcccagcggcttctcccgaacaactgagctttagggaacgacagaagtactttgaactggaagtgcgtgtgccacaggcagagggaccgcctaaacgagtgtctcttgttggagctgacgacctgaggaagatgcaggaagaggaagctagaaagctgcagcaaaagagggcacagatgctaagggaagccgctgaggccggagccgaagcccgtcttgcccttgatggggagaccctaggtgaagaggagcaagaggacgaacagcctccatgggcgtccccttcccctacaagcaggcagtcacctgcttcacccccacccctggggggtggtgcgcctgttcgcaccgcgaaagccgaacgtcgccaccaagaaaggcttagagtgcagtcacctgagccccctgcccctgaaagggcattaagccctgccgagctgagagctctggaagccgaaaaacgggcactctggcgagcagctagaatgaagagcttggagcaggatgccctccgggctcagatggtgctgtcccggtctcaggagggacgaggcactcgtgggccactggaaagacttgccgaagcgccatcccctgccccaactcccagccctacaccagtggaggatctggggcctcagaccagtacatctcccggacgcctctccccggattttgcagaggagctccgatccctggaaccatcaccatcaccaggcccacaggaagaagatggggaagtggccctggtgctacttggcagaccttcacccggagccgtcggccctgaggatgtcgccctgtgctcctccagacggcctgttaggcctggcagacggggtcttgggcctgtgccgagctag

SEQ ID NO: 239731 - DNA, 4650 bp, synthetic construct
  misc_feature 1..4650: note = Description of Artificial Sequence: Synthetic coding sequence
  source 1..4650: mol_type = other DNA
atgcagctcgtggaattagacgtcagtcggaacgacattcccgaaatccccgagtccatcaaattttgtaaagcactggaaatcgctgactttagtggcaatcctctgtccagactgcctgatggtttcacccagcttaggagcttagctcacttggctctcaatgacgtttctctgcaggccctccctggagatgtgggaaatctggccaatctggtgacactggagctgcgcgagaatctgctcaaaagcctgccagcttctttatcttttctggttaaactggagcagctggatctcggtggaaatgacttggaggtcctgcctgataccctgggagccctgcctaacttgcgagaactgtggttggatcgtaatcaactaagcgccctgccacctgaactgggcaatctgcgcaggttagtgtgcctggacgtgtcagagaataggctcgaggagctgcccgcagagttgggcggtctggtcctcttgacggatctactgttgtctcagaacctattaaggcgtctgccggatgggatcggacagctcaaacagttatctattcttaaggtagatcagaacaggctttgcgaggtgaccgaagccattggcgattgtgaaaacctctccgagctcattcttactgagaatctgctgatggctctgccccgatctctgggcaagttaactaaacttaccaacctcaatgtcgatcgaaaccaccttgaggccctgccccctgagatcgggggttgtgtggccctgtccgtcctaagtctccgagacaaccgtctggccgttctgcctccagagttggcacacacgactgagttgcatgtgctggacgtggccggaaatagactccaatcgttgccgttcgcgttgacccacctgaatcttaaagcactgtggctggccgagaaccaggctcaaccaatgttaagatttcaaacagaagatgacgccagaacaggcgaaaaagtgctcacctgctatttattgccgcagcagcccccaccctccttggaggatgctgggcagcagggctcactgtctgagacatggagcgacgccccaccatccagagtgagcgtcatccagttcctcgaagctcctatcggtgacgaagacgctgaggaggccgcagcggagaaacgaggcctgcagaggagagctaccccccatccaagcgagcttaaagtgatgaaaagatcaattgagggcagaaggtcagaggcctgtccctgccagcccgattctgggagcccactgcccgcagaggaggaaaaacgactgtccgccgaaagtggcctctccgaggattcgcgtccgagcgcaagtactgtctctgaagcggagcctgaagggccatccgcagaggctcagggcggaagtcaacaggaggcaactaccgctggcggagaagaagatgccgaagaagactatcaggaacccacagttcatttcgctgaggacgccctgctgcccggagacgatcgcgagattgaggaagggcagcccgaggcaccctggacgttgcccggtggaaggcaaagactgattaggaaggataccccacactataaaaagcatttcaagataagtaaactccctcagcccgaggctgtggtggctcttctccagggaatgcagcccgacggggaaggccctgtggcacccggagggtggcacaacggtcctcacgccccatgggctcccagagcccagaaagaagaagaggaagaagaagaaggcagccctcaggaagaggaggttgaagaagaggaagaaaatagggcggaggaggaggaggcctcaactgaggaggaggacaaggagggggcagtcgtgtccgcccctagcgtcaagggagtaagctttgaccaggcgaacaacctgttgatagagcccgcaagaatcgaagaggaagagcttactcttacaatcctgaggcagacgggagggcttggaatcagtatcgcgggtggaaaaggtagcacgccatacaagggggatgatgaggggatcttcatatctagagtgagtgaagaagggcctgctgccagagcaggcgtgcgggtcggagataaactgcttgaggtgaatggagttgctcttcagggcgctgagcaccacgaagccgtggaggctctccgaggcgctggcaccgccgtgcagatgcgagtttggagggagaggatggtggagcctgaaaatgcagtgactatcacaccccttagacctgaggacgattactctcctagggaacgtagaggcggtggtctgagactccctctgctgcctcctgaatcacctggaccactacggcagcgccacgtcgcctgtctggcaagaagcgaaagggggctgggtttctctatcgccggaggcaaagggagcactccttaccgggcaggcgacgcaggaatcttcgtgtcgcgtatcgctgaaggcggagcagcccaccgggctggaaccctccaggttggggacagggtcctgtcaataaatggagtggacgtcacagaggcgcgtcacgaccatgccgtgtccctgttgacagctgcatctcccacaattgcccttttactcgagagagaggcgggtgggcctctgccaccctccccacttccccactcctcccctcctaccgccgctgttgcaactaccagcattacgacagcaacgcccggtgtcccaggcctgccaagtcttgccccatccctcctggccgctgctctcgaaggtccttaccctgtcgaggaaattcgtctacctcgcgctggagggccactaggcttgagcatcgtgggaggcagcgatcactcatctcaccctttcggagtacaagaacctggagtatttatttctaaggtgcttcccaggggcctcgcagccaggagtgggctgcgggtgggggatcggatattggcagtgaatggacaggacgtccgcgatgctacgcatcaggaagcagtgtccgccctactaagaccctgtttggagctgtcccttttagtgcgaagagatcctgctcctccaggtctccgggagctgtgcatccagaaagctcctggcgaacgactcgggatctctataagagggggagctaggggccacgcgggtaatcccagggatcctaccgatgagggtattttcatctccaaggtttctcccactggcgcagctgggagggatgggcgactgcgagtggggttgagactcctggaggtgaatcagcaaagtctcctagggctgacacatggagaagcagtccagctgctccggtcggtcggggacaccctaactgtcctggtttgtgacgggtttgaggcttccacagatgccgctctagaagtgtcgcctggggtgatcgcaaatcccttcgcagcgggaatcggccaccgcaattccctagaaagtatttcatctatcgatcgcgagctttctcctgaggggccaggtaaagaaaaggaactaccaggccaaaccttgcactggggaccagaggcaacagaggccgcaggaaggggactgcaaccgctgaaattagactatcgcgcactggctgcagtcccatccgctggttcagtacaacgcgtgccctccggagccgcaggaggcaaaatggctgagtcaccctgttctccatccggtcagcagccaccatccccacccagccctgatgagttgcccgctaatgtgaaacaggcatacagagccttcgccgctgtccctacttctcacccgcctgaagatgccccagcacaaccacccacgcctggcccagccgcaagtccggagcaattgagtttcagagagagacagaagtatttcgaacttgaggtgcgggtgcctcaggctgaaggaccccctaagagagtatctcttgtgggggctgatgacctgagaaagatgcaggaggaggaggcgagaaaactccagcaaaaacgcgctcagatgctccgcgaagctgccgaagccggagctgaagcgaggctggcattggatggtgagacactcggggaagaggaacaagaagatgagcagccaccctgggcctcccccagccccaccagccggcaatctccggcatcgcctccaccgctcgggggaggcgcacccgtccggacagctaaggcagaaaggagacatcaagagaggttacgtgtacaatcccccgagcccccagccccagagcgggctctctctccagccgaattgagggcccttgaggccgagaagcgtgcactgtggcgcgcagctcggatgaagagcctggagcaagacgccctgcgggcacagatggtgctctctcgaagtcaggagggtagaggtacgcgcggtcctctggaaagattggctgaagctccctctccagcccctactccatctccaacgccagtggaggacttgggcccacagaccagcaccagccccggacggctcagcccagactttgccgaggagctcaggagtctggaacctagccccagtcctggtccacaagaggaggacggagaagtagccctcgtgctgttgggtcggccttcaccaggtgccgtgggtcccgaagacgtagcactgtgtagtagtaggcgcccagtacgacccggtaggcgcggactgggacctgtacctagctag

SEQ ID NO: 239732 - DNA, 2268 bp, synthetic construct
  misc_feature 1..2268: note = Description of Artificial Sequence: Synthetic coding sequence
  source 1..2268: mol_type = other DNA
atgcagcctgacggggaggggcctgtggctcccggagggtggcacaatggacctcacgccccttgggcccctcgagcccagaaggaagaggaggaagaagaagaaggcagcccacaagaagaggaggtggaggaggaagaagagaatagagcggaggaggaagaggcatctacagaggaagaggataaagaaggggctgtcgtgagtgctccatcagtgaagggcgtgtcctttgaccaggccaacaacctgctgatcgagccagcccgaattgaggaggaagaacttacattgaccattcttagacagaccggtggactcggaattagtatcgcaggtgggaaaggctctaccccttataagggggacgacgagggaatctttatttcacgcgttagcgaagaagggccagcggcacgagccggtgtgcgtgtgggggacaagctgttggaagtcaacggcgtagcgctccagggagccgagcatcacgaggccgttgaggcccttcggggagccggaacggctgtccagatgcgggtatggcgggaaagaatggtggaaccagaaaatgctgttacaatcacccccctgcggcctgaggacgattattccccaagagaacgtaggggagggggactcaggctcccactgttgcccccagaatctccaggtcccttaagacagaggcacgtggcttgcctggccaggtcggaacgtggcctcggcttcagtatcgccggtggaaaaggttctactccataccgcgctggcgacgctggaattttcgtaagtcggattgcagagggtggggctgctcacagagcaggcactctgcaggtcggggaccgggttctctcaatcaacggagtagatgtgaccgaggccagacacgaccatgcggtgtcgttgcttacagcagcgagtcccaccattgcgctgctgctggagcgcgaggctgggggacccctgcccccatctccacttccccactctagtcctccaacagccgcagtagcaacaaccagcataactactgctactcctggcgttcccggtctgccctcactggcgccttcactgctggctgccgcactagagggaccatatccagttgaggagatcagactgccaagagctgggggacctctgggcctcagcatcgtgggtggctcagaccacagcagccatccttttggggtgcaagaaccaggcgtgttcatttccaaagtgctacccagaggactcgccgcacgcagcggcttaagagtaggggatagaatccttgcagttaatggccaggatgttcgagacgccacgcaccaggaagctgtatctgcattactacggccatgtctcgagctttcgcttttagtacggagggaccccgcaccgccaggattgcgggagctgtgtatccaaaaagcacctggtgaaagactggggatctctatccgaggtggagctaggggacacgccggaaatccgcgagaccccactgacgagggtatcttcatcagcaaagtaagtccaactggggcagccggtcgcgatgggcgtcttcgggtcggtttacggctactcgaggtgaatcagcagtcactcttaggcctcacacacggcgaggctgtccagttgctgagatctgttggggatactcttactgtactggtgtgcgacggcttcgaggcaagcaccgacgccgcactagaagtgtctcccggagtgatagctaatccgtttgctgctgggattggccatagaaactctctcgagtctatatcctcgatcgatcgagaacttagtcccgaaggccctggcaaagaaaaggagctcccaggccagacgcttcactggggcccagaggctactgaggccgcaggacgtgggctgcagccactgaagctagactatagagccttggccgctgttccctccgccggttcagttcagcgtgttccttcaggggcagcaggtggcaagatggctgaatctccatgtagtccgagcgggcagcaacctccatccccccctagcccagacgagctgcccgctaatgttaagcaggcctaccgggcttttgccgcagtgcccacctctcatcctccagaggacgcccctgcacagccccctacacccggtccagctgcttctcctgagcagctcagtttcagagaaagacagaaatacttcgaattggaagtccgagtgccgcaggccgagggacctctgcgcccaggcaggcggggtctgggccctgtaccgtcgtag

SEQ ID NO: 239733 - DNA, 4968 bp, synthetic construct
  misc_feature 1..4968: note = Description of Artificial Sequence: Synthetic coding sequence
  source 1..4968: mol_type = other DNA
atgctaaaatgtattccactctggcgttgcaatcgccatgttgagtccgtcgacaagcggcattgttccctgcaggcggttccagaggagatctacaggtattccaggtccctcgaggaacttctgctggacgctaatcagttacgcgagctgcctaagcctttcttccggttgttaaatctgagaaagctgggattgagtgataatgagattcaacggctcccccctgaggtggccaattttatgcagctcgtggagctggacgtgtctcggaatgacatcccagagattcccgaatcaatcaaattctgcaaggcattggaaatcgccgacttctcaggcaaccccctaagccgcctcccagatggctttactcagttgagatctctcgcacacctagctctgaatgatgtatccttgcaggccctccccggagatgtgggtaatctcgctaatctcgtcaccctggagctccgggagaacctgttgaagtcactgcctgccagcctcagtttcctagttaagctcgaacagctggatcttggcggaaacgaccttgaagttctccccgacactcttggtgctctaccaaatctgcgagagttgtggctcgatcgtaaccagctgtcagccctacctccagagctcggaaacctacgtagactggtctgtctcgatgtgtccgagaaccggctggaagagttgcccgcagagcttgggggacttgtcctactgaccgatctgttactgtctcagaatttgctgagaagattgcctgatggtattggacagctcaagcagctgtcaatacttaaggttgatcaaaacagactctgcgaagtaaccgaagcaatcggcgattgcgaaaacctgagtgaactgattctgacagagaatcttctgatggcgctgccgcgaagtctcggtaagctcacaaagctcacaaaccttaatgtagataggaaccatctcgaggctctgccgcctgaaatcgggggttgcgtggctttgtcagtcctctctctaagagataatagactggctgttttgcccccagagctggcccacaccactgagctccacgttctggatgttgccggtaaccgtcttcagtccctgccctttgcgctgactcacctaaacctgaaggccctgtggctagcggaaaaccaggcccaaccaatgctccggttccagactgaagatgacgctaggactggagagaaggtactaacttgttatctgcttccgcagcagcccccacctagccttgaggatgccggacagcagggaagcctttccgaaacctggagcgacgcccctccgtctcgggtgagtgtcatccaatttctggaggctcctatcggcgatgaagacgccgaggaagcggctgccgaaaagaggggcctgcagcggagagctaccccacatccctctgagctgaaggtgatgaagcgaagcatcgaagggaggaggagcgaggcctgtccctgccagcccgattcaggctcaccattgccagctgaggaggagaagcgcctgtctgcagagtctgggctgtccgaggatagtcgcccaagcgcatcaacagtttccgaggctgagcccgagggcccttctgcagaagctcagggaggttctcagcaggaggctaccacagctggcggagaggaagatgctgaggaagattaccaggagcctaccgtgcactttgcagaagatgccttgctgccgggagacgaccgagaaattgaggagggtcagccagaggcgccatggacattgcccggtggccgtcagcgactgattagaaaagatactcctcactataaaaaacacttcaaaatctccaagctcccacagccagaggccgttgtggcgctgctacaaggcatgcaacccgatggcgaaggacctgttgcaccgggaggttggcataatgggcctcacgccccttgggcccctcgggcacagaaggaggaagaggaggaagaagaaggatctccacaggaggaggaggtagaggaagaggaggaaaatagggccgaggaagaggaagcttctaccgaagaggaagacaaggaaggtgcggtggtcagtgcaccatccgtcaagggagtaagtttcgatcaagctaataacctgctgattgagcctgctcgcatcgaagaagaagagctcactctgaccatcttaaggcaaactggcggattgggtataagcattgcgggtgggaagggttcaacaccctacaagggagacgacgagggcatttttatcagtcgggtgagtgaagaggggcctgcagccagagctggtgtccgggttggagacaaacttctggaagtaaacggcgtcgctctacaaggcgctgaacatcatgaggcagtggaagcactgagaggcgcaggtaccgctgtgcagatgagggtctggcgggagcgcatggtggaaccagaaaacgctgtgactatcacgcccctcaggccggaagatgactattctccaagagaaagacgaggcggagggctgaggctgccactgctgccaccagagtctcccggtccgctccgtcagaggcatgtggcctgcttggctagaagcgagagaggcctgggcttttctattgctggaggtaaaggatccacaccatatagggccggagacgctggaattttcgttagcaggattgcagaaggtggggctgcccaccgggctgggactctccaggtgggagatagagtcctgagcatcaacggggtggatgtcaccgaagctcggcacgatcatgccgtcagtttgctgaccgccgcatctcccacaattgcgttactgcttgagagggaagctggcggtccgttgccaccttctcccctccctcattctagccctccgaccgcagccgtagccactaccagcatcactacggctacccccggtgtccccggattgccttctttagcgccaagcttgctggcagccgcactagagggtccatatcctgtggaggagatacgactgccgcgagccggtggtcccctgggactgtcgatcgtgggtggcagtgatcactcaagccatccgttcggcgtccaggaacccggagtatttatcagtaaagtgctgccacgcggtctggcagccaggtctggcctgagggtgggcgacagaatcctcgccgtgaatggacaggacgtcagagatgcaacccaccaggaggcagtttcagctctgctgaggccttgcctggagttgagccttttagtccgcagagacccagcgcctcccggactcagggaattgtgtattcagaaggctcccggagaacgccttggtattagcattaggggaggggcaagaggacatgccggtaatccccgagaccccacagacgaaggcattttcatttcgaaagtctctcctaccggggcagctgggagggatgggagattgagggtggggctgcgcctccttgaggtgaaccagcagtctctgcttgggttgacacacggggaagcggtccagctcctgaggtccgtgggcgacactctgaccgtgcttgtttgtgatggtttcgaggccagcaccgatgcggcactggaagtgagtccaggtgtcattgccaatccattcgccgctgggattggccacaggaactcactcgagtccatcagttctatagatcgtgagctgtctccggaaggaccgggaaaggaaaaagaactgcctggccaaacgctgcattgggggccagaggctaccgaggctgcaggacgtggactacagccgctgaagttagactatagagccctggccgcagtgccaagcgcaggaagtgtgcaacgagtaccttccggcgcagctggcggtaagatggccgaatccccatgctcacctagtggccagcaaccccctagccccccaagccctgacgagctgcccgcaaacgtgaaacaggcttatcgggcattcgcagcagtccctacgtcccatccgccagaggacgcacccgctcagccaccaactccaggcccagcagctagtcccgagcagctgtcattccgcgaacgtcagaaatactttgagctggaggtccgggttcctcaggccgaaggtcctcctaaaagggtgagcttggtgggagccgacgaccttcggaagatgcaggaggaagaggcaaggaaactgcagcaaaaaagggcacagatgctgagggaggcggctgaggctggtgctgaggccagactcgcactagacggcgagaccctgggagaggaggaacaggaagacgaacagccgccttgggcctctccttctcctacatctaggcaaagcccagcttcccctcccccacttggaggtggtgcccctgtcaggacagcgaaggccgagcgcagacaccaggaacgccttcgggttcagtcccctgaacctccagccccagagcgcgctttatcacccgctgagctgagggccctggaagcagaaaagagggccctgtggagggctgcacggatgaaaagcctggaacaggacgcgctcagagcccaaatggtgctttcaagatcccaggaaggacggggaaccaggggacctttggaacgcctagccgaggcaccatccccggcacccaccccttcccccacgccggtggaagacctaggtccccagacaagcacgtcgccgggtaggcttcccctgtctggtaagaagtttgattacagagcattcgcagccctgccctccagccgccctgtttacgatatccagtcgcctgattttgcagaggagctacggtctctagaaccctcaccgagccctgggcctcaggaggaggacggcgaggttgctttagtgctcctgggacgtccctcacctggtgctgtgggccctgaggatgtggccttgtgttcatctcgtcgtccggtgcgccctggtcgcagagggcttgggccagtaccctcgtag

SEQ ID NO: 239734 - DNA, 2427 bp, synthetic construct
  misc_feature 1..2427: note = Description of Artificial Sequence: Synthetic coding sequence
  source 1..2427: mol_type = other DNA
atgtggtttttcgctagggaccctgtacgagacttcccctttgagctgattcccgagcctccggagggcggtctcccaggaccatgggctctgcaccgcggaagaaagaaagctactgggagccctgtgtcaatctttgtgtatgacgttaagcccggagccgaagaacagacacaggtcgctaaggcagccttcaaaaggttcaagaccttgcggcatcctaacatactggcctacattgatgggctggaaaccgagaaatgtttgcatgtagtgaccgaggcggtcacgcccttaggaatctacttgaaggctcgtgtagaggcaggagggctgaaagaactggaaatttcttggggccttcaccagattgtgaaggcgctttcttttttggtaaatgattgtagtttaattcacaacaacgtgtgcatggctgccgtgtttgttgatcgggcaggcgaatggaagctcggagggctggattatatgtattcagcgcaggggaacgggggaggcccaccacgcaaggggatccccgagctggagcaatatgacccccctgaattggccgacagttccggccgagtggtcagggagaagtggagcgccgatatgtggagactgggatgcctcatttgggaggtattcaatgggccactgccgagggcggcagcactgagaaaccccggaaaaataccaaagactctggtgccccattactgtgaactggtgggcgctaaccctaaggtgaggcccaatccagcccgattcctgcaaaactgtagagcacccggaggatttatgagcaaccgctttgtggaaacaaatttgttcctcgaagagatccagattaaggagcctgctgaaaaacagaagttttttcaggaactttcaaaaagtctcgacgcatttcctgaagatttttgccggcacaaggtgctcccccagctgctgacagctttcgagtttggaaacgctggcgctgtagtcctaacccctttattcaaagttgggaagtttctctcagccgaagagtatcaacagaaaatcatcccagtcgtagtgaagatgtttagttcaacagaccgcgcaatgagaattcgattgctgcagcagatggagcagttcatccagtatctcgacgagcctactgtgaatactcagatctttccacacgtggtgcacgggttcctggacacaaacccagccatcagggagcagacagtgaaatctatgctgctgctggctccgaagttaaacgaggcaaatctgaacgttgagctgatgaagcacttcgctcggctccaggctaaagatgagcaggggccaataagatgtaacaccactgtgtgcctggggaaaattggctcttacctttctgcctctacccgtcatcgcgtccttacctccgcttttagcagggctacaagagatcctttcgctccttctagagtggcaggggtcctgggtttcgccgctactcacaacctgtactcaatgaatgattgcgcacaaaaaatccttccggttctgtgtggcctgactgtagacccagaaaagagcgtgcgcgaccaagcatttaaagcaattcgcagctttctgtcaaagttagagtctgtttcggaggatcccacacaactagaagaagtggaaaaagatgtacatgctgcatcatcaccaggaatgggcggtgcggctgcgtcctgggcgggttgggctgttacaggtgtgtccagtttgaccagcaaactcattcgctctcaccccactacggctcccacagaaaccaacatcccccagcggccaacccccgaaggcgtgcctgctcccgcacccacccctgtccccgctacccccactacaagcggacactgggaaactcaggaagaggacaaagatacagcagaagactcgagcacagctgatagatgggatgacgaggattggggctcactggaacaagaagcagagtcagtgctcgcccaacaagatgactggagcaccgggggtcaagtgagccgggctagccaggtgtctaatagcgaccataaatcctccaagtcacctgagtcagactggtcttcctgggaggctgagggttcttgggagcaggggtggcaggaaccttcttcccaagaacccccaccggacggtacgcgtttggccagtgagtacaactgggggggtcccgaaagtagcgacaagggggacccgttcgctacactgtcagcaagaccaagtacccagcccagaccagatagttggggcgaagataattgggaaggcctggagaccgattctcgacaggtcaaagcggagttggcacgcaagaaacgggaggagcggaggagggagatggaggcaaaaagagccgagcggaaagtggccaaaggacctatgaagcttggtgccagaaaactggactag

SEQ ID NO: 239735 - DNA, 2346 bp, synthetic construct
  misc_feature 1..2346: note = Description of Artificial Sequence: Synthetic coding sequence
  source 1..2346: mol_type = other DNA
atgtggttcttcgccagggaccccgtacgcgatttcccattcgaactgatacccgaacctcctgagggaggcctgcctggtccctgggccctacatagagggagaaagaaggcaactggcagtccagtgagcatttttgtttatgacgtgaagcctggggctgaagaacagactcaggtcgccaaagcagcttttaaaagattcaaaacattgaggcatcctaatatcctagcatacatcgatggtctggagactgagaagtgcctgcatgttgtgaccgaggcagtgactccacttgggatatatcttaaggcccgagtcgaagctggcggattgaaggagctggagatttcatgggggctgcaccaaatcgtgaaggcactcagctttttggtgaatgattgctccctgatccacaataatgtgtgtatggcggctgtgtttgtcgatagggcaggtgaatggaaactcggagggttggattacatgtatagcgctcaaggcaacgggggtggaccaccaaggaagggcattcctgaactggagcagtacgacccgccagagctcgccgatagtagtggtcgagtggttcgtgaaaagtggagcgccgatatgtggcgtcttggatgtctgatctgggaagttttcaacgggcctctgcctcgcgcagctgccctcagaaatccaggtaagattcccaaaacgctcgttcctcattattgtgaattggttggggctaatcccaaagtgcgaccaaacccagccaggttcctgcagaattgccgcgctcccggtgggttcatgagcaacaggtttgtggagacaaacctcttcctggaggagatccaaattaaggaacccgcagaaaagcagaaattttttcaggagctaagtaagtcccttgatgctttcccagaagatttctgtcgtcataaggtgctgccgcagttactgaccgcctttgaatttgggaatgcaggcgctgtcgtcctaactccactcttcaaagtaggtaagtttctgagtgccgaagaatatcagcagaaaatcatcccagttgttgtgaaaatgttcagcagcactgatcgggctatgcgcatcagattactgcagcagatggagcagtttatccagtacctagacgagcctaccgtgaacactcaaatcttcccacacgttgtgcacggctttctcgatacaaacccagccattcgtgagcagaccgtgaagagcatgcttcttctggcccctaagctgaacgaagcgaatctgaacgttgagcttatgaagcatttcgcccgactgcaggccaaggacgaacaaggcccaattcgctgtaatactactgtctgtctagggaaaatcggcagctatttgagtgcatcaacaagacatagagtactgacaagcgccttcagccgggcaactcgggatccgtttgccccaagccgcgtggccggagttttgggattcgcagccacacacaatctgtatagtatgaacgactgtgcacagaagattcttcccgtcctgtgcggcctgacagtggaccctgagaagagcgtacgagatcaggccttcaaagccatccggtcatttctgagcaagctggaatccgtgtctgaggatcctactcagttggaagaggtcgaaaaggatgtccacgccgcttctagccccggtatgggcggagccgctgcaagctgggcaggatgggcggtgacaggggtttcttccctgacaagcaaactcataagatcccacccaacaaccgcccctactgagacgaatattccccaacggcctacacctgaaggagtacctgctcccgctccgactcccgttccagctacaccaactacaagcggtcactgggagacccaagaggaggacaaggataccgctgaggatagctctaccgcagaccggtgggacgatgaggattggggctcgctcgaacaagaggctgagtcagtcctcgcacagcaggatgactggagcacaggcggacaggtctcccgcgcatctcaggtaagtaactctgaccacaagtcaagcaaaagcccagagagtgactggagtagctgggaagctgaaggaagctgggagcagggctggcaggagcccagtagccaggagcctccaccagacgggacccgtcttgccagtgaatataactgggggggaccagagagtagcgacaaaggtgacccatttgcaacgctgagtgccagaccatccacgcaggatagatcccgtttgagctggcctggcaggtctgctcggagcggaggaggccgttggcgacccaacgcccctcgcggaaggtggcctcgagctccctag

SEQ ID NO: 239736 - DNA, 2124 bp, synthetic construct
  misc_feature 1..2124: note = Description of Artificial Sequence: Synthetic coding sequence
  source 1..2124: mol_type = other DNA
atgtggttctttgcccgagacccagtgcgtgatttcccattcgaactcatcccggagccacctgaggggggactgcctggcccttgggctttacaccggggtcgcaaaaaagccacagggtcccctgtgagtatctttgtatacgatgtaaagcctggtgcagaagagcagacacaggtggctaaagctgccttcaaaaggttcaagactctgcggcacccaaacattctggcgtacattgacggactcgaaactgagaagtgtctacacgttgtgaccgaggccgttactcccctcggcatttacctaaaagcaagagtggaggccggagggttaaaggagctagagatctcctggggcctgcatcagatcgtcaaagcactttcattcttagtcaatgattgctccctgatccacaataacgtatgtatggccgctgtttttgttgatcgcgcaggcgagtggaagctggggggtctcgattatatgtatagcgctcaggggaatggtggcggtcccccaagaaagggcatccccgaactggaacagtatgacccgcctgagttagccgattctagtggaagagttgtaagagaaaaatggtccgccgacatgtggcggcttggctgcctgatttgggaggtattcaatggtcccctgcctcgcgctgcagccctgcgcaacccaggtaaaattcctaagactctggttcctcattattgtgaactggtcggtgcaaaccccaaggttcgacccaatcccgctaggtttctccaaaattgtagagcacccggaggatttatgagtaaccggttcgtggagaccaacctctttctcgaggagattcaaattaaggaacctgcggagaagcagaaatttttccaggaactgtccaaaagcctggacgcttttcctgaggatttctgtaggcacaaggtcctgcctcaattacttactgcattcgaattcgggaacgccggagccgttgtcctgacgccgctctttaaagtcggcaagtttctgtccgcagaagaatatcagcagaaaataattcccgtcgtggtcaagatgttctcaagtaccgacagagctatgagaattaggctcctgcagcagatggaacaattcatccagtatcttgacgaaccaacggtgaacactcaaatttttccccacgtcgttcatggattcttggacacaaaccctgccatcagagagcaaaccgtcaaatctatgttactgctggccccaaagctcaatgaggctaacttgaacgtcgagctgatgaaacacttcgctagactgcaggccaaagacgagcagggtccgatcagatgcaacacaacggtgtgcctgggcaaaattgggagctacctctccgcatcaactcggcacagagtgctcaccagcgcgttcagtagggccacccgggaccctttcgccccaagtcgggtggccggtgtgttggggtttgccgcaacacataacctgtacagcatgaatgactgtgcccagaaaatcctgcccgtgctctgtggcttgactgtggatcccgaaaaaagtgtcagagatcaggccttcaaagccatcaggagcttcctgagcaagcttgagagtgtttccgaggatcctacgcagctggaagaggtcgagaaagatgtccatgcagcatcttcccctgggatgggaggggctgctgcgtcttgggcagggtgggctgtaaccggcgtgtcctctttgacgtctaagctgatcaggtcacacccaaccacggctccgaccgagacaaacatccctcaacgccctactccagaaggacattgggagacccaagaacccccaccagacggaacaaggctggcgtccgaatacaactggggcggtcccgagagctctgacaaaggcgacccgttcgcaacactgagcgcgcgaccctctacgcaacccaggcccgacagttggggtgaggacaactgggaggggctagaaaccgactcccgccaagtgaaggctgagttggcaagaaagaagagagaggagcgtcgtagggagatggaagccaaaagggcagaacgcaaggtggccaagggccctatgaagttgggggcacgcaaattggattag

SEQ ID NO: 239737 - DNA, 1071 bp, synthetic construct
  misc_feature 1..1071: note = Description of Artificial Sequence: Synthetic coding sequence
  source 1..1071: mol_type = other DNA
atgtggttttttgcccgtgatccagtccgcgacttcccttttgaattaatccccgaaccgcctgagggcggactgcctgggccatgggccctccaccgagggcgaaaaaaggcaactgggagccctgtgtccatcttcgtctacgatgtcaagccaggcgctgaggaacaaactcaagtcgccaaagcagctttcaagagatttaagacccttcgccatccgaatatacttgcctatattgatggcctggaaaccgagaaatgcctgcacgtggtgaccgaggcagtcacgccactgggcatttatttaaaggccagggtcgaagcaggtggactgaaagagttagaaatctcctggggcctgcaccaaatcgtcaaagctttgagcttcttggtgaacgattgcagccttatccacaataacgtttgcatggctgcagtatttgtggatcgagccggagaatggaaactcggcggactcgattatatgtacagcgcgcaggggaatggtggtggacccccaaggaagggcattccggaactggagcagtacgacccccctgaactagcggactcaagcgggagggtggtacgagagaaatggtccgcagatatgtggcggctaggttgcttgatttgggaggttttcaatggccctcttccaagagcggctgctctgcgcaaccctggtaagattccaaagaccctggtcccgcattattgtgaattagtaggcgctaaccccaaagtgcggccaaatcccgcacgtttcctgcaaaactgtagagcacccggtgggttcatgagtaacaggttcgttgaaaccaaccttttcctggaggagatacagcccaaggaccccagactgaaagaattcctgccacagcctccaccactgttcctgccccctctgcagccccaggctacaggcagaagaaggcggcgtacccgaacacagcagcggacagccgcactgcttactgacgggaccacaaagacgggagccgcatggtcaagacgtccatctttgtgttggcctagcagaaccacaggtgccccaggggcaaagtag

SEQ ID NO: 239738 - DNA, 2376 bp, synthetic construct
  misc_feature 1..2376: note = Description of Artificial Sequence: Synthetic coding sequence
  source 1..2376: mol_type = other DNA
atgtggttttttgccagagacccagtgagagattttccatttgagcttattcccgagcccccagagggcggacttcccggaccttgggcactgcatagaggacggaaaaaggccacggggtcccctgtgagcatttttgtctacgacgttaagccaggtgccgaagagcagacacaggtggccaaagctgcgtttaagcgttttaagacactcagacatcctaacatcctcgcttacatcgatgggcttgagacggaaaaatgcttgcacgtggtgacagaagccgtcaccccgctggggatctatctgaaggctcgggtggaggccggaggtctgaaggagctcgagatcagctggggactgcatcagatcgtcaaggccctgagttttttggttaatgactgcagcctgatccataacaacgtgtgcatggctgctgtctttgttgatcgcgctggggagtggaaattaggcggtctcgactatatgtacagtgcgcaggggaacgggggaggtcccccaaggaaggggattccagagcttgaacagtatgacccacccgaactcgccgactcatcaggacgtgtcgttcgagagaaatggtccgcggacatgtggcgacttggctgtctgatttgggaagtgttcaatggcccacttccaagagcagccgctctgcgcaatcctggtaaaattcccaaaacgctggtgcctcactattgcgaactcgtaggcgctaatccgaaggtgagacctaatcctgcaagattcctgcaaaattgtcgcgcacctggcggttttatgtcaaaccggtttgtggagaccaatttgttcctggaagagattcaaattaaggagccagccgaaaagcagaaattttttcaggagctgtcaaagtcattggacgccttcccagaggacttttgcaggcacaaggtgctgccacagttactgaccgccttcgagttcggcaatgcaggggcagtcgttctaactcctttatttaaagtcgggaagttcttgtctgccgaagagtaccaacagaagatcatccctgtggtcgttaaaatgtttagtagtaccgacagagctatgaggatcagactgctgcagcagatggagcagttcatccagtacttggatgagccaaccgtgaacacgcagatctttccacacgtcgtgcacggctttctggacacgaacccggctattcgggagcagaccgtgaaatccatgctcttattagcgccaaagctaaacgaagctaacctgaatgtggagctcatgaaacactttgctcggctgcaagcaaaggatgagcagggcccaattcgctgcaacactactgtttgccttggcaagatcgggtcctacttatctgccagcactcgacaccgcgtgctcacatctgccttctcccgggctactcgggatccatttgcaccttctcgggtggctggcgttctggggttcgcagcaactcataatttgtattctatgaacgattgcgcgcagaagattttaccggttctctgcggactcactgtcgacccagagaaatcagttcgggaccaggccttcaaagcaatcagatcatttctcagcaaacttgaatcagtaagtgaggacccaacccagttagaggaggtagagaaagatgtgcacgccgcatctagccccggaatgggaggtgcagcggcttcttgggccggatgggccgtgacaggcgtgtcctcactgactagtaaacttataagatcgcaccccacaacggccccaactgagacgaacatcccacagcgacctacaccagagggtcattgggagacacaagaggaggacaaggacacagccgaagacagctcgacggccgaccgctgggatgacgaagactggggctccctcgaacaggaggccgagtctgtgctggcacagcaagacgattggtcgacgggaggccaggtatcccgggcaagccaggtaagcaactcagatcataaaagttccaaatcgcccgagtccgattggagtagttgggaggctgaaggcagctgggagcagggctggcaggaaccaagctcccaggagccccctcctgatggtactcgtctggccagtgaatacaattgggggggacccgagtcctccgacaagggggatccattcgcaacattgtcagcacggccttctacccaacctagaccagattcctggggcgaggacaattgggagggattagaaaccgatagtcgacaggttaaggccgaactggcgcgaaaaaagagggaagagcgcaggagggaaatggaagccaagagagccgaacgaaaggtggccaagggcccaatgaaactaggagctcgaaaactagattag

SEQ ID NO: 239739 - DNA, 2343 bp, synthetic construct
  misc_feature 1..2343: note = Description of Artificial Sequence: Synthetic coding sequence
  source 1..2343: mol_type = other DNA
atgtggttttttgctcgggatcccgtgcgtgactttcctttcgaacttataccagagccgccagaaggagggctgcccggtccgtgggccttgcacagaggacggaagaaggctactggatcacccgtctctatcttcgtctatgatgtcaagcctggcgcagaggagcagacgcaggtggctaaagcagctttcaaacgtttcaaaactctgaggcacccaaacatcctcgcttatatagacggcctagagacagaaaagtgtctgcacgtcgtgacagaggctgttactcctctgggcatttatctcaaggcaagagtggaggctggcggactgaaggagctggaaattagttggggcctgcaccagattgtgaaagccctgagctttctggtgaatgattgcagtctgatccataataatgtgtgcatggctgctgtgtttgtggatcgcgcaggggaatggaagttgggcggtttagactacatgtacagcgctcagggcaacggcggaggcccaccccgaaagggaatcccagaacttgaacaatatgatcctcccgagctggccgatagctctggacgggtagtaagagagaaatggagcgctgatatgtggcgcctgggatgtctcatttgggaagtctttaatggccctttgcccagagccgcagcacttagaaatcctggaaaaatcccgaaaacgctcgttccacattattgcgaacttgtcggagcgaatcccaaggttagacctaaccctgcaagattcctccagaattgccgggctcctgggggttttatgagcaaccggtttgtggagacgaacctcttcctggaagaaattcagatcaaagagccagctgaaaagcaaaaatttttccaggaactcagcaagtcactcgacgccttccctgaagatttttgtcgccacaaggtccttccccagctattgaccgcattcgagttcgggaacgcgggagcagttgtgttgacacccctgttcaaggtcgggaagtttctatcagcagaggagtaccaacagaagattattcctgtggttgtcaaaatgttcagttcaacagatcgcgctatgcgaatccgtctgctgcagcagatggagcagttcattcagtatctcgatgaacctacagtcaacacacagatctttccgcacgtggtgcacggtttcctggacaccaaccctgccatcagggaacaaaccgtgaagagcatgctgttgctggccccaaagctgaacgaagcaaatctcaatgtcgagctgatgaaacatttcgcacgcctgcaggcgaaggacgaacaaggaccgatcagatgtaacacaaccgtatgcctgggcaagattggctcctacctgtctgcatccaccaggcatagagtgttaaccagtgccttctcaagggccacccgtgacccattcgcaccctctcgcgttgcaggggtgctggggtttgcggcaacccataatctgtatagcatgaacgattgcgcccaaaaaattctgcccgtgctgtgcggactgacggtggatccagaaaaaagtgtcagagatcaggcttttaaagccattcggtctttcctgtctaaactcgagagtgtctctgaggaccccacgcagctcgaagaggtggagaaggacgtgcatgcagcctctagccccggaatgggcggagctgccgcttcctgggccggatgggccgtaaccggtgtgagcagcctgaccagcaagcttatacgcagccatcctacaacagcaccaacagagaccaacatccctcagaggccaactccagagggagtaccggctcctgccccaacccctgtgcctgcgacgccaaccacttctggccattgggagactcaagaagaggataaagacaccgccgaggattcctcaactgccgataggtgggacgatgaggactgggggagcttggaagaggcagagagcgtgcttgcccagcaggacgactggagcaccggcggacaagtgtctcgggcaagccaggtgagtaactcagatcataaatcgagtaaatctccagaatctgattggtcaagctgggaagcggagggctcctgggagcagggatggcaggagcctagttcccaggaacctccccctgacggaactagactcgccagcgagtacaactgggggggaccagagtctagcgacaaaggcgacccattcgccactttgtcagctcgcccaagcacccaggacaggtcgcgcctctcctggccaggccgatccgccagatcgggcggagggcgatggcggccaaacgcaccacgcggacgatggccccgagcgccttag

SEQ ID NO: 239740 - DNA, 2124 bp, synthetic construct
  misc_feature 1..2124: note = Description of Artificial Sequence: Synthetic coding sequence
  source 1..2124: mol_type = other DNA
atgtggttctttgccagagacccagtacgcgatttccctttcgagcttattcctgagcctccagaagggggactgccgggaccttgggcccttcatagaggaaggaaaaaagcaacgggcagccccgtgagcatctttgtttacgatgtcaaacccggagccgaagagcagacccaagtcgccaaggctgcctttaaacgattcaagacactacgacacccgaatatattggcctacatcgacggtttagaaaccgaaaaatgtctccacgtcgttaccgaggcagtgactccgttaggcatttatcttaaggccagggtagaagctggcggtctgaaggagctcgagattagctggggcttgcaccagatcgtgaaggcactctccttcctggtcaacgactgcagcttaatacacaataacgtttgcatggcagccgtgttcgtggaccgcgctggtgaatggaagctcgggggtctcgattatatgtattcggctcagggcaacgggggtggcccaccgagaaaaggtatacccgagctggagcagtacgacccccctgaactggcagacagctccggccgagtcgtgagggaaaaatggtcagcagatatgtggaggctcggctgcttgatttgggaagtgttcaatggacctctcccaagagcagcagcactcaggaatcctggcaagattccaaaaacactggtgccacattattgcgaactggtgggagctaatcccaaggtccgccctaaccccgcacgcttcttgcagaattgcagagctcccggtggattcatgtccaatcggtttgtcgaaacgaacctgtttctggaggaaattcagattaaggagcctgctgaaaagcagaaattcttccaagaactaagcaagtcactagatgctttcccagaggacttctgtaggcacaaagtccttccccagctgctgactgcattcgaattcgggaacgctggagccgtggtgttgacaccactgttcaaggtgggaaagttcctcagcgctgaggaatatcagcagaagataatacctgtggtggtgaagatgttttcttctaccgacagagctatgagaattagacttcttcaacaaatggagcagttcattcagtatcttgacgagcctactgtgaacactcagatcttcccgcatgttgtgcacggcttcctggacacaaatcccgcaatcagggaacagacggtcaaaagcatgctgctcctcgcccctaaactgaacgaagccaacctgaatgtggagctcatgaagcacttcgccagactccaggccaaagatgagcagggtcctatacggtgcaacaccaccgtgtgcctcgggaaaatagggtcatatctgagtgcaagcacccgacatcgggtgttgacctcagccttttcgcgtgccacccgagaccctttcgcaccatctcgcgttgccggagtgttgggcttcgccgctacacataatctttactccatgaatgactgtgctcagaagattctgccagtgctgtgcgggcttacagtggaccccgagaagtcagtacgcgatcaggcctttaaggctatacggtcctttttatcaaagttggaatcggtgtccgaagatcccactcaacttgaggaagtggagaaggatgtgcatgcagccagttcccctggaatgggcggtgctgctgcttcatgggctggctgggcagtcacaggggtgagctcccttacatcgaagctaatccggagtcacccaaccaccgcccctactgagaccaacatcccccagcggcctaccccagaaggtcattgggagacccaggaaccgcctccagacggtacccgcttggcatcagagtacaactggggcggtccagaaagcagcgataaaggcgatccattcgcgacgttgtccgcgagacctagcactcagcccaggccagacagctggggcgaagataattgggagggtctggagaccgattctaggcaagtaaaagccgagctggcccgaaaaaaaagagaagaaagaaggcgagagatggaggccaaaagggccgagaggaaggtcgccaagggcccaatgaaactgggcgctaggaaactcgattag

SEQ ID NO: 239741 - DNA, 2364 bp, synthetic construct
  misc_feature 1..2364: note = Description of Artificial Sequence: Synthetic coding sequence
  source 1..2364: mol_type = other DNA
atgtggtttttcgcacgtgatcctgttcgcgactttccttttgagctaatccccgagccgccagagggcggtttgccagggccttgggcactgcacaggggcaggaagaaggctaccggatctcccgtatcaatctttgtgtacgatgttaagccgggtgcggaggaacagacccaggtggctaaggccgctttcaagcgcttcaagactcttaggcaccccaatatacttgcatacattgatggcctggaaaccgagaagtgcttacacgtggtgaccgaggcagttaccccccttggaatatacctgaaggcccgagtagaggccggtggcctgaaagaactcgaaatatcctggggcctgcatcagattgtcaaggctctgagcttcctggtcaatgattgtagcctaattcataacaatgtatgtatggccgctgtgttcgtcgacagagcaggtgaatggaagttaggtggtctggattacatgtattccgctcaggggaacggcggaggaccgcctagaaaaggtattcccgagctggagcagtatgacccacccgaactcgctgactcttctgggagggtggttagagaaaaatggtctgctgacatgtggagactcggctgcctgatatgggaggtctttaacggtccactcccacgggctgctgctctgaggaaccccggaaaaatcccaaaaactctggtgccgcactactgcgagctcgtcggcgctaaccccaaggtcagaccgaacccggctaggtttctgcagaattgtcgggctcctgggggatttatgtccaatagatttgtcgagacaaatttatttctcgaagagattcagataaaggagcccgcagaaaagcagaaatttttccaagagctcagtaagtcgctggacgctttcccggaagacttctgtagacacaaggtgttaccccagctgctaaccgcttttgaattcggaaatgctggcgctgtcgtcctgaccccactcttcaaagtcggaaagtttctgagtgctgaggaatatcagcagaagatcatccccgtcgtggtgaagatgttctccagcactgaccgcgcaatgcggatcaggctgctgcagcagatggagcaatttattcagtatctcgatgaaccaaccgttaatactcagatctttcctcatgtcgtacacggattcctggacacaaatcccgctatcagagaacagacggttaagtctatgctgctgctcgcccctaagctgaacgaagctaatctcaatgtggagctgatgaagcattttgccaggttgcaagcaaaagatgagcaggggcctatccggtgcaatactacagtgtgtctgggaaaaataggctcctacttatcagcaagcaccaggcacagggtactaacaagcgctttcagccgcgcaacaagggacccctttgctccaagcagagtagctggggtccttggctttgctgccactcataacctgtactcaatgaatgattgtgcccaaaaaatcctccccgtgctgtgtgggctaactgtagaccccgagaaatcagttcgagatcaggcctttaaggcaattcggtctttcctctcaaagttagaatctgtgtccgaggatcctactcagctcgaggaagtcgaaaaggatgtccatgctgccagcagcccaggaatgggcggagctgcagcaagctgggcaggctgggctgttactggggtgagcagtctgacctcaaagctcattaggtctcatccaacaaccgctccaaccgagaccaacattcctcaaaggcccaccccggaaggggtaccagcaccggcacccacccccgtgcccgcaactccgacaacttctgggcattgggaaactcaggaggaggataaagacaccgccgaagattcaagcaccgccgaccgatgggatgacgaagattggggctcgctcgagcaggaagccgaatccgtcctggctcagcaggacgattggagcaccggcggtcaagtgtcccgcgcatcacagtcccccacgggagccgcaggaaagctgcgtgcccctggcaaccgggctgggaggagccaagcgccacggtctcatttgctaacagtacacggatggccagccagtatcaccggcgtggcacaaagccccgctaccagagctactccgtccctgccctgcctccacgtgccagccccttcaagggggcagacgttgggtgtgcggaccaccggtagggcctcaagactcacggtggatcgaagcaggctgtcttggcccggtaggagcgctagaagcggcggtggccgttggcgaccaaacgccccaagaggtaggtggcctcgagcaccatag

SEQ ID NO: 239742 - DNA, 663 bp, synthetic construct
  misc_feature 1..663: note = Description of Artificial Sequence: Synthetic coding sequence
  source 1..663: mol_type = other DNA
atgattaaacccaaatggggaggcttggtgtgggcccagtggcacggaccactggctcggccttccgggacacttccatttgctagtagcatgccgagcccagtggacgccagcagtgcagatgggggaagcggcctgggaagccacaggcgaaaacggactacgttctcgaaggggcagttactagagctcgagcgcgcattcgcagcctggccatatcctaacatttctacgcacgaacatctggcctgggtcacatgcctccccgaagctaaagtccaggtctggttccaaaagcggtgggcgaaaattattaagaatcggaagtcggggatactctctcccggttcggagtgtcctcagagcagttgttcattgcccgacaccctccagcaaccctgggacccccaaatgccaggacagccgccaccctccagtggaactccacaacggacctcggtgtgtcgccactcaagttgcccagcacccggactgtctcccagacagggctgggaaggggctaaggcagtcgccccatgggggtcggcgggtgcatctgaggtgcatccatcactggaacgcgcaactcctcaaacttcccttgggtcgctttcggatttgatctacgccctagcaatcgtggtgaatgtagaccactcatag

SEQ ID NO: 239743 - DNA, 651 bp, synthetic construct
  misc_feature 1..651: note = Description of Artificial Sequence: Synthetic coding sequence
  source 1..651: mol_type = other DNA
atggggggatctggcgtggggacagcttggcacggccctttggcacgcccttccgggaccttgccattcgcttccagtatgccaagccccgtcgatgcatcatcagcagatggcggttccggcctgggctcccaccgacgtaagaggacgaccttcagcaagggtcaattactggagctggagagggcctttgctgcatggccataccctaatatcagcacccatgaacatctggcttgggtaacgtgtttacctgaagctaaagtgcaggtctggtttcaaaaacgctgggccaaaatcattaaaaatcggaaatctggcatcctcagccccggttccgagtgcccacagtcctcctgttctctgcccgacactttgcagcagccatgggatccccagatgccgggacagccgcctccttcatccgggaccccacaacggacttcagtgtgtcgacactcctcatgccccgcacccggtctttctcccagacagggctgggagggggctaaagccgtggccccttggggaagcgccggtgccagcgaggtgcacccatcactcgagcgcgctacccctcagaccagtttggggtctctgtccgacctgatctacgcgctggcaattgtcgtgaacgtagaccacagctag

SEQ ID NO: 239744 - DNA, 648 bp, synthetic construct
  misc_feature 1..648: note = Description of Artificial Sequence: Synthetic coding sequence
  source 1..648: mol_type = other DNA
atgatgactactggatggactggactgtgccttccgccagtaaaccctagccgggtgtcttcgagttctctcgaaacctcaaccacggagtccatttttgcacacgacggcggatcaggtctcggctcccatcgaaggaagagaaccaccttcagtaaggggcaactgcttgaactcgaaagggccttcgccgcttggccatatcctaatatctctacccacgagcatctcgcctgggtgacctgtcttcctgaggctaaggttcaagtgtggtttcagaagcggtgggcgaagattatcaagaatcgcaagagtggaatcctctcccctgggtctgagtgccctcagagctcttgcagtctccccgacacactgcagcagccatgggatccgcagatgcctgggcagccccctccctctagcggcactccccaacgcactagcgtgtgcaggcacagtagctgtcccgctccagggttaagcccacggcaggggtgggaaggagctaaggccgtggccccatggggatccgccggagcctctgaggtccacccaagtctcgagcgggctactccacagacatcactggggtctttgtcagacctgatttatgcactcgctattgtcgtcaatgtggaccattcttag

SEQ ID NO: 239745 - DNA, 648 bp, synthetic construct
  misc_feature 1..648: note = Description of Artificial Sequence: Synthetic coding sequence
  source 1..648: mol_type = other DNA
atgatgaccacgggatggacaggactgtgtcttcctccagtcaacccaagccgggtatcaagttcatccttggagacttctaccaccgagtcaattttcgctcatgatgggggaagcggtcttgggtcccatagacgcaaacgcactactttctccaaaggtcagctactcgagctcgaaagagcttttgcggcttggccttacccgaacattagtacccacgaacacctcgcgtgggtgacttgtttgcctgaagccaaggtccaggtctggttccagaagcgctgggcgaaaataattaagaataggaaatccggaatcctgagccccggaagcgagtgtccacagtcctcctgttccctccctgatacccttcagcagccatgggacccccagatgccaggccagcctcccccaagcagtggtaccccgcagcgcacctccgtttgtaggcactcctcctgtcccgctccgggtctgtcacctcgccaaggatgggagggcgcaaaagccgttgccccttggggctcagctggtgcatctgaggtccaccccagcctggaaagggctactcctcagacctctctcggctcactgagtgatctgatatacgcacttgcaatcgtagtcaatgtggatcacagctag

SEQ ID NO: 239746 - DNA, 1212 bp, synthetic construct
  misc_feature 1..1212: note = Description of Artificial Sequence: Synthetic coding sequence
  source 1..1212: mol_type = other DNA
atgtcgggacgggtgggagaccttagtcccagacagaaagaagcactggcgaagtttagggagaatgtacaggacgtccttcccgctcttcctaacccggacgactactttctcctaaggtggcttagagcccgtagtttcgatctgcaaaaatctgaagccatgttacgcaagcacgtggaattccggaaacagaaagatatcgacaacataatctcctggcagcctccggaagtcatacaacagtatcttagcggtgggatgtgcgggtatgacctggacggatgcccggtttggtatgatattataggacccctggacgcaaaaggattgctgtttagcgcatccaagcaggatctcctccgtacaaaaatgagagagtgtgagttactcctgcaggagtgcgctcatcaaacgaccaaactgggcaggaaggtggagaccatcaccattatttacgattgcgagggcctagggctgaagcacctctggaaacccgctgttgaagcctatggtgaatttctgtgtatgtttgaggaaaactatcctgaaacgttaaagcggctattcgttgttaaggccccaaagttgtttcccgtggcttacaaccttatcaaaccctttttgtctgaggacacacgcaaaaagatcatggtgctgggcgcaaattggaaggaagtcctgctgaaacatatctcccccgatcaggttccagttgagtatggagggacaatgaccgatccagatgggaatcctaaatgtaagtccaagatcaattatggcggtgacatcccgaggaagtactatgtgcgggaccaagtcaagcagcagtacgaacacagtgtccaaatttcaagagggtcttcacaccaagtcgaatatgagattctgttcccaggttgtgtattacgatggcagtttatgagtgatggagccgatgtggggttcggcattttcctgaagactaagatgggagagagacagcgagcaggcgagatgacagaggtcttgccaaatcagaggtacaactcacatcttgtccccgaggatggcactctcacatgttccgatcccggaatttacgtgctcaggttcgataatacatacagcttcattcacgctaaaaaggtgaactttacagtggaggtgctcctcccagataaagcttcagaggaaaaaatgaaacaattgggtgctggcacgccaaaatag

SEQ ID NO: 239747 - DNA, 963 bp, synthetic construct
  misc_feature 1..963: note = Description of Artificial Sequence: Synthetic coding sequence
  source 1..963: mol_type = other DNA
atgagcggaagagtcggagatctgagccctcgtcaaaaggaagccttagcaaaattccgagagaatgtgcaggatgtcttgcccgctctgccaaacccggacgattatttcctgctgaggtggctgcgcgcaaggtccttcgatttgcaaaagtctgaagctatgttgaggaagctgggccgtaaggtggaaacaattaccattatctatgactgtgaagggctgggcttaaagcatctgtggaagccggctgtcgaggcatacggtgagttcctgtgcatgttcgaagaaaattaccccgagacactgaagcgactctttgtggtaaaagctcccaaattgtttccggtggcatataatctcataaaaccctttctctcagaagataccagaaaaaagattatggtgctgggggcaaattggaaagaggtccttttgaaacacatcagcccggatcaggtgcctgtggaatatgggggtacgatgacggaccccgatgggaatcccaaatgcaagtctaagattaattatggtggggacattcccagaaagtactatgtacgagatcaggtgaaacagcagtatgaacattctgtgcagatctctcgtggaagcagccaccaggtggagtacgagatactgttcccgggttgtgtgcttcgctggcagtttatgtccgacggcgcagacgtggggttcggcatattcctgaagactaaaatgggcgagcggcagagagcgggtgagatgaccgaagtcctcccgaaccaacgctataactcacatttggtcccggaagacggcacccttacatgttccgatcctggcatctacgtgttgaggtttgacaacacatactccttcatacatgcaaaaaaagttaatttcacagtggaggtactgctgccagataaagcttccgaggagaagatgaagcaactgggcgcaggaacaccaaaatag

SEQ ID NO: 239748 - DNA, 990 bp, synthetic construct
  misc_feature 1..990: note = Description of Artificial Sequence: Synthetic coding sequence
  source 1..990: mol_type = other DNA
atgctgcgaaaagtgatacagcagtacttgtcaggcggaatgtgcggttacgatctggacgggtgccctgtgtggtacgatattatcggtcctctggatgcaaagggcctcctgttttctgcttcaaaacaagatctgctgcggactaagatgcgagagtgcgaactgcttctgcaggagtgcgcacaccagaccaccaagttgggacgtaaagtggagactattacaataatctacgattgcgaggggctgggcctgaaacacttgtggaagcctgctgtggaggcctacggtgagtttctgtgcatgttcgaggaaaattatcccgagactttgaaaaggctattcgtcgtcaaagcgccaaagctcttcccagtcgcctataacttgatcaagcctttcttgagcgaggacacccgcaagaagataatggtgttaggagctaattggaaggaggtgttgctgaaacatatatcgccggatcaggtccctgtggaatatggagggaccatgacagatcccgacggaaaccctaagtgcaagtcaaagatcaactacggaggggatatccctcgaaaatattacgtgagggaccaggttaaacagcaatatgaacacagcgtgcagatttcaagaggcagctcccaccaagttgagtacgagatcttatttccgggatgtgttctcagatggcagtttatgagtgatggggcagacgtgggctttggcatttttctgaagaccaaaatgggcgagcgtcagcgcgctggggagatgactgaggttttgcccaaccagcgttataatagtcatctcgttcctgaggatggtacactcacatgcagcgatcccggaatctacgttctcaggtttgataacacctacagcttcatacacgcaaagaaagtgaacttcacagtcgaggtgcttctcccggataaggcgtccgaggagaagatgaagcagctcggggcaggaacgcccaagtag

SEQ ID NO: 239749 - DNA, 1179 bp, synthetic construct
  misc_feature 1..1179: note = Description of Artificial Sequence: Synthetic coding sequence
  source 1..1179: mol_type = other DNA
atgtcaggccgagtgggcgacttatcgccaaggcaaaaagaggccctggctaaattccgagaaaatgtacaggacgttttgcccgctctgccaaacccagacgattactttctgttgcgctggcttagggctagatcctttgacttacaaaagtctgaggccatgttgcggaagcatgtggagttcagaaagcaaaaagacatcgacaacatcattagttggcagccccctgaggtgattcagcagtatctgtctggagggatgtgcggatatgatctagacggatgcccagtgtggtatgacattattggaccgctcgacgctaaagggttgctatttagcgcgtccaagcaggatctgctccgaacgaaaatgcgcgagtgcgagctattattgcaggagtgtgctcaccagactactaaactgggcagaaaagtcgagactataaccattatctatgattgcgagggcctgggactgaaacacctgtggaagcctgcagttgaggcctacggcgaatttctttgcatgtttgaagagaattacccagaaacactgaagcggttgtttgtggtaaaagcccctaaactctttcctgtggcttataacttgatcaagccctttctgtcagaggataccagaaagaaaatcatggtgttaggggctaattggaaggaagtcctgttgaaacacatcagccctgaccaagtgcccgttgagtatgggggtactatgaccgacccagatggtaatcctaagtgcaagtccaaaatcaattacggcggagacattcccagaaaatattatgtacgcgaccaagttaagcagcagtatgagcattcggtgcagatatccaggggaagttcgcatcaggtggaatacgaaattctttttccgggatgcgttctgcgctggcagttcatgtccgacggcgcagacgtcgggtttggaatcttcttgaaaacaaaaatgggcgaacgtcagcgcgctggggaaatgaccgaggtgctacccaaccagcgctataattcgcacctggtcccagaagacggtacacttacatgttcagacccagggatctgtaaatacctatgcctgggtaatgctctgaagccccacgtgcagctgagcgcctgtgaggtcccactccccccatggatcttcgggtccgagtgttag

SEQ ID NO: 239750 - DNA, 1119 bp, synthetic construct
  misc_feature 1..1119: note = Description of Artificial Sequence: Synthetic coding sequence
  source 1..1119: mol_type = other DNA
atgtccaaagcttttggactcttacgtcagatctgccaatctatcctcgccgagtccagccagtcccccgcagacctcgaagaaaaaaaggaagaggattccaacatgaagagggagcaacccagggagaggcccagagcttgggactatccgcacggccttgtgggcctgcataacattggtcagacctgttgcctgaattctctcatccaagtcttcgtaatgaacgtggatttcacccgcatcttgaagcgcatcacagttccacggggtgctgatgagcagcgacgatccgttccattccagatgctgttgctgttagaaaagatgcaggactccaggcagaaagccgtgcgaccacttgagctggcctactgtttacagaaatgtaacgtgccactgttcgtacagcacgatgccgctcagctgtatctgaaactgtggaatcttattaaagatcagatcactgatgtgcacttggttgagaggcttcaggctctgtataccatccgagtaaaggactccttgatctgtgtggactgcgcaatggaaagtagtcgcaattcctccatgcttaccttaccactgtccttgtttgacgtcgattcaaagccacttaagactctcgaagatgctctccattgcttttttcaacctcgcgagttatcatccaaatctaaatgtttttgcgaaaactgtggcaagaaaactcgcggaaaacaagtcctcaaactgacacatctaccacagaccctcacaatccatttaatgcgcttttccatccgaaattcccagacgcgtaaaatttgtcatagtctgtactttccacaatctctggacttttctcagattctccctatgaagagagaaagttgcgatgctgaggagcaatcagggggacagtatgagctattcgcagtcattgcccatgtagggatggccgacagcggacactactgcgtttatatacggaatgcagtagatgggaaatggttttgtttcaatgactctaacatttgtctggtctcttgggaagacattcaatgcacttacggaaaccccaactaccattggcaggagactgcgtacctgctagtatacatgaaaatggagtgttag

SEQ ID NO: 239751 - DNA, 1062 bp, synthetic construct
  misc_feature 1..1062: note = Description of Artificial Sequence: Synthetic coding sequence
  source 1..1062: mol_type = other DNA
atggagttcagaaagacaatggatatagatcatattcttgactggcagcctccagaggtcattcagaaatatatgcccggtggcctctgcgggtatgaccgggacggatgtcctgtgtggtacgatatcataggccctctggacccaaaaggacttctctttagtgtgaccaaacaggaccttctcaaaactaagatgcgtgattgcgagagaatcctacacgagtgtgacctccagaccgaacgacttgggaagaagatcgagaccatcgtgatgatctttgattgcgaaggactgggcctaaagcatttttggaaaccacttgtggaagtgtaccaggagttctttggattgctcgaagaaaactacccagagactctcaagttcatgctgattgtaaaggccaccaaactatttcccgtcggctacaaccttatgaagccgtttcttagcgaagatacgcgcaggaaaatcattgttctgggcaataactggaaggagggcctgctcaaattgatctccccagaagaactacccgctcagtttggaggaactctcaccgaccctgatggaaatcccaagtgccttaccaagatcaactatggtggtgagatccctaagtcaatgtacgtaagagaccaggtaaaaacacaatacgaacactccgtgcaaatcaatcgcggatcatcacaccaggtggagtacgaaattctgtttccaggctgcgtattgagatggcagttctcatcggacggcgctgatattggcttcggcgtatttctgaagactaaaatgggggagcggcagcgagctggagagatgacagacgtcttaccatcccagcggtacaatgctcacatggtgccagaagatgggaaccttacgtgctccgaagccggagtgtacgtagaatccgaaagcgggaaatcttgctgccacctccccgtaataatttgctctcatgagctccagaattctcactccaactcccaggtgatggcttatcaaatggtaagaaagtgcaagctgtctcgaccccttcccctgccagcctctaactag

SEQ ID NO: 239752 - DNA, 1026 bp, synthetic construct
  misc_feature 1..1026: note = Description of Artificial Sequence: Synthetic coding sequence
  source 1..1026: mol_type = other DNA
atggaatttagaaagaccatggacatcgaccatattttggactggcagcctccagaggtcattcaaaagtatatgcccggagggctttgcgggtatgaccgggacgggtgccctgtttggtatgatatcatcggcccattggatccaaaaggtttgctcttctccgtaactaagcaagatctccttaagactaagatgcgcgactgcgagcgtatcctgcatgagtgcgacctgcagacggagcggctgggtaagaaaatcgagaccattgtgatgatatttgactgcgaggggctgggactcaagcacttttggaaaccactcgtagaggtgtaccaggagttcttcggcctccttgaggagaactatcccgagacccttaaattcatgctcatagttaaggctaccaagctctttcctgtaggttataacctgatgaagccctttttatctgaggatacgcgcaggaagataattgtgctgggcaacaattggaaagaagggctcctcaaactgatttcccctgaagaactgcccgcacaatttggtggaaccttgactgatcccgatggaaaccccaagtgtttaaccaagataaactacggcggagaaattcccaagtccatgtacgtgcgtgatcaggtaaaaacacagtacgaacactccgtccagatcaatagagggtcatctcaccaggttgagtacgaaattttatttccgggatgcgttcttaggtggcagttcagctctgatggggcagacatcggcttcggcgtgttcttaaagacaaaaatgggggagcgccagagggccggagagatgaccgacgtccttccatcccagagatataatgctcacatggtaccagaagacggaaatttaacctgcagcgaggctggggtttatgttctgcggtttgataacacctactccttcgtgcacgccaagaaggtctcatttactgtcgaagtgcttctgcccgacgaaggaatgcaaaagtacgacaaggagttgacacctgtatag

SEQ ID NO: 239753 - DNA, 972 bp, synthetic construct
  misc_feature 1..972: note = Description of Artificial Sequence: Synthetic coding sequence
  source 1..972: mol_type = other DNA
atggtgattcaaaagtacatgccagggggattgtgcgggtacgaccgcgacggctgtcccgtgtggtatgatatcattggccctttggacccaaaggggctcttattttctgtcacaaagcaagacttgctgaaaactaagatgagagactgtgaaaggattctgcacgagtgtgatcttcagacggagcggctgggcaagaagattgagaccatcgtgatgattttcgactgtgagggacttggacttaagcatttctggaagccactggtggaggtgtaccaggagtttttcggactccttgaggaaaactatcctgagacccttaaatttatgttgattgttaaagccactaagttgtttcctgtcggctacaaccttatgaagccttttctgagtgaagatacccgaaggaagatcatcgttctgggcaacaattggaaggagggtctgctcaaattgattagcccagaagaactgccggctcaattcggaggaaccctgaccgaccctgatgggaaccctaagtgtttgacaaagattaactatggcggagagataccaaaatccatgtacgtccgagaccaagtgaagacacagtacgagcactctgtgcagattaacaggggaagttctcaccaggtcgagtatgagattctgtttccaggttgtgtattgagatggcagttctcctctgacggggcagatattggcttcggagtttttctaaagactaagatgggagaacggcagcgagccggtgagatgaccgacgtgctccctagtcaacgctataatgcacatatggttccggaagacggaaacctgacctgcagtgaggccggagtgtatgtcctccggtttgataatacctattccttcgtgcacgctaagaaggtctccttcacagtggaggttctactgcccgacgaaggcatgcagaagtacgacaaagaactgaccccagtgtag

SEQ ID NO: 239754 - DNA, 972 bp, synthetic construct
  misc_feature 1..972: note = Description of Artificial Sequence: Synthetic coding sequence
  source 1..972: mol_type = other DNA
atggtaatacagaagtatatgccaggcggattgtgtggctacgatcgcgatggctgtccagtgtggtatgacatcattggcccactcgatcctaaagggctcttgttttccgtgactaagcaggacttgctgaagaccaagatgagagactgcgaaagaatcctccatgaatgtgacctgcagaccgaacgcttaggaaagaagatcgagaccatcgtgatgatttttgattgcgagggccttggattaaaacatttctggaaacctttagttgaggtgtatcaagaattcttcggactgctggaagaaaactatccggaaacactaaaatttatgctgatagtcaaagctaccaagctctttccggtgggctataatctgatgaaacccttcctgagcgaggatacccggcgaaaaatcatcgttctgggtaataactggaaagagggattgctcaaactgattagccccgaggaattgccggctcagttcggtggaacattgacagatccagatgggaatcccaaatgtttaaccaagattaattacggcggagaaattcccaaatccatgtacgtcagggaccaggtgaaaacacagtatgaacatagtgtccaaatcaatcgtggaagctcgcaccaggtggagtatgaaatactcttccccggatgcgtgctgcggtggcagttcagttccgacggcgctgatatcgggttcggggtgttcctaaagacgaagatgggcgaacgccagagagctggtgaaatgaccgacgttctaccgagccaaagatataatgcacacatggttccagaggacggcaacctcacctgctccgaggccggagtatatgttctgagatttgataatacttattcctttgtgcacgcaaagaaggtgtcctttacagtggaggtcttgctgcctgacgagggcatgcaaaagtacgacaaggaattaacccccgtctag

SEQ ID NO: 239755 - DNA, 1221 bp, synthetic construct
  misc_feature 1..1221: note = Description of Artificial Sequence: Synthetic coding sequence
  source 1..1221: mol_type = other DNA
atgtcctccagggtgggcgacctttctccccagcagcaagaagccctagcccgttttcgagagaacctgcaggatctgctccccattctgcccaatgccgatgactattttcttctacgatggctccgtgctcgtaatttcgaccttcaaaagagcgaggacatgctgcgtaggcatatggaattccgaaaacagcaagacctggacaatatcgtaacctggcaaccccctgaagttatacagctttacgattctggcggactgtgtggctacgactatgaagggtgccctgtttacttcaatatcattggcagcctggaccccaagggcctgcttctttctgcttctaaacaagatatgattagaaagcgcataaaggtttgtgagctgctgctgcacgaatgcgaactgcagacccagaaactaggacggaaaatagagatggcccttatggtgtttgacatggaagggctttctcttaagcacttatggaaacctgcggtggaggtctatcaacaattcttcagcatcctggaagccaactatcccgaaacactgaaaaaccttatagtgatccgggcaccaaaactattccctgtggcattcaatctggtcaagtctttcatgagcgaagaaactcggagaaaaatcgtgatcctgggggacaattggaagcaggaacttaccaagttcatatctcctgatcagctcccagtggaatttggtggaactatgacggatcctgacggaaaccccaagtgtctgacaaaaatcaattacgggggtgaggtgcctaaatcatactatttgtgtgagcaggtaagattacagtatgagcatacacgctcagttggtcggggttcttccctccaggtcgagaatgagattttatttcccggatgcgttctgcgttggcagttcgcaagcgatggaggcgatataggattcggcgtcttcctgaagaccaaaatgggtgagcaacagagcgcaagggagatgactgaggttctcccttcacagcgctataacgcccacatggttccggaagacggcagtttgacttgcctacaggctggtgtgtatgtcttgcgatttgataacacctacagccgaatgcacgcaaaaaaactatcgtacaccgttgaggtcctcctgccagataaggcttcagaggaaaccctgcagagcttgaaagcaatgcgcccatccccaactcagtag

SEQ ID NO: 239756 - DNA, 1083 bp, synthetic construct
  misc_feature 1..1083: note = Description of Artificial Sequence: Synthetic coding sequence
  source 1..1083: mol_type = other DNA
atgtctagtagggtaggtgatctgtctcctcagcaacaggaggctctggccaggtttagggagaatttacaggatctgctgccaatcctgccaaacgcagatgattattttttgctacggtggcttagagcaaggaactttgatctgcagaagagcgaggatatgctgaggcgccacatggaattccgaaagcagcaggacctggacaacatagtgacctggcagcctcctgaggtcatccagttgtatgactcagggggactgtgtggctatgattatgaagggtgccccgtatactttaatatcatcggctcgctcgaccctaaaggattgcttttgtccgcttccaagcaggacatgattcggaagcgaatcaaagtgtgcgaacttctgctccacgagtgtgaactgcaaacccaaaagctggggaggaaaatcgagatggctctgatggttttcgacatggaaggcctaagcctgaagcatctgtggaaaccagccgttgaagtttaccaacagtttttctccatcctggaagctaactaccccgagacgcttaaaaacttgatagtgatacgggcaccgaaactgtttccagtggctttcaatctcgtgaagagcttcatgtcagaagaaacgcggagaaaaatcgttatcctaggcgataactggaagcaggagttgacgaaattcattagccccgatcagctccccgttgaatttggtggaacaatgacagatccagatgggaacccgaaatgtctaaccaaaattaactacgggggagaggttccaaagagttactatttatgtgagcaggtgaggcttcagtacgagcacacccggagtgtcggtcggggttctagcctgcaagttgaaaatgagatcttgttccctggatgcgtactgcgctggcaatttgcatctgacggcggagatatcggcttcggcgtttttctgaagaccaaaatgggagaacaacaatccgcacgggagatgactgaggtgttacccagccagcggtacaacgcgcatatggtgcccgaagacggaagtcttacatgtctacaggccggtgtatag

SEQ ID NO: 239757 - DNA, 1083 bp, synthetic construct
  misc_feature 1..1083: note = Description of Artificial Sequence: Synthetic coding sequence
  source 1..1083: mol_type = other DNA
atgcttcggcgacatatggagttccgcaaacagcaggatcttgacaatatagtcacctggcagcccccagaggttattcaactgtatgactctggcggtctgtgcgggtacgattatgaaggctgccctgtatattttaacatcatagggtctctcgatcccaaaggcctgctgctttctgcctccaagcaagacatgatccgtaagcggattaaagtgtgtgagctcctgctgcatgaatgcgagttgcaaacacagaaattaggcaggaagattgagatggctttaatggtattcgatatggaaggcctctcactcaagcatctatggaagcccgctgtcgaggtttaccaacagttttttagcatccttgaggccaactacccagaaactcttaagaatttgattgtaatccgcgctcctaaacttttccccgttgccttcaacctggtgaagtccttcatgagcgaagaaacacgcagaaaaatcgtgatcttgggagataattggaagcaggagcttacaaagttcatttcacccgatcagctgccagtcgaatttggcggaaccatgacggatcccgacggtaaccctaaatgcttgactaagattaactacggtggcgaggtgcccaagtcttattatctatgcgaacaagttcgactgcagtacgaacatacacgcagtgtcggaagggggagcagcttacaggttgagaatgagattctgtttccagggtgcgtcctccgctggcagtttgcctccgacggcggagatataggattcggcgtatttctcaagacaaagatgggagagcagcagtcagctcgagagatgaccgaggtactgccttcacagagatacaatgcacacatggtgcccgaggatgggtctctgacatgtctccaggctggcgtgtacgtaagaggactctgctctctgatcacctctcccagcttgcagatgagctgcgctagcaccacccccactgcaggctgcatgcctcgttccagtgcaaccctgtggcggtgttgttttcctacgcgtcccttgaggcggaggtgcagggtgtctcggagatag

SEQ ID NO: 239758 - DNA, 1176 bp, synthetic construct
  misc_feature 1..1176: note = Description of Artificial Sequence: Synthetic coding sequence
  source 1..1176: mol_type = other DNA
atgttgatgaccacttctagctgcgcgggttgtgaactggaaaccctcacttgccggaatcctaagacctgctccgaggggcctaagagccctcagcctaccagctgcccacatgcactgcgtgcatggcacatggaattccggaaacaacaggaccttgataatattgtgacatggcaaccacccgaggtcattcaactttacgactctggaggtctctgcggctatgattacgagggatgccctgtctattttaacattatcgggagtctggaccctaagggtctcttattgagtgcatccaagcaggatatgatacggaagcggattaaagtctgcgagctgctgttgcacgaatgcgagctacaaacacagaagttgggacgtaaaatcgaaatggctctgatggtgtttgacatggagggcctctcgctgaaacatctctggaagcctgcagtggaggtctatcagcagttcttctccatcctggaagcgaactatccagaaaccctgaaaaacctaatcgtgattcgagcacccaaactgttcccagtggcctttaacctggtaaagtccttcatgtctgaggagaccaggcggaagatcgtcatcctcggcgacaattggaaacaagaactgaccaagttcatatcccccgaccagctgcccgtcgagtttgggggtacaatgaccgatcccgacgggaatcctaagtgccttacaaaaattaattatgggggtgaggtccccaagtcgtactacctgtgtgaacaggtcaggctacagtatgagcacaccaggagtgttggacgcggatcaagtctgcaggtggagaacgaaatcttgtttcccggttgcgtgctgagatggcagtttgcttccgacggcggagatataggttttggggtatttctaaaaaccaaaatgggtgagcagcagtctgctagagaaatgaccgaggtgcttccttcacagcggtacaacgctcacatggtgcctgaagacgggtccttaacatgtttgcaggccggtgtatacgtgttacggttcgataatacttacagtaggatgcacgctaagaagttatcttataccgtggaggttcttctgccagataaggcgtcagaagagactttgcagagtctaaaggctatgaggcctagccctacacaatag

SEQ ID NO: 239759 - DNA, 2256 bp, synthetic construct
  misc_feature 1..2256: note = Description of Artificial Sequence: Synthetic coding sequence
  source 1..2256: mol_type = other DNA
cccgcagcagccgcatcaagtctagaacgggagacggaaagattcagggaactcctgctgtacgggaggaaaaaagacgccctagagagtgccatgaaaaacggactttggggtcacgccctgttactggcttctaagatggatagcaggactcatgcccgtgtgatgacacgcttcgctaactcactgccaatcaacgacccattgcagacagtataccagttaatgagcgggcgaatgccagctgcatccacatgctgtggagacgaaaaatggggtgattggcgccctcaccttgccatggttctcagcaatctgaataacaatatggatgtggaaagccggaccatggccaccatgggcgataccctcgcatctaggggcctgttggacgccgctcacttctgctacctgatggcccaggcaggctttggcgtttacaccaaaaaaactacaaaactggttctgatcggtagcaatcattccctcccctttcttaaattcgctaccaatgaggccatccaaagaacggaagcgtacgaatatgctcaaagcctcggagctgagacctgcccattgccgtcctttcaggtctttaagttcatttactcctgtaggcttgctgaaatgggcctggccactcaggcatttcattactgtgaggccatcgcgaagagcatcctgactcagccacacctctatagtcctgtgctcatctcccagctcgtgcagatggcaagtcagctgagactgtttgatccccagctcaaggaaaagccagaagaggaatcactcgccgctcctacctggctggtccaccttcaacaggtcgagcgccagataaaggaaggcgctggcgtgtggcaccaggatggtgcactgccccagcaatgtccaggaaccccctcctctgaaatggaacagctcgacagacccggactgagccaacctggtgcactgggaatcgccaatcccctattggctgtcccagctccttctccagaacactccagcccctctgtgcgccttttacctagtgccccacagacccttcctgacgggcctctggcatctccagccagagtaccaatgttccccgtacccctgccacccggacccctggagcccggacctggatgcgtcacccctggacccgctctgggcttcctcgagccctccggacccggtctgccacctggcgtgccccctctacaagaaagaagacacctgcttcaggaagctcgctctcccgatccaggaatcgtcccacaggaggcgcctgtgggaaactctctgagtgaactctccgaggagaatttcgacggtaaatttgcaaatctaacccccagtcggaccgtgcccgactcagaggcgccacccggatgggaccgcgcagactccgggccaacgcagccccctttatcactctcaccagcgcctgaaacaaagagacccggacaggctgcaaaaaaagaaacaaaggagcccaaaaagggtgagtcctggttctttcgatggttaccagggaagaagaaaacagaggcatacctgcccgacgacaaaaacaaaagcatcgtgtgggacgaaaaaaagaaccagtgggttaatctgaacgaacccgaggaagaaaagaaagctccaccaccccctcctacttccatgccaaaaacagttcaggcagcacctcctgctttgccgggaccaccaggcgctcctgttaacatgtattccagacgagccgctggcacacgagccagatacgtggatgtcttgaacccgtccggaacgcaacgttccgagcccgctttggcaccagccgactttgtggctccccttgccccactgccgatcccgagcaacctgtttgttcccaccccagatgcagaagaacctcagttgcccgacggcacgggacgggaggggccagccgctgcaaggggattggctaatccagaaccagccccagagcctaaagtgctatcgtctgcggcttccctgccaggcagcgagctcccaagttcacgacctgaaggatcccagggaggggagctgtccagatgctccagtatgtcaagtctgtcgcgcgaggtgtcacaacatttcaaccaggcaccaggggacttgcccgctgctgggggaccaccctcaggcgctatgcccttttacaaccctgcacagttagcccaagcatgtgctacgagcggaagcagcaggctagggcgaattggacagaggaaacatctggtgttaaattag

SEQ ID NO: 239760 - DNA, 6480 bp, synthetic construct
  misc_feature 1..6480: note = Description of Artificial Sequence: Synthetic coding sequence
  source 1..6480: mol_type = other DNA
atgcccggactggacagacctctgtctcgccagaatccccatgacggcgtagttacaccagctgcatctccgagtctccctcagcctggcttgcagatgccgggacagtggggacccgtccaggggggtcctcagccatccggccagcatagaagcccctgtcccgagggccctgtgccatcgggcgtaccatgtgctacgtcggtgccgcatttccctacccccagtatcctgcatcaggggcctggtcatgagcagcattccccactggtggcacccccagccgcactaccatccgacggaagagacgaagtctcgcatctacagagcggaagtcatctcgcaaacaattctgaccctgaaagcacttttagacaaaaccccaggatcgtgaatcactgggcatctccagagctgaggcagaacccgggtgtgaagaatgaacatcggcctgccagtgccctggtcaatcctctggcgagaggggatagccccgaaaatcgaacacatcatcctctgggggctggggctggatctggctgtgcccctctcgaagccgattctggagctagcggagcgcttgccatgtttttccaagggggagagacggagaatgaagagaacctcagcagcgagaaagcaggactctccggccaggccgattttgatgacttttgcagtagtccaggcctcggacgaccacccgctccaacacatgttggggctgggtccctatgtcaagccttgttacccggtcccagtaatgaggccgcaggagacgtatggggcgacacggctagtacaggagtgccggacgcctctggttctcagtatgagaacgtagagaatctagaatttgtccagaatcaggaagtgcttcccagcgagccacttaatcttgatccctcctctccttccgatcagtttcggtatggccctctacccggacctgcagttccgagacatggcgctgtatgtcacactggtgcccctgatgcaaccttgcacacagtgcaccccgactcggtgtcaagcagttacagttcgagaagccatgggcgactatctggctcagctcgcccacaggagttggtgggaacctttattcagcaagaggttgggaagcccgaggatgaagcatcaggtagcttcttcaaacaaatagactcctctccagtaggaggtgagacagatgaaacaaccgtatctcagaattatcgtgggtccgtgtcacagcccagtacgcctagcccgccaaaacccacggggatcttccagactagtgctaactcgtcgttcgagcctgtaaaaagccatctcgtgggtgttaaacccttcgaagctgatcgcgctaatgtggttggggaagtgcgggagacatgcgtgcgccaaaagcagtgccgcccagctgctgcgctgcccgacgcctctccagggaatttggaacagcccccagataacatggagacattgtgtgccccacaggtgtgccccctccctctcaatagcactactgaggccgtacacatgctgccccatgcaggagcgccaccacttgacacggtctaccctgcccctgagaagcgcccatcagccagaacacaggggccagtcaaatgcgagtctcccgcaaccaccctgtgggctcagtctgaactgcctgactttggtggcaatgtgctgcttgccccagcggctccagctttatatgtgtgtgctaagccccaacccccagtagtgcaaccgcctgaggaggctatgtccggccaacagagtaggaaccccagcagcgccgcacccgtgcagtcaagaggagggatcggtgcatccgagaacctggagaaccctcccaagatgggagaagaagaagcccttcagtcacaggctagctccgggtatgcgtcgctgctaagttctcccccaaccgagagccttcagaatcctccggtcttgattgcccagccagatcactcttacaaccttgcgcagcctattaacttttccgtgagcttatccaacagccacgaaaaaaaccagtcctggcgtgaggcactggtcggtgaccgtcctgctgtctcttcctgggctttaggaggggattcaggagaaaacacctctcttagcgggattccaacctcatctgtgctcagcttaagcctgccttcctccgtggcccagtctaactttcctcagggctccggagcatccgagatggttagcaatcagcccgctaacctgctggtgcagcctcccagccagccagtgcccgaaaacttagtgccagagtcccaaaaagataggaaggccggatccgccctccctggcttcgcaaactcgccagcgggatccacaagcgttgttttggtgccccctgctcacggaaccctggtccccgacggaaataaggccaaccactcaagccatcaagaagacacttacggcgcacttgattttacactgagtaggacgctggagaatcctgttaatgtttataacccgtcccattcagatagcctcgccagccagcagtccgtggcctctcacccacggcagagcggtcctggcgcacctaacctcgaccggttttaccagcaggtgacaaaggacgctcagggccagccaggactcgagcgggcacaacaggagctcgtgccaccacaacaacaggcaagcccgccacagcttcccaaggccatgttctccgagctgagtaacccagagtctctgccagcacagggacaggctcaaaacagtgcccaaagtccagcctcattggttctagtagatgcagggcaacagttgcctcccagaccgcctcagagctccagcgtttctctggtgtcttccgggtcaggacaggctgcagtgcccagcgaacagccctggccgcagcccgtccccgcactcgccccaggaccaccacctcaggaccttgccgcttattattactacagaccgctttacgacgcctaccagccacagtattcactgccctaccccccagagccaggagccgcaagcttgtattatcaagacgtgtattcactttacgagcctcgatacagaccctacgatggcgcagcgagcgcatacgcgcagaactacagataccccgaacccgaacgcccttcttctcgggcatctcactccagcgaacggcctccaccaaggcagggttacccggaagggtactacagttcgaaatccggatggtcctcgcagtctgactactatgcctcatattatagtagccagtacgattatggagatccaggacactgggacaggtaccattacagtgccagggtcagggacccccgaacctacgaccgtcgttactggtgtgatgccgagtatgatgcctaccgccgagaacactcagcatttggcgacagacccgagaagagggataacaattggagatatgaccccaggttcacagggagttttgacgacgatccagatcctcaccgcgacccctatggcgaggaggtcgatagaagatccgtccactcagagcattcagcccgatcactccacagcgcccactcactggcttctagaagatcatccctgtcatctcatagccaccagagccagatttacaggtcacataatgtggccgcaggcagctacgaggcaccactgcccccaggcagcttccatggcgactttgcctacggaacttacaggtcaaatttttcctccggccctggcttcccggaatacggctatccagcagataccgtgtggccggcaatggaacaggtcagttcacgcccaacttctcccgagaagttctcagtaccacacgtgtgcgctcgctttggccctggcggacagctgataaaggtcataccaaacttgccatccgaaggtcagccagccctcgttgaggtccacagcatggaagccctgctccagcatacatcagagcaggaagagatgagagcctttccaggccctttagctaaggacgatacccacaaagtcgatgtgattaatttcgcacagaacaaagctatgaagtgcttgcagaatgagaatttgattgacaaagaatctgcatctttactatggaacttcatagtgcttctgtgtcggcaaaatggcactgtggtgggcacagatatcgccgagctgctgttaagagatcacagaactgtttggttacccggtaagagtcctaatgaggccaacctgatcgatttcacaaatgaagctgttgaacaggtggaagaggaagaaagtggtgaggcacagctgtcatttttaacaggcggtcctgccgctgcggcttcctccttagagcgggaaactgaaaggttccgagaactgctattgtacggccgaaaaaaagacgctctggaatccgctatgaaaaatggtctgtggggacatgcactgctgcttgcctctaagatggactcccgcacacacgcaagggtcatgacgaggtttgctaattccctgcccataaacgacccacttcagacagtgtaccaactcatgtctggcaggatgccagctgccagcacctgttgcggcgacgagaagtggggggactggaggccacatcttgccatggtgctgtctaatctcaacaataacatggacgtcgagtccagaactatggcgacaatgggcgacactctggctagccgtggcttgcttgatgccgcacatttctgctacctcatggcccaggccggttttggtgtgtacacgaaaaaaactaccaagctcgtattgatcggctctaatcacagcctgccctttctcaaattcgccacaaatgaagccattcagcgtaccgaggcctatgaatacgcccagagcctaggcgcagagacttgtcccttgcctagttttcaggtttttaagtttatttacagctgccgccttgccgaaatgggccttgccacccaggccttccattattgtgaggccattgcgaagagcatcctaactcaacctcacctgtattcacccgttcttatctcccagttggtccagatggcctctcagctgcgtctgtttgatcctcagcttaaggaaaaacctgaggaggagtcactggccgcacccacttggttggtgcatctgcaacaggtagagcgacagatcaaggagggcgctggagtgtggcaccaggatggggctctgcctcaacagtgtcccggaaccccctccagcgagatggagcagttggatcgtcccggtctgagccaacccggagcactggggatagccaaccctcttctggcagttcctgcgccatctcccgagcactcttcacctagtgtgcgtctcctgccttcagctccccaaaccctcccagacggccctctggcatcgccagcaagagttccaatgtttccagtgccactgccaccaggtccattagagccgggacctggatgcgtgaccccagggcctgcgctcggcttcttggagccttctgggcctgggctccctccaggcgtaccacccctacaagagcggaggcatcttctacaggaggctcgaagtccggatccaggcatcgtccctcaggaagcccctgttgggaacagcctcagtgaactgtccgaggaaaactttgacggtaagttcgccaacttgacaccgtccagaacagtgcccgatagcgaggctcctcctgggtgggaccgagcagattccggacccacacagcctcctctctctctgagccctgcccctgaaaccaaacgccctggacaggcagctaagaaggaaacgaaagaaccgaagaagggcgaaagctggttctttagatggctcccagggaagaaaaagactgaggcgtacttgcccgacgacaagaacaagagcatcgtatgggacgagaaaaaaaaccagtgggttaacctaaacgagcccgaggaagagaaaaaagctccacctcctccccctactagtatgcccaaaacagtgcaggccgcaccccctgccctcccgggtcccccaggagctccagtgaatatgtacagcagacgcgctgcaggaacacgggctcgttatgtggacgtccttaatccaagcggaacacaaagatccgaacctgcacttgcacccgctgacttcgttgctcccctggcccctcttccaattcctagcaacctgtttgtgcccactcccgacgcggaggagccgcaacttcctgatggcacagggagggaaggtcctgctgccgcacgtggcctggcgaatcccgaaccagccccagaacccaaagtgttgagttccgctgcctccttgccagggagtgagttaccatcctcccgccctgaaggttctcagggtggggaggccccaggagatcttcctgcagctggaggtcccccttcaggagcaatgcccttttataacccggcacagctggcgcaggcttgtgcaacttccgggagctctagactaggaaggattggtcaacgcaaacacctggttttgaactaa

SEQ ID NO: 239761 - DNA, 7074 bp, synthetic construct
  misc_feature 1..7074: note = Description of Artificial Sequence: Synthetic coding sequence
  source 1..7074: mol_type = other DNA
atgcaaccaccgcctcagaccgtaccgagcgggatggccggaccgcctcccgctggtaatccgaggtccgtattttgggcctcttccccgtatcggaggcgggcaaacaacaatgccgcagtcgctcctactacctgtccactgcagccagtcaccgaccccttcgcattttctaggcaggcacttcagtcaacacccctgggatcttccagcaagagttctcctccagtgctgcaagggcctgctcccgcaggcttcagccagcaccctggcttacttgtgccacatactcacgcacgcgacagctctcagggcccttgcgagccactgcccggacctctgacgcaacccagagctcacgcttctcccttcagcggagcgttgacgccaagcgcccctcccggtccagaaatgaaccgctccgctgaggtgggtccctcgtcggagcctgaagtccagacgctgccatatctgccgcactatattccgggagttgacccagagacctcacacggtggacacccacatggaaacatgcccggactggatcggccattgtctcggcagaatcctcatgatggcgtcgtcacccccgctgcgagtccaagtctgcctcagcccggactccagatgcctggacaatggggcccagtgcaggggggaccacaaccatccggccagcaccgaagcccttgtcccgagggccctgtgccaagcggtgtgccctgtgccaccagcgtcccccatttcccaaccccctctatcctgcatcaggggccaggtcacgaacaacattcacctctagttgcccctccagccgcactgccttcagatggccgtgacgaagtctctcatcttcagagtggcagccatctggcaaacaactcagaccctgaaagtacatttcggcagaacccccgtatcgtgaatcattgggcgtcacctgagctgcggcagaatcccggagtgaagaatgagcaccgacctgcgtctgccctggtaaaccctctggccaggggtgatagtcctgagaacaggacccaccacccactcggagcgggagccggttccggctgcgcaccgctggaagctgatagcggggcatctggcgctctggctatgttctttcaggggggtgagacagaaaacgaggaaaacctgtcgagcgaaaaagcaggactctccggccaggcagactttgacgatttttgtagttcacccggactggggcgacctcccgctcccacccatgttggggctggctccctgtgtcaggctctcctgcccggtccgagtaatgaagccgcaggcgacgtttggggggatacagcctccaccggagtgccagatgccagtggtagtcagtacgagaatgtcgagaacctagaattcgtccagaatcaggaggtgctaccttcagagcctctcaatctcgacccctcgtccccgtccgatcaattccgctatggccctcttcctggacctgccgtcccgaggcacggggcagtatgccatacaggagccccagacgctacacttcatactgtgcacccagacagcgtatcatcctcgtattctagcaggtcgcacggaaggctctctggatcggctcgtccacaggaactggtcggcacattcatccaacaggaggttggcaagcccgaggatgaagccagcggctctttctttaagcaaatcgactcaagcccggtggggggagagaccgacgagacaacagtgagtcaaaattaccgcggatcggtttctcagccttccaccccgagcccacccaagcccaccggcatttttcagaccagtgctaatagctcgttcgagccggtaaaaagccatctcgtcggcgtaaaaccattcgaagcagatagggctaatgttgtgggcgaagtaagggagacctgcgtgcgccagaaacaatgcagaccagcagccgcactacccgatgccagtcctggaaacctggagcagcctccagataacatggagacattatgcgcgcctcaagtgtgtcctttacccctgaatagtactactgaagcggtgcacatgctccctcatgctggggcaccccctctggacactgtatatcctgcccctgaaaagaggccgagcgccaggactcagggcccagtcaagtgtgaatcgccagctaccaccttgtgggcccagtcagaactcccagacttcggtggaaatgtcctgcttgcccctgctgcaccagcactctatgtgtgtgctaagccccaaccccctgtggtgcagcctccagaagaggcgatgtctgggcagcagagcagaaacccttccagtgcagcacccgtgcaaagccgcggagggatcggagccagtgaaaatctggagaaccctccaaagatgggagaggaggaagccctgcagagtcaagcctcaagcggttacgcatcactgctctcttcacctccaaccgagtcgctacagaaccctccagtgctgattgcccagcccgatcactcatataatctggcccaacctatcaatttcagcgtgagcctctcaaacagtcacgagaaaaatcaatcgtggcgagaagccctggtcggcgacagacccgcagtgtcatcatgggccttaggcggagactcaggggaaaatacatctctgtcgggcattcccacatcatctgtactcagtctgtcgttgcctagcagcgtagcccagagcaacttcccacagggctccggagcgtctgagatggtttctaaccaaccagctaacttactcgtccaacctccttcacagccggtccccgagaatcttgtgccagaatcccagaaggatagaaaggccggtagtgcgctgcccggatttgcaaatagccccgctgggagcacttccgtggtgctcgtgcccccagcacatggtaccctcgtgcctgacggcaacaaagccaatcattcttcacatcaggaggacacctacggcgcacttgactttaccctgagtagaactttggaaaatcccgtcaacgtatataatcccagccattctgactcgctcgccagccaacagtctgtggcctctcacccgagacaaagcgggcctggagcacctaatttggacaggttttaccagcaggttacaaaggacgcccagggccagcccggtctggagcgcgcacaacaggaactggtcccgcctcagcaacaggcaagccctccgcagcttcctaaagccatgttttcggaactgtcaaatcccgaatcccttcctgcccagggccaggcacagaatagtgctcagtctcctgcatcactcgtacttgtcgatgccggtcagcagcttcccccacgacctccacagagctcgtccgtctccctggtctcgagtggctcagggcaggccgctgtgccatcagaacagccctggccccagcctgtcccggctcttgcacccggtcctccaccacaggatcttgcagcgtattactattatcggcctttgtacgatgcctatcaaccgcagtacagtttgccttaccctccggagccaggcgcagcttccctctactaccaagacgtttatagtctatatgagccacggtacagaccatacgatggcgctgcttccgcatatgcccagaattaccgatatcccgagccagagagacctagttcgagagcttcccactcctctgagcgcccacccccacgccagggttacccagaaggttactatagtagcaaatccggttggtcctcacaaagtgattattatgcttcatactactctagccagtatgactacggcgaccctggccactgggaccgctaccactatagcgctcgggtcagggatcctcggacgtatgatagacgctattggtgtgatgcggagtacgatgcttatcgaagagaacactccgccttcggggatcgtcccgagaagcgggacaacaattggcgctatgacccaaggtttaccggcagcttcgatgacgaccccgatccccatcgcgatccatatggtgaggaagttgaccgccgttcggtgcatagtgaacattctgccaggtctctgcattctgctcatagcctggccagtagaagatcatccttgtcaagccactctcatcagagccagatttaccgctcacacaatgtagccgcaggttcatacgaggctccactgcctccgggttcatttcacggagacttcgcttacggcacgtatcgctcaaatttcagcagcggtccagggttccctgaatatgggtaccccgctgacactgtttggccagcgatggaacaggtctcgtccaggcctacttctcccgagaagttttctgtgcctcacgtgtgtgccaggttcgggcctgggggtcaactgattaaggtcattccaaatctgcctagtgagggccagccagccctcgttgaagtacattccatggaagcacttctccagcacaccagcgaacaggaagaaatgcgcgctttccccggaccacttgcaaaggacgacacccacaaagtggatgtgattaactttgctcagaacaaggcaatgaaatgcctgcaaaatgagaacctgatagacaaggagtcagcatctctcctgtggaattttattgtcctcctctgccgacagaacggaacagtggtgggcaccgacatcgctgagttattgcttcgcgaccaccggaccgtatggttgccgggtaagtctcctaacgaagctaacctaatcgacttcaccaatgaggccgtcgagcaggtggaggaggaagagtcgggggaggcccagctttccttcttgacaggcggacccgctgctgctgcgagttcgctggaaagagagactgagcgctttcgcgaactgctgctgtatgggaggaaaaaggacgctctcgagtcggccatgaagaatggtctgtggggtcatgccctcctcctggcaagtaagatggacagtaggacccacgccagggttatgaccagatttgccaattctctccctatcaatgaccccttgcaaaccgtgtaccagctgatgtcaggcagaatgcccgcagcaagcacttgctgtggagacgaaaaatggggcgattggcgtccacatcttgctatggtcttgtctaacctgaataacaatatggacgttgaaagccgtacaatggctacgatgggcgacacactggccagcagaggcctgcttgacgccgcacacttttgttaccttatggctcaggccggattcggtgtttataccaaaaaaaccaccaaactggtgctaatcggttcaaatcattcactccctttcctcaagttcgctaccaacgaggccatccagagaacggaagcttatgagtacgctcagtctcttggagctgaaacatgtcctcttccctccttccaggtatttaagttcatctactcctgtcggctagctgaaatgggccttgctactcaggccttccactactgcgaggccatcgcaaagagcatactcacacagcctcatctctattcacccgtgctaattagccagctcgtgcagatggcatcccaactccgccttttcgaccctcagttaaaggaaaaaccggaggaggaaagtttggcggctcccacctggctcgttcacctccagcaagtagagagacagattaaggagggggctggcgtttggcaccaggacggggctctcccacaacagtgtcccggtactccctcctccgagatggagcagctggataggccaggcttgagccaaccaggggctctggggatagccaatccgctgttggccgtgccggctccttcacccgagcacagcagtccgagtgttaggttactacccagtgcaccacagacccttccggacggtcccctggcatctcctgctagagtccctatgttccccgtgcctctgccccctggcccactggaaccaggaccaggctgtgttactcctggtcctgcacttggctttcttgaaccttcaggtcccggtctaccccctggtgtgccgcctttacaggaacgacggcacctcttacaggaagcgagatccccggaccccggtattgtcccccaagaagcccctgtgggtaacagcctgtctgagctttctgaagagaacttcgacggaaagttcgctaacctgacaccttcccgaacagtaccagacagcgaagccccacctgggtgggaccgggctgatagcggacctacccagccaccactgtcccttagtccagcccctgaaacaaagaggcctggacaggctgccaaaaaggaaactaaagagcccaagaaaggggagtcatggttcttccgctggctgccaggcaaaaaaaaaacagaggcctatctgcctgatgacaaaaacaaatcaatcgtttgggacgagaaaaagaatcagtgggttaatctgaatgaacctgaagaagagaagaaagctcccccaccccctcctacatccatgccaaagacggtgcaggccgcaccgcctgctcttcccggacccccaggcgctcccgtcaacatgtatagtagacgggcagccggaacccgagcccgatacgtggacgtgctgaacccctccggcactcagaggagtgaacctgcactggccccagccgactttgttgctcctctggcgccactgccgataccatccaacctgttcgtcccaacccctgatgccgaggagccccagcttccagatgggacaggtcgcgagggcccagctgcggcaagagggttggctaatcctgaaccagctcccgaaccgaaggtcctatccagtgccgcatcactccccggtagcgaattaccatccagccgccctgaaggatcacagggaggcgaattaagtaggtgctcgtcaatgagttcactctcgagggaggtctctcaacactttaatcaagcccctggggacctgccagcagcgggaggcccaccttccggggcaatgccgttttacaatcccgctcaactcgcgcaggcttgcgctacaagtggatcatctcggctgggccgtattggtcagcgaaagcatctggttttaaactaa

SEQ ID NO: 239762 - DNA, 1158 bp, synthetic construct
  misc_feature 1..1158: note = Description of Artificial Sequence: Synthetic coding sequence
  source 1..1158: mol_type = other DNA
atggatctgctgcctacctccattttgcttgcttcactgtggatttgtagccatctccaccctcctggggtgtcggtggatctcccacctacatccatcctccttgtgtccctttggatctgtagtcatcttcacccacccggtgtttcagtggatcggcctcctcccccaagttcttggtgcttgtgcggatccccccctactagcatcctgctcgtcagtctctggatttgctcccctccgccttcgtcctggtgtctctgcggcagcgccccaacaagtattctgctggtctctctgtggatctggcggctttggggcttaaccgaaggagaaagctggttctttcggtggctgcccggaaagaagaaaacagaggcgtatttaccggacgacaaaaataaatcaatcgtgtgggacgagaaaaagaatcagtgggtcaacttgaacgagccagaggaagagaaaaaagcaccacctcctcctccaaccagtatgcctaaaacggtacaggcagcaccacccgcacttccgggaccaccaggagctccagtcaatatgtatagtcgtcgtgccgcaggaacccgcgctcgctacgtggatgtcctgaacccgtctggaacccaacggtcagagcccgctctggctcctgcggatttcgtggcgccactggcacccttgcccattccaagcaatctgtttgtccccaccccagtgtcttctgtccgaccccaaggacgctcgggaaggaacgatggactgctggccctgtcctcaccggatgctgaggaaccccagctgccagatggcaccgggcgtgagggtcctgccgcagctcgcggtctggccaaccccgagccagctccggagccaaaggttctgtcatccgctgcatctctgcctggctctgagctgcctagcagcagacctgaaggcagtcaggggggagagctgagccgctgttcatcgatgagtagtctgtcacgcgaggtctcgcagcactttaaccaagccccaggcgacctgcccgctgcaggtggcccaccgagcggcgcaatgccgttttacaatcccgcacagctagcccaggcttgtgccacttcaggatcatccagactggggagaattggccagagaaagcacttggtactgaactag

SEQ ID NO: 239763 - DNA, 6404 bp, synthetic construct
  misc_feature 1..6404: note = Description of Artificial Sequence: Synthetic coding sequence
  source 1..6404: mol_type = other DNA
atgccgggtctggaccgcccactatccaggcaaaacccgcatgacggggttgtaactccagccgctagcccttcgttgccccagccaggactgcagatgcctgggcagtggggtccagtgcagggcggtcctcagcccagcggacagcatcgcagcccgtgccctgaggggcctgtgccgtcaggagtgccttgcgcgacatccgtgccgcatttcccgactccgtccattttacaccagggacccggtcacgagcagcacagtcccttggttgccccacccgcagccctgccgtctgacgggagagacgaggtctctcatctgcagtctgggtctcaccttgccaataacagtgatccagaatcgactttccgccagaatccaaggatagttaatcattgggcttcacctgaactgcggcagaacccaggtgtaaagaacgagcatagaccagctagcgctctcgtgaatccgctcgccagaggcgattccccagagaatagaacgcatcatcctcttggggcaggcgctgggagtggatgtgctccgcttgaggccgactctggtgcatccggtgctttggctatgttcttccaggggggagagactgagaacgaagaaaatctctcgtctgaaaaggctggattaagcggccaggcagacttcgacgacttctgcagcagcccaggtcttggacgaccccctgcacctacccatgtcggagccggatcactgtgccaggccttgctaccgggtccatccaatgaggcggctggtgatgtgtggggggacacagccagcactggggtcccagatgcctcgggtagtcaatatgagaacgtggaaaacctggaattcgtccagaaccaggaggtattaccatctgagccacttaacctcgatccctccagtccctctgaccagtttcgctacggacctcttccagggcctgctgtgcctagacatggcgctgtatgccataccggcgcaccagacgctaccctgcataccgttcatcccgattcagtgtcttcatcttattccagtaggagccacgggcgtctcagtgggtccgcacggcctcaagagttggtcggtacctttattcaacaggaggtgggaaaaccggaggacgaagcttctggaagcttctttaagcagatagattccagccctgtgggaggcgagacagacgaaaccactgtgagccagaattatcgaggctctgtgtcgcaaccctcgactccaagtccccctaagcccaccggtatattccagacatctgcaaactcatcattcgaaccagttaaatcccatctggtaggagtcaaaccttttgaagcagacagggcaaatgtggtgggggaggtacgtgagacatgtgtgagacagaagcagtgtagacccgcagccgcactccccgacgcttctcccggaaatttggagcagccccctgacaacatggagactctgtgtgcccctcaggtctgcccgcttccattgaactcaaccacagaggctgtccacatgctgcctcatgccggagccccacctcttgataccgtgtatcccgcacccgagaaacgccctagtgctcgcacgcagggaccggtcaagtgcgaatcccctgctacgactctgtgggcacagagtgagttgcccgatttcggagggaacgttctgttggctcccgcagcccctgcactgtacgtgtgcgccaagccccagcctcctgttgtccagcctcctgaagaggccatgagtggtcagcagagtcgtaacccaagttccgctgccccagtgcagtccaggggaggtatcggggcttcggaaaatctggaaaatccaccgaagatgggagaagaggaggctttacagtcacaggcttccagcggctatgcttctctgctttcttcaccacccactgaatcattacaaaatccccctgtgcttatagctcagcccgaccattcttacaacctggctcaaccaataaacttctctgtctctctaagtaactctcatgaaaaaaatcagtcgtggcgggaggcactggtaggggaccggccagctgtttctagctgggccctcggcggagatagcggggaaaacacgtccctgtccggaattccaacatcatccgtgctctctctaagtttaccaagcagcgtggcacaatctaacttcccacagggatctggggctagtgaaatggtgtcaaaccagcccgctaacctgttagtgcaacccccatcacaaccggtgcccgaaaacttagtgcctgagtcccaaaaagatagaaaggcgggaagtgcgctgcccggatttgcaaactctcccgctggttccacctccgtggtgctcgtgccgcctgcacacgggactctggtgcctgacgggaataaggccaaccacagttcacaccaggaagacacgtacggagccttggattttacgctgtcccgaacgttagaaaatccagtgaatgtgtacaaccctagccactccgatagtctggcctcacagcagagcgtggcttctcatccgaggcagtcaggccctggtgccccaaaccttgacagattttaccagcaagtaactaaggatgcccaaggccaacctgggctggaacgcgcacaacaggagttggtgccacctcaacagcaagcttcccctccgcagctcccaaaggccatgttctcagaattgagcaacccggaaagccttccggctcagggccaggcccagaatagcgcgcaaagccccgcaagcctggtattggttgacgccggacagcagttgccgcctagaccgccacagagtagtagcgtctcactcgtcagctccggatcaggccaagcagctgttccttccgaacagccatggccccaaccagtgcccgcactagcccctggaccccctccccaggatttagcagcttattattattacagacccctgtacgacgcataccaaccccagtacagcttgccttacccgccagagccaggggctgcctctctttactaccaagatgtgtactcactatacgaacccagatatcgcccatatgatggcgctgcctctgcttacgctcagaactacagatatcccgaaccagaaaggccctcctcgcgcgcttctcatagttcagagaggccaccgcctagacaaggataccccgagggatactacagttcaaagagcggctggtcttcacagtcggattattatgctagctactattcttcccagtacgactatggcgacccaggccattgggataggtaccattatagtgctcgtgtcagagacccacggacctacgaccgccgatactggtgcgacgccgagtacgatgcatacagacgagagcactcggctttcggagaccgccctgagaaaagggacaataactggcgttatgaccccagattcacaggaagctttgacgatgatcccgatccccaccgcgatccttacggcgaagaggttgaccggcgatctgtgcattcggagcattcggctcgctccctccacagtgcgcacagcctagcttctagacgcagtagtctttcatcacatagtcaccagtctcaaatctaccgcagtcataatgtagctgccggttcatacgaggccccattaccacctggttcatttcacggcgacttcgcctatggaacttatcgatcaaacttctcctctggcccagggttcccggaatatggctaccccgcagacacagtttggcctgccatggagcaagtgtccagtagacccaccagcccagaaaagtttagcgtcccccacgtgtgcgccaggttcggacccggtggtcaattgataaaagtcatccccaacttaccctcggaagggcagcccgctctggtagaagtgcactctatggaggccctcttacagcacacgtccgagcaggaagagatgcgcgctttcccaggtccgcttgctaaagatgacacacataaggtagacgtcattaactttgcgcaaaacaaagccatgaagtgccttcagaacgaaaatttgattgacaaggaatccgcaagtcttttatggaattttatcgttctgctttgtcgccaaaacggaacagtggttgggactgatattgccgagctgctcttaagggaccatagaacagtctggttacctggcaagtctccgaatgaagccaacttgatagattttacaaatgaggccgtggaacaagtcgaagaagaggagtccggtgaggctcagctctcattcctgactggcggtccagccgctgcggcatcatctctggaaagagagaccgagagatttcgagaactgctcctctacggccgaaagaaggatgcattagaatcagccatgaagaatgggttatggggccacgcactgctgctagcatctaaaatggattcccggacccacgccagggtaatgacacgttttgcaaacagccttcctatcaatgaccctctccagacagtgtatcagctaatgagtggtcgtatgccagccgcttccacttgttgtggggatgaaaagtggggtgattggaggcctcatctggccatggtgctatccaacctcaataacaacatggatgtggagtctaggaccatggccactatgggggatactctggcctcgcgcggattattagatgcagcccacttctgttacttaatggcccaagcagggttcggggtgtatacaaagaagaccacgaaactggttctgataggctctaaccattccctgccatttttgaagtttgcgacaaatgaagccattcagagaaccgaggcatatgaatacgcccagtccctcggagctgaaacatgccctctcccttcattccaggtgttcaaattcatttattcttgtaggctggcagagatgggccttgcaacccaggcatttcattattgcgaggccattgcaaaatctattctgacccagccacacttgtatagtcctgtcctgatctctcagctggtccagatggcgtctcagctcagattgttcgacccacagctgaaagagaagcctgaggaagagtcattggctgctcccacatggctggtgcacctccagcaggtagagcgtcagattaaagaaggcgcaggcgtttggcatcaggatggggcactgccacagcaatgtccgggaactcctagtagcgagatggaacagctggacaggcctgggctctcacagcccggagctctgggtatcgccaatcctctgttagccgtccctgcaccatccccggagcactcttccccctccgttaggcttctgccaagcgctcctcagacgctcccggacgggcctttggcgtctcccgctagagtacccatgttcccagtcccactgccaccaggaccactagagccaggtcctggctgcgtcacaccgggaccggctctgggatttctcgaaccatctggcccaggtctcccaccaggcgttcccccacttcaggaacgcaggcatctgctgcaggaagcaagatcccctgaccccggaatcgtcccccaggaagcccctgtggggaattcactttctgagttatccgaggagaacttcgatgggaagtttgccaacctgactccctcaagaactgttcctgactcagaggccccaccgggttgggacagggctgactctggcccaacccagccacccctttccctgtctcccgctcccgagaccaaaaggccaggccaggcagccaaaaaagagactaaagagcctaagaaaggggaatcatggttctttcgctggctcccgggtaagaaaaagactgaagcttatcttcccgacgacaaaaataagagcatcgtgtgggacgagaaaaagaatcagtgggtcaacctcaacgaacctgaagaggaaaagaaggcgcctccaccccctcctacttccatgcctaaaacagtccaggctgccccacccgctctgcccggaccgccaggggctcccgtcaacatgtatagccgcagggctgccggaactagggccagatacgtcgacgtgctgaatccttctgggacacagcgttccgaacccgcactcgctcccgctgactttgtagcccctttagccccacttcctatccctagtaatttattcgtaccgaccccggacgcagaagagccccaacttccagacggcacagggagggagggacccgcagccgctcgcggactggcaaatcctgagccagcccctgagcctaaggcccctggagacctccctgcagcaggcggacccccatccggagcgatgcctttctataacccggcacagctggcccaagcctgcgcaaccagtggctctagtcgactggggagaatagggcaaagaaagcaccttgtacttaacta

SEQ ID NO: 239764 - DNA, 423 bp, synthetic construct
  misc_feature 1..423: note = Description of Artificial Sequence: Synthetic coding sequence
  source 1..423: mol_type = other DNA
atggacctgctgccgaccagcattctgctcgcttctctttggatatgtagtcacttgcacccacctggcgtgtccgtggatttgccgcctacttccatactactggtctctttgtggatctgctcccacctccacccccctggggtgtctgttgaccgaccaccaccaccctctagctggtgcctttgtggctcacctcccacttccatcctgctggtgagcctttggatctgttctccccctccatcttcatggtgtttgtgtggcagtgcgccaacatccattctgctggtatcactctggatttggagactgtgggggctcaccgaggtcggccacgtggaattcgtgttccttccctggctgatctcatggaacatcatgttcagtaagcttttcagctgctttttgtatctcggatag

SEQ ID NO: 239765 - DNA, 2205 bp, synthetic construct
  misc_feature 1..2205: note = Description of Artificial Sequence: Synthetic coding sequence
  source 1..2205: mol_type = other DNA
atgttctcagaactcagtaatcctgaatctctgccagcccagggccaagctcagaacagtgcacagtcacctgcaagcctagtcctcgtagacgctgggcaacagttgcctccaagacctcctcagtcatccagcgtgagtttagtttcctccggaagtggccaggcggctgtgcctagcgagcagccatggccgcagccggttcctgcacttgcaccaggcccaccccctcaggatcttgctgcttactattattaccgcccactctacgacgcttaccagccccaatactcactcccttatcccccagaacccggtgccgcttccctgtactaccaggatgtgtactcactttatgaacccagatatagaccctatgatggagcagccagcgcgtatgcccagaactatcgatacccagaaccagagcgcccttcgtccagggctagccactctagcgagagacccccacccagacagggatacccagagggatattactcaagcaaaagtgggtggtcttctcagtcggattattatgccagttattatagctcccagtatgattacggggaccccggtcactgggatcgctaccactactcggccagagtgagagaccccagaacgtacgatcggcgttattggtgcgacgccgagtacgatgcttaccgtcgggaacactctgcgttcggagacaggccagagaaacgagataacaactggcgatacgatccacgctttacaggcagtttcgatgacgatccggatccccaccgcgatccctacggtgaagaggttgatagacggagcgtacactcagagcacagtgctcgctccctgcattcagctcattccctcgcgagccgccgaagtagcttgtcctcccattcccaccagtcccagatatatcggagccacaatgttgcagccggatcctacgaggccccattgccaccaggatccttccatggagactttgcatacggtacctaccgctccaatttctccagtggcccaggcttcccagagtatggctataggccagctctcggttttcttgaaccttctggccctggcctccccccaggtgtgccaccactccaggaaaggagacacctgttgcaggaggcgagatcgccagatccaggtattgtcccacaggaggcccctgtcggtaacagcctcagcgaattaagcgaagagaactttgacggcaaatttgccaatctgactccttcaagaaccgtacccgattccgaggcacctcctgggtgggatcgggcagatagtggccctacgcagcccccactgagtctgtcccccgcaccagagacaaagcggcctggccaggctgcaaaaaaagaaactaaagagcctaagaagggtgaatcctggttctttagatggctccccggaaaaaagaaaacggaagcttatcttcctgatgacaagaataagagtatagtgtgggacgaaaagaaaaatcagtgggttaacctgaacgagcccgaagaggaaaaaaaagcaccgcctccaccccctacttcgatgccgaagactgtccaggcagcacctcccgctctccccggtccccctggtgcaccagtcaatatgtattcccgcagggccgctggaacacgggcacgttacgtggatgtactgaacccaagcggcactcagagatcagagccagccctcgcaccagcagattttgtggcccctttggcgccactgccaattccctctaatcttttcgttcccacgccagtcaggcctcagggacgttccggtcgtaacgacgggctgttagctttgtcctcaccagatgccgaagagccccagctccccgacggaacaggtcgggaagggcctgctgcagccaggggcctggctaacccagagccggctccagagcccaaagttctgtcctcagctgctagtttgcctggttcagagctgccctctagtcgcccagaggggtcacagggcggtgagttatctaggtgcagcagcatgagcagccttagccgcgaggtgtctcaacacttcaaccaggcgccaggagatctccccgctgccggaggacccccatccggggctatgcctttctataatccggctcagctggcacaagcatgcgccacttctggttccagcaggctggggagaattggtcagcgcaaacacctcgtcctgaactag

SEQ ID NO: 239766 - DNA, 5183 bp, synthetic construct
  misc_feature 1..5183: note = Description of Artificial Sequence: Synthetic coding sequence
  source 1..5183: mol_type = other DNA
atgttctttcaaggaggtgagacagaaaatgaggagaatctgagcagcgagaaggccggactgtcaggacaggctgacttcgatgacttttgtagtagtccagggctgggaaggccaccagccccaacccatgtcggcgctggtagcctctgccaggccttgctgcctggaccaagcaacgaggcagcaggagatgtgtggggagacactgcctcaacgggcgttcctgatgcatctggatcccagtatgaaaatgttgagaatctggagttcgttcaaaatcaggaagtgttgccttccgagcctctcaatctcgatccttcaagcccctcagatcaattcaggtacggccctctgcccggtcccgctgtgccaaggcatggcgctgtgtgtcatactggggcacctgatgcgactttacataccgtgcatccagactcagtgtcctcgagttacagctcacgctctcatggcaggctctccggttctgcccgtccacaggaactggtcggcacctttattcagcaggaggttggcaagccagaagacgaagccagcggttcgtttttcaaacagatcgattctagccccgtggggggagaaacagatgaaacaacagtgtcccaaaattatcggggatcggtctcccagccctcgactccctctccgcctaagcctacgggaatcttccaaacatctgccaattcgtcctttgagcccgtgaagtcacaccttgtgggagtcaagccctttgaggcagatagggccaatgtcgtgggggaggtgcgtgagacttgcgtgcggcagaagcagtgtcgtccagccgcagccctcccggatgcaagccctgggaacctggagcaaccacccgataatatggaaaccctgtgcgcaccgcaggtgtgcccattgccattgaattctactaccgaagccgtgcatatgctgccccatgccggagcaccgcctctggacacagtttatcccgcacctgagaagagaccttcagcccgaacacagggccctgtcaaatgtgagagtccagccacaactctctgggcacagtctgagctccccgatttcgggggaaatgttttgctcgcaccagccgctcccgcactctacgtgtgtgccaaaccccagcctcctgtggttcagcccccagaggaggcaatgagtggacaacagtcaagaaaccctagtagtgctgcacctgtgcagagccgcggtggcatcggtgctagcgagaatctggagaacccccctaagatgggcgaggaagaagcacttcagtctcaggtcacaaaggacgcccagggacagccagggctggagagagcccagcaggagcttgtcccaccacagcaacaggcttcgccccctcaacttcccaaggctatgttttccgagctttcaaacccagagtcattgcctgcacagggtcaggcacagaacagcgcccagagccctgcgagcttggtcttagttgatgctgggcagcagctgcctcccagaccacctcagtccagttcagtgtcacttgttagtagtggctcaggccaggcggcagtgccctctgagcagccttggccacaacctgtccctgcgctggcccctggtcccccacctcaagatcttgctgcatactactattatcgccctctgtatgacgcataccagccacagtactccctgccttatcctcccgaacctggagccgctagcttatattatcaggatgtttactcattgtacgaacccaggtaccgcccatatgacggtgccgcatcagcttacgcacaaaattatagatatccagagcccgagcggccaagctctcgggctagccactcaagcgaacggcctccgccaagacaaggatacccagaaggctactacagttcaaagtccggctggtctagtcaatcagattactacgccagctattattcctcccagtatgactatggtgatccaggacactgggacaggtatcattatagcgccagggtacgagatcctaggacctacgacagacgttactggtgcgacgccgaatacgacgcctatcgaagagagcacagcgcctttggcgaccgacctgagaaacgcgacaataactggagatatgacccgaggttcactgggagttttgatgatgaccccgaccctcacagggacccctacggggaagaagtcgaccggaggagcgtccactccgaacattctgccagatcacttcattccgcacactccctggcctctcgcagatcctctctatcatcccacagtcatcagagtcaaatttatcgttcgcacaatgtcgcagcagggagttacgaagcacccttgcctccaggttcatttcacggggatttcgcttacgggacatatcgctctaatttctcatcagggcctggcttcccagagtacggctatccggctgatactgtgtggccggctatggagcaggtttcctcaaggcctacatctccagagaagttttctgtcccgcatgtctgcgctagattcggtccgggtggacagttgattaaggtgatacccaatctgccaagcgaagggcagccggcattggttgaggtacacagtatggaggctctgctgcagcacaccagtgaacaggaggagatgagagcgttccctggccctctggctaaagatgacacacacaaggtagacgtgataaactttgctcagaataaagctatgaagtgcttgcagaatgaaaatctgatcgataaagaatcagctagtttgctctggaactttattgttctgctgtgcagacagaatggtacagttgtgggaactgacatcgcggagttactgctgagggatcataggactgtgtggttgcccggtaaatcaccaaacgaggccaatcttattgattttacaaatgaagcagtggagcaagtggaggaagaggagagcggcgaggcccagctgagtttcctaacgggcggacccgcagcagcagcttcctcgttggaaagagagaccgagcggttcagagaactcctgttgtacggcaggaaaaaagacgctcttgagtctgccatgaagaatggcctgtggggacatgcccttctgctggccagcaaaatggactcccgcacccacgcacgggtcatgaccaggttcgccaatagcctgcccatcaacgatccactgcagacggtgtaccagctgatgtcgggcaggatgcccgctgcatccacatgctgcggggacgagaagtggggcgattggcgtccgcatctggccatggttttatctaacctgaacaacaatatggacgttgagagtcgaacaatggccactatgggcgacacactggcctctaggggtctgctcgacgccgcacacttctgttacctcatggctcaggctggtttcggcgtttatactaaaaagaccaccaagctggttctcattggaagcaaccactcactgccctttcttaaattcgcgacaaacgaggcaattcagcggacggaggcttatgagtatgcacaaagtctgggagccgagacatgccccctgccatcattccaggtcttcaagttcatatactcctgccgcctggccgagatgggcctggccacccaggcattccactattgcgaggcgatcgctaagtccatcctgacccagccacacctctattcacccgtgctaataagtcagcttgtgcagatggcctcccagttgagactgtttgaccctcagctaaaggagaagcccgaagaggagtcccttgcagcccctacatggctcgtgcacctgcaacaggtggaacggcagattaaggaaggagccggagtgtggcatcaggatggggctttgccccagcagtgtcccggtactccctcctccgaaatggaacagttggatcggcctggtcttagccagcctggcgcactgggcatcgccaacccactgctcgcggttcctgccccaagccctgagcattcctccccctctgtccgcttattgccaagcgcaccccaaacacttcctgacgggccattagcctcaccagcacgggtgcccatgttccctgtgcccctgccccctggcccactcgagcccggtcctgggtgcgtcacccccggaccagctctcggcttcctggagcctagcgggcctggcctccctcccggagtgccacccctccaggagcgaagacacttgttgcaggaagccaggtcgccagatccgggaatcgtgcctcaggaggcccctgtcggaaactctcttagcgaactgtcagaggagaattttgacggcaaatttgccaacctcacaccatctaggaccgtccctgattctgaagcaccacctggatgggatagagccgactctgggccaactcagcccccactatctttgtccccggcacccgaaaccaaaagacccggtcaagcagcgaaaaaagaaacaaaggaacccaagaaaggggagtcatggttcttcagatggctccccggaaaaaaaaagaccgaggcctacctccccgacgacaaaaacaaaagcatcgtatgggatgaaaagaagaatcagtgggtcaatctgaatgaacccgaagaagaaaagaaggccccaccccctcctcctacatcaatgcccaagaccgtgcaggcagcacctcccgcacttccaggcccacctggcgcacccgtgaacatgtactctagaagagctgccggaactcgggcacgctatgtagatgtgttgaatcctagtggaacgcagcgcagtgagcctgcactcgcccctgctgacttcgtggcaccgcttgccccattgcctattccaagtaacctgttcgtgcccaccccagatgcagaagagccccaattgccagacggtactgggagggagggcccagctgccgcaaggggccttgctaaccctgagcccgcaccagaaccaaaagtgctgagctccgctgcgtcactaccagggagtgagctgccctcttcaagacctgagggctctcagggtggcgaggccccaggcgaccttcctgcagccggtggtccgccttcaggagctatgccattttataaccccgctcagcttgcacaggcttgcgccacctctggatcgtccagactcggtcgcattggacagcggaagcatttagtgcttaatta

SEQ ID NO: 239767 - DNA, 6464 bp, synthetic construct
  misc_feature 1..6464: note = Description of Artificial Sequence: Synthetic coding sequence
  source 1..6464: mol_type = other DNA
atgcccggactcgatagaccactgagtcgccaaaatccccacgatggggtggtgactcccgctgccagcccttctctccctcagccagggctgcagatgcctgggcagtggggcccagtccaggggggaccccagcccagtgggcagcacaggtcaccctgcccagaggggccagtaccctcaggggtgccttgcgccaccagcgtgccccacttccccactccttctattcttcaccaaggcccaggacacgaacaacactctcctctggtggccccacctgccgctttgccctccgatggccgtgatgaggtttcacatcttcaatccggcagccacctggctaacaattcagatcctgagtctacctttagacagaacccccgaatcgtgaaccactgggctagtccggagctgcggcagaacccaggtgtgaagaatgaacaccgtcccgcatcagctctcgtcaatccattggccagaggcgattctcccgagaatagaacacaccatcctctgggggctggggctggaagcggctgcgcccctctggaagctgactctggcgcttccggcgcactagctatgttttttcaaggcggtgaaactgaaaacgaggagaacttgtccagtgaaaaggccggactaagcggacaggcagacttcgacgatttttgtagcagccctggtctggggcgacccccagctcccacccatgtcggagccggaagtctgtgccaagctcttctccctggacccagcaacgaagctgccggagacgtgtggggagatacagcgtcaaccggcgtgccagacgccagtggcagccagtacgagaatgttgagaacctggagtttgttcagaatcaagaagtgttaccatccgagcctctgaatttagacccatcaagccccagcgatcaattccgctacggcccactgcccggaccagccgtccccaggcatggagccgtgtgccatacaggcgcaccggatgcgactcttcacacggttcatcctgactccgtgtcctccagttacagttcacgtagccatgggcgtctgtctggctccgctagaccccaagagctggtgggcacctttattcagcaagaggttggtaaacccgaggacgaggctagcggctccttctttaaacagattgactctagtccagtgggcggagagaccgacgaaaccactgtctcccaaaattaccggggaagtgtgagccaaccttctactccctccccccctaagcccaccgggatcttccaaacaagcgcgaactccagcttcgagccagttaagtcccaccttgtgggagttaagcctttcgaggctgatcgtgctaacgtcgtgggcgaggtccgggaaacatgtgtccgccagaagcaatgccggcctgcggctgctctccccgacgcaagtcccggaaatctggagcagccacctgacaacatggagactctctgtgctccccaggtgtgcccattacccctgaattctacaacagaagctgtgcatatgctgccgcacgcaggggctccaccactcgacaccgtgtatcccgcacccgagaaacggcctagtgccagaactcagggacctgttaagtgcgaaagcccggctactactctgtgggcgcagagtgagctacctgattttggcggaaacgtcttactcgcccctgccgcaccagccttatatgtgtgcgccaaacctcagccacctgtggtgcagccacccgaggaggcgatgagtgggcagcaatccagaaacccatcctctgcagctccagtgcagagtcggggagggataggagccagcgaaaatttagaaaaccccccaaagatgggggaagaggaggccttgcaatcccaggctagctccggctacgccagtctgctgtcatctccacccacagaatcactgcaaaatcctcctgtccttatcgcacagccagaccactcatataatttagcccagcctattaatttttcagtttccctgtccaactctcacgaaaaaaatcagagctggcgggaggccctagtcggagaccgacccgcagtctcatcttgggctctcgggggtgacagcggtgagaacacaagccttagtggaattcccacttcctcagttctgagccttagtctgccttcctccgtggcccagagtaattttccccaaggctctggcgcaagcgaaatggtaagtaatcagccagccaatctgcttgtgcaaccaccctcccagcccgttccagagaatctggtgccagaatctcagaaggatcgcaaagccggaagcgcactaccgggatttgcaaatagccctgccggaagcaccagcgtggtcctcgtgcccccagcacatggcactcttgtgcccgacggaaacaaagccaaccacagcagccaccaggaagatacgtatggagcccttgactttaccctttctcgcactttggagaatccagtcaacgtctacaaccccagccactcagatagtcttgcctctcagcagagcgttgcctctcaccctcgtcagagcggcccaggagcccctaacctggatagattttaccaacaagtgactaaggacgcgcagggacagcccggactggagcgagctcaacaggagctggtaccgcctcaacagcaagctagcccacctcaattaccaaaggccatgtttagtgaactgagtaaccctgaatctctccccgctcagggacaggcacaaaactccgcccagtcccctgcatctttagtcctcgtggacgctgggcagcagctgcccccaaggccccctcagtcttcctcagtctccctggtcagcagcggatctggacaagctgctgtcccaagcgaacagccttggccgcagccagtgcctgccctcgctccgggaccaccgccacaggacctggcagcttattactactatcgccctttgtacgacgcctaccagcctcaatatagcctcccctacccaccagagcccggagcagcctctttgtactaccaggatgtttatagtctgtacgagcccagatatagaccatatgacggagcggcttcagcctacgcccagaattaccgatatccagagccggagagaccgtcgtctcgagcctctcactctagtgagaggccacccccaagacaggggtatcctgaggggtactacagtagcaaatctggctggagtagccagtctgattattatgcctcctactactcgtcgcaatatgattatggtgatccagggcattgggacagatatcactactccgcacgtgttcgggatccacgaacctacgaccggcgttattggtgcgatgccgaatatgacgcctatagacgggagcactctgcattcggcgaccgccctgaaaaacgggataacaattggagatatgaccctagattcactggcagcttcgatgacgatccagatccacacagagatccttacggggaggaagttgatcggcgaagtgtgcactccgagcatagcgctcgttcacttcactcggctcactccctggccagtaggcggtcttctctctcttcacattctcaccaatctcagatctatcgctctcataacgtcgctgctggttcatatgaagcacctctccctcccggtagtttccacggtgacttcgcctatggcacctacaggtctaacttcagctccggaccgggatttcctgagtatggataccctgctgacactgtgtggcctgctatggaacaggtcagtagtagacccacctcaccggagaagttttcagtgcctcacgtatgtgcccgattcggacctggtgggcaacttattaaagttatccccaacctgcctagcgaagggcagccagcgctggtggaagtgcacagtatggaggccctcctccagcatacttcggagcaagaggagatgcgggcatttccgggacccttagctaaagatgatacacacaaggtcgacgtgattaacttcgcacagaataaggccatgaagtgtcttcagaacgagaatcttatcgacaaggaatccgcttccctgctgtggaacttcatcgtactgctgtgccgccaaaatggcaccgttgtggggaccgatattgcagagcttctcctgagagatcatcggaccgtctggttgccagggaagtcccctaatgaagcaaacctaatcgactttacaaacgaagcagtggagcaggttgaggaagaggagtcgggcgaggcacaattgtcatttctgactggtgggccagctgcggctgctagctcccttgagcgagaaaccgagagatttcgagagctcctcctgtacggtcgcaagaaggatgcccttgagagtgctatgaagaacggactgtgggggcacgctctgcttctcgcatctaagatggattccagaactcatgccagagtgatgacaaggttcgctaactctttacccattaatgatcccctgcaaaccgtctaccagctaatgtctggccgtatgcccgcagccagtacatgctgtggtgacgagaaatggggcgactggcgaccccatctggctatggtgctcagtaatctgaacaacaacatggacgtcgaatcacggacaatggctactatgggcgataccctggcgtccagaggcttactcgacgccgcacatttctgctacctgatggcccaggctggctttggcgtttacaccaaaaagactacaaagctcgtcctgattggctctaaccacagcctcccttttctgaaattcgcgaccaatgaggcaatacagaggacagaagcgtatgaatatgcccagagtctcggtgctgaaacctgccccttgccatcattccaggtgttcaagtttatttatagctgtagacttgctgaaatgggcctggcaacacaggcctttcattattgtgaggctatcgctaagtcaattctcacccagccacatctctactcccccgtcttgatatcccagctcgttcagatggcatcccagctgaggctgttcgacccccagctaaaggaaaaaccggaggaggagtctctggccgctccaacctggttggtccacctgcagcaggtcgagcggcagataaaagagggggcaggtgtatggcaccaggacggagctcttccacagcaatgtccaggaacgcccagcagcgagatggaacaattggatcgcccaggcttatcccagcccggtgctctcggaattgcgaatcccctgctggctgttccggcaccaagcccagaacactcttcaccttctgtcaggctgctgccttctgcaccacagactttgcctgacggcccactcgccagtccggcacgggtgccgatgttccctgtgcccctccccccaggccctctggagcctggtcctggctgtgtgacacccggtcccgctcttggatttctagaaccgtccggccctggactaccacccggtgttccacccctgcaggaacgacggcacctgctgcaggaggcacgaagcccagacccaggtatcgtgcctcaagaggcaccagtgggcaacagtctcagcgaactgtctgaggagaattttgatggcaagttcgccaatctcacccccagcagaacggtcccagacagtgaggcacctccaggctgggatcgggcagacagtggcccaactcagccaccgctcagcctgtcaccagcccctgaaaccaagagaccgggacaggctgctaagaaggagaccaaggagcctaagaaaggtgaatcctggttctttcggtggctaccgggtaaaaagaagaccgaagcgtatctgcccgacgacaagaacaagtccatcgtgtgggatgagaaaaagaatcagtgggttaacctcaacgagcccgaggaggagaaaaaggcacctcctccaccccctaccagtatgccgaaaactgttcaagccgctccacctgcgctacccggtccccctggcgctcccgtgaacatgtattctcgccgtgcagccggaaccagagctcgttacgtcgatgtgctaaacccctccggcacccaaaggagcgagccagccctggcacccgcagattttgtagccccacttgctcctcttcctattcctagcaatctatttgtacccacaccagatgccgaagagccgcagttgccggatgggacaggccgagaagggccagccgcagcccgtggcctggctaacccagagcctgctcccgagcctaagttgagtaggtgcagctctatgtcgtctctgtcgcgggaagtaagtcagcacttcaaccaggctcctggcgacctaccggctgcaggcggacccccttctggcgctatgccattttacaaccctgcacagctcgcacaagcctgcgccacttccggctcttcacgactcggacgtatcggacaacgtaagcatctcgtgctaaacta

SEQ ID NO: 239768 - DNA, 1521 bp, synthetic construct
  misc_feature 1..1521: note = Description of Artificial Sequence: Synthetic coding sequence
  source 1..1521: mol_type = other DNA
tgatccgcctttggagacagacccgagaaaagggataacaattggcgctatgatcccaggttcaccggttcgtttgacgacgatcccgatcctcacagagacccctatggagaggaggttgatcgccgttccgtacacagtgagcattctgccagaagtctccactcagctcacagcctggcttccagacgttcttcgctgtcatcccactcccatcaatcccagatatacagaagccacaatgtggctgctgggagttatgaagctccgttaccacccggaagctttcatggcgactttgcctacgggacatacaggtccaattttagctcaggacccggatttccagagtacggttaccccgcactcggcttcttggagccatctgggcctggtttgccacccggtgtacctccacttcaagaaaggaggcatttactgcaggaggcaagatctccagaccccggtatcgttcctcaagaggcccctgtcggcaattccctttcggaattatctgaggagaattttgatgggaaatttgccaacttaacacctagccgcactgtgcccgactcagaggcacccccaggttgggaccgcgctgactcaggacctactcaaccgcctctgtcattatcaccagctccagaaactaaaagacccggacaggccgcaaaaaaggagacaaaggagccaaagaagggcgagtcatggttctttaggtggttaccgggaaagaaaaagacggaagcgtacctcccagacgacaagaacaaaagcatcgtctgggatgaaaagaaaaatcagtgggtgaaccttaatgaacctgaggaggaaaagaaggcccctcccccacccccaacctcaatgcccaagacagttcaggcagcacctccagcattacctgggcctccgggagcccctgtaaacatgtatagtcgccgtgccgctgggactcgggctaggtacgttgacgtactcaacccgagtggtactcaaaggagcgagcccgcattagctcccgctgactttgtggccccactagcccctttgcccatcccatcaaatctatttgtgcctacaccagttaggccccaaggacggtccggaagaaacgatgggctattggctctttctagtccagatgcagaggagcctcagttgcccgatggcaccgggagggaggggccagctgcagctcggggattagcgaaccccgagcccgcaccagaaccaaaggtgctgtctagcgcagccagcttgcctgggagcgaactgccgtcctctcgcccagaaggaagtcagggcggagagttgagccgatgttcatcaatgtcctcattaagtcgggaagtgtcccaacattttaatcaagcgcctggagatctgccagccgctgggggacccccttccggcgctatgcctttttataatcctgcccaactggctcaggcatgcgccactagcgggtcttcccggctcggcagaattggccagagaaagcatctggtgcttaactag

SEQ ID NO: 239769 - DNA, 3180 bp, synthetic construct
  misc_feature 1..3180: note = Description of Artificial Sequence: Synthetic coding sequence
  source 1..3180: mol_type = other DNA
gccagggtcagggaccccaggacgtacgaccgcaggtactggtgcgacgccgagtacgatgcttatcgcagagaacactcagcctttggggatcgaccggaaaagcgggataacaactggagatacgacccgagatttaccggatcgtttgacgacgaccctgacccccacagagatccctatggagaggaagtcgatcggagatcggtgcatagcgagcattcagctcgatccttacacagtgcccacagccttgcgtcaaggaggtcatctctatcctctcacagccaccagagtcagatttataggtcccacaatgtggcagctggcagttacgaggctcccttacctccagggagcttccatggcgattttgcctacggcacatatcgatctaacttttcctccgggccaggcttcccagagtacggataccccgctgacactgtgtggcctgctatggagcaagtctcgtcacgcccaacctctccagagaaattttccgtccctcacgtttgtgcgaggttcggccctggtgggcagctgattaaagtgatccctaacctccctagtgaaggccagcccgctctcgtcgaagttcactccatggaagctttgctccagcacactagtgagcaggaggaaatgagggccttccctggcccattggccaaggacgacactcacaaggtggacgtgatcaacttcgcccagaacaaggcaatgaaatgcttgcaaaacgagaatctgattgacaaagagagtgcgtcactcctgtggaatttcattgtcctgttgtgtcgccagaacggtactgtggtcggtacggacatcgctgaactactgctgcgggatcatcgcaccgtgtggctccctggcaagagcccaaacgaggccaatctgatcgacttcaccaacgaggccgtcgaacaggtcgaggaggaggaaagtggagaagctcaactgtcctttctgaccgggggacctgccgctgccgcttccagtttagaacgagagactgagagatttcgcgagctgttgctgtacggcaggaagaaggacgctttggagagcgctatgaaaaacggcctgtggggtcacgctttgctgttggcttctaaaatggatagccgcacccacgcaagagtaatgacccgatttgctaattcccttcccattaatgatcctctacagactgtgtatcagctgatgtccggccgaatgcccgctgcttctacctgctgcggtgacgagaaatggggcgattggcgaccccacctagccatggtgttgagcaatcttaacaacaacatggatgtagagagcaggactatggctactatgggcgatacactcgcgtcccggggtttgcttgacgcagcacatttttgctacctcatggcacaagcagggtttggtgtctatacaaaaaaaactacaaagcttgtgctcattgggagtaatcactcgcttccgtttctcaagtttgccacgaatgaagcgattcagagaaccgaggcatacgaatatgcacaatcgctgggggctgagacatgtcccttaccctcatttcaggtgttcaaattcatctactcctgccggttagcagagatgggcttagcgacccaggcatttcactattgtgaagctatcgctaagtccatccttactcagccacacctgtatagtcccgtgcttatctcccagctagtgcagatggcctcccagctacgtctgtttgatcctcagctcaaggagaaacccgaggaagaaagtctggctgcgcctacttggttggttcacttacagcaggtcgaacgccagattaaggaaggcgcaggtgtgtggcatcaagacggcgctctgccacagcaatgccctggcacacccagtagtgaaatggagcaacttgaccgccctggcctgtcccagccgggagccttgggcatagctaacccactcttagcagtgcccgcaccctcacctgagcacagttcgccatcagtccgactactgccgtcagcaccccaaaccctacctgatggaccactggcgtctcctgctcgagtgcccatgttcccagtgcccctgccacctggcccactggagcccggacctggctgtgtaacaccagggccagccttaggattcttggaaccttctgggccagggttaccacccggagtcccaccgcttcaggaaagacgacatctgctgcaggaggcccgaagtccagatccaggcattgtaccacaggaggccccagttgggaattcactaagcgagttgagcgaagaaaacttcgacggcaagtttgctaacctcactcctagcagaacagtgcccgatagtgaagcccctcctggatgggatagagctgattccgggcctactcaaccgcctttaagcctgagcccggctccggagacaaaacgcccaggtcaggccgctaagaaggaaacaaaggaacctaaaaagggtgaatcttggtttttccgttggctccccggaaagaaaaagaccgaagcatacctgcctgatgataaaaacaagtcaatcgtgtgggacgagaagaaaaaccagtgggtgaacctgaacgaaccagaagaagaaaagaaagcaccccctcctccaccgacttcaatgccgaaaactgtgcaggctgcccctcctgctttacccggaccacctggagccccagtcaatatgtattccagacgggcagccggaacaagagctcgctatgttgacgtgctcaatcccagcggaactcagagaagcgagccagctctagcccctgctgacttcgtggctccgcttgcccctcttcccattccaagcaatctgttcgtccccacccccgatgccgaggagccacagctgcccgacgggactggacgtgaaggtcccgctgctgctcgtggtctcgcgaacccagagccagcccctgagccgaaggtcttgagctctgccgcttcattgcccggatctgagctcccctcctcaagacccgaggggtcccagggtggtgaggcgccaggagacttacccgctgcagggggtccaccatcaggcgctatgcctttttataacccagcccaactggcacaggcttgcgccacgtcaggatcaagtagattgggacgtataggacagcgaaagcatctagtcttgaattag

SEQ ID NO: 239770 - DNA, 603 bp, synthetic construct
  misc_feature 1..603: note = Description of Artificial Sequence: Synthetic coding sequence
  source 1..603: mol_type = other DNA
atgcccaagacagtgcaggctgcccctccggcactgccaggacccccaggtgccccagttaacatgtactcccggcgagcagctggcacaagggctagatatgtagacgtcctgaacccctctgggactcagcgaagcgaaccagcattggcgccagctgacttcgtggcacccctcgcgccattaccaatcccctccaatctattcgtgcccaccccggtgtctagtgtgcgcccacaaggaagaagtggcaggaacgatggtctcctcgctctgtcttcgcccgacgccgaggagcctcaattgccggacggaacaggtcgcgaggggcctgctgccgcaagggggctggctaaccccgaaccagctccggagccgaaggtgctatcatccgccgcatccctacccggatccgagctgcctagttctagacccgaagggagccagggcggagaagccccaggggacttgcccgctgcaggcggtcctccaagtggcgcaatgccgttctacaaccctgcccagctggcccaggcatgtgcgacctctggatcctctcgcctaggtcgcatcggccagcgaaaacacctcgtgctcaactag

SEQ ID NO: 239771 - DNA, 924 bp, synthetic construct
  misc_feature 1..924: note = Description of Artificial Sequence: Synthetic coding sequence
  source 1..924: mol_type = other DNA
atgtctatgatcttgtccgctagtgtgataagagtcagagatgggctcccactgtcagcctctactgattatgaacaatctacaggcatgcaagaatgcagaaagtactttaagatgttatctcgcaagctagctcagctgccagataggtgtaccctgaagactggacattacaatatcaactttatttcatctctgggggtttcctatatgatgctgtgtaccgaaaactatccaaacgtgctggcctttagcttcctagatgagctgcagaaggagttcatcaccacttacaatatgatgaagacgaacaccgccgtcagaccttattgttttatcgagttcgataattttatacaaaggacgaagcaacgctacaataaccctagatcactgtcgactaagattaatctaagcgacatgcagacagagatcaagctgcgacccccataccagattagcatgtgtgaactaggatcagccaacggagtcacctccgcattcagtgtggactgtaagggggcaggaaagattagctccgcacatcagaggttagagcctgcgacactgtccggcatagtgggttttatactgtccctgttatgtggcgctttgaatctgattagggggttccatgccattgagagcctcctgcagagcgacggggatgattttaattacataattgcattctttctgggcacagccgcatgcctgtaccaatgttaccttctcgtgtactacactggatggaggaatgtgaagtcattccttacgttcggactcatctgcctgtgtaacatgtacctgtacgagctgcggaatctgtggcagctcttctttcatgtgacagtcggggcttttgtgacactccagatttggctccggcaggctcaggggaaggcacccgattatgatgtttag

SEQ ID NO: 239772 - DNA, 330 bp, synthetic construct
  misc_feature 1..330: note = Description of Artificial Sequence: Synthetic coding sequence
  source 1..330: mol_type = other DNA
atgtccatgatcctcagcgcatccgtgattagagtgagggacgggctccctttgtctgcttcgaccgattacgagcagagtactggcatgcaggagtgcaggaagtacttcaagatgttgtcccgcaaattggcacagctgcctgaccgatgtacgttgaagactgggcattacaacataaactttatctcaagtctgggggtgtcttatatgatgctgtgcaccgagaactatccaaatgtattggcctttagctttctggacgagctgcagaaagagttcatcaccacctacaatatgatgaaaacgaacactgctgtaagaccatag

SEQ ID NO: 239773 - DNA, 870 bp, synthetic construct
  misc_feature 1..870: note = Description of Artificial Sequence: Synthetic coding sequence
  source 1..870: mol_type = other DNA
atgtccatgatcctgtctgcgtctgtaatacgagtcagagatgggctgcctttgtctgcctctacggattacgaacagtcgaccggtatgcaagagtgccgcaaatacttcaaaatgctctctagaaaactggctcagctcccagaccgctgtaccctgaagaccggacactacaatatcaacttcatttcttctctgggcgtgtcatacatgatgctctgtaccgaaaactatcccaacgtgctcgctttcagcttcttggacgagttgcagaaggaatttattactacatataatatgatgaaaacgaacactgccgtcagaccatactgcttcattgagtttgataattttatccaaaggactaagcagcgctataataatcccaggagcctgtcgacgaaaattaacttaagcgacatgcagactgaaataaaattgcgccctccataccaaatctctatgtgtgagctgggcagcgccaacggagtgacatccgccttcagtgttgactgcaaaggcgctgggaaaattagctccgcccatcagcgcctggagccagcaactctttcgggtattgtcggattcattctcagcctcctgtgcggggctctcaatctgatcagaggattccacgctatagaatctcttttgcagagcgacggtgatgactttaactacattattgccttcttccttggcaccgccgcatgcctgtaccagtgttatctacttgtatactataccggctggaggaacgtgaagagcttccttacatttggactgatctgcctgtgcaacatgtacctctatgaattaaggaatctctggcagctatttttccacgtgactgtgggagcatttgtttag

SEQ ID NO: 239774 - DNA, 417 bp, synthetic construct
  misc_feature 1..417: note = Description of Artificial Sequence: Synthetic coding sequence
  source 1..417: mol_type = other DNA
atgagcatgattctcagcgccagtgtgattcgtgttcgggatggtctgcctttaagcgcaagcacagactatgaacagtcaactggaatgcaagagtgcagaaaatatttcaaaatgctttcgcgtaagttagctcagctcccagacaggtgtaccctcaagaccggtcactacaacataaactttatctccagtctgggcgtgagttacatgatgctatgcacggaaaattaccccaacgtgttggccttttccttccttgacgagcttcagaaagagttcatcaccacgtataatatgatgaaaactaataccgcggttcgcccttactgttttatcgaatttgataacttcattcaacggactaaacagaggtataataatccccgaagtctgagcaccaagatcaacctgtag

SEQ ID NO: 239775 - DNA, 657 bp, synthetic construct
  misc_feature 1..657: note = Description of Artificial Sequence: Synthetic coding sequence
  source 1..657: mol_type = other DNA
atgtctatgatcctaagcgcctcggtcatccgggtgcgtgacggcctgcccctgtctgccagcaccgactacgaacagagtaccggcatgcaggaatgcaggaagtactttaaaatgctgagccggaaattagcacagctgccagaccggtgcaccctgaagaccggtcattacaacattaactttatctctagtttaggtgtaagctacatgatgctgtgtacagagaactacccgaacgtgctggccttcagcttcctcgacgagctgcagaaggagttcattacaacctataacatgatgaagaccaacacagccgtgcgcccatattgttttatcgagttcgacaattttatccagcgcactaaacaaagatataacaacccacggtccttgagtaccaagatcaacctgtccgacatgcagactgagattaagcttcggccaccctatcaaatttcgatgtgcgaattgggatccgctaacggggtgactagtgcgttctccgtggattgcaaaggcgctggaaagatcagcagcgcccaccagcgcttggagcctgccacgctctctgggatcgtaggtttcattctctcattactgtgcggcgcacttaacctcatcaggggcttccacgccatcgaatccctactatag

SEQ ID NO: 239776 - DNA, 306 bp, synthetic construct
  misc_feature 1..306: note = Description of Artificial Sequence: Synthetic coding sequence
  source 1..306: mol_type = other DNA
atgtccatgattctatccgcatctgtgattcgggttagagatgggctgccgctaagcgcctctactgattacgaacagtccacaggaatgcaagagtgtcgcaagtattttaaaatgctttctaggaaactggcccagctgcctgatcgatgcacactgaaaaccgggcattataacattaactttatcagctctctaggagtgtcatatatgatgctctgcaccgagaactatccgaatgtccttgccttctcctttctggatgaattgcagaaggaattcattactacatacaacatgatgtag

SEQ ID NO: 239777 - DNA, 924 bp, synthetic construct
  misc_feature 1..924: note = Description of Artificial Sequence: Synthetic coding sequence
  source 1..924: mol_type = other DNA
atgtctatgatattgtcggccagcgtaatccgtgtacgcgatggacttcccttgagcgcatccacagactacgaacagagtaccggcatgcaggagtgcagaaagtattttaaaatgttaagtcgcaagctagctcagctacccgatcgttgcacattgaaaacagggcactataacatcaattttattagctccctaggagtctcgtacatgatgctgtgtactgaaaactacccaaatgtgcttgccttctcctttcttgatgagctgcagaaagagtttatcacgacctataatatgatgaagactaataccgccgtccggccttattgctttatcgaattcgataattttatccagcggacaaaacagaggtataataacccccgttcattgtcaaccaaaatcaacctttcagatatgcagaccgagattaagctacgccctccataccagatctccatgtgcgagttgggctccgcgaatggtgtaacatctgcattcagtgtggactgcaagggcgctggaaaaatcagcagcgcccaccagagactagaacctgcaacacttagcgggatagtgggatttatcctgtccctgctatgcggggctcttaacctcattcgcggatttcacgcgattgagagtctcctacaaagcgatggcgacgacttcaactacatcattgctttttttctgggaactgcagcatgcctgtatcaatgttatctgttagtctattacactggttggagaaacgtcaagtcatttctgacctttggactcatatgcctatgtaatatgtacctctatgagctgcggaatctgtggcaacttttctttcatgtcaccgtcggagcctttgtcactctgcagatctggctgcgccaggctcaaggaaaggccccagattatgacgtgtag

SEQ ID NO: 239778 - DNA, 2298 bp, synthetic construct
  misc_feature 1..2298: note = Description of Artificial Sequence: Synthetic coding sequence
  source 1..2298: mol_type = other DNA
atgacgacatacctggaattcattcagcagaatgaagaacgggacggcgtgagattctcttggaatgtttggccgtcctctcggctggaggccacacggatggtggtgccagtcgccgctctcttcacacccctgaaggaaagacccgaccttccccctattcagtacgaaccagttctgtgttctcgcacaacctgtagggcagttttgaaccccttatgtcaagtggattatcgagctaaactatgggcctgtaacttttgttatcagcgcaatcagtttcccccatcctatgccggaatatcagagttgaaccaaccagctgaacttctgccgcagttcagttcaatcgaatatgtggttctaaggggcccacagatgcccttaatctttctttacgtggtagatacctgtatggaagatgaagacctgcaggccctgaaggaatcgatgcagatgtccctgagccttttacctcctacggcccttgtcggcttgatcacatttggacgcatggtgcaggtccatgagctgggttgtgaaggaatatcaaaaagctatgtatttagggggacaaaagatctgagtgccaaacagttacaagagatgttgggactcagcaaagtgcccctcacacaggctactcgaggtcctcaggttcagcagccacctccttcaaatcgatttctgcagcctgtgcaaaagatcgatatgaatctcactgatctcctgggggagttgcagagggatccttggccagtccctcagggtaagcggcctctgaggagctctggcgttgccctgagcatcgctgtgggactactggagtgcactttccccaataccggagccagaattatgatgttcatcgggggaccagctacccagggcccaggcatggtggtgggtgatgaactgaagacccccatcagatcgtggcatgatatagacaaagacaatgctaagtatgtcaaaaaaggtactaaacatttcgaagccctcgcaaatcgagccgcaaccactggacacgtgattgacatttatgcctgcgctcttgaccagacaggactccttgaaatgaagtgctgcccgaatctcacaggaggctatatggtgatgggagactcatttaatacatctttgtttaaacagacatttcagagggtattcaccaaagatatgcatggccagtttaaaatggggtttggaggcactttggaaatcaaaacaagccgggagataaaaattagcggggctattggcccttgtgtgagtctcaactctaaaggcccttgcgtgagtgaaaatgagattgggactggtggtacttgtcagtggaagatatgcggcctatctcccactacaactctggccatttacttcgaggtggtcaaccagcacaacgcgcctattccacagggcggtcgaggcgcaatccagtttgtgacacagtaccagcattcatccggacagcggcgtatccgcgtgacgactatcgccagaaattgggcggacgcacagacgcagatccagaacatcgccgcatcatttgatcaggaagcggctgcaatcctgatggcccgtcttgccatataccgggcagaaacagaagaaggccctgatgtcctccgatggctggatcggcagctcatacggctgtgccagaaatttggggaatatcataaagatgatcctagctcattccggttttccgagacttttagcctgtaccctcagtttatgttccatctcagaagaagtagcttcttgcaggtcttcaataactctcctgatgagagttcttactaccgccatcacttcatgaggcaggacctgacgcagagcttgatcatgatccagccgatcttatatgcctacagctttagtgggccacccgagccggtgcttctagacagttcaagtattttagcggatagaattctgctgatggacacattttttcagatactgatctaccacggcgagacaattgctcagtggaggaagagtgggtaccaggacatgcccgaatatgagaattttaggcaccttctccaggcccctgtggatgacgctcaagaaattctccattcgagattccctatgcctcgatacatagacaccgaacatggagggtcccaagctaggttcctgctgagcaaagtgaacccatcccagacgcataacaatatgtacgcctgggggcaggaatctggagctccaattctgactgacgatgtgagcctccaggtgttcatggaccacctcaaaaagctagcagtgtcctctgcggcttag

SEQ ID NO: 239779 - DNA, 1992 bp, synthetic construct
  misc_feature 1..1992: note = Description of Artificial Sequence: Synthetic coding sequence
  source 1..1992: mol_type = other DNA
atgcctctgattttcctctatgtggtagacacatgtatggaggatgaagatctccaggcactgaaggaatctatgcagatgtccctctcacttttgcctcctacagccctggtcggactgatcacatttggaagaatggtgcaggtgcacgaactgggatgcgaaggaatctccaagagctatgtgttcaggggcacaaaggatctctccgcaaagcagttgcaggaaatgctgggactttctaaagtccctctgacccaggctacgcgcggtcctcaagtgcagcagcctccccctagtaacagatttctgcagcccgtccaaaagatcgatatgaacctgaccgatctgttaggtgaactgcagcgcgatccctggcctgttccgcaaggcaagcggccacttaggagtagtggagtggccctaagtatcgccgtgggcctgcttgaatgtacctttcctaacacaggagcacgcattatgatgttcatcggaggtcccgcaactcagggaccgggaatggtggttggggatgaattaaagaccccaatccgcagttggcacgacatcgacaaggataacgctaaatatgtgaaaaaggggacaaagcatttcgaggcccttgccaatcgggctgcaactacgggtcacgtgatcgacatatatgcctgtgcgctcgatcagactggcttgctggagatgaagtgctgcccaaatctcacaggcggatatatggtgatgggcgactcatttaatacctctctgtttaagcagacctttcagagggtgttcaccaaggatatgcatggccagtttaaaatgggcttcggcggtacgctggagataaagactagccgggagatcaagatatccggcgctattgggccttgtgtgagtctgaatagcaaaggcccatgcgtctctgagaatgaaatcggtacagggggaacatgtcagtggaaaatatgcgggctgtcccctactaccaccctcgccatttatttcgaggtggtgaatcagcataatgcccctattcctcagggcggtcgcggagctattcaattcgtcacccaatatcagcattctagtggacagaggcgtattcgggtcactaccatcgccaggaactgggcagacgctcagactcagatccaaaatatagctgcctcctttgatcaagaggctgccgctattcttatggctcgattagccatatatcgcgctgaaaccgaagagggaccagatgtcctacgatggctcgacagacaactaatcaggctgtgtcagaagtttggcgaatatcacaaggatgacccttcgtcatttcggttttcagagactttttcactctaccctcagcgcagagatttccccaagacctccggggagattctggaaaatcaggaaaaggcgagatccgcatgtctgaaattcatgtttcatctgaggcggtcttccttccttcaggtttttaataattctccagatgaaagcagctattacagacatcattttatgcgccaagatcttacccaaagcttgatcatgatccaaccaatcctttacgcctactccttttcaggaccgccagagccagttctccttgactcgtcttccattttggccgaccgaattctcctaatggatacttttttccaaatactgatctatcatggggaaacgatcgctcaatggcgcaaatctggttatcaggatatgcccgagtatgaaaacttccgtcatctgctgcaggctcctgttgacgatgcacaggaaattctccacagcagatttcctatgcccagatatatcgatactgagcacggagggtcccaggccagatttctgttatctaaagtgaatcccagccaaactcacaacaacatgtacgcatggggccaggaatcaggcgctcctatcctcactgatgatgtatctttgcaggtattcatggaccacttgaagaaactcgctgtttcatccgccgcatag

SEQ ID NO: 239780 - DNA, 1692 bp, synthetic construct
  misc_feature 1..1692: note = Description of Artificial Sequence: Synthetic coding sequence
  source 1..1692: mol_type = other DNA
atgttgggccttagtaaagtgcccctcacccaggccacgagagggccacaggtccagcagcctccccctagcaacagattcttacagccagtccagaagattgacatgaacttgactgacctgttaggggagctgcagagggatccatggccagtgccgcaaggtaagagaccgttgaggtccagcggcgtggcgcttagcatagcagtgggcctgctagagtgcacatttcccaacactggggcacgtatcatgatgtttattgggggacctgctacccaaggacccggaatggtggtcggagatgagttgaagaccccaatccgctcttggcacgatattgataaggacaacgctaaatatgtgaagaaaggcacgaagcactttgaggcccttgccaacagagccgctactacggggcatgtaattgacatctatgcatgtgccctggaccagacagggctgcttgaaatgaagtgctgccccaatctcacgggcggttatatggttatgggggatagttttaacacgtcgctttttaagcagactttccagcgcgtattcacaaaagacatgcatggacagtttaagatgggcttcggcggtacgcttgagatcaagacttccagggaaatcaagatatccggcgcaataggcccatgcgtttccctgaattctaagggcccttgtgtctccgagaacgaaatcggtaccgggggaacctgtcagtggaaaatctgtgggttaagcccgacaaccacactggctatctatttcgaggtggtcaaccagcacaacgctcccattcctcaggggggacgcggtgctattcagtttgtgacccagtaccagcactcaagcggccagcggagaatcagggtcaccacgatcgcccgtaattgggcagacgcccagactcagatccaaaacatcgctgctagttttgaccaggaggcggctgccatcctcatggctcggctcgccatctaccgagccgaaaccgaggagggcccagatgtcctccgctggctggacaggcaactgatacgcctttgtcaaaagttcggtgagtaccacaaggatgatccctcatcctttcgtttttccgaaacattcagcctgtaccctcagttcatgtttcatttgagaaggagtagcttcctgcaagtcttcaataatagcccggacgaaagttcctattaccggcatcattttatgcggcaggatcttactcaatcccttattatgattcagcccattttgtatgcttattccttcagtggtcccccagaacctgtccttctcgattcttctagcatccttgccgaccgcatactgttaatggacaccttttttcagattctaatttatcacggggaaacaatagctcagtggcggaagtcaggataccaggacatgccagagtacgagaatttccggcacctgctgcaggcccctgtggacgacgctcaggagatcttgcatagtagattcccaatgccgagatatattgatacggaacatggaggcagtcaggctcggttcctgctgtccaaagtgaatccctcacaaacccataataatatgtatgcttggggccaggagtccggagcgccaatcttaacagatgacgttagcctgcaagtgttcatggaccacctgaagaagttggccgtgtcctcagccgcatag

SEQ ID NO: 239781 - DNA, 2211 bp, synthetic construct
  misc_feature 1..2211: note = Description of Artificial Sequence: Synthetic coding sequence
  source 1..2211: mol_type = other DNA
atgaccacttatctcgaatttatacagcagaatgaggagcgcgacggagttcgcttcagttggaatgtgtggccatcttctcggttagaggccacacggatggtggtgcccgtcgctgcactctttactcctttaaaagaaagacccgatctcccgccaatacaatacgagcctgtactgtgtagccgcactacctgccgggcagtgttgaaccccctgtgtcaggtcgactatagggctaagctatgggcgtgcaatttttgttaccagcgcaaccagcgtgggccacaaatgcctctgatctttctttacgtggtggacacatgcatggaggatgaggatcttcaggcactgaaagagtctatgcaaatgtccctgtcgttgcttccaccaaccgccttggtgggcctgataaccttcggacgcatggttcaggttcacgagctgggttgcgaaggaattagcaaatcttacgtgttccggggaacaaaggatttgagcgccaagcaattgcaggagatgcttggcctgagcaaagtgccactgacacaggccacccgaggccctcaggtgcagcagccccctccttctaaccgctttctccagccagtgcagaagatagacatgaatctgaccgatctgcttggcgagctccagcgcgacccatggcctgtgccacagggcaaaaggcctctgaggtcctcgggagtggccttgtccatcgccgtgggcttacttgagtgtacattccctaacacaggagctcgaatcatgatgtttatcggtggccctgccactcagggcccaggcatggtcgtgggggacgaacttaagacacctattagatcttggcacgacatagataaggataacgctaaatacgttaagaaggggacgaagcactttgaggccctggcgaatcgagccgctaccactggccatgtgatcgacatctatgcttgcgcgctagaccagactgggctccttgagatgaaatgctgcccgaacctaacaggaggttacatggtcatgggcgatagttttaacacatcattgtttaagcagactttccagagagttttcaccaaagatatgcacggtcaatttaaaatgggtttcgggggtacgttagagattaagacaagtcgggagataaagatttctggagctattgggccatgtgtgtccctgaacagcaaaggaccttgtgtgagtgaaaacgagatcggaaccggaggaacatgtcagtggaagatctgcggtcttagtcctacaactaccttagctatttatttcgaagtggtcaaccagcacaatgcccctattcctcaagggggtcggggagctatccagttcgtgacacagtaccaacactcttcaggacaacgcagaattcgtgtgacaacaatcgccaggaactgggctgatgcccagacgcagatccagaatatagcagcaagtttcgatcaggaggcagctgccattcttatggcacggctggctatctatcgagctgaaacagaggagggaccggacgtgttgaggtggctcgaccgacagctaatccggctctgccagaaattcggtgagtaccataaagacgatccaagttcattccgattcagcgagacgttctccctgtatccccagttcatgtttcatctaagacgcagctcatttcttcaggtttttaacaactcaccagatgagagttcatattaccgacaccacttcatgcgtcaggacctgacccagagtctgattatgattcaaccaatattgtatgcctacagtttttctggacctcccgaacccgtactattggatagtagcagtatactggccgatcgtatcttgctcatggataccttctttcaaattttaatttaccacggggagactatagcccagtggcgaaaatctgggtaccaggacatgcccgagtacgaaaactttcggcatctgcttcaggcacctgttgatgacgctcaagagatcttgcactctaggtttccaatgcctaggtacatcgacactgagcacggaggtagtcaggccagatttctgctcagtaaggtcaacccttcccagacgcacaataatatgtacgcctggggccaagaatctggcgctccaatactgaccgatgatgtgagtcttcaagtcttcatggaccacctcaaaaaactggccgtgagtagcgctgcttag

SEQ ID NO: 239782 - DNA, 510 bp, synthetic construct
  misc_feature 1..510: note = Description of Artificial Sequence: Synthetic coding sequence
  source 1..510: mol_type = other DNA
atgacaacttatctggaattcatccaacagaacgaggagcgcgacggcgtgaggtttagctggaatgtgtggccgtctagcaggctggaggccactcgcatggtagtgcctgtcgccgctctgtttacccctttgaaggaacgcccagacttgccccctattcaatacgagcccgtcctttgttctagaacgacttgtagggccgtgttgaaccccctgtgccaggtggactatagagccaagctgtgggcctgcaacttttgttaccaacggaatcagtttccaccaagctatgcgggaatctctgaactgaatcaacccgctgagctgctccctcagtttagctccatcgaatatgtagtgctccgcggaccgcagatgccgttgatctttctgtatgtggtcgacacctgtatggaggacgaagacctccaagccctgaaggagagcatgcagatgtccctttctctgcttccacctacagctctcgtggggctgatcaccttttag

SEQ ID NO: 239783 - DNA, 285 bp, synthetic construct
  misc_feature 1..285: note = Description of Artificial Sequence: Synthetic coding sequence
  source 1..285: mol_type = other DNA
atgacgacatatctcgagttcattcagcagaacgaagagagagacggagtgagattctcttggaacgtttggccctcatccagactcgaagcaacacgcatggtggtgccagttgcagctctcttcactccgcttaaagagaggccggatttgcccccaatacagtatgagccggtgttgtgtagccgaacaacctgcagagctgtgctgaaccctttgtgccaggtggactatcgggctaagctgtgggcttgtaatttttgctatcaaagaaatcaagtctag

SEQ ID NO: 239784 - DNA, 423 bp, synthetic construct
  misc_feature 1..423: note = Description of Artificial Sequence: Synthetic coding sequence
  source 1..423: mol_type = other DNA
atgacaacatacttggaatttatccagcaaaatgaagaaagggacggggtccggttttcttggaatgtgtggccctcatcacggcttgaagccacccgtatggtggtccctgtcgccgcactctttacacccctcaaggaacgacctgacctgccacctattcagtacgagccagtactatgttccagaacaacttgtagagccgtgctcaacccactttgccaggtggactatcgagcaaagctgtgggcatgcaacttttgctaccaaaggaaccagtttcctccctcctatgcgggaatcagtgagcttaatcagcccgctgagctgctgccacagttcagtagtattgagtacgtcgtgctccgaggacctcagatgcctttgatcttcctatacgtcgtggatacttgtatggaatag

SEQ ID NO: 239785 - DNA, 123 bp, synthetic construct
  misc_feature 1..123: note = Description of Artificial Sequence: Synthetic coding sequence
  source 1..123: mol_type = other DNA
atgacaacttacctggaattcatccaacagaatgaagagagggatggagttcggtttagctggaacgtgtggccctcttctaggctggaagcaacacgaatggtggtgcccgtcgcagcctag

SEQ ID NO: 239786 - DNA, 2304 bp, synthetic construct
  misc_feature 1..2304: note = Description of Artificial Sequence: Synthetic coding sequence
  source 1..2304: mol_type = other DNA
atggcaacctatctggaatttattcagcagaacgaagagcgcgacggtgtgcgattcagctggaatgtctggccctccagcaggcttgaggcaacgcgcatggtagtgccactagcttgcctgcttacgcccctgaaagagcgcccagacctgccccctgtgcaatacgagcccgtgttgtgtagtcgcccaacttgcaaggcagttctgaacccgctgtgtcaagtagattaccgagccaagctgtgggcttgcaacttctgtttccagcgaaatcagtttccacccgcttatgggggaatctctgaagtcaaccaacccgctgagttgatgccccaattctcaaccattgaatatgtgatccagagaggtgctcagagtcccctgatcttcctttacgtggtcgatacctgcctcgaggaggacgatctgcaggcactgaaggaaagtctgcagatgagtctatctctcctgcctcccgatgctctggtgggactgatcacatttggcaggatggtacaggtgcatgagctctcatgtgagggaatcagtaagagctatgtgtttagaggcactaaggatttaaccgccaagcagatacaggacatgcttggcttaaccaaacctgccatgccaatgcagcaggcacgccctgcccaacctcaagaacatccctttgcaagctcacggtttttgcagccggttcacaagattgatatgaatctgaccgacctcctcggagagttgcagcgtgacccttggcctgtaacccagggtaaaagaccgctccgatccactggcgtcgccctctctatcgcagtcgggctccttgaggggactttccctaataccggtgccaggattatgctcttcacaggaggtccccctacccagggaccaggaatggtcgtgggcgatgagctgaagattcccattagatcttggcacgacatcgagaaagataacgctcgctttatgaaaaaagcaaccaaacactatgagatgttggccaatagaaccgccgctaacggccactgcatcgacatttatgcctgtgcgctcgatcagaccggattgcttgagatgaagtgctgcgcgaatctgacaggcggatatatggtaatgggggactcttttaacaccagccttttcaagcagactttccaaagaatattcacaaaagacttcaatggagatttcaggatggcatttggcgctacgctcgatgttaagactagtcgggagttgaagattgccggagccattggaccctgtgtttcactcaatgttaagggcccttgcgtgtctgaaaatgaactgggagtgggcggtacctcgcagtggaaaatctgcgggttggacccaacctctaccctgggtatctatttcgaggtcgtaaatcagcataacacacctattccacaaggaggaaggggggcaatccaattcgtgactcattaccagcacagcagtactcagcgtcggataagggtcacaacaatagctcgcaactgggctgacgtgcagagccagttgcgtcatatagaggccgcattcgatcaggaggcagcagctgtgctaatggcgcgtctaggagtgttccgagcggagtcagaggagggccctgatgtgcttagatggctggataggcagctgatcagactgtgtcagaaatttggccagtataataaggaggatcccacatctttccgactctctgacagcttcagtctttacccgcagtttatgtttcacctgcgcagatccccgtttttgcaggtgttcaacaactcaccagacgagtcttcttattacagacaccacttcgccagacaggaccttacacagagtctcatcatgattcagcccattctgtactcttactcctttcatggccctcccgagcccgtgttactggacagctcttccattctggctgacagaatcctgcttatggatacttttttccagattgtcatttacctaggcgaaaccatcgcccagtggagaaaagccggatatcaggatatgccagagtatgagaattttaagcacctcctgcaggctcccctagacgacgcacaggaaatcctgcaggcgcgttttccaatgcctcggtacatcaatacagaacacggagggagtcaggccagattccttctcagtaaagtgaatcctagccagactcacaacaacttatacgcttggggccaagagaccggcgctcccatcctcactgatgacgtttcattacaggtgtttatggaccacctaaagaaattggcagtctcgagcgcttgttag

SEQ ID NO: 239787 - DNA, 2304 bp, synthetic construct
  misc_feature 1..2304: note = Description of Artificial Sequence: Synthetic coding sequence
  source 1..2304: mol_type = other DNA
atggccacttatcttgagtttatccagcagaacgaggaaagggatggtgtacgattttcgtggaacgtttggcctagtagccggctcgaagcaacaaggatggtagtgccattggcttgcctccttactccacttaaggagcggcctgatctgcctccggtccagtacgagcccgtgttgtgttctaggcccacctgcaaagccgtgctcaatcctctctgtcaggtagattacagggcaaaactctgggcgtgcaacttctgtttccagagaaaccagttccccccagcctacgggggtatttctgaagtgaaccagcccgcagagctcatgccgcagttttctacgattgagtacgtgatccagcgcggtgctcagagcccactgatctttttgtacgtagttgacacctgtttagaagaggacgatctacaagcactcaaggagtccctccagatgtcattatccttgttgccccctgatgcccttgtgggacttattactttcggcagaatggtccaggtgcacgagctttcctgcgagggtatttccaaatcttacgtgttcagaggaaccaaggacctgaccgctaagcagatccaagatatgctggggctcaccaagcctgctatgcctatgcagcaggccaggcctgcacagccacaggagcacccgttcgcctcatctcggtttcttcagcctgtccacaagattgacatgaacctgacagacctcctgggcgaactacagcgtgatccctggccagtcacccagggtaaaagaccactcaggtctactggagtggcactttcaattgctgtgggcctgctcgagggaacttttcccaatacaggtgcgaggataatgctcttcacgggcggtccacctacacagggccctggcatggttgtcggcgacgaactgaaaatcccaattaggtcttggcacgatatcgagaaagataacgcaagatttatgaagaaggccacgaagcattatgagatgctggctaaccggactgcggctaacggacactgtatcgacatctatgcatgcgcactggatcagactgggctgctcgaaatgaaatgttgcgctaacctgactggtggttacatggtgatgggggattcatttaatacctctctgttcaagcagacattccagaggatcttcactaaagacttcaatggcgactttcgcatggcgtttggcgcaactctcgatgtcaagacatctagggagctgaagattgctggtgccattgggccttgtgtctcactgaacgtgaagggtccttgtgtgtccgagaacgaactgggggtaggaggcacctcacagtggaagatttgcggcttggatcccacgagcaccctcggcatttacttcgaggtggtcaatcaacacaacacaccaatcccacagggtggccgtggggcaattcaattcgttacacactatcagcactcaagcacacagaggcggattcgcgtaactaccattgccagaaattgggctgatgttcagtctcagctgagacatattgaggctgcctttgaccaggaggctgccgcagtgctgatggcaaggctgggcgtcttccgtgccgagtccgaagagggccctgatgttctccgctggctggatcggcagttaattcggctttgccagaagttcggccagtacaacaaagaggatccaacctcgttccgcttatctgatagcttctccctgtaccctcagtttatgtttcacctcaggaggagcccattcctacaggtgttcaataactcaccggatgagtcttcctattacagacatcactttgcacgccaagatctcactcaatcgctcattatgattcagcccatactgtacagctactccttccatggacccccagaaccagttctcttggactcttcgtccatcctcgcagaccgcattctcctgatggacactttctttcagatcgtgatctacttaggggagaccattgcccagtggaggaaagctggatatcaagacatgcctgagtacgagaacttcaaacatctgctgcaggctccgctcgacgacgcacaagagatattacaggccaggtttcccatgccaagatacattaatactgaacacggaggttctcaagccaggttcttgctcagcaaggtaaatccaagtcagacccacaacaacctctacgcatggggacaggagacgggggctccaatccttacggacgatgttagcttgcaagtgttcatggaccacctgaagaagctcgccgtgagcagcgcctgttag

SEQ ID NO: 239788 - DNA, 2304 bp, synthetic construct
  misc_feature 1..2304: note = Description of Artificial Sequence: Synthetic coding sequence
  source 1..2304: mol_type = other DNA
atggctacctacttggagtttatccaacaaaatgaggagagggacggagtgcgcttttcttggaacgtgtggccgagcagcaggctggaagccacacggatggtagttccgctcgcctgtctgctcactcctctgaaggaacgcccagatctaccccctgtgcagtatgagcccgtgctttgcagccggcctacgtgcaaggcggtacttaatccgctgtgtcaggtagattaccgggctaaactgtgggcctgcaatttctgtttccagaggaatcagttcccaccagcctatggagggatttcagaggtgaaccagcctgcagagctgatgcctcaattttcaactattgaatatgtgatccagcgcggtgcccagagccctcttatctttctctacgtagtggacacctgtctggaagaggacgatttgcaggccctaaaggagagcctccagatgtcactttcacttttacctcctgacgccctggtgggactgatcacattcggaaggatggtacaggtacatgagctttcgtgcgaggggatttccaagagctacgtttttaggggcacaaaggatctcacggccaagcagatacaggacatgctgggactgaccaagccggctatgcctatgcagcaggccaggccagctcagccacaggagcatccatttgcttcttctcgttttctacagcctgtgcataagattgatatgaaccttactgacttactaggtgagctgcagagggatccttggcccgtgactcaaggaaagagaccgctgaggagcacgggagtcgctctgagtatcgccgttggactcctggaaggcacatttccaaataccggggctcgcattatgctatttaccgggggacctcctacccaggggccaggtatggtagtgggcgatgaattgaagatccctatccgatcttggcatgatatagaaaaagataatgcccgatttatgaaaaaggcgaccaaacattacgaaatgctggctaaccggaccgccgctaacggacactgcattgatatttacgcgtgcgccctggaccaaaccgggcttctggagatgaaatgctgcgccaatctcaccggaggatacatggtcatgggtgacagctttaacacctcactcttcaaacagacctttcagaggatctttacaaaggattttaacggagactttaggatggccttcggcgcaactttggatgtgaagaccagtcgcgagttgaagattgcaggtgctatagggccatgtgtttcgttgaatgttaaaggcccttgcgtgagcgaaaacgagctgggcgttggaggtacatcccaatggaaaatctgcggcctcgaccccacgtctacactggggatatactttgaggtcgtgaaccagcacaatactcccatcccccaagggggacggggagccatccaatttgttactcactaccagcactcctccacacagcgacgaatccgcgtgacaactatagcccgaaattgggctgatgtgcagagtcagctcagacatatagaggctgccttcgatcaggaggcagctgccgtcctgatggcacggctcggtgtgttcagagccgagtctgaagaagggcctgacgtccttagatggctggaccgtcagttaattcgcctgtgtcaaaagttcggccagtacaacaaagaagacccaaccagctttaggctttctgacagtttctctctctatccgcagttcatgttccaccttagacgcagcccgtttctgcaggttttcaataattctcctgacgaaagctcctattaccggcaccattttgcgagacaggacctcactcagtctctgattatgatccagcctatactgtatagttattcctttcacggtccaccagagcctgtgctattggattccagttccatactcgccgataggatattactgatggatacatttttccagattgtgatttacctgggtgaaacgatagctcagtggaggaaggccggttatcaggacatgccagaatacgaaaactttaagcatctgctccaagcccctctggatgacgcccaggaaatactgcaggccaggttcccaatgcctcgatacatcaataccgaacatggtgggtcacaagcgaggttccttctctccaaagttaatcctagtcagacccacaacaacctctacgcttggggccaggaaacgggggcaccgattttaactgacgacgtgagtctccaggtgtttatggaccacttaaaaaaactggctgtatcatctgcttgttag

SEQ ID NO: 239789 - DNA, 2304 bp, synthetic construct
  misc_feature 1..2304: note = Description of Artificial Sequence: Synthetic coding sequence
  source 1..2304: mol_type = other DNA
atggcaacttatctggagtttatccagcagaatgaggagcgcgatggcgtccgattcagttggaacgtgtggcccagttccagactggaagccaccaggatggtggtccccttggcctgccttctgacccccctgaaagagaggccagatctgcctccagtacaatacgaaccagtcctgtgctctcgccctacatgtaaagctgtgctcaaccctctctgtcaggttgattatagggccaagctgtgggcctgtaatttctgtttccaaagaaatcagttccctcctgcttacggagggatttcagaggtgaaccaacccgctgagcttatgccccaatttagtaccattgagtacgtgatacaaagaggcgctcagtcgcctcttatattcctctacgtggtcgacacttgtctcgaagaagatgacctgcaggctttaaaggaatctcttcagatgtctctgagcttgttgccccctgatgctctggtggggctcattacttttgggcgaatggtgcaggtccacgaactgtcctgtgaaggaatatcaaaatcctatgtttttagagggaccaaggacctgacggcaaaacagatccaagatatgcttggcttgaccaagcccgcaatgccaatgcagcaggccaggccggctcagccacaggagcacccttttgcatcctcccgattcttgcaaccagtccataagatcgacatgaacctaactgacctattaggagagctgcaaagggacccatggcctgtcacccaagggaagcgcccactccggtctaccggcgttgcgttatccattgccgtgggtctgttagaaggcactttccctaacacaggagcaaggattatgctcttcaccggtggacccccaacccaggggccaggcatggtcgtgggcgatgagctgaagataccaatccggtcctggcatgacatcgagaaggacaatgcgaggtttatgaagaaagcaacaaaacattatgagatgcttgcgaaccggaccgctgcgaacggccattgcatcgacatttacgcatgcgctcttgaccagactggccttctggagatgaagtgctgtgccaatcttaccggcggttacatggtgatgggggacagctttaatacatccttgtttaaacagaccttccagcgcatctttacgaaggacttcaatggtgattttcggatggcattcggagctactcttgacgtcaagacttcgagggaactgaagattgctggagcaattggaccgtgtgtttccctgaatgtaaagggcccatgcgtgagcgaaaacgagctgggagtggggggaacttcccagtggaagatttgtggccttgacccaacctctaccttgggtatttatttcgaggtcgtcaatcagcataacacaccgatccctcaggggggtaggggagccatccagtttgtcacgcattaccaacactcctcaactcagcggaggatcagagtcactactatcgccagaaattgggcagacgtgcagtctcagctgagacacatcgaggcggcattcgatcaggaggcagctgctgtcctcatggcgcgtctcggggtttttcgcgctgagtcggaggaagggcctgacgtcctacggtggctggacaggcagcttatcagattatgccagaaatttggccagtacaacaaggaggacccgacgtcctttcggctttctgatagctttagtctttatccccagttcatgttccacctgcgccgatctccattcctacaggtcttcaataattctcctgatgagagcagttattaccggcaccactttgccaggcaagatctgacacaaagcctgataatgatccagcctatcctttacagctattcctttcacggtcctcctgagcctgtgctgcttgacagcagcagcatcctggcggacagaatactgctcatggatacattcttccagattgttatctatctcggggaaacaattgctcagtggcgaaaggctggctaccaagatatgccagaatatgagaactttaagcacctgctgcaggcgccactggacgatgcacaggaaatcctgcaggccaggttcccaatgcccaggtacatcaacaccgaacatggtggtagccaggccagattcctgctgtccaaggtcaaccccagccagacgcacaataatttgtatgcttggggacaagagaccggcgctcccatcctcacagatgatgtcagcctgcaggtgttcatggaccacttgaagaagctggccgttagcagtgcctgctag

SEQ ID NO: 239790 - DNA, 741 bp, synthetic construct
  misc_feature 1..741: note = Description of Artificial Sequence: Synthetic coding sequence
  source 1..741: mol_type = other DNA
cagagaaggattcgcgtcaccactatcgcaaggaattgggcagatgtccagagccaattgcgccatattgaggcagccttcgaccaggaggcggctgccgttttgatggccaggctgggtgtcttccgagcggaaagcgaagaaggtccagatgttttacggtggctggacaggcagcttattagactgtgtcagaagttcggccagtataacaaagaagaccccaccagttttcgcctgtcagacagttttagcctgtacccccagttcatgtttcacctgcgcagatccccattccttcaggtgttcaataatagtcccgatgagtctagctactaccgccaccacttcgcccgacaagacctcacccagtccctgataatgattcagcccattttgtatagctacagtttccacggtccgccagagacaattgcccagtggcggaaagcaggttaccaggacatgcccgaatacgaaaactttaagcaccttctgcaggcacctctcgacgacgcacaggagatcttacaggctcgcttccccatgcctaggtatatcaatactgagcatggaggcagccaggctcgctttctcctctctaaggtgaacccatcacagacacacaacaatttgtatgcatggggacaggaaaccggagcccctattctgaccgatgacgttagcctacaggtttttatggaccatctgaagaagttggcagtgtcaagtgcgtgctag

SEQ ID NO: 239791 - DNA, 996 bp, synthetic construct
  misc_feature 1..996: note = Description of Artificial Sequence: Synthetic coding sequence
  source 1..996: mol_type = other DNA
atggcgacctatctggagttcatacaacagaacgaggagagagacggggtgcgtttcagttggaacgtttggccatcaagtaggctggaggccactaggatggttgtgcctcttgcatgtctgctgacacccttgaaagaaagacctgatcttcctcccgtgcagtacgaaccagtgctgtgtagccgccctacatgtaaggctgtgttgaaccccctgtgtcaggtcgattatcgagcgaaactgtgggcctgcaacttttgtttccaaagaaatcaatttccgccagcatacggcggaatcagtgaggtcaatcagccagccgagctaatgccccaattcagcaccattgagtacgtcatccaaaggggggcacagtcaccgctaatatttctatatgtcgtcgacacttgtctggaggaggatgacttgcaggccctgaaagagtcactccagatgtccctctccctgctgccccctgatgctctagtgggtttgatcactttcgggcgaatggtgcaagtgcatgagctgtcgtgtgagggtatttccaagtcatacgtgtttcgcggaactaaggaccttaccgccaagcagatccaggatatgttgggattaacaaaaccagccatgcccatgcagcaggccaggccagcccagcctcaagagcacccctttgcctcctcccgcttcctgcagcctgtacataagattgacatgaacttgacagaccttttaggagagctgcaaagagatccatggcccgtcacccaaggcaaacggcctcttaggtcgaccggagtcgccctctccatcgccgtgggtctgctcgagggtaccttcccaaacactggcgctagaattatgttatttacaggtggcccacctacacagggtcctgggatggtggtgggcgatgaactgaaaattcccatacgaagttggcacgacatcgaaaaggataacgcgcgtttcatgaaaaaagcaaccaagtag

SEQ ID NO: 239792 - DNA, 1200 bp, synthetic construct
  misc_feature 1..1200: note = Description of Artificial Sequence: Synthetic coding sequence
  source 1..1200: mol_type = other DNA
atggctgagcggaggagacataagaagaggatccaagaggtgggcgagccatcaaaagaagaaaaggcagtcgctaaatatctgcggttcaactgccctactaaaagtactaacatgatggggcaccgggtcgattactttattgcttcgaaggcagtcgactgtctcctggactccaaatgggcgaaggcaaagaaaggagaggaggctctgttcaccacacgagagtcagtggtggactactgtaatcgactgctgaagaagcagttctttcacagggcattgaaggtcatgaagatgaagtatgataaggatattaagaaggaaaaggacaagggcaaagcggagagcggtaaggaggaagacaaaaagtccaagaaagagaatattaaggacgagaagaccaaaaaagagaaggagaagaagaaggatggtgagaaagaggagtctaagaaagaggagactcccggaacacctaagaagaaagagaccaagaagaagtttaaactggagccacacgacgaccaggtgttcctggacgggaacgaagtgtacgtctggatctacgacccagtacatttcaagacctttgttatggggctgatcttagtgatcgcagtcatagctgctaccttattccccctgtggccagccgagatgcgagtgggcgtttattacctctctgtgggcgctggttgtttcgttgcctccatactgctactggccgttgctcgctgtatactgttccttatcatctggctgatcaccggcggaaggcatcacttctggttcctgcccaacctgacggctgacgttgggtttatcgatagctttcgaccgttatacactcatgaatacaagggaccaaaagcagacctcaagaaagacgagaagagcgagacaaagaagcagcagaagtccgacagtgaggagaagtccgatagcgaaaagaaggaggacgaggagggaaaggtgggccctggtaatcacggcaccgagggatctggcggagagcgacattctgacacggactctgaccgaagggaggacgatcgctcccagcattctagcggtaatgggaatgacttcgagatgattaccaaagaggagttagaacaacagacagacggagattgtgaagaggacgaggaggaagaaaatgatggcgagaccccgaagagtagccatgagaaaagttag

SEQ ID NO: 239793 - DNA, 1200 bp, synthetic construct
  misc_feature 1..1200: note = Description of Artificial Sequence: Synthetic coding sequence
  source 1..1200: mol_type = other DNA
atggcagagcgccgtaggcacaaaaagaggatacaagaagtcggggaaccgtctaaggaagagaaagctgtggcgaaatatctccgtttcaactgtcccacgaagtcgacgaacatgatgggtcatcgggtggactattttatagccagtaaggctgtcgattgtctcctcgactctaaatgggccaaggccaaaaagggcgaggaagcattattcacaacgagagagagcgttgtggactactgtaacaggctgctgaagaaacagttctttcacagagctttgaaagtgatgaagatgaaatacgacaaggatattaagaaggaaaaggataaaggcaaggcggaatccggtaaagaagaggacaagaaatcaaagaaggaaaacattaaagacgaaaagacgaaaaaagagaaagagaagaaaaaggatggtgagaaagaggagagtaaaaaggaggaaacccctgggacgcccaaaaaaaaggagacaaagaagaaattcaagcttgaaccacatgacgaccaagtctttctggacggtaacgaggtctatgtatggatctacgatccagttcacttcaagacgtttgttatggggctgattctcgtgattgctgtcatagccgcaaccctgttcccgctctggccagctgagatgcgggtgggcgtgtactatctgtcggtaggtgcagggtgtttcgttgcctcgatcctcctgctggcagtcgcgcgatgcatattgtttctcataatctggctcatcaccggaggcagacatcacttttggttcttgccaaaccttactgcagatgtgggattcatcgacagttttcggcctctatacacccacgagtataagggccctaaagctgacctgaagaaagacgagaaaagcgaaacgaaaaagcagcagaaaagcgacagcgaggaaaaaagcgatagtgagaaaaaagaagatgaagaggggaaggtgggacccggaaaccatggaaccgagggcagtggtggagagaggcattccgatactgactccgataggcgcgaggacgatcgctcacagcactcctccgggaacggcaacgattttgaaatgatcacgaaagaagagctggaacaacagaccgatggagattgcgaagaagatgaagaggaagagaatgatggagagacccccaagagcagtcatgagaagagctag

SEQ ID NO: 239794 - DNA, 372 bp, synthetic construct
  misc_feature 1..372: note = Description of Artificial Sequence: Synthetic coding sequence
  source 1..372: mol_type = other DNA
atggctgagaggaggcgacacaaaaagcggattcaggaggtcggagaaccttcgaaagacgagaaatcagagacaaaaaaacaacaaaagtctgattcggaagaaaaatctgacagtgagaagaaagaggacgaggagggcaaggtggggcctgggaatcacgggaccgaggggagcggaggtgagaggcactcagataccgatagtgacaggcgcgaagacgatcggagccaacattcctctgggaatgggaatgactttgagatgatcactaaggaggagctagaacagcagactgacggggactgcgaggaagatgaagaggaggaaaatgatggtgaaacaccgaaatccagtcacgagaagtcctag

SEQ ID NO: 239795 - DNA, 2283 bp, synthetic construct
  misc_feature 1..2283: note = Description of Artificial Sequence: Synthetic coding sequence
  source 1..2283: mol_type = other DNA
atggccggtcaacagttccagtacgatgactccgggaacacctttttctatttcctgacatctttcgtcggcctgatcgtcattccagccacatattatctctggcctcgcgatcagaacgccgagcagatacggctgaagaacattcgcaaggtttatggacgatgcatgtggtatcgcctgcgattgttgaagcctcagcctaacattatccccacagtcaagaagatcgttctccttgctgggtgggcccttttcctttttctcgcatataaagtgagcaagaccgacagagagtaccaggagtataacccttacgaagtgctcaacttagatccgggtgccaccgtggctgaaatcaaaaaacagtatcgcttgcttagtctgaagtatcacccagataagggcggagacgaggtaatgtttatgcgaattgcaaaggcctacgccgcactcaccgacgaggaatctcgtaagaattgggaagagttcggcaatcctgatggtccccaggcaactagtttcgggattgctcttccggcttggatcgtggaccagaagaactctattttagtcctcctagtgtacgggctagctttcatggtgattcttccggtagtagtgggcagttggtggtatagatctatccggtactccggtgatcagatccttatcagaacgacccagatttacacctatttcgtttacaaaacccgcaacatggatatgaagcgcttaattatggtgctggccggagccagtgaatttgacccgcagtacaacaaggacgccacttcccgcccaacagacaatatcttgatccctcagctcattcgcgaaattggatcgattaacctgaagaagaatgagccccctctcacctgtccttattcattaaaagccagagttctgcttttgtctcacctggccaggatgaaaattcctgaaaccttagaggaagatcagcagttcatgcttaaaaaatgtcccgctctgctccaggaaatggtcaacgtgatctgccaactgattgtaatggccagaaatagggaggaacgggaattccgggcacctaccctagcctcattagaaaactgcatgaaactgtcccagatggctgtacagggccttcaacagttcaagtctcctttgctacagctgcctcatatcgaagaagataaccttaggagggtctccaatcataagaagtacaagataaaaaccattcaggatctcgtcagcttaaaggaaagtgaccggcacacccttctccactttctggaggacgagaagtatgaggaggtcatggctgttttaggatccttcccctatgttaccatggacatcaaatctcaggtcctggatgacgaagacagtaataacatcacggtgggcagtctggttacagtactcgtgaaactcacccggcagaccatggctgaggttttcgaaaaagagcagagtatttgcgcagctgaggagcagccagccgaagacgggcaaggagagactaataaaaatcgcaccaaagggggttggcaacagaagagcaagggtcctaagaaaactgctaaatcaaaaaaaaaaaaaccacttaagaagaagcctacccctgttctgctgccgcagagcaaacagcagaagcagaagcaagccaacggtgtagtggggaatgaagccgctgtcaaagaagacgaggaagaggtaagcgacaaaggttctgatagtgaggaggaagagacaaatcgcgactctcaatctgaaaaggatgacggttcggatagagattctgatcgggagcaggatgaaaaacagaacaaggatgacgaggccgagtggcaggagcttcagcagagcatccagcgtaaggaaagggcgcttttggaaaccaagtcaaaaatcacacacccagtatattctctgtatttccccgaagagaaacaggaatggtggtggctgtacatcgccgaccgaaaagagcaaactctgatctcaatgccctaccacgtatgtacactcaaggacacggaggaagtcgaactgaagtttccggcacccggaaagcctgggaattaccagtatacagtcttcctgcgctctgattcttatatgggactggatcaaatcaaaccattgaaactcgaagtgcatgaggccaagcccgttccggaaaaccacccccaatgggacactgccattgagggggacgaagaccaagaggattccgagggcttcgaagattccttcgaagaggaggaggaagaggaagaggatgatgattag

SEQ ID NO: 239796 - DNA, 1254 bp, synthetic construct
  misc_feature 1..1254: note = Description of Artificial Sequence: Synthetic coding sequence
  source 1..1254: mol_type = other DNA
atgttcatgaggatcgcgaaggcatacgcagccctcactgatgaagagtcccgtaagaactgggaggagttcggcaacccagacggcccacaggcgacaagttttggcattgccctcccggcatggatcgtggaccagaaaaacagtatcctcgtgcttctggtgtatgggcttgctttcatggtaatattgcctgtggtcgtggggagctggtggtaccggtccattcggtattcaggggatcagatactcatcagaaccacgcagatctatacatacttcgtgtacaaaacacgcaatatggacatgaagcgccttatcatggtactcgcaggggcttccgagtttgatccccagtacaataaggacgccacatctcgacccacagacaacattctcattccccagctcatcagggagattggttctatcaacttaaagaaaaacgagccgccattgacatgtccatacagcctcaaggccagggtgctcctactgtctcacctggcacgaatgaagatcccagagaccttggaggaggatcagcagtttatgttaaagaaatgcccagcgttgctgcaggagatggtcaacgtgatctgccagttgatagtaatggcacggaaccgcgaggaaagggagttcagggctcctaccctcgctagcctggaaaactgtatgaagctgtcccagatggccgttcagggcctgcagcagttcaagtctccccttctccagcttcctcatattgaggaggacaatctgcgacgcgtgtccaaccataagaagtataagataaagaccatacaggacctcgtgtctttgaaggagtccgacaggcacacactcttgcacttcctcgaggacgagaaatatgaagaagtgatggccgtattggggtccttcccgtacgtgactatggacattaagagccaggtccttgatgatgaagattctaacaacattaccgtgggcagcctggttactgtgctggtgaagctcacccggcagaccatggcagaagtttttgaaaaggaacaaagcatttgcgctgctgaggaacagccggctgaagacggacagggcgagacaaataagaacagaacaaagggcggatggcagcagaagagcaaaggacctaagaagactgccaaaaagaaaaaggagacattcaagaagaagacctacacctgcgccattactactgttaaagcaacagaaaccaaggcaggaaaatggagccggtgggagtag

SEQ ID NO: 239797 - DNA, 1137 bp, synthetic construct
  misc_feature 1..1137: note = Description of Artificial Sequence: Synthetic coding sequence
  source 1..1137: mol_type = other DNA
gaacatgagagagaatttcgtgcacctactctggcttccctggagaactgtatgaaactgtcacaaatggccgtacagggacttcaacagttcaagtcgcccctgcttcaattaccccatatcgaagaggataacctgcgccgtgtgagtaaccacaagaaatataaaatcaaaactattcaggatctcgttagcttgaaggagagcgaccgccacaccctcctgcactttctggaagacgagaagtacgaggaggtgatggccgtgctcggcagctttccttatgtcaccatggatatcaaaagccaggtcctggatgatgaggacagcaataacattaccgtgggttctctagtgacggtgttagtgaagttaacgcgccagaccatggcagaagtgtttgagaaggagcagtccatctgtgctgctgaagagcagcccgcagaggacggtcagggggaaactaataagaacaggaccaagggaggctggcagcaaaaatccaaaggacccaagaagactgcaaagtccaagaagaagaaaccacttaaaaagaaacccacacctgttctgcttccccagagcaaacagcagaagcagaaacaggcaaacggggttgtcggaaacgaggctgctgtcaaagaggacgaggaggaggtctcagacaaaggctcagattccgaggaggagtggcaggagctgcaacagagcatccaaagaaaggagcgcgctctgctggaaaccaagtctaagattactcatccagtgtactctctgtattttcctgaggaaaagcaggagtggtggtggctctacatcgccgaccgcaaagaacagactctcatttccatgccatatcacgtatgtactcttaaagacacagaagaggtggaactgaagtttcctgcgccaggcaaacctggaaattaccaatacaccgtattcctgcggtctgattcttatatgggactggaccaaataaaacccctgaagttggaggtgcacgaggccaagccagtgcctgagaatcatccacaatgggacacggccatcgagggcgatgaagaccaagaggatagcgagggcttcgaggactcctttgaggaagaggaagaggaagaggaggacgacgattag

SEQ ID NO: 239798 - DNA, 2346 bp, synthetic construct
  misc_feature 1..2346: note = Description of Artificial Sequence: Synthetic coding sequence
  source 1..2346: mol_type = other DNA
atggtccgcgtgcttcgtagcatgtgtctcccacagctctgctctcacattctctccgtgtgctcagggaccaccagcgaccggaatgtctactctgtcccagggagccagtatctctacaatcagccttcctgttacagggggttccagaccgtcaagcatagaaatgagaatacatgtcctctgcctcaggagatgaaggccctattcaaaaaaaagacctacgatgaaaagaaaacgtacgaccagcagaagttcgacagcgagagagctgatgggaccatcagctccgagatcaagtccgcgcgtggatcccaccatctgagcatatacgccgagaactctctcaaaagcgatgggtaccacaaaagaactgatagaaaatcaaggatcattgccaaaaacgttagcacctcaaaaccagagtttgagtttaccacattagacttccccgagctacagggagctgaaaacaatatgtctgaaatacaaaagcaacctaagtggggacctgtacacagcgtgtcaacagacatctcgctcctccgggaggtggtgaagcctgctgccgttctcagcaaaggggagatcgtggttaagaacaacccaaacgagtccgtgacagccaatgcagccacaaacagtccctcctgcaccagggagctgtcatggacccccatgggctatgtggtacgccaaactctctccacagaactgtcagctgccccaaagaatgttacaagtatgattaatttgaaaacaattgctagctccgccgatccaaagaacgtgtccataccttcctcagaagccctctcctctgacccttcctacaataaagagaaacacataatccatccaactcaaaaatcaaaggcctcccagggatccgacctggagcagaacgaggcctcacggaagaacaagaagaaaaaagagaagagcacaagcaaatacgaggtgctaaccgtccaggagcctccaagaattgaagatgccgaggagttcccaaatctggcagttgcctccgagcgtcgcgatcgcattgagacacctaagtttcaatcaaaacagcagccgcaggacaatttcaaaaataacgtcaagaagtcgcagctgccggttcagctggacttgggcggaatgctcaccgccctggagaagaaacagcatagccagcatgccaagcaatcctctaaacccgtcgtggtctccgttggagcggtgcccgtgctgagcaaagagtgtgcctcaggtgagagaggtcggcgtatgtcgcagatgaaaacaccccacaacccgcttgatagctccgcccctctgatgaaaaaaggcaagcagcgagaaatccctaaggcaaaaaagcccacaagccttaaaaaaatcattttaaaagagaggcaggagcgaaagcagcggctccaggagaatgcagtaagtcctgcatttacctcagacgacacacaggatggggagtcaggcggagacgaccaattccctgaacaggcagagctgagtggaccggaaggcatggatgaactgatcagcactcccagcgtcgaggacaagtccgaagagccccctggaacggaacttcagcgcgacaccgaggcctctcacctggccccaaaccatacaacattccccaaaattcatagccgacgatttcgggactactgtagccagatgttgagcaaggaagtcgacgcttgtgtgactgatctgctaaaggagctcgtccggtttcaggatcggatgtaccagaaggatcctgtgaaggccaagaccaagcggcgactggtgctcggactgagagaagttttaaagcatctgaaactgaaaaagctcaagtgcgtgatcattagcccgaactgtgagaagatccagtcaaaagggggtttagacgacacactccatacaattattgactacgcctgcgagcagaacatcccctttgtgttcgccttgaaccgaaaagccctgggacgcagcctgaacaaagctgttccagtatctgtcgtagggattttctcttacgatggggctcaggaccagttccataagatggtggagctgaccgtggccgcacgccaggcctacaagacgatgcttgagaatgtgcaacaggagctggtgggcgagccccgaccccaagcccctccgagcctgccgactcaaggcccatcctgcccggctgaagatggaccacccgcactcaaagaaaaggaagagcctcactatattgagatctggaaaaaacatcttgaagcctactcaggatgcacattggagcttgaagaatcactggaagcgagcactagtcagatgatgaacttgaatctctag

SEQ ID NO: 239799 - DNA, 2565 bp, synthetic construct
  misc_feature 1..2565: note = Description of Artificial Sequence: Synthetic coding sequence
  source 1..2565: mol_type = other DNA
atggcttctgaggggccacgggaacctgaatccgagggcatcaagttgagtgctgacgttaaaccgttcgttccgagatttgcagggctcaatgtcgcttggttggagagcagcgaggcgtgcgtgttcccctcatctgccgctacgtactacccttttgtgcaggaaccaccagtaacggagcaaaaaatctacactgaagatatggcgtttggggcatcaacatttcctccccagtacctgtctagcgagatcacattacacccgtatgcgtactctccttatacacttgattctacacagaatgtgtattcggtccccggttcacagtacctgtacaaccagccttcctgctaccggggatttcaaactgtgaagcaccggaacgaaaacacatgccctttgccccaggaaatgaaagcacttttcaagaagaagacctatgatgagaagaagacctacgatcagcagaagtttgattctgagagagctgacggcactatctcttctgagatcaaatccgcgagagggtctcaccatctctccatttatgcagagaactctctcaagtctgatggataccataagagaaccgacagaaagagccgaattatcgccaagaacgtttctacttctaagcctgagttcgaattcaccaccctcgacttccccgagctgcagggggctgaaaataacatgtccgagattcagaagcagcctaagtgggggcctgtgcacagcgtgagtacggacatcagcctgcttcgagaggtagtcaagcccgcagccgtcctttcgaagggcgaaatcgtggtgaaaaataaccccaacgaaagtgtgaccgcgaacgccgctactaacagcccctcctgtacacgagagttatcctggacacccatgggctacgtagttcgtcagacgctgtccactgagctttcagctgcccctaagaatgttacatccatgattaacttgaaaacaatcgcttcttctgcagatcccaagaatgttagtattcccagctccgaagccctgtcttctgatccaagttataacaaggaaaagcatataattcatcccactcagaagagcaaagcatcccagggcagtgacctggagcagaacgaagccagccggaaaaacaagaaaaaaaaagaaaaaagcacaagcaaatatgaagtgctgaccgtacaggagcctccaagaattgaggatgccgaagaatttcccaatctcgcagtggcttctgagagacgggaccggatcgaaaccccgaaattccaaagtaagcagcagccgcaggataactttaagaacaacgtgaaaaagtctcagttgcctgtccagcttgatttgggtggcatgttgacggcccttgaaaaaaagcagcactcccagcatgccaaacagtccagcaagcctgtcgtcgtgtcagtcggtgcagtcccggtgttgagcaaagagtgcgcctccggggagagagggagacgcatgtctcagatgaaaacaccgcacaatccactcgatagttccgcacccctcatgaagaagggcaaacagagagagatcccaaaagccaagaaaccaaccagtctgaagaagatcatcctaaaggaacgtcaggaaaggaagcagagactccaggaaaacgctgtctctcccgcatttacatcagacgatacccaagacggcgagagcggaggcgacgatcagttccccgaacaagccgagctgagcggccctgaagggatggacgagctaatttcgacccccagcgtagaggacaagtctgaggagccccctgggaccgaactacaacgggatactgaagcttcccatttagcacccaatcacaccacctttccaaaaattcattccagaagatttcgggattattgctcccagatgttatcaaaagaggtcgacgcctgtgtgaccgatttgctgaaggaactggtgcggttccaggatagaatgtaccaaaaagatcccgttaaggctaagacaaaaagacggctggtcctgggactgcgggaggtgcttaagcaccttaaacttaagaaactaaagtgtgtgattatttcccccaactgtgagaaaattcagagcaaaggtggtttggacgataccctgcatacaattattgattatgcctgcgagcagaatatcccttttgtgttcgcactcaatcgtaaagcactggggagatcgttaaacaaagccgttcctgtgtcggtagtggggatcttcagctacgatggagcacaggaccaattccacaagatggttgagcttaccgttgctgcgagacaggcctataagacaatgttggagaatgtgcaacaggaacttgtgggagagcctagacctcaggcccctcccagcttgcccacgcaggggcctagctgccctgctgaggacggccctcccgctttgaaagagaaggaggagccccactacatagagatatggaaaaagcacctggaggcttactccggatgtactctggaattggaggaatctttggaagccagcacatctcagatgatgaatcttaacctctag

SEQ ID NO: 239800 - DNA, 2583 bp, synthetic construct
  misc_feature 1..2583: note = Description of Artificial Sequence: Synthetic coding sequence
  source 1..2583: mol_type = other DNA
cccgcttcaagacggcctgcggctgggttaagggatgctgccagttctgccccaagaggaatggcatccgagggacctagagagcccgagtccgagggcattaaactgtccgccgacgttaagcctttcgtgccacgctttgcaggtctgaatgtcgcgtggctcgagtcatctgaggcttgtgtcttcccttctagcgccgcaacctattaccctttcgtgcaggaacccccagtcactgagcagaagatctacacagaagacatggcatttggcgcttcaacattccccccacagtatctgtcatccgagatcaccctgcacccatatgcatactctccgtataccctagatagcacacagaacgtgtatagtgtgcccggaagtcagtacttgtacaatcaaccatcttgttataggggtttccagactgtcaaacaccgaaacgaaaacacgtgtcccttgccccaggagatgaaggccctgttcaaaaagaagacttacgacgaaaaaaagacttacgaccagcagaagttcgacagtgaaagggcggacgggaccatctcctcagagatcaaaagcgctagaggaagccatcacttgtccatttacgctgagaattctctaaagtctgatggctatcacaagcgaaccgaccggaaatctcgaatcatcgcaaagaatgtgtcaacaagtaaacctgaatttgaatttacaacacttgactttcctgaacttcagggagctgaaaataatatgtccgagattcagaaacagcctaagtggggacctgtgcactccgtttcaacagatatcagtctgctccgcgaggtggtcaaacccgctgctgttttgtccaagggtgaaatcgtagttaaaaacaatccaaatgagtcggtgttgatgcctctcccaatcctgctgcatgttcaggagacgcttagcaccgaactgtccgccgcacccaaaaatgtgactagtatgataaaccttaaaaccatcgccagctcagctgatccaaaaaatgtgagtattccctcctccgaagcattatcctccgatccaagctacaacaaggagaagcacataattcatcccacccagaagtcaaaagcatctcagggctctgatctcgaacagaacgaagccagcaggaaaaataagaaaaaaaaagagaaatccaccagcaaatatgaagtactgaccgtccaagaaccccctaggattgaggatgctgaggagtttcccaacctcgcagtggccagcgagcggagagatcgtattgagactccaaaatttcaatctaaacaacaaccccaggacaattttaagaataatgtgaaaaagagccagctgccagtgcagctggacttagggggtatgctcacggcactcgagaaaaagcagcactcccagcacgcgaagcagtcatccaaaccggtggtggtatcggtgggagctgtgcctgtcctgagcaaggagtgcgccagcggagagcgcggacgcagaatgtcacagatgaagactcctcacaatcccctggatagctctgcacctctcatgaagaaggggaaacagagagagatccctaaagctaaaaaacctaccagtctgaagaagatcatcctgaaggagaggcaagaacggaaacaaagactgcaggagaatgctgtgtctcctgcctttacatccgatgacacacaggatggagagagcggtggggacgatcagtttccagagcaggccgagctgtccggacccgaagggatggatgagctcatctcaaccccctccgtcgaggacaaatcagaggagcctcctgggacagaactccaacgggatacagaggccagtcacttggctccaaaccacaccacattccccaaaatacatagccggaggttcagggactactgctctcagatgctgagcaaagaggtggatgcttgcgtgaccgacctcttaaaagaattagtgcggttccaggaccgtatgtatcagaaggatccggtgaaggctaagaccaagaggcggcttgtcctgggtctgcgagaggttctgaaacatctgaaattgaagaagctgaagtgcgtaattatcagccccaactgcgaaaagatccagtccaaaggcggactcgatgatactctgcacactatcattgactacgcctgtgaacagaatattccctttgtctttgctctgaatcgaaaggctctcggaagatcactcaataaggcagtgccggtctctgttgttggaatattcagttacgatggggctcaggatcagttccacaaaatggtcgagcttacagttgctgcccgacaggcctacaaaaccatgcttgagaatgtgcagcaggagctagttggtgaacctcgcccacaggccccaccctcgctcccaacacaggggccatcctgtccagccgaagacggtccacctgccctcaaggagaaggaggaaccccactatattgagatatggaagaaacacctggaggcctatagtgggtgcactttggaacttgaagagagcctcgaagcatccacgtcccagatgatgaaccttaatctgtag

SEQ ID NO: 239801 - DNA, 828 bp, synthetic construct
  misc_feature 1..828: note = Description of Artificial Sequence: Synthetic coding sequence
  source 1..828: mol_type = other DNA
gggaccatatcatcagagattaagagtgctcgtgggagtcatcacctatccatctacgccgagaatagtctcaagtcagacggttaccacaaacgcactgatcgaaagagccgaatcatcgcaaagaacgtctcgacatcaaagcccgagttcgaattcacaacacttgatttccccgaactccagggagctgaaaacaatatgagcgaaattcagaagcagcctaaatggggccctgtccatagcgtttcaactgatatttccctcctccgcgaggtggttaaacctgctgcagtcctttctaagggagaaatcgtggtcaagaacaaccctaacgaaagcgttacagccaatgctgccacaaactctccctcatgtaccagagcggaccctaaaaatgtgagcattccctcaagtgaagcacttagttccgacccatcatacaacaaggagaaacatattatccacccaacacagaagagcaaggcatctcagggctccgatctggaacagaacgaggcctctcgcaagaataaaaagaaaaaagaaaagagtacgagtaaatacgaggtcctgacagtgcaagaacctccaaggattgaggatgccgaggagtttccaaatctggctgtcgcctccgagagacgtgaccgaatcgagaccccaaagtttcagtcaaagcaacagccccaagacaactttaaaaacaatgtgaagaaaagccagctacccgtgcagcttgatttaggaggcatgctaacagcccttgaaaagaagcagcacagtcagcatgcgaagcaatcatctaagcctgtcgtggtttcgtag

SEQ ID NO: 239802 - DNA, 183 bp, synthetic construct
  misc_feature 1..183: note = Description of Artificial Sequence: Synthetic coding sequence
  source 1..183: mol_type = other DNA
atgcccctgcccatcctgctccacgtgcaggaacagatactcaagatgttagtctatcacctcctgaagttgtatctgcgcattctgcccacgactaagaaaaatacgctgtttattttgcctaagtctcttaaacatcataaggtggtgactctaaataagatgaaacctcaggagcggtag

SEQ ID NO: 239803 - DNA, 2361 bp, synthetic construct
  misc_feature 1..2361: note = Description of Artificial Sequence: Synthetic coding sequence
  source 1..2361: mol_type = other DNA
atggcgttcggcgcttctacatttcccccacagtacttaagctccgagataaccctgcatccctatgcttacagcccatatacacttgactctacccaaaacgtatactccgtgccaggctcccaatacctttataatcagcctagctgctatagaggcttccaaaccgtgaaacatcgcaatgagaacacttgcccgctgccccaggaaatgaaggcgctgtttaaaaagaagacctacgatgaaaagaagacatacgaccaacagaagtttgatagcgaacgcgctgacggcaccatcagctccgagatcaagagcgctcggggttctcaccacctaagcatatatgcggagaattcattaaagagcgacggataccacaaaagaaccgaccgtaagagcaggataattgccaagaacgtgtccaccagtaaaccagagttcgaattcaccaccttagatttcccggagcttcaaggggctgagaacaacatgtcggagattcagaagcagcctaaatggggtccagtacattcggtgtcaactgatattagtttgctccgagaggtagttaagccggctgccgtgctgagcaaaggcgaaatagttgtgaagaataacccgaatgagtccgtgactgccaacgcggctactaattcacccagttgcacgcgggagctctcctggacccccatgggatacgttgtccggcagactctgagcacagagctgtcagccgctcctaagaatgtgacatctatgatcaatctgaaaactatcgcttccagcgcggacccaaagaacgtgtctatccccagctccgaggccctcagcagtgacccaagctacaacaaagagaagcacatcatccatcccacccagaagagcaaggcatctcaagggtctgaccttgaacaaaacgaagctagccggaaaaataaaaaaaaaaaggagaaatctacttcaaagtatgaggttctcaccgtgcaggagcctccacgcatcgaggatgccgaggaattcccaaacctggctgtggctagtgagaggagggaccgtatagaaacacccaaattccaatctaaacagcaaccccaagacaacttcaaaaataatgtgaaaaagagccaactacctgtccagctggacctgggtggaatgctgacagccctggagaaaaagcaacactcacagcacgcaaagcagtccagcaaaccagtcgttgtttccgtcggagcagtgcccgtgcttagcaaggagtgtgcaagtggagaacgcggtcgtcggatgtctcagatgaagacaccccacaaccccctcgacagctctgcacctctgatgaaaaaaggaaagcaaagggagatccccaaagctaaaaaaccaacaagtctgaagaagatcatcttgaaggagcgccaagagagaaaacaaaggctccaagaaaacgctgtgagccctgccttcacctccgatgatacccaggatggggagagtggtggggacgatcagttccccgagcaagccgagctttctggtccagaaggtatggatgaattaattagtactccatccgtagaagataagtcagaggagccacctgggacagaacttcaacgagatacagaagcaagtcatctcgcacccaaccacaccacctttccgaaaattcactcaaggcgctttagggactactgctcgcagatgctttcgaaggaggtggacgcctgtgttactgatctcctgaaagagctcgttcgcttccaggacaggatgtaccaaaaggatccagtgaaagccaaaacaaaaaggcggctggtgctaggactgagggaagtcctaaagcacctgaagttaaagaaattgaaatgcgtgattatttctcccaattgcgaaaagatccagagcaaaggtggtctggacgacaccctccacacaattatcgactacgcctgtgagcagaatatcccttttgtgttcgccctgaacaggaaggccctgggtaggtcgcttaataaggcagtacccgttagtgtggtggggatcttttcatatgacggcgctcaggaccagttccataagatggtggagctcaccgtggcagctcgccaggcgtataaaacgatgctggaaaatgtgcagcaggagctcgtgggggagcctcgccctcaagcacccccttccctgcctacacaaggcccatcctgccctgcagaagacggccctcctgccctcaaggagaaagaagagccacactacattgagatttggaaaaaacacttggaagcctactctggctgtaccttggagctggaggaaagtctggaggccagcaccagccagatgatgaacctgaacttatag

SEQ ID NO: 239804 - DNA, 747 bp, synthetic construct
  misc_feature 1..747: note = Description of Artificial Sequence: Synthetic coding sequence
  source 1..747: mol_type = other DNA
atgcagacctgccccttagcattccccggacacgtaagtcaagctcttggcacactcttatttctcgcagctagtctgtccgctcagaacgagggatgggacagccctatatgcacagaaggggtggtgtccgtttcatggggagaaaacactgtaatgagctgtaatatcagcaacgctttcagccatgtgaacatcaagcttcgagctcacgggcaggagagcgcaatctttaatgaggtagcacctgggtacttctctcgcgacggctggcagcttcaggtgcaggggggtgtggcccagctggtcattaaaggcgctcgtgactcccacgccggtctctacatgtggcacctggtgggtcaccagagaaataacagacaggtcacactcgaagtctccggggcagagccccagagcgcaccagatacaggtttctggccagtccccgctgttgtgaccgccgtgtttatactgcttgtggcactggtgatgttcgcatggtataggtgtaggtgttcacagcaacgcagagaaaagaagttttttttgcttgagcctcagatgaaggtggcggcattaagagccggtgcccagcagggactgtcaagagcgtcagctgagttgtggacaccagattccgagccaacgcctcggccactggctctggtttttaagccctctcctctgggtgctttggagctactatccccacagcccctcttcccctacgcagcagacccatag

SEQ ID NO: 239805 - DNA, 888 bp, synthetic construct
  misc_feature 1..888: note = Description of Artificial Sequence: Synthetic coding sequence
  source 1..888: mol_type = other DNA
atgcttcaaggacctggctccctgctgctgctgtttctagctagccactgctgtctaggatctgctcgagggctgttcctgttcggacagcctgacttttcctacaagcgtagcaactgtaagcctatccccgctaacttgcagctgtgccacgggatcgagtatcagaacatgaggttgcctaatctcttaggtcacgagaccatgaaggaggtgctggagcaggcaggagcatggatccctctggtgatgaaacagtgtcatcccgacacaaaaaagtttttgtgttccctttttgccccagtgtgtttggatgacctggatgagactatccagccctgccacagcctctgtgtccaggtgaaagacagatgtgccccagtgatgtctgctttcggctttccgtggcccgacatgctggagtgtgaccgattcccccaggacaatgacttatgcattcccctggcaagctctgatcacttacttcctgccaccgaagaggcacctaaggtgtgcgaagcttgtaaaaataagaacgacgatgataatgatattatggaaactctctgcaagaatgactttgctctcaagataaaagtaaaggagattacctatataaatagagataccaaaattattctcgaaaccaagtcaaagactatctacaaactgaatggagtctctgagcgtgacctaaaaaagagcgtgctttggctcaaggatagcctgcaatgtacatgtgaggagatgaatgacataaatgccccttatctggtcatgggccagaaacaggggggagagctggtcatcaccagcgtgaaaaggtggcaaaaggggcaaagggaattcaagcgtatttctcggtctataaggaagctgcagtgctag

SEQ ID NO: 239806 - DNA, 312 bp, synthetic construct
  misc_feature 1..312: note = Description of Artificial Sequence: Synthetic coding sequence
  source 1..312: mol_type = other DNA
atggccagtagatgggctgtgcagctgttgctagttgcagcctggagtatgggttgcggagaggcacttaagtgttatacttgcaaggagcccatgacctctgcttcttgcagaaccattactagatgcaaacccgaggatacagcttgtatgacaactcttgttactgttgaggcagaatatcccttcaaccagagcccagtcgtaaccagaagttgctccagtagttgtgtggcaactgatcccgactctatcggtgccgctcacctgattttctgttgtttcagagatctgtgtaactctgagctttag

SEQ ID NO: 239807 - DNA, 636 bp, synthetic construct
  misc_feature 1..636: note = Description of Artificial Sequence: Synthetic coding sequence
  source 1..636: mol_type = other DNA
atgatttcaaggatggaaaaaatgaccatgatgatgaaaatactgatcatgtttgccttggggatgaattactggtcctgtagtgggttccccgtttatgattacgatccttcatcattgagagacgctctttccgcgtctgttgtgaaggtgaactcacaatccctctccccatatctgttcagagcgttccgctctagcctcaagagagttgaagtgctggatgaaaacaatctggttatgaatcttgagttctctattagagaaactacgtgccgaaaggacagcggagaggatcctgctacctgtgcctttcagcgcgactactacgtgagcaccgcagtttgtcggtccacggttaaggtctcggcacaacaggtccagggagtgcacgcccgatgttcctggagctcttccacttctgagagttattcaagcgaagagatgatctttggcgatatgttaggctctcacaagtggaggaataattatcttttcggactaatttccgatgaatcgataagcgaacagttttacgatcgctctttgggaatcatgcgaagggtcctcccacccggtaatcgaaggtacccgaaccacaggcacagggcccgtataaatacagacttcgagtag

SEQ ID NO: 239808 - DNA, 636 bp, synthetic construct
  misc_feature 1..636: note = Description of Artificial Sequence: Synthetic coding sequence
  source 1..636: mol_type = other DNA
atgatttcaagaatggaaaaaatgaccatgatgatgaagatcctgatcatgttcgcactcggcatgaattattggtcctgtagtggctttcccgtatacgattatgatccttccagtctgcgggatgccttatctgcctcagttgtcaaggtgaattcgcagagcttaagcccttatctgtttcgggcatttcgttcgagcctgaaaagagtcgaggtgctagatgagaataatctggtcatgaatttggagttttcgatcagagaaaccacgtgtcgcaaagactcgggtgaggatccagccacatgcgcattccaacgagattattacgtgtctaccgcagtgtgtcggagcacagtgaaggtcagtgcccagcaggtccagggtgtacatgccaggtgttcatggagtagttccacaagcgagagctatagttctgaggagatgattttcggcgatatgctgggctcccacaagtggcggaacaactacctctttggattgatcagcgacgagtccatttccgagcaattttatgatcggtctttgggaattatgagaagggtgttgccgcctgggaatcggagatacccaaaccatcgccatagggctcgtattaatacggacttcgagtag

SEQ ID NO: 239809 - DNA, 366 bp, synthetic construct
  misc_feature 1..366: note = Description of Artificial Sequence: Synthetic coding sequence
  source 1..366: mol_type = other DNA
atggccccacgaccactactgttactgctgttgctgctgggaggatcagccgcaaggcctgctccacctcgagccaggaggcattctgatgggacttttactagcgagctttctcgactcagagagggcgcaaggctccagaggctgctgcagggtttggttgggaagcgaagcgagcaagacgcagaaaattccatggcttggacccggctgtccgctgggcttctctgcccaagtgggtcaaacatgcccattctgcaagcatggatgccccttgacggcacttggtcgccatggctgcctcctgggccaatggtctcagaacctgcgggtgccgcagccgagggaaccctgaggcccagatag

SEQ ID NO: 239810 - DNA, 1323 bp, synthetic construct
  misc_feature 1..1323: note = Description of Artificial Sequence: Synthetic coding sequence
  source 1..1323: mol_type = other DNA
atgcgtccacatctatcccctccgttacagcagctgctcctcccagtactcttagcctgcgctgcacattctacgggagcattacccaggctttgcgatgtcttacaggttctatgggaggagcaggaccagtgcctgcaggagctttctcgagaacagaccggagatctgggaactgaacagcccgtgccagggtgcgaaggcatgtgggataacataagctgttggccatctagcgtaccaggcagaatggttgaagttgagtgccccaggtttctcagaatgctcacatcccgaaacgggagtctctttcgaaattgcacacaggacggctggtcagagactttccctcgaccgaacctggcatgcggcgtcaacgtcaacgatagctccaacgagaagcgacacagctacttgctcaagctgaaagtcatgtatactgtcggatacagcagctccctggtaatgctgttggtggccttggggatcttatgtgcttttcggcgtcttcattgcactcgtaattacattcacatgcacctgtttgtgtcttttatcctacgggcactttctaactttattaaagacgccgtactcttttcttctgacgacgtgacatattgcgatgcacacagggcaggctgtaaactggtaatggtccttttccagtactgcatcatggcaaattactcttggctgcttgtggagggcctctacctacacactctgctcgcgatctcattcttctccgagcgcaaatacctgcaggggtttgtggccttcggctggggcagtcccgcaattttcgtcgcactgtgggcaattgccagacactttctggaggatgtggggtgttgggacattaatgcaaatgctagtatctggtggattatccgcggacccgtgatcctgtccatcctgattaactttatcctctttatcaacatactccgaatattgatgcggaaactccgaacccaggaaactagagggaacgaggtgagtcactataagagactggctaggtcgaccttgcttctgataccactgttcggcattcactacatcgtatttgctttttcgcctgaagatgctatggaaattcaactgttcttcgagctggccctggggagctttcagggattggtggttgctgtcctttactgcttcctcaatggcgaggtgcagctcgaggttcaaaagaaatggcagcagtggcacctgcgtgaatttcctttgcacccagttgcgagcttctctaattcgaccaaggcgagtcatttggaacagtcacagggaacgtgtcgaactagcatcatctag

SEQ ID NO: 239811 - DNA, 288 bp, synthetic construct
  misc_feature 1..288: note = Description of Artificial Sequence: Synthetic coding sequence
  source 1..288: mol_type = other DNA
atgaaactgctgatggtgctgatgctggctgccctgctactacactgctacgccgatagcgggtgtaaattgctcgaggatatggttgagaagacaatcaactcagatattagtatccctgagtacaaggaacttttgcaggagtttatcgattcagacgcagccgctgaggccatgggaaaatttaagcagtgtttcctgaaccaatcgcacagaacactaaagaatttcggactgatgatgcacaccgtgtatgatagcatctggtgtaatatgaaatccaattag

SEQ ID NO: 239812 - DNA, 1746 bp, synthetic construct
  misc_feature 1..1746: note = Description of Artificial Sequence: Synthetic coding sequence
  source 1..1746: mol_type = other DNA
atgcctgctcccagggctcgagaacagccgagagtgccaggggaacgtcagccactactcccacgcggagcgaggggacccagacgatggcgcagggctgctggggctgccgtgttactggtcgagatgctggagagagccgctttcttcggtgtgaccgctaatctggtactctacctaaacagcactaatttcaactggactggcgaacaggcaaccagagctgccctagtgttcctgggcgcatcttacctactcgctcctgtggggggatggctcgccgatgtgtacctgggacggtaccgggcagtggctctgtcgctcctgctgtatttagcagccagtggcctgcttccagctaccgccttccccgacggacgatcaagtttctgcggcgagatgcccgcttcgcccctcggccctgcttgtccttccgccggttgccccaggtctagcccatccccctactgcgcacccgtgctgtacgccggactcctgctgctgggactggccgcttcaagtgtccgtagcaatctgacaagcttcggcgctgatcaagtgatggacctggggagggacgctactagaagattctttaactggttctattggtccatcaatctgggcgctgtactatcacttctggtcgttgcatttatccagcagaatatcagctttcttctcggctatagcatacctgtcgggtgcgtcgggttagcgttcttcattttccttttcgcaacacccgtctttattacgaagccccctatgggatctcaggtctcatctatgctaaaactcgccctccagaattgctgcccacagctgtggcagaggcacagtgccagggaccggcagtgcgcgagagtgcttgccgacgaaaggtcaccccagccaggcgcatccccccaggaagacatcgctaatttccaggtgctggtcaagattctccccgtcatggtgacactggtcccatactggatggtctatttccagatgcagtccacatacgtgctgcaagggttgcacctgcatattcccaatattttccctgcaaatcccgctaacatctcagttgccctgagagcacagggatccagttacaccattcccgaggcctggctgcttctggccaacgtcgtcgtagtccttatactagtgccactgaaagatcgcctcatcgacccattactgctcagatgtaagctgctccccagtgctctacagaagatggccttgggtatgttcttcggcttcacctccgtgatcgtcgccggagtactggaaatggagagactccactacatccaccataacgagaccgtttcgcagcagataggtgaggtgctgtataacgccgctcctctgtccatatggtggcagatcccgcagtatctcttaataggaatcagcgaaatcttcgcaagcatccccggattggaattcgcatattcagaggctcccagaagtatgcaaggcgctattatgggaatctttttttgtctgtcaggggtgggaagcctattaggcagtagtcttgtagcactgctgagccttcccggtggatggttacattgtccgaaggattttggcaatataaataattgcaggatggacttatacttcttcctgctggctgggatacaggccgtgactgctcttctgttcgtctggatcgccggtcggtatgaaagagcctctcagggtccagcttcccactcacggttcagtcgcgacagaggatag

SEQ ID NO: 239813 - DNA, 363 bp, synthetic construct
  misc_feature 1..363: note = Description of Artificial Sequence: Synthetic coding sequence
  source 1..363: mol_type = other DNA
atgaaactcctgatggtcctcatgctggcggctctgagtcaacattgttatgctggcagtggttgtccactgctagagaatgtgatatccaagaccatcaacccgcaggtgagtaaaactgaatataaagagctgttgcaggagttcattgacgataatgcgaccactaacgctatagacgagctgaaagaatgctttctgaatcaaacagatgagacattgtcaaatgttgaggtgtttatggtgatctctttttcgagctacaaactgttcaagtcgcccgatcaaggacaggttggatctagttttctcactgataacgctaaggcgacttccgagcaggccttctcttatatcggttag

SEQ ID NO: 239814 - DNA, 315 bp, synthetic construct
  misc_feature 1..315: note = Description of Artificial Sequence: Synthetic coding sequence
  source 1..315: mol_type = other DNA
atgaagctcgccgctttgcttggcttgtgcgtcgccctgtcatgcagctctgctgctgcattcttggtgggaagcgctaagcctgtggctcaaccggtcgcagccctcgagtcagctgctgaagctggagcaggaaccctcgcgaaccctctgggaacactcaatccactaaagctactactgtcaagcttggggatacccgtgaatcatctgatagaggggtcccagaagtgtgtagcagagcttgggccacaggccgttggagctgtcaaggccctcaaagcactgctgggggctcttaccgtatttgggtag

SEQ ID NO: 239815 - DNA, 282 bp, synthetic construct
  misc_feature 1..282: note = Description of Artificial Sequence: Synthetic coding sequence
  source 1..282: mol_type = other DNA
atgaagctcgtgaccatcttcttgttagtgacgatcagcctctgctcctactcggcaaccgcttttcttattaataaggttcctctccccgtggataagctagctccattaccactcgacaacattctgcctttcatggacccactgaagcttctgctgaaaacactgggcatctcagtggaacacctggtggagggactaagaaagtgcgtgaatgagttgggccctgaagcctcagaggccgtcaagaaattactggaggccctgagtcatttggtttag

SEQ ID NO: 239816 - DNA, 1854 bp, synthetic construct
  misc_feature 1..1854: note = Description of Artificial Sequence: Synthetic coding sequence
  source 1..1854: mol_type = other DNA
atggctgaagctaaaactcactggctgggtgccgcactgagccttatccctctgatttttctcataagtggtgccgaggcagcgagttttcaaaggaaccagcttttacagaaagagcctgacctcagattagagaatgtgcagaagtttccaagtcctgagatgatacgcgctctcgagtacatagaaaatctcagacaacaggcccataaggaagaatcaagccccgattacaacccttaccagggcgtgtcggtgccgctacagcaaaaggagaatggtgacgagagccacctgccggaacgagactcgctcagcgaggaggattggatgcggataatccttgaggccctgcggcaggccgagaatgagccacaatcagcccctaaggaaaacaagccctacgccctcaactcagagaaaaattttcctatggacatgtctgatgactacgaaacccaacaatggcccgagcggaagctgaaacatatgcagtttccgccaatgtacgaggagaattctcgagacaatccatttaaacggaccaatgagatagtagaagaacaatatacgcctcagtccttggccacccttgagtctgtctttcaggagttaggtaagttgactggccctaacaaccagaagcgcgagcgcatggacgaagaacaaaagctgtacacggatgacgaggacgacatttataaagctaacaacatcgcatacgaggatgtcgttggaggggaagactggaaccccgtggaggagaaaattgaatctcaaacacaggaagaagtcagagattctaaggaaaacatcgagaagaacgagcagattaatgatgagatgaaacggagcgggcagctcgggatccaggaagaggacttaaggaaggagtcgaaggatcagctctcagacgacgtgagtaaagtcattgcctatcttaaacggctagtcaacgccgcaggatctggcagattacaaaacggccagaatggggagcgcgctacccgcctgttcgagaaaccactcgactctcaatctatttaccagctgattgagatttcccgaaacctgcagatccccccagaggatctcattgaaatgttaaaaactggggaaaaaccaaatggatctgtggagcctgaaagagagttggacttgcccgtggacttggacgatattagcgaggccgacctagatcaccccgacctattccagaaccggatgctgagcaagtctggctatccaaaaactccaggacgggctgggacggaagccctaccagatggcctgagtgtggaggatattcttaatctgctggggatggagagtgccgctaaccagaagacttcctatttccctaacccatataatcaggaaaaagtgctccccaggttgccatatggcgctgggagatctaggtccaaccagttgccaaaggccgcttggattccccacgtggaaaacaggcaaatggcatacgagaatctgaatgataaggaccaggagttaggtgagtatttagcccgaatgttagtaaaatatccggaaatcattaactcaaatcaggtgaaaagggtccccggtcagggctcctctgaggatgatcttcaagaagaagagcaaatcgaacaggctatcaaggagcacctgaaccagggttcgtcccaggaaaccgacaaactcgctcccgtatcaaaaagattccctgtcgggccacccaagaacgacgataccccaaataggcagtactgggacgaagacctgcttatgaaagttctcgaatacctcaatcaggagaaagcagagaagggaagggagcatatcgctaaacgggcaatggagaacatgtag

SEQ ID NO: 239817 - DNA, 435 bp, synthetic construct
  misc_feature 1..435: note = Description of Artificial Sequence: Synthetic coding sequence
  source 1..435: mol_type = other DNA
atggccgaggccaaaacacattggttgggcgctgcactctcattgatcccattaatcttcctgatatcaggggctgaagccgcttcctttcagaggaatcaactgctgcagaaggagcctgatctgcgcctcgagaacgtgcagaagtttccaagccctgagatgattcgtgcgctcgagtacattgaaaacctgcgtcagcaagcccataaggaggaatcatccccagactataatccatatcagggtgtgtctgtgcctctccagcagaaagagaacggcgacgaaagccacctaccggaaagggattccctatccgaagaagactggatgagaattattcttgaggccctgaggcaggctgagaatgaaccccagtctgcccctaaagagaataaaccatacgccctcaattccgagaaaaatttcccctag

SEQ ID NO: 239818 - DNA, 378 bp, synthetic construct
  misc_feature 1..378: note = Description of Artificial Sequence: Synthetic coding sequence
  source 1..378: mol_type = other DNA
atggcagaagcaaagactcactggcttggagcggcacttagtctcataccgcttatattcctcatcagcggcgcagaagccgcttcttttcagagaaaccagctgctgcagaaagagccagacctccggctcgaaaacgtacagaaattccctagccccgaaatgattcgagcattagaatacatagaaaatttgagacaacaggcgcacaaggaagagtctagcccagactataacccgtaccaaggggtgagtgttcctctgcaacaaaaggagaatggcgacgagagtcacctccctgagcgagactcactgagcgaggaggactggatgcgcattatactcgaagccttgcgccaggctgagaatgagccatag

SEQ ID NO: 239819 - DNA, 1434 bp, synthetic construct
  misc_feature 1..1434: note = Description of Artificial Sequence: Synthetic coding sequence
  source 1..1434: mol_type = other DNA
atggctgaggctaaaacccattggcttggcgcagcgctttctctgatccctcttatctttctcattagcggtgcagaagccgcatcctttcagagaaatcagctgctccaaaaggaacccgaccttcgattagagaatgtccagaaattccccagccccgagatgatccgggctttggagtacatcgagaatctgcgacaacaggcccataaggaggagtcttccccagactacaatccatatcagggtgtgtctgttcctctgcagcaaaaagagaacggagatgagtcacacttacctgaaagagactctcttcgcggagaagattggaatcccgtagaggagaagattgagtcccagacacaagaggaggtacgagactctaaggagaacatcgagaagaatgagcagatcaacgacgaaatgaagcgaagtggacagctcggaatccaggaggaggacctgagaaaggagtcaaaggaccaactgagtgatgacgtctccaaggtgatcgcctacctgaaaaggctcgtcaacgctgcagggtctggccgattgcagaacggccagaacggggaaagagctacaagactgttcgaaaaacccctagacagccagtctatatatcaattgatagagatatcacgcaacctccagattccaccagaggatctaatcgagatgttgaaaacaggcgagaagcctaatggctcggtggaaccagaacgagagctagacttgcccgtcgatttagatgacatctcagaagcagatttagaccacccggatttatttcaaaatcggatgctctctaaatccgggtatcctaagactccgggaagggccggaacagaagcgttaccagacggattgagtgtggaagatatcttgaatctcttaggcatggagagcgctgcgaaccagaaaacttcatacttccctaacccttataatcaggagaaggtcttacctcgactgccatacggcgctggaaggtcccgttccaaccagctgccgaaagccgcttggattccacatgtggaaaataggcagatggcctacgagaatctgaacgacaaggatcaggaattgggcgagtacctagccagaatgctggtaaaatatccggagatcattaacagtaatcaagtgaaaagagtgcccggacagggatcatccgaggatgatctccaggaagaggaacaaattgaacaggccatcaaggaacacctgaaccaggggtccagccaggagactgacaaactcgctccagtttctaaacgcttccccgttggaccgccaaagaacgatgacacccctaaccgtcagtattgggacgaggatctgctgatgaaggtcctggaatacctgaatcaggagaaagcagagaaaggcagggaacacattgctaaacgggctatggagaacatgtag

SEQ ID NO: 239820 - DNA, 390 bp, synthetic construct
  misc_feature 1..390: note = Description of Artificial Sequence: Synthetic coding sequence
  source 1..390: mol_type = other DNA
atggaacccagccagtgcgtggaggagttagaggacgacgtgtttcagcctgaagacggtgagcccgtaacccagcccggtagcctcctgagtgccgacctcttcgcccagagcctcttggactgccctctcagtaggctgcagctcttccccctcacccactgctgcggacctgggttgaggcctacctcacaggaagacaaagccacacagaccctgagccccgcttcaccttcacagggcgttatgttgccttgcggagtgacggaagaaccacaaaggttattctatgctcctgctgaacctaagtcttgtgtagttgctgaccccccactaccggctcaaccctgttttgaatggcggagggagcaggagagaggtcgaccctag

SEQ ID NO: 239821 - DNA, 711 bp, synthetic construct
  misc_feature 1..711: note = Description of Artificial Sequence: Synthetic coding sequence
  source 1..711: mol_type = other DNA
atggcggcaatccaggatggcctggcaaagggtgagaatgatgagaccgttagtaataccctcaccctgacgaatgggctggagcggcgtacaaagacttactccgaagacaacttcgaggaactgcagtactttcctaatttctacgctttgctgaagtccattgactcagaaaaagaggctaaggaaaaggaaaccctgatcacaatcatgaaaaccctgattgattttgtgaagatgatggtcaaatatgggactatttcgcctgaagagggggtctcctatctcgagaacttggatgaaatgatcgccctgcaaacgaagaacaaacttgaaaagaacgcaaccgataacatcagcaaactgtttccagcaccaagcgaaaagtcccacgaagaaaccgattcgaccaaagaagaggctgcgaagatggagaaggaatatgggagtctgaaggactctacaaaagatgacaactccaaccctggaggcaaaaccgacgagcctaaagggaagactgaagcctacttagaggcaattcggaagaacatcgagtggctgaagaagcacgacaaaaagggaaacaaggaagattacgacctctcgaaaatgcgggattttatcaacaagcaggcagacgcttatgtggagaaaggcatcctggacaaggaagaagccgaagcgattaagcgtatttatagttccctttag

SEQ ID NO: 239822 - DNA, 174 bp, synthetic construct
  misc_feature 1..174: note = Description of Artificial Sequence: Synthetic coding sequence
  source 1..174: mol_type = other DNA
atggcagcaatccaagatggattggcaaaaggcgaaaacgacgaaactgtctccaacacactaactctgacaaatgggctggaacgcaggactaaaacttacagcgaagataacttcgaggaattgcagtatttcccaaacttttatgcactcctgaagtccatagacagttag

SEQ ID NO: 239823 - DNA, 990 bp, synthetic construct
  misc_feature 1..990: note = Description of Artificial Sequence: Synthetic coding sequence
  source 1..990: mol_type = other DNA
atgagtgcgttcgacactaaccccttcgccgaccccgtcgatgtgaatccattccaggatccgtccgtgacacagttaactaatgccccacaagggggtctggctgagttcaatccattcagtgaaacgaacgcagcaacaaccgtgcccgtcacccagcttccaggctcttcccagccagctgtactccaaccttccgtcgaacctacacagccaaccccacaggctgtggtatcagccgcacaggccggtttattgcggcagcaggaggaattggatagaaaggccgctgagcttgaaagaaaagagcgggagctgcagaacacggttgcaaatctccacgtaagacaaaacaattggccacctcttcccagctggtgtccggtgaagccatgtttctaccaggacttttctaccgaaatccctgcagattatcagagaatatgcaaaatgctgtattacctatggatgctacacagtgtgacactgttcttgaatctactcgcttgtctggcctggttttcaggtaactcatccaaaggtgttgacttcggactatccatcttgtggtttctgatcttcacaccttgcgccttcctatgctggtataggcccatctacaaggcttttcggtctgataactccttttctttctttgtctttttcttcgtgtttttctgtcagataggcatttatataatccagttggtggggatcccaggtctcggagattctggatggatcgccgcactgtccaccttagataaccactcactcgctattagcgttattatgatggtggtggctgggttcttcactctgtgtgccgtcctgtctgtgtttttacttcagagggtgcactccttatatcgccgaaccggtgcctccttccagcaggcgcaagaagagttttcccagggtatttttagctcccggaccttccaccgggcagcctcttcagccgctcagggagcgtttcagggaaattag

SEQ ID NO: 239824 - DNA, 864 bp, synthetic construct
  misc_feature 1..864: note = Description of Artificial Sequence: Synthetic coding sequence
  source 1..864: mol_type = other DNA
atgtctgcatttgatacgaacccatttgccgataccaacgctgcaacaaccgtgccagtgactcaacttcctggctcgtcccagccagccgtgctgcaaccctcagtcgagcccacacagccaacaccacaggccgttgtaagtgccgctcaggcaggcctgctgagacagcaggaggagctggatcggaaagccgcagagcttgaaaggaaggaacgtgagctgcagaatacggtggccaatctccacgtgcggcagaacaactggcccccactgccatcttggtgtccagtgaagccatgcttctatcaggatttctcaaccgagatccccgcagattatcaaagaatctgcaagatgctgtattatctgtggatgctgcacagtgtgacactttttcttaatctgcttgcatgcttagcgtggttttcaggtaactcctccaagggcgtggattttggcctctcaattctgtggttcctgatctttaccccatgtgcctttctgtgctggtatcgcccaatctataaggcgtttaggagcgataactcattttcattcttcgtgtttttcttcgtgttcttctgtcagatcggcatctacattatacaactggtgggcatccctggtctcggggattcaggatggatcgctgccctgtcaaccctggacaatcattcccttgcaatctcagtgattatgatggtggtggcaggcttctttacgctttgcgctgtgctgtcggttttcctcctccagcgcgtgtctggcgtcggccgagcagattccaaatgggaagaggccggaaatcgtttcctgccgctgcctcgcgatgttttccatcactgtagctgggctagttag

SEQ ID NO: 239825 - DNA, 1044 bp, synthetic construct
  misc_feature 1..1044: note = Description of Artificial Sequence: Synthetic coding sequence
  source 1..1044: mol_type = other DNA
atggctcagtcaagagacggcggaaatcctttcgctgagccctctgagctcgacaatccgttccaagaccctgcggtcattcaacatcgcccatctcggcaatacgcaacgctggacgtctacaacccctttgagactcgagagccgcctcctgcctatgagccccctgcccctgctcctcttccgccaccctctgcccctagcttacagccaagtcgtaaattgtctcccacagagcctaagaattacggcagctactctactcaggcttccgccgctgcggctactgcagaactgttaaagaagcaggaggagctcaatcgtaaggccgaagaactagatcgccgagagagggaactccagcatgcagctctcgggggaaccgccacgagacagaacaattggcccccactcccctctttctgccctgtgcagccatgcttttttcaggatatctctatggaaatacctcaggagtttcagaagaccgtttccacaatgtactacctctggatgtgttccaccctagccttgctgttaaattttcttgcatgtttggcgtcattctgtgtagaaactaacaacggggcaggtttcgggctgagtatcctttgggtcctcctcttcacaccctgctcttttgtgtgctggtatcgccctatgtataaggcttttagaagcgactccagcttcaacttcttcgtgttcttcttcattttttttgtgcaagacgtgttgttcgttctccaagccatcggcattccaggctggggattcagcggctggatctccgctctggtggtgccgaagggtaatacagcggtttctgtcctaatgctgttagtagcgctgttgttcaccgggatagccgtcttagggatcgtgatgttgaaaagaattcatagcctgtatagacgcactggcgcttcttttcagaaggcccagcaggagtttgccgcaggtgtctttagcaatcctgctgtgcgcaccgcagccgctaacgcagcggctggcgcagcagaaaacgcctttagagccccttag

SEQ ID NO: 239826 - DNA, 966 bp, synthetic construct
  misc_feature 1..966: note = Description of Artificial Sequence: Synthetic coding sequence
  source 1..966: mol_type = other DNA
atggctcagagcagggacgggggaaatcctttcgccgagccttccgagctggataatccctttcagccaccaccagcctacgagccacctgcccctgctccacttcctcctccatcagctccttctctccagcctagcagaaagctgtcacccactgaaccgaagaattacgggtcatattcgactcaggcttctgccgctgccgctactgcagagttactgaagaagcaggaagaactgaacagaaaagcagaggaattagatcgcagggaacgggaactgcaacatgcggcacttggagggacggcgacccggcagaataactggccccctctgccgtccttctgtcctgtccagccctgctttttccaggatatcagcatggagattcctcaagagttccagaaaaccgtgagcacaatgtactatctttggatgtgtagcaccctggccttattgcttaactttttggcgtgcttagcctccttttgtgtggaaacgaacaatggagccggttttggtcttagtatcctttgggtactactgttcacaccctgtagcttcgtgtgctggtatcgacccatgtacaaagcctttcgctccgatagcagtttcaacttttttgtgttcttcttcattttcttcgtgcaggatgtgttatttgtcctccaggctattggcattcccggatggggcttcagcgggtggatatctgctcttgtcgtgccaaaaggcaacaccgccgtgagcgtgctaatgttgcttgtcgccttgttgtttaccgggattgccgtgctaggaattgtgatgcttaaacggatccactccctatacagacgcactggagcatcattccagaaggctcaacaggagtttgcagcgggtgtgttttcaaatccagccgtgagaaccgcggctgccaatgcggctgctggcgctgcagagaatgcattccgggctccttag

SEQ ID NO: 239827 - DNA, 690 bp, synthetic construct
  misc_feature 1..690: note = Description of Artificial Sequence: Synthetic coding sequence
  source 1..690: mol_type = other DNA
atgtctgagaaggagaacaactttcccccattacctaagtttataccggtgaagccttgtttctaccaaaacttcagtgacgaaataccggtggaacaccaggtgttggtcaaacgcatctatcggctgtggatgttctactgcgcgactctgggggttaacctgatcgcatgcctggcatggtggataggaggaggcagtggcactaatttcgggttggcctttgtttggctgcttctcttcactccatgcggttatgtgtgttggtttcgaccagtctacaaggctttcagggccgattccagctttaatttcatggccttcttcttcatttttggggcacagtttgtcctcaccgtcattcaggccattgggtttagcggatggggcgcttgtggatggctcagcgctattggcttttttcaatacagccccggagctgcagtggtgatgctgcttcctgctataatgttttccgtatcagctgcgatgatggccattgccattatgaaggtgcataggatctatcgtggcgctggcggtagttttcagaaagcacagactgagtggaatacgggaacttggcgaaatccaccatccagagaggcacagtacaataattttagcgggaattcccttcccgaatatccaactgtccccagttatcctggaagcgggcagtggccctag

SEQ ID NO: 239828 - DNA, 588 bp, synthetic construct
  misc_feature 1..588: note = Description of Artificial Sequence: Synthetic coding sequence
  source 1..588: mol_type = other DNA
atgagcgaaaaagagaacaatttcccacccctgccgaaattcattccagtcaagccttgtttctatcaaaactttagcgatgagatacctgttgaacatcaggtgcttgtgaaacgtatatatagactgtggatgttctactgcgctacgctgggggtgaatctgatcgcctgtctagcttggtggattggcggagggtcaggcaccaacttcggtctggctttcgtttggcttctgctgtttaccccatgtggttatgtgtgttggttccgacctgtgtacaaagccttccgcggatggctgagtgcaattggctttttccagtattcccctggagccgcagtggtgatgctactccccgctattatgttttctgttagcgcagctatgatggcaatcgctatcatgaaggtgcatagaatatatagaggcgcagggggatcctttcagaaagcccagacagagtggaacactggaacctggaggaaccctccttcacgggaggcacagtacaacaacttttcaggcaattccttgccagagtatcctacggtgccctcctaccccggatctggccagtggccatag

SEQ ID NO: 239829 - DNA, 588 bp, synthetic construct
  misc_feature 1..588: note = Description of Artificial Sequence: Synthetic coding sequence
  source 1..588: mol_type = other DNA
atgattcagagacacattccagtgtgcgggcgatccagaccttatcagcggggatgtgtggtccaggctggatcctccggctcccctggctggtcccactttaaaatcatctgtggactggctccagctcctagtgaagcggttctatctgctcgtaacaattgcgagcacaccggagggtgccggctgcagccggcattagtgggtgaaacagaaatgtccgagaaggagaataacttcccaccactgcctaagttcattcctgtaaagccatgcttctatcagaatttttccgatgaaatccccgttgagcaccaggtcctcgtgaaacgcatctatcgactgtggatgttttattgtgcaacattgggcgtgaatctaatcgcttgtctcgcgtggtggataggtgggggtagcggaactaacttcggactggccttcgtgtggttgttgctgttcactccctgtggatatgtttgttggtttaggcccgtgtataaagctttccgagcagactcaagctttaattttatggcttttttctttatcttcggagcacagttcgtgctcaccgtaatacaggcctag

SEQ ID NO: 239830 - DNA, 708 bp, synthetic construct
  misc_feature 1..708: note = Description of Artificial Sequence: Synthetic coding sequence
  source 1..708: mol_type = other DNA
atggctgaaaaggtcaacaacttcccacccctcccaaaattcattccattaaaaccttgtttctatcaggactttgaagccgatatacctcctcagcacgtgagcatgaccaaacgcctttattatttatggatgctcaactcggtgacactggcagtaaacctggttggatgccttgcctggctgattggaggcggtggagccacaaatttcgggctggcgttcttgtggttgatcctgttcaccccctgctcctatgtgtgctggtttcggcctatttataaggcattcaagacagattcgtcctttagcttcatggcattcttttttaccttcatggcccagctcgtcattagtatcatacaagccgtggggattcctggctggggcgtttgtggatggatcgccacaatctccttcttcggcactaatatcggtagtgccgtggtgatgctaattccgactgttatgttcaccgtgatggcggtgtttagctttatcgccctgtcaatggtacacaaattctaccgagggagcgggggtagttttagcaaggctcaggaggaatggaccacaggagcttggaaaaaccctcacgtgcagcaagcggctcagaacgccgctatgggtgccgctcagggagccatgaatcaacctcagacacagtactcggcaacccccaattacacatattccaacgaaatgtag

SEQ ID NO: 239831 - DNA, 708 bp, synthetic construct
  misc_feature 1..708: note = Description of Artificial Sequence: Synthetic coding sequence
  source 1..708: mol_type = other DNA
atggctgaaaaagtgaataactttcccccattacccaaattcatcccgctgaagccctgcttctaccaagacttcgaggctgacattccacctcagcatgtatcgatgacaaagagactttattacctgtggatgctgaactctgtcacactcgcagtgaatctcgttggttgtctcgcttggctcatcggaggtggcggagccactaacttcggcctggcatttctctggctgattctgtttactccttgcagctacgtgtgctggtttcggccaatctataaggcgttcaagaccgactcatcctttagttttatggcctttttttttaccttcatggcccagcttgtgataagtattatccaagccgtgggcattccgggatggggagtgtgtggatggattgcaactatcagttttttcggcaccaatattggttccgctgtggtcatgctcattcccaccgtcatgttcaccgtgatggctgtcttttccttcatcgccctgtcaatggtgcataaattttaccgcggaagtggcggatccttttctaaggcccaggaagagtggaccaccggggcatggaagaaccctcatgtgcagcaggcagcccagaatgcggctatgggggcagcacagggcgctatgaaccagccacagacccaatattccgctaccccaaattacacatattcgaacgaaatgtag

SEQ ID NO: 239832 - DNA, 495 bp, synthetic construct
  misc_feature 1..495: note = Description of Artificial Sequence: Synthetic coding sequence
  source 1..495: mol_type = other DNA
atgttcctgcctcgcctacgagggcgttatagttctcccgcttgtcagcacgatcaggcccctctgctgcctttagatgtgaccgattcatccttttcttttatggccttttttttcactttcatggctcaactcgtgatctccatcattcaggccgtgggaatccctggatggggtgtctgtggctggattgctacaatcagcttttttgggacaaatatcgggagcgctgtggtgatgctgattccaacagtgatgtttaccgtaatggctgtgttttcattcattgccctttcaatggtgcacaagttttacagaggatcaggtggatccttcagcaaagcccaagaagaatggactactggggcttggaagaacccccatgtccagcaggccgctcaaaatgctgccatgggcgctgcccaaggggctatgaatcagccccagacccagtactctgcgacccctaattatacttattctaatgaaatgtag

SEQ ID NO: 239833 - DNA, 1083 bp, synthetic construct
  misc_feature 1..1083: note = Description of Artificial Sequence: Synthetic coding sequence
  source 1..1083: mol_type = other DNA
atgttcgtggcccgaagcatagcagctgatcataaggatctgatacacgatgtctcttttgattttcatggacgcagaatggctacctgcagctccgaccagtcggtgaaggtgtgggataaatctgagtcaggagactggcattgtacggccagctggaaaactcactcgggctccgtgtggagagtgacttgggcccaccccgagtttgggcaggtactcgcttcctgtagctttgacaggacagccgctgtttgggaagagatcgtgggggaatctaatgataagttgcggggacagtctcattgggtgaagcggacgactctcgtcgactcccggaccagtgtcactgatgtgaaatttgctcctaagcatatgggcctgatgctggccacttgcagcgctgatggaatcgtacgaatctacgaagcgccagacgtcatgaacctatctcaatggtctcttcagcatgaaatatcatgtaaactctcctgttcatgcatatcatggaatcctagttcttcccgagcccattctcccatgattgccgtgggcagtgacgatagcagtcccaatgcaatggccaaagtgcagatctttgagtataatgagaatacccgaaagtatgcgaaggctgaaaccctgatgacagtgaccgatcccgtgcatgatatcgctttcgcgccaaatctcggaagaagctttcacattctggctatagccacaaaagatgtcagaattttcaccctcaagccggttcgcaaggagcttactagctcagggggacccaccaagttcgagattcacatagtggcacagtttgacaatcacaatagccaggtgtggcgggtgagttggaatatcacagggacagtgttagcctccagcggcgacgacgggtgcgtgcgtctgtggaaggccaactacatggacaattggaagtgtacagggattctgaaaggaaatggtagccccgttaatggcagcagtcagcaaggcacctcgaatcctagcctgggcagcaccataccatcattgcagaactcactcaacggaagctccgctggccgaaagcactcctag

SEQ ID NO: 239834 - DNA, 1266 bp, synthetic construct
  misc_feature 1..1266: note = Description of Artificial Sequence: Synthetic coding sequence
  source 1..1266: mol_type = other DNA
atgtttgtggctcgctcgattgccgctgatcacaaggatttgatccacgacgtgtccttcgattttcacggcaggagaatggcaacttgctcgtccgatcaatccgttaaagtgtgggataagtccgaatcaggcgactggcattgtactgcatcttggaaaacccactctgggtctgtatggcgggtcacttgggcacacccagaattcgggcaagttctggccagctgcagtttcgataggacagctgccgtgtgggaggagatcgtcggagaatcgaatgacaagctgcgagggcagtcgcactgggttaagagaactactctggtagatagcaggacatctgtcacggatgtaaagttcgcacctaagcacatgggcctaatgttggccacttgtagcgccgacgggatagtgcggatatacgaggcacctgacgtgatgaacctgtcccagtggagcctccaacatgaaattagttgtaagttgagctgttcctgcatttcttggaacccatccagcagccgcgctcacagtcccatgatcgctgtggggagtgatgactcttctcccaatgcgatggcaaaagtccagattttcgagtataatgagaatactcgaaagtacgccaaggcagaaactttaatgactgtgacggatccagttcatgacatagccttcgcacccaaccttggccgatccttccacatcttagccattgccacgaaggacgtgaggatctttacactgaagcccgttcgtaaggaactcacctcttccggcggacctacgaaatttgaaatccatattgtagcacagttcgataaccacaattcccaggtttggagggtctcttggaacattactggaaccgttctagcgagtagcggtgatgatgggtgcgttcgcctttggaaagctaactacatggacaattggaaatgcactggcattctgaaggggaacggctcccccgtgaatggcagttcgcagcaggggacgagtaacccatcgttaggctcaacaatcccgagtctgcagaactcgttaaatggttcatctgctggcagatatttcttcacccctctagactcacctcgcgcagggtcccgctggtcctcctatgctcagctattacctcctccacctccacccttggtggagcactcctgcgatgccgacactgccaacctgcagtaccctcatcctcgccgacgttacctctccaggcctctgaatccgttaccagagaacgagggtatctag

SEQ ID NO: 239835 - DNA, 3075 bp, synthetic construct
  misc_feature 1..3075: note = Description of Artificial Sequence: Synthetic coding sequence
  source 1..3075: mol_type = other DNA
atgcctgctgctaggccccctgccgctgggcttagagggatctccctcttcctggccttgcttctggggtctcccgcagcggctttggaaagagacgcactccctgagggcgacgcttccccactggggccttatttactgccgtctggtgctcctgagcggggatctccaggcaaggagcaccccgaagaaagagtggttaccgcaccacccagttccagccaatcagctgaagtgctgggagaactcgtcctggacgggacagcgcctagtgctcatcacgacatccctgctctgagcccattgcttcccgaggaggctcgtccaaagcacgcgctaccgcctaagaaaaaattgccctcgcttaagcaggtcaatagcgcaagaaaacaacttcgccctaaggctacgagcgccgcaacagttcagagagctggcagtcaaccggcaagtcaggggcttgatctattgtcatctagcaccgaaaagcccggtccccctggggatccggaccctattgtcgccagcgaagaggcgtctgaggtcccgttgtggctagaccggaaagaatctgctgtgcccactacccccgcaccactgcaaatcagtccattcactagccaaccatacgtggcccacacccttccccaacgaccggagcccggagagccaggaccagatatggcacaggaggctccgcaagaggacaccagcccaatggctctaatggataagggcgaaaatgaactgaccggaagtgccagcgaggagagtcaggagactaccacgtctaccatcattactacgacagttattaccactgagcaggcacccgctctgtgttcagtgtctttctctaatcctgagggttatattgactccagtgattatccactgctgcccctgaacaacttcttggagtgcacgtataatgtgacggtatacacagggtatggggtggagctgcaagtgaagtccgttaatctctctgatggcgagttgctgtcaataaggggtgtcgacgggcctacattgactgtcctggccaaccagacactcctggtggaaggtcaggtgattcgttctcccactaatacaatctcagtttatttcaggacattccaggatgacggcttagggaccttccaactgcactaccaggcctttatgctaagctgcaattttcccagaaggcccgattcaggagatgtgaccgtcatggatctccactctggcggagtggcccactttcactgtcacctaggctatgaacttcagggtgcaaagatgctgacttgtatcaatgcctccaagccacactggtcgtcacaggaaccgatatgctctgcgccatgcgggggtgcggtgcacaacgcgaccatcggcagggttctgtcccctagttatcccgagaacactaatggctctcagttctgcatttggactatagaggccccagagggccagaagttgcacttgcactttgagcgcctcttgctgcatgacaaggaccgtatgaccgttcactcaggccagactaacaaaagtgccctcttatacgattccctacagacagaatctgtgcccttcgaaggactcctgagcgaaggaaacacaatccgcattgagtttactagtgatcaggccagagctgccagtacctttaatatccgtttcgaagcgttcgagaaaggccattgttacgagccttatattcagaacgggaacttcactacctccgatcccacctataacattgggaccatagtcgagttcacatgcgaccctggccattcattggaacagggaccggctatcatcgagtgcatcaatgtgcgcgacccgtattggaacgataccgaaccgttatgcagggccatgtgcggaggcgagctatcagccgtggccggtgtagtgttgtctcctaattggcccgaaccatatgtggaaggagaagactgcatttggaagatccacgtgggcgaagagaagcgaattttcttggacatacagttcctgaacctgagcaattccgacattctcactatctacgacggtgacgaggtgatgcctcatattctgggtcagtatctgggaaacagcgggccacaaaagctctattcctccactcctgatctgacaatacaatttcactctgaccctgcaggcctcatttttggcaagggccaagggttcatcatgaattacattgaagtgagcaggaatgactcttgctctgacctccctgagattcagaacggttggaagactactagccacaccgaactcgtccgaggagcacgcattacgtaccagtgcgacccaggatatgacatcgtgggcagtgacaccctgacatgtcagtgggacctgtcatggagctcagatcctcctttctgcgagaagattatgtactgcacggatcctggagaagtcgaccatagtacccggttaattagcgaccctgtccttcttgtaggcacaactatacagtacacatgtaatccagggtttgtgctcgagggctctagtctgcttacatgttattctcgcgagacaggcacacccatatggacaagcaggctgccacactgtgtgtccgaggagtcactggcctgtgataatcctggactgcctgagaacggctatcagatcctgtataagagactgtacctgcctggagaaagcctaacttttatgtgttacgaaggattcgagttgatgggcgaggtgactatcaggtgcattcttggacaacccagccactggaacggccctcttccggtctgtaaggtgaatcaagacagttttgagcatgccttggaggtcgccgaagccgcagcagaaaccagcctggaaggcggaaacatggccctggccatctttattcctgtgctaatcatctccctgttacttgggggtgcctacatctatataaccagatgtagatattactccaacctgcgactgcctttaatgtattcgcacccgtattcacagatcaccgtcgagactgaatttgacaatcctatctacgagacaggtgagactagggagtatgaagtgagcatttag

SEQ ID NO: 239836 - DNA, 2847 bp, synthetic construct
  misc_feature 1..2847: note = Description of Artificial Sequence: Synthetic coding sequence
  source 1..2847: mol_type = other DNA
atgcccgctgccaggccgcctgccgcaggcctccgaggcatctcacttttcctggcgctgcttctcggatcccctgcggctgctctcgagagagatgccctgcccgaaggagatgcatctcccctgggaccttaccttctgccgtctggggctccagagagaggatctccaggtaaagagcacccggaagagcgcgtggtgaccgcccctccctcctcttctcagtctgccgaagtgctcggcgaacttgttctcgacggtaccgctccaagcgcccaccacgacattcccgctctgtccccactactaccagaggaagctaggcccaaacacgccttaccaccgaaaaagaaactgccttctttgaagcaggttaacagcgcaagaaagcagttgagaccaaaagcgacaagcgccgctactgttcagagggcgggaagtcagcccgcaagccaaggtcttgatctgttgagcagctccacggaaaaacccggacctcccggagacccggatcccatcgttgcaagcgaagaagccagtgaggtcccgctgtggctggaccgaaaggaatcagctgttcctaccaccccagcaccccttcaaatctctcccttcactagccagccatatgttgcacacacattgccacagaggccggagcctggcgagcctggcccagacatggctcaggaggccccacaggaagacaccagccctatggccctcatggataagggggagaacgaactcaccggctcagccagtgaagaaagtcaagagaccacaaccagtactattatcaccacgaccgtcattaccacagaacaggctcctgccttatgctccgtctccttttcaaacccagagggttacatcgacagttcagactacccactacttcctctgaacaacttcctggagtgcacctacaacgttacggtctacactggatacggcgtggagctgcaggtgaagagtgtgaatctgagcgacggagaactgctcagcattaggggcgttgacgggccaaccctgacagtgctggccaaccagactctgctggtagagggtcaagtgattcgatctccgactaataccatctctgtctatttccgaacctttcaggacgatggcctagggactttccagctgcactaccaggcatttatgctgtcttgtaatttccctcgacgacccgattcaggagatgtaaccgtaatggacctgcactcgggcggagtagctcactttcattgtcacctgggctatgagttacagggcgctaagatgctgacctgcatcaacgccagcaaaccgcattggtcgagtcaggaaccgatctgcagcgctccttgtggaggagccgtgcacaatgctaccatcggcagggtgctctcgccctcttaccccgagaacaccaatggcagtcagttctgcatctggactatcgaggcaccagaggggcaaaagctccatttgcacttcgagagactcctcttacacgacaaagaccgaatgactgtgcactccggccagaccaataagtcagcattgctgtacgacagtctgcagacagaaagcgttcctttcgaggggctcttatcagaagggaatacgataagaatcgagtttactagcgatcaagctcgggcagcgagcacttttaacattcgctttgaagctttcgaaaaaggacactgctacgagccctatatccagaatggcaacttcacaacaagtgatccaacatacaacataggcacgattgtagaatttacctgcgacccagggcacagccttgaacagggaccagcaattatcgaatgcatcaatgtcagagacccttactggaatgacacggagcccctctgtcgggcaatgtgcggcggtgaactgagtgctgtggccggagtcgtgttatcccccaattggcctgagccttatgtggagggagaagattgcatctggaaaatccacgttggcgaggaaaaacgtatctttctagatatacagttcctcaatttatcaaattcagatatcttgacaatctatgatggagatgaggtaatgccacacattcttggtcagtatttgggaaactccgggcctcagaaactatatagctcaacgccagatttaactattcagtttcactccgatcccgctggcctgatctttggcaagggacagggattcatcatgaattacattgaggtctcaagaaacgactcttgtagcgatctgccagagatacagaacggctggaagaccacaagccacacagagctcgtgcgaggagccaggattacatatcagtgcgaccccggatacgatatcgtcggttccgataccttgacatgccagtgggatcttagctggagcagcgacccgccattctgcgaaaagataatgtactgcacagacccaggggaggttgatcattccacgaggctcattagtgaccccgttctccttgtgggcacaactatccaatatacatgcaatcctgggtttgtgctggagggttcatcactcttaacgtgttacagccgagagacaggcacgcccatttggacctctcggctaccgcattgtgtgctggcggaagcagcggctgagacatcactcgaaggcggtaatatggctttagccattttcatacctgttctcatcatctctctgcttctgggtggcgcatatatatacatcactcgttgtcggtattactccaatctgaggttacctctgatgtactcacacccctacagccagattacagtggagacagagtttgacaatcccatttacgagacgggggagacccgcgaatatgaggttagtatctag

SEQ ID NO: 239837 - DNA, 2850 bp, synthetic construct
  misc_feature 1..2850: note = Description of Artificial Sequence: Synthetic coding sequence
  source 1..2850: mol_type = other DNA
atgcccgctgcccgaccacccgctgccggtctgagggggatttcattgtttctggctctgctcctcggcagtccggcagccgctttagagagggacgcgttgcctgagggagacgctagtccattaggcccttacctgctgccctcaggcgctccagaaaggggctctccaggaaaagaacaccccgaagagagagtggtgaccgctcccccaagcagctctcagagcgccgaggtgctgggcgagctcgtgctggatgggacagcccctagtgcccaccacgacatcccagctctgagccctctgctgccagaagaagcccgtcctaagcacgctctgcctcccaaaaagaaactgccttctctgaaacaggtcaactcagctcggaagcagttgcgaccaaaggcaacaagcgctgccacagtgcagcgggctggatctcaacctgccagccaaggcctggacctgctgtcgtcaagcactgagaaaccaggtccacctggtgatcctgaccccatagtggcttctgaagaggcttccgaggttcctctgtggctggaccgcaaagagtctgccgttcctacaacgccggctcccctgcagatctctcctttcacatctcaaccatacgttgcccatactttgccccaaagacctgagcccggagaacctggtccagacatggcacaggaggcgcctcaggaagatacatctcccatggccctgatggacaaaggggagaatgaacttactggcagtgcatcagaagagtcgcaggagacgactacctctaccatcattaccacgacagtgattacaactgaacaggcccctgcattgtgctctgtctccttctccaatccggaaggctatattgattcctccgattaccctctgcttccgctgaacaattttctcgaatgcacctacaacgtgaccgtgtacacggggtatggcgtggagcttcaggtgaagtccgtgaacctctccgatggcgaactgttaagtatccggggtgtcgacgggccaacactgaccgttctcgcgaatcaaaccttgttagtcgaggggcaagtgatccgatccccaacgaatactatctctgtgtactttagaacgtttcaggatgatgggctgggcacttttcagctgcattatcaggccttcatgctcagctgtaattttcctcggagaccagatagcggggacgtcacagtaatggacctgcacagtgggggagtcgcccacttccactgccacctgggctatgagctccagggtgccaaaatgctgacttgcatcaacgcaagtaaaccacactggtcgtcacaggagcctatttgctcggccccatgcggtggggcagtgcataacgcgacgatcgggagggtgttgagtccctcctatcccgaaaataccaacggttcgcagttttgtatatggactatagaggccccagaaggccagaagctgcatttgcattttgaaagactgcttcttcatgacaaggatcggatgacagtccactctgggcaaaccaataagagcgccctgctctacgatagtcttcagaccgagtcagtgccattcgaaggattactgtcagaaggaaatacaattaggatcgaattcacttccgaccaggcgcgagctgcctctacattcaacataaggtttgaagcattcgagaaaggccattgctatgaaccctacatacagaatggcaacttcactacgagcgatcctacgtacaatatcggaaccatagtggaattcacatgcgacccaggccattcactggagcagggtccggcaatcattgagtgcatcaacgttagagatccatactggaacgacactgaaccactctgcagagccatgtgcggcggagagctgtccgccgtagctggggtggtgctgagtccgaactggcccgagccttacgtcgaaggagaggactgcatctggaaaatccacgtgggcgaggagaaacgtatctttctagatatccagttcctgaacctgagcaattccgatattctgacaatctatgacggcgatgaggtgatgccacacattcttgggcagtacttgggtaattctggtccacagaaactgtacagttctactcccgacctaacaatccaatttcacagtgatcctgcaggcctgattttcggaaaaggccaaggctttattatgaactatatagaagtgtcaagaaatgattcatgcagtgatttgcccgagatccaaaacgggtggaaaaccacctcgcacaccgagctggtgaggggggctaggattacctatcagtgcgatcccggttacgacatagtaggctccgacaccctgacctgtcagtgggacctctcttggtccagcgatcccccattctgcgagaaaacagaagagtccctggcctgtgataaccctggcctcccagaaaacggttatcagatcctttacaagcgcctctatctgcctggcgaatccttaactttcatgtgttatgagggctttgagctgatgggtgaggtgacgatacgctgtatcctcggccaaccgagccactggaatggcccacttcccgtctgcaaagtcgcagaggcagccgcagaaactagtctggagggaggaaatatggcactcgcaatctttattcccgtgctgattatcagtcttctgctgggtggtgcatacatttacataacccgatgtcgatattactccaacctgagattgcctcttatgtatagccacccctattctcaaatcaccgtggaaaccgagtttgacaatcccatttacgagaccggcgagactcgggagtacgaggtgtcaatctag

SEQ ID NO: 239838 - DNA, 420 bp, synthetic construct
  misc_feature 1..420: note = Description of Artificial Sequence: Synthetic coding sequence
  source 1..420: mol_type = other DNA
atgtactgcaccgacccgggtgaggtagaccactccacacggctgatttctgatcccgtactgctcgtaggcactaccatccaatatacctgcaacccagggttcgtgttggagggttcatccctactgacatgctactcacgagaaacaggcacacccatttggacttcacggcttcctcactgtgtcagtgaggagtcgctggcttgcgacaatcctggtctgcctgagaacgggtatcagatcctttacaagaggctgtacctgcccggagagagcctaactttcatgtgttacgagggctttgaactgatgggagaggtgacgattaggtgtattctcgggcagcctagtcactggaacgggcctctgcccgtctgtaaggatgtagctactattcctactagcgcatgtctgtag

SEQ ID NO: 239839 - DNA, 3042 bp, synthetic construct
  misc_feature 1..3042: note = Description of Artificial Sequence: Synthetic coding sequence
  source 1..3042: mol_type = other DNA
atgcctgccgcacgacctcctgccgcagggctacgtggtatctctctgtttcttgcgcttttactggggtctcccgctgcagctctcgagcgggacgcgctgcccgagggcgatgcctcacctctggggccatacctgctgccctcgggcgcaccagagcgcggatcccccggaaaagagcaccccgaagagcgcgtggtgaccgccccaccttccagttctcagagtgcggaagtgctcggggagctcgttttggatggaacggccccatcagctcaccatgacattcctgctctgtcccccctgcttcctgaagaagcacgaccaaaacacgctctaccgcctaagaagaagctcccttcattgaaacaggtgaactccgcgaggaaacagctgcggcctaaggccacttccgcagccacagtgcagcgggctggcagccagccagcttcccaaggtctggatcttctgagcagctctacagaaaagccgggaccccctggggacccagatccgattgtcgctagtgaggaagcatctgaggtgcccctgtggctggatcggaaggaatcagcagtccccacgaccccggcacctctccagataagtcccttcacgtcacagccctatgtcgcccatactttacctcagcggccagagcccggagagcccggaccggatatggcccaggaggctcctcaggaagacacttccccaatggcactcatggacaaaggagaaaacgagcttacagggtcagcttcagaggaatctcaggaaactaccaccagcaccattatcaccacaacagtgatcacgaccgagcaggctcctgccctgtgcagcgtttcttttagcaaccctgagggatatatcgacagctctgattaccctttgctgcccttgaataatttcttggagtgcacatataatgttacagtgtacaccgggtacggagtggaactgcaggtcaaatcagtgaatctaagcgatggagaactgttgagcatcaggggagttgacggccctacactcactgttctggctaaccagacactactggtcgagggccaagttataagatctcccacaaacactatctctgtatatttccggacttttcaagacgacgggttgggcaccttccagcttcactatcaggcatttatgctgagttgtaacttccctagacgcccagatagcggggacgtcaccgttatggacctgcatagcgggggagtggcccatttccactgccacttggggtatgagctccagggggcaaaaatgctgacatgcatcaatgcgtctaagccccactggagctcgcaggaacctatctgcagcgcgccatgtgggggtgcagtgcacaatgccacaattggtagagttctcagcccatcttatccagaaaataccaacgggtcccagttttgcatctggacgatcgaggctccggaggggcaaaagcttcatctgcactttgaacggctgttgttgcacgataaggaccgtatgacagtccactctggccagactaacaaatcggcgcttctgtatgactccctgcagactgagtcagtccccttcgaaggactgctgtccgagggcaacactataaggatcgagtttaccagcgaccaggctcgagccgcttccacctttaatatcagatttgaagccttcgaaaagggtcactgttacgaaccatacatccagaacgggaatttcaccacaagcgaccccacatacaacatcggcacgatagtggaattcacatgcgaccccggtcactcactggagcaaggtcctgcgatcatcgaatgtatcaatgttcgggacccttactggaacgatacggagcccctctgtagggcaatgtgcggcggtgagctctccgccgtcgccggagtggtcttgtcacccaattggcccgaaccatacgttgagggggaagattgtatatggaagatccacgtaggggaagagaagagaatttttctcgatattcagttcctcaacttatccaacagtgatatcctgactatctatgacggggatgaggttatgccgcacattcttggacagtatttaggaaattcaggtccacagaagttgtactccagcacgcccgatttaactatccagttccacagcgatccagccggtcttatctttggaaagggacagggcttcataatgaattacattgaggtctctcggaacgactcgtgtagcgatctgcctgaaattcaaaatgggtggaaaacaacttcacatactgaattagtgcgcggagctagaatcacgtatcagtgcgatccaggctatgacatcgtcgggtcagacactttaacctgccaatgggatctctcctggagttcggatcctccgttttgtgagaagatcatgtactgtacggatcccggtgaggtggaccattccaccaggctgatctctgatcctgtgttgctcgtcggtacaactatccagtacacctgcaatccaggatttgttctcgagggatcctccctgctcacctgttattctcgcgagaccggcactccaatttggacgagccgcctccctcattgcgtctcagaggagtctctggcttgcgataaccctgggcttccagagaacggctatcagatcctctacaaaaggctgtatctgcctggagaaagtctaacttttatgtgctatgagggatttgagctaatgggcgaggtaacgatacgttgtatactgggacaacccagtcattggaacggccctttgccggtgtgcaaggtggctgaggccgcagcagaaactagtctggagggaggaaacatggcgcttgctatctttattccagtgctgatcatctccctgctgctggggggagcatacatctacatcacgaggtgtagatattatagtaatttaaggttgcctctgatgtactcacatccgtacagccaaatcacagtggagactgaattcgacaatccaatatatgaaacgggtgaaacccgcgaatacgaggtctccatttag

SEQ ID NO: 239840 - DNA, 3072 bp, synthetic construct
  misc_feature 1..3072: note = Description of Artificial Sequence: Synthetic coding sequence
  source 1..3072: mol_type = other DNA
atgcccgctgctcggccacccgctgccggactgcgcggtatctccctctttcttgctctgctgctgggctctcccgctgctgctctggaaagggacgcactgccagaaggtgatgccagcccgttgggaccctaccttctcccttccggcgctcctgagcgtggttccccaggtaaggagcatccggaggagcgcgtggtgacagcccctcccagctcctcccaatctgccgaagttctaggcgaactggtcctggacggaactgcccctagtgcgcatcatgacattcccgctctgtctcccctcttgcccgaggaggccaggcccaagcacgccctgccacccaagaaaaaattgccctcccttaaacaggtgaattctgccagaaagcagctgcggccaaaagccacttccgccgctactgtgcagagagctggaagccagcctgcctcccagggcctagacctcctttcaagctcaacagaaaagcccggacctccaggtgatccagaccctatcgtggcatcagaagaggcttcagaagttcccctgtggcttgaccggaaggaatccgctgttcccacaactcctgccccactccaaatttctccatttaccagtcagccctacgtggcccacacactccctcaacgccctgaacccggtgagcccggtcccgatatggcacaggaggcccctcaagaagacaccagtcccatggcattgatggacaagggcgaaaacgaacttaccgggagtgccagcgaggagagccaggaaacaactacctccacaattatcacgaccactgttatcacaacagagcaggccccagctctctgctccgtctctttttctaatcctgagggctatatcgactcatcagactaccctctgctgccacttaataattttcttgaatgcacttacaatgtgaccgtgtacacaggttacggagttgaactgcaggtgaagtctgtgaatttaagtgacggagaactgctcagtattagaggggtggatggccctactctgacggtgctggccaatcagaccttgctagtcgaaggtcaggttatcagatcccctaccaacacaatcagcgtgtacttcagaacatttcaggacgatggattgggcacctttcagctccactatcaggccttcatgctatcctgcaattttccgcgtaggcccgacagcggagacgtcacagtgatggacctgcattctggaggagtcgcacacttccactgccacctaggttacgaactccagggagcgaagatgctcacttgtatcaacgcttcaaagccccactggtcaagccaggaacccatctgcagcgccccatgcggcggagccgtgcacaatgccaccatcgggagagtgctgagcccctcctatccagagaacactaatggcagccagttctgcatctggacaatcgaggcgccagaaggccagaaattgcacctgcacttcgagcgattgctcctgcacgataaagatcgaatgacagtccattctggccaaactaacaagtctgctctgctctatgattctctgcaaacagagagtgttccctttgagggtctgctgtccgagggaaataccattcgcattgagtttaccagtgatcaggcccgagctgcttcgactttcaacattcgatttgaggcattcgaaaagggccattgctatgaaccctatatacagaatggtaacttcacaacttctgaccctacctacaatattgggactatcgtcgagtttacctgcgacccaggacacagccttgagcaggggccagccataatcgaatgcatcaatgtcagagatccctactggaatgacacggagccactgtgtcgtgcgatgtgcggtggagaactgtctgccgttgctggcgtggttctgagccccaattggccagagccatatgtggagggagaggactgcatatggaaaatacacgtgggagaggagaaacggatctttctggatatacagttcttgaacctctctaacagtgacatcctgaccatatacgacggggatgaggtaatgccccacattcttggccaatacttggggaacagtggccctcaaaagctgtattctagtacacctgatctcacgatccagttccacagcgacccagccggattgatcttcggaaaaggccagggttttataatgaattacatcgaggtgtccaggaacgatagttgtagtgatctgcctgagatacagaacggctggaagacaacaagtcacactgaactcgtgcgcggtgcacgcatcacctaccagtgcgatcctgggtacgatatcgtgggcagtgacaccctgacatgccagtgggatttgagttggtcctctgaccctcccttctgcgaaaaaattatgtactgcactgacccaggcgaggtggaccactccactcgactgatctccgaccctgtgctcctggttggtacaactatacagtacacctgtaacccgggttttgtgctcgaaggttcctccctgctcacctgctattctagggagaccgggacaccaatctggacctcacggcttccccattgcgtttctgaggagtccctcgcctgtgataatccaggcctgcccgagaacgggtatcagatcctgtacaagcgactgtacctccccggagaaagcctgactttcatgtgttacgaaggattcgagctcatgggcgaagtgacaatcaggtgtattctgggccaaccttcccactggaatggcccattaccggtatgcaaggttaaccaagattcctttgagcatgcactcgaggccgaagcggcagcagaaacctcactagagggcggaaatatggctttggcgattttcattcccgtattgatcatatctttacttttgggaggagcctacatctatattacccggtgccgctactactcaaacctgaggctcccgctgatgtatagccacccttactctcaaattactgtggagacggagttcgacaaccctatctatgaaaccggggaaacccgggagtacgaggtgtcaatttag

SEQ ID NO: 239841 - DNA, 258 bp, synthetic construct
  misc_feature 1..258: note = Description of Artificial Sequence: Synthetic coding sequence
  source 1..258: mol_type = other DNA
ggatttggtactgacgtcgactacgagaccgcttttatacactatcgactggcctccgagcagcagcacagcgcacaagctatgttcaatctggggtacatgcatgaaaagggactgggcatcaagcaggacatccatcttgctaagcggttctacgatatggccgcatcccagccccgttgtacctcatcaagcctaccatctcccttgcagattggaagaagactcttccttgcagtgcacaccggcaataaatag

SEQ ID NO: 239842 - DNA, 2385 bp, synthetic construct
  misc_feature 1..2385: note = Description of Artificial Sequence: Synthetic coding sequence
  source 1..2385: mol_type = other DNA
atgcgagtaagaatcggcctgacactgttgctctgtgcggtgcttctgagcctggcctccgcctctagcgacgaagagggcagtcaggatgagtcactggactctaagacaactctcactagtgatgagagtgtcaaggaccataccacagccggacgtgtcgtcgccggacagatcttccttgacagcgaagaatcagagctggaatcctccattcaggaggaggaagatagtctgaagtcgcaggagggggagtccgtgactgaggacatttccttcctcgaaagtccgaaccccgagaacaaggactacgaagaacctaagaaggtgcgcaaacctgcactgacggcaattgagggtacagcccatggagaaccttgccatttcccattcctgtttctggataaagaatatgacgaatgcactagtgatggcagagaggacggcagactatggtgcgccaccacctacgactacaaggccgacgaaaaatggggattctgtgagactgaagaggaggccgcaaaaaggaggcagatgcaggaggccgagatgatgtatcagaccggaatgaagattctgaacggctccaacaagaagagccagaagagggaggcataccgctatctgcaaaaagccgcatctatgaatcacactaaagcactggaacgtgtgagctatgctctcctttttggcgactacttaccgcagaatattcaagcagctagagaaatgtttgagaagctcactgaagaagggagccccaagggtcagacggcgcttgggtttctatatgcctcgggattgggtgtaaacagctcacaagctaaggcactggtgtactacacctttggtgcacttgggggtaatctgatcgcacatatggttctaggctataggtactgggccggaatcggcgttttgcaatcctgcgagagcgctttaacacattaccgattagtcgcgaatcacgttgccagtgacatctctcttaccggcggaagcgtggtccagaggatcaggttaccggacgaggtggagaatccaggcatgaactcaggtatgctggaagaagacctgattcagtattaccaatttctcgcagaaaagggagacgtgcaggcccaggttgggcttggccagctgcacctgcacgggggtcgaggagtcgaacagaatcaccagcgagcgtttgactactttaatctggctgctaacgctgggaatagtcacgccatggcgttcttgggaaaaatgtattcggagggatctgatatcgtgccccagagcaacgaaactgctctgcactactttaagaaggcggcagatatggggaatccggtgggacagtctggtctcggtatggcgtatttgtacgggaggggtgttcaggtgaactacgatctagcactaaaatacttccagaaggctgcagagcagggttgggtggacggtcagctgcaactgggcagcatgtattacaatggaatcggagtgaagagagactacaaacaggcattaaagtatttcaacctggcgtctcagggagggcacatcctggctttctacaatctggcccaaatgcatgccagcggaacgggggtcatgcggtcctgtcatacagctgttgagctctttaaaaacgtctgtgaacgcggacgatggtctgagcggctgatgacagcctataatagctacaaagatggtgactataatgcggctgttatccagtatttactactggcggaacaagggtatgaagtcgcccagtccaacgcagcatttatcctggaccagagagaagcttccatcgtgggggagaatgagacctatcctagagcactcctgcactggaaccgcgcagccagtcaaggctacacagtcgccagaatcaaactgggggactatcatttctatgggtttgggacagacgtggactacgagacagcatttatacattacaggctggcctctgaacagcagcactcagctcaggccatgttcaatctgggctatatgcacgagaagggtcttggaatcaaacaggacattcatttagcgaagcgcttctatgacatggctgcagaggcctcgcccgacgcgcaagttcccgtgttcctggccttgtgcaaactgggcgtcgtgtactttctgcagtatattagggaaactaacatccgtgacatgtttacacagctggacatggatcaactcctaggccctgagtgggatctgtacctaatgactattattgcactgctgctggggactgtgattgcttaccggcagagacagcaccaggatatgcctgcacctaggcccccaggccctcgcccagctccccctcagcaggaggggccacctgaacagcagccaccacagtag

SEQ ID NO: 239843 - DNA, 906 bp, synthetic construct
  misc_feature 1..906: note = Description of Artificial Sequence: Synthetic coding sequence
  source 1..906: mol_type = other DNA
atgcgcgtcagaatcggacttacactcctgctctgcgccgtactcctgagtttggcgtccgcaagcagtgatgaagaaggatcccaggatgagtcacttgactccaaaactacactcacaagcgatgaatccgttaaggaccataccacagccggaagggtggtggcagggcaaatcttcttggactcagaggaatctgaactggagagttccattcaagaagaggaagacagtttaaagtcccaggaaggggaatcagtgacagaggatatcagcttcctggaatcccctaaccccgaaaataaagactacgaagagcctaaaaaagtgaggaagcccgcactgacagcaattgagggtaccgctcatggggaaccatgtcacttcccttttctgttcctggataaagaatacgatgaatgcacaagtgacggtcgggaggacggacggttatggtgtgcgacgacctatgattataaggcggatgagaaatggggcttttgcgaaaccgaggaggaggctgctaaacggcgtcaaatgcaagaggctgaaatgatgtatcagacgggtatgaagatcctaaacggctccaataagaagtcccagaaacgtgaggcttatcggtacctgcagaaggccgctagcatgaatcacaccaaagctctggagcgcgtttcgtacgctctcctctttggggattaccttccacaaaatattcaggccgctcgtgagatgttcgagaagttaaccgaagagggctcccccaaaggtcaaactgccctcggatttctgtacgcctcaggcctgggcgtcaactccagtcaggcaaaggcgctcgtgtactatacctttggggcactggggggtaatttgatagcgcacatggtgctcgtgtccaggctgtag

SEQ ID NO: 239844 - DNA, 2067 bp, synthetic construct
  misc_feature 1..2067: note = Description of Artificial Sequence: Synthetic coding sequence
  source 1..2067: mol_type = other DNA
atgaaaccactgtcactcctaatcgaaatcctcataattttgggtgtgactatcaaaaccatcaaggcagaagaacacaacaagcggcagaaagaaagaaatgtgacaacccaagtctctgtcaacgagatcaaacagtatctcagccatatccttgaacaaagaacttcttccaatgtcataaataaaagagagaacctgctggaaaagaaaaagaaccaaagaaagataagaattaagggaatccagaataaggacatccttaaacgaaacaagaatcatctccaaaaacaggccgaaaaaaacttcactgatgagggcgaccaactgtttaagatgggaattaaagtcctgcaacagagcaaatctcagaaacagaaagaggaagcatatctgctatttgccaaggccgctgatatgggcaatctgaaagctatggaaaaaatggccgatgcactgttgtttggaaatttcggcgtacagaacattacagcagctattcagttgtatgagtctctcgcgaaagagggatcctgcaaggctcaaaacgccttgggctttctctcttcctatggaatcggcatggagtacgaccaggctaaggcactaatttactacacattcggatctgctgggggaaacatgatgtcccaaatgatcctggggtaccggtacctgtccggaattaacgtgctgcaaaattgtgaggtcgctctctcttactacaaaaaggtggccgattatattgccgacacttttgaaaaaagtgagggcgtgcccgtggagaaagtacggctgacggaaagacccgagaatctgtccagcaactctgagatacttgattgggatatctatcagtattacaaattccttgcagaaaggggggatgtccagatacaggtgtcactcgggcagctccatctcattggtcgcaagggtcttgaccaggactattataaggccctgcactattttctcaaggctgctaaagcaggctcggccaatgccatggcattcattggaaagatgtaccttgagggcaacgccgcagtgccgcagaataacgctacagcgtttaagtatttctcaatggccgctagcaagggaaacgcaatagggcttcacgggctgggcttgctgtatttccacggaaagggcgttccgctgaactacgcggaagccctcaaatatttccaaaaagcggcagagaagggctggccggacgcgcaatttcagctgggctttatgtattattccggcagcggcatttggaaggattacaagttggcctttaagtatttttatcttgcctcacagtcaggccaacctctggctatttattacctcgccaagatgtatgccaccggaactggcgtggttcgctcgtgtcgaaccgccgtagagctctataagggggtgtgtgagcttggccactgggcagagaagttcctaactgcctattttgcctacaaagatggcgacattgattctagtctagtgcagtatgccctcctcgccgagatgggatacgaagtcgcccagtctaactcggcttttatactggagagcaagaaagcaaacatcctggagaaggaaaagatgtatccgatggcgctcctgctgtggaaccgggctgctatccaggggaatgcttttgctagagtcaagatcggggattaccattattatggatacggcaccaaaaaggattaccagacggctgccacccattactccattgccgctaataagtaccacaatgcccaagccatgtttaacttggcttatatgtatgaacatggcctcggcataactaaagatatacaccttgctcgcaggctctatgacatggctgcccagacctcacccgacgctcacatcccagtcttgtttgccgtgatgaaactggagacaacacatcttttacgggacatcctttttttcaatttcacaacccgctggaattggctcaagctcgacaatactataggcccacactgggatctgttcgtgattggattgattgttccagggttaattctgctcctgagaaaccatcacggctag

SEQ ID NO: 239845 - DNA, 1728 bp, synthetic construct
  misc_feature 1..1728: note = Description of Artificial Sequence: Synthetic coding sequence
  source 1..1728: mol_type = other DNA
atgaagccactcagtttgctcattgagattctgattattctgggagtgactattaaaactatcaaggctgaagagcataataaaaggcagaaagaacgtaatgtgacaacacaggtgtccgtgaacgagattaagcaatatctgagccacattctggaacagcgtacttccagcaatgtaatcaacaagcgggagaacctgctggagaaaaagaagaaccagcgcaagattcggattaaaggcatccagaacaaagacatcctcaaacggaataagaatcaccttcagaagcaggccgagaaaaattttacagacgagggggaccagctatttaaaatggggattaaagtgcttcaacagagcaagagtcagaagcaaaaagaggaagcctacctattattcgcgaaggctgccgatatgggcaatctgaaagcgatggaaaaaatggcggacgccctgctatttggtaactttggggttcaaaacatcacagccgcaattcagttgtacgaatctttggccaaggaagggtcctgcaaagcccagaacgcactgggctttctgtcatcgtacggtattgggatggaatacgatcaggctaaggcattgatatattacacgtttggcagcgccggtgggaatatgatgtcccaaatgatcctgggataccgctatctgagcggcattaatgttctgcagaactgcgaagtggccttgagttactataagaaggtggcagattacatcgccgacactttcgagaagtctgaaggggtcccggttgagaaagtgagactcacggagcggccagagaatttaagttctaactccgagatcctggattgggacatttaccagtactacaagtttctcgcagagagaggagacgtgcaaattcaggtttcccttgggcaactccacctgatcggaagaaaggggttggaccaggattactacaaggccctgcactatttcctgaaagctgctaaagcgggtagtgccaacgctatggcctttattggcaagatgtatctcgaagggaacgcagcagtgccgcaaaacaatgctaccgcattcaaatatttctccatggccgctagcaagggaaatgcgatcggactccacgggctagggctcttgtacttccatggcaagggggtgccgctgaattatgccgaggccttgaagtactttcaaaaggccgcagaaaagggttggccggatgcacagtttcagctgggatttatgtactacagcggctctgggatctggaaggattacaaactcgccttcaagtacttttacttggcctctcagtccggtcaacctctcgccatctactaccttgcaaaaatgtacgctacaggcactggggtagtcagatcctgtcggacggcggtagagaaacgtttgaccttcctcaagaagcgcaggtgcatacagtggaggttctcttacggaatcgagctgcctttcaaggatattcatctggcaaggcggttgtacgacatggctgctcagaccagtcctgacgcgcatatacccgtgttgtttgccgttatgaagctggagactactcacctgttgcgggacatcctgtttttcaatttcactacacgatggaactggcttaagcttgacaataccatcggccctcactgggacctattcgtaattggcttgatagttccaggacttattttgcttctgcggaaccaccacggctag

SEQ ID NO: 239846 - DNA, 1833 bp, synthetic construct
  misc_feature 1..1833: note = Description of Artificial Sequence: Synthetic coding sequence
  source 1..1833: mol_type = other DNA
atgattgcttcacagtttctttctgcactgacactggtgctcttgattaaggagtcaggtgcctggtcctacaatacatccacggaggcgatgacatatgatgaagcaagtgcgtattgtcaacagcgttacacgcatctggtggccattcagaataaagaagagatagagtacctgaattccatactgtcctactctccatcttactattggataggaatcagaaaggtgaataacgtctgggtatgggtgggcactcagaagcctctgacagaggaggccaagaattgggctccaggtgaacctaacaaccgacagaaggacgaggattgtgtcgaaatatacatcaaaagggaaaaggatgtgggaatgtggaatgacgagcgatgctcaaagaagaagttggcactgtgttataccgccgcatgcaccaacacttcctgctcaggccacggagagtgcgtggaaacaattaacaattatacttgcaagtgtgacccgggattttctgggctaaagtgtgaacagattgtcaattgcaccgccctcgagtccccagagcatgggtccctggtgtgctcgcatccacttggtaactttagctacaactctagttgctctattagttgcgacagaggatatctccctagctctatggaaaccatgcaatgcatgtcatcaggggagtggtctgccccaatccccgcttgcaatgtagtcgaatgcgacgctgtgactaaccctgccaatggctttgtcgagtgctttcagaatcctggctcatttccctggaatacgacctgcaccttcgactgcgaggaagggtttgaattgatgggtgcccagtctctccagtgtacctccagtgggaactgggacaatgaaaaacctacctgcaaggcagtgacatgccgggcagtgcgacaacctcagaatggcagcgtgaggtgctcacactctccggcaggagagtttacgtttaagtctagctgcaatttcacttgtgaagaggggttcatgctgcagggccctgcgcaggtagaatgtaccacccagggccagtggacacagcagattcccgtgtgcgaagcctttcagtgtacagccttgtctaacccggagagggggtacatgaactgtcttcccagtgcctccgggtcattcagatatggctcttcctgtgagttcagctgcgagcagggctttgtgttgaagggaagtaaaagactacagtgcgggcctaccggagaatgggataatgaaaagcccacctgcgaagccgtgaggtgcgacgccgtgcaccagcccccaaagggcctggtgagatgtgctcatagtcctatcggcgagtttacttacaagtcttcctgcgcctttagttgcgaggagggctttgagctccacgggtctacacaactagaatgcacctcccagggtcagtggaccgaggaagtcccttcttgtcaggttgttaaatgctcgtccctggccgttcccggtaagattaatatgagctgctctggggaaccggtatttggaacagtctgtaagtttgcctgccccgaaggctggactctgaacggtagtgccgctcgaacctgcggagcaacaggacattggtccggattactgcctacctgcgaagccccaacagagtcaaacattcccctcgtggctggtttgtccgctgcgggtctgtcactcctgacactcgcaccctttctcctctggctacgcaaatgcctaagaaaagccaaaaagttcgtgcccgcttcctcatgccagagtctggaaagtgacggatcctaccagaaaccatcgtatattctttag

SEQ ID NO: 239847 - DNA, 1455 bp, synthetic construct
  misc_feature 1..1455: note = Description of Artificial Sequence: Synthetic coding sequence
  source 1..1455: mol_type = other DNA
atgatcgcaagtcagttcctgagcgcacttacactagtcctcctgattaaggaatcgggcgcttggtcttataacaccagtactgaagccatgacttacgacgaagcgagcgcctactgtcaacagcgctacacacacctggtcgctatccagaacaaagaggaaatagagtatttgaatagtattctcagttattcgcccagctactactggatcggaattagaaaggtaaataatgtgtgggtctgggtgggtacacaaaagccgttgaccgaggaggccaaaaattgggccccaggggagccaaataaccgccagaaggatgaagactgtgtagaaatatacataaagagggaaaaagatgtgggcatgtggaacgacgaaagatgttctaagaaaaagttggctctgtgttatactgcagcctgtacaaacaccagctgttccgggcatggcgagtgtgtggagacaattaacaactacacctgtaaatgcgaccctggattttctggtctgaagtgcgagcaaatcgttaattgtacagctttagagagccctgagcacggaagcttggtttgctcccacccattgggcaatttttcctacaattctagctgttcaatcagctgcgaccgtggctacctaccctcatccatggagacaatgcagtgcatgagctccggcgagtggtctgccccaattccagcctgtaatgtggtggagtgtgatgccgtcactaatccggctaatgggtttgtcgaatgtttccaaaatcccggaagtttcccctggaacactacttgtacttttgactgcgaagaaggtttcgagctgatgggcgctcaatccctgcagtgcactagctcaggcaactgggacaatgaaaaaccaacatgcaaggcagtgacctgtagagcagtgcgccaacctcagaatggctccgtgagatgttcccatagccccgcaggagagttcacatttaaaagctcctgcaacttcacttgtgaggagggcttcatgctgcaaggacctgcgcaggttgagtgtacaactcagggccagtggacccagcaaataccggtctgtgaggtcgtgaagtgctcttcactggcggtacctggaaagattaacatgagctgcagcggtgagccagtctttggcacagtatgtaagttcgcttgcccagagggatggacactgaatggcagtgctgcacgcacatgtggggctacaggtcattggtcaggccttttaccaacctgtgaggccccaactgaaagtaacatccctctcgtcgccggtcttagcgcagctgggctgtcactgctgacactggcgccattcttgctttggttgcggaagtgtttgcgcaaagccaaaaagttcgtgcctgcctcctcttgtcagtcactagagtccgatggatcgtaccagaagccgagctatattctatag

SEQ ID NO: 239848 - DNA, 1458 bp, synthetic construct
  misc_feature 1..1458: note = Description of Artificial Sequence: Synthetic coding sequence
  source 1..1458: mol_type = other DNA
atgatagctagccaattcttatctgctctaacccttgttctccttataaaggagtctggcgcttggtcctacaatacgagcaccgaggctatgacgtacgatgaggccagcgcctattgccagcagcggtacacccatctggttgcgatacaaaacaaggaggagatcgagtacctcaactctatcctgtcatattctccctcttactactggatcgggatcaggaaagtcaataacgtatgggtatgggtgggaacgcagaagcccctgacggaggaagccaagaactgggcaccaggcgagccaaataatcggcagaaagacgaggattgcgtcgaaatatatattaagagggagaaagatgtgggcatgtggaacgacgagcggtgctcgaaaaagaaacttgcgctctgttatactgctgcctgcacaaatactagctgctcagggcacggggagtgcgtggaaacgattaataactatacctgcaagtgtgatcccggtttctctgggctaaagtgtgaacagatggtcgagtgcgacgcagtcaccaatcccgctaatggctttgtagagtgcttccagaaccctgggagctttccctggaacacaacctgtacgttcgattgcgaagaggggttcgaactcatgggggcacagagtctgcagtgcaccagttctggcaactgggataatgagaaacccacctgtaaggctgtgacctgccgggcagtccggcagccgcagaatggtagcgtgaggtgttctcactcccctgccggtgaattcacattcaaatcatcttgtaacttcacgtgcgaggaaggctttatgttacaagggcctgctcaggtggaatgtactactcaaggccaatggactcagcaaattcctgtatgtgaagcagtgcgctgcgatgcagtacaccagccccctaaagggctggtccgatgcgcacacagcccaatcggtgaatttacgtacaagtcctcttgcgccttcagctgcgaggaggggttcgaattgcatggctctactcaactggaatgcactagtcaggggcagtggacagaggaggttccaagctgtcaagtggtgaaatgcagcagcctcgccgtccctggtaagattaacatgtcttgctctggcgaaccagttttcggaaccgtgtgtaagttcgcttgtcccgaaggctggaccctcaatggttccgctgccagaacctgtggcgctacaggccactggtcaggcttgcttcccacatgcgaggcaccaacagaatcaaacattccccttgtggccggattatccgccgcaggactcagtctgcttacactcgccccatttttactatggctaagaaaatgcctgagaaaggccaagaagtttgtgccagcctcttcctgtcagtctctagagtcggatggctcctatcagaagccttcttatattctatag

SEQ ID NO: 239849 - DNA, 1644 bp, synthetic construct
  misc_feature 1..1644: note = Description of Artificial Sequence: Synthetic coding sequence
  source 1..1644: mol_type = other DNA
atgattgcatcccagttcttatctgcactgacactggtgctgctcataaaagagagcggcgcttggagctataatacctcaacagaagccatgacgtacgatgaagcctcagcttactgccaacaacgttacacacacctggtagccatccagaacaaagaagaaatcgaatatttaaattcgatcctttcctatagcccaagttattactggatcggaatccgcaaggtcaacaacgtgtgggtgtgggtcgggactcagaagccgcttaccgaggaagcaaaaaactgggccccaggagaacctaataatagacagaaggatgaggattgtgtggagatatacatcaaacgcgagaaggatgtaggcatgtggaacgacgagcgctgtagcaaaaagaagctagccttatgctacaccgctgcttgtaccaacaccagttgttcgggacacggcgagtgcgttgagacaataaataactacacttgtaaatgcgatccagggtttagtggcttgaagtgtgaacagattgtgaactgcactgcactggaaagccctgagcacggctccctggtctgtagtcaccctctcggaaactttagctacaatagcagctgcagcatctcctgtgaccgtgggtacttgccttcttccatggaaactatgcaatgtatgagtagtggagaatggtccgcccctatccccgcatgtaatgtagttgaatgtgatgctgtaaccaaccccgctaatggttttgtcgaatgttttcagaatccaggaagcttcccctggaacactacctgtacattcgattgcgaagagggctttgagctgatgggggcacaatctctccagtgcacctccagtggtaactgggataacgaaaaacctacatgtaaagccgtgacttgcagagcagttagacagcctcaaaatggatcggtgcggtgttcccatagtcccgctggagagtttacctttaaaagctcctgtaatttcacatgcgaagaaggatttatgctgcaggggcctgctcaggtagagtgcacaacacaaggccagtggactcagcagatccctgtttgcgaggctgtgagatgcgacgccgttcaccaacctcctaaaggtctggttagatgtgctcacagccctatcggcgagtttacttataaatcatcctgtgccttttcttgtgaagagggatttgagctccacggttctacccagcttgagtgcacatcccaagggcaatggactgaggaagttccaagctgccaggtcgtcaaatgctcaagtctcgccgtgcctggaaaaattaacatgtcctgcagcggggaacctgttttcggcaccgtctgtaaatttgcgtgcccagaaggctggacactgaacgggtccgccgctaggacgtgtggtgctacgggccactggtctgggctgctgcctacgtgcgaagctccaaccgagtccaacattccgctcgtggccggtttgagcgcggctggattgtccctgttaacactggcgcctttcctgctgtggttaaggaaatgcttgaggaaggccaaaaagtttgtccccgcatcttcctgtcagtctttggagtctgacggcagctaccagaaaccttcctacattctatag

SEQ ID NO: 239850 - DNA, 1644 bp, synthetic construct
  misc_feature 1..1644: note = Description of Artificial Sequence: Synthetic coding sequence
  source 1..1644: mol_type = other DNA
atgatcgccagtcagtttttatcagccttgacccttgtgctcctgattaaagaaagtggggcttggagctataatacttcaaccgaggctatgacctatgatgaagccagcgcatattgccagcaacggtatactcaccttgtcgcgatccagaataaggaagagattgaatatctgaacagcatcctgtcatatagtccaagttactactggattggtatacggaaggtcaataacgtctgggtctgggtcggaactcagaagcccctcaccgaagaagccaagaactgggctcccggagagccaaacaaccgccagaaggacgaggactgcgtggaaatatatattaaacgcgagaaggatgtggggatgtggaatgacgaacggtgcagcaaaaaaaagttggcactgtgctacaccgccgcttgtactaatacttcgtgtagcggacacggagagtgtgtagaaactataaataactatacctgcaagtgtgatccaggcttcagcggcctcaagtgtgagcagatcgtgaactgcacagcccttgaatcaccggagcacggatcactcgtgtgctcgcatcccctcggcaatttcagctacaactctagttgcagcatcagttgcgataggggatacctgccaagcagcatggagactatgcagtgcatgtcctcaggagaatggtcagcaccgatacctgcttgcaacgtggtcgagtgtgacgccgtgaccaaccccgctaacggcttcgttgaatgtttccagaacccagggagcttcccttggaatacgacatgcaccttcgattgcgaagagggctttgaattaatgggggctcaatctttgcagtgtaccagtagcggcaactgggacaacgaaaaacccacctgtaaagccgtgacatgccgcgcagtgcggcagccccagaatgggtctgtgcgctgctcacatagcccggctggtgaatttaccttcaagtcttcctgcaactttacctgcgaagagggtttcatgttgcagggcccagcacaggtagagtgtactacgcagggccagtggactcaacaaatacctgtgtgtgaagcatttcagtgcactgcattatctaatccagagcgaggatatatgaattgtctgccttccgctagtggatctttcaggtatggaagttcgtgtgagtttagctgtgaacagggctttgtattgaaaggctcaaagcgactccaatgtgggcctactggagaatgggataatgaaaaaccaacatgcgaagtggtgaagtgcagcagtcttgcagtcccaggaaagattaacatgtcatgctctggggagccggtgtttggtactgtttgtaaatttgcttgtccggaggggtggactctcaatgggtctgccgcaagaacctgcggagccacagggcactggtctgggttgctgcctacttgcgaagcacctactgaatccaatatccccctggtggccggtctctccgccgcagggttatcccttttgacactggctccctttctgttgtggctgcggaaatgcctgcggaaggcgaagaagttcgtgcccgcatctagctgtcagtccctggagtctgatggaagttatcagaagccctcctatatactgtag

SEQ ID NO: 239851 - DNA, 1455 bp, synthetic construct
  misc_feature 1..1455: note = Description of Artificial Sequence: Synthetic coding sequence
  source 1..1455: mol_type = other DNA
atgattgcatctcagtttttgtccgccctcacattagtgctgttgatcaaagagagcggtgcatggagttataatacgtctacggaagctatgacttacgacgaagcttccgcctattgccaacagcggtacacgcacctagttgccattcagaacaaagaggagatcgagtacctcaatagtattctctcctactcaccgtcctactactggattggcatacggaaggttaataatgtctgggtttgggtcggaacacagaagccgcttactgaagaggctaagaattgggcccctggcgagcccaataatcgacaaaaggacgaggactgcgttgagatttacatcaagcgcgagaaggatgtcgggatgtggaacgacgaacgatgctccaaaaagaagctggcactttgttacacggcagcctgtacaaacactagctgttcaggccatggcgagtgcgttgaaacaattaataactatacttgcaagtgcgaccctgggttctcaggcctgaagtgcgaacagattgttaattgcactgcactagaatctccagagcacgggtctcttgtttgcagtcaccccctgggcaacttttcttacaattcaagttgttcaatttcatgcgacaggggctatctgccctcctccatggagaccatgcagtgcatgagcagcggcgagtggtctgccccaattccggcatgtaacgttgttgagtgcgacgccgtgaccaatcctgctaacggattcgtggagtgctttcagaacccgggatctttcccatggaatactacatgcaccttcgactgtgaggaggggttcgaactcatgggcgctcagtctctccagtgcaccagctcaggaaactgggacaatgagaagcccacctgtaaggccgtgacctgcagagccgtccgacagccacaaaatgggtccgttaggtgctctcactcccctgccggtgaattcacgtttaagtcctcttgtaacttcacctgcgaagaaggtttcatgcttcaaggcccagctcaggtcgagtgcactactcagggccagtggacccagcaaatcccggtctgtgaggtcgtgaaatgctcttcactggctgtgcccggtaagatcaatatgagctgctctggagagccggtttttggaactgtgtgtaagtttgcttgtcctgagggatggaccctgaacggcagcgccgcacggacctgtggagccactgggcactggtcaggtttgttgccaacctgcgaagcgccaactgagtctaatattccgctcgtggctggcctgagcgcagctgggctgtccctcctgacactggcaccctttctactgtggctgcgaaaatgcctgagaaaagccaagaaattcgtgccagcttcatcatgtcagagcttagagtcagatggctcgtatcagaagcccagctacattctttag

SEQ ID NO: 239852 - DNA, 1458 bp, synthetic construct
  misc_feature 1..1458: note = Description of Artificial Sequence: Synthetic coding sequence
  source 1..1458: mol_type = other DNA
atgattgcctcccaattcctttcagctttgactctcgtacttcttataaaagagagtggagcatggtcctacaatacgtcaactgaagctatgacctacgacgaagcctcagcatattgtcagcaaagatacactcacttagtagccatacagaataaagaggaaatagaatacttaaattcgatactttcttacagcccaagttactactggattggcatccggaaggttaacaatgtttgggtgtgggtcggcacacagaagccactcacagaagaggcaaaaaattgggctcctggggaacccaataaccgccagaaggatgaagactgtgtggagatctatattaaacgggagaaggacgttggtatgtggaatgatgaacgttgcagcaaaaagaagctggccctttgttatactgcggcttgcaccaatacaagttgcagcgggcacggagagtgtgttgagaccatcaacaactatacttgcaagtgcgacccaggatttagtggacttaagtgtgaacagatggtggagtgtgatgccgtcacaaatcccgcaaacggatttgtggagtgtttccagaaccccggatcatttccctggaataccacttgtaccttcgattgcgaagaagggtttgaactcatgggtgcacagtccctgcagtgtacctcttccgggaattgggacaacgagaaacccacatgtaaggccgtgacctgtcgcgctgttaggcagccccaaaatgggagtgtgcgttgctcgcattcccccgcaggggagttcacttttaaaagctcatgcaattttacatgcgaagaaggcttcatgttgcagggaccagcacaggttgagtgtactacccagggtcagtggacccagcaaattccagtttgtgaggccgtgcgatgcgacgccgtgcaccagccacctaaaggattggttcgctgtgctcattctcccatcggggagttcacttacaagtcatcctgtgctttttcgtgtgaagaggggttcgaactacacggctccacccagctggagtgtacctcccagggtcagtggacagaggaggtcccctcttgccaagtagtcaagtgtagctcccttgccgtccccggaaaaatcaacatgtcatgttcaggcgaacccgtctttggtacggtgtgtaagtttgcatgtccagagggttggacattaaatggttccgcggcaaggacatgtggggctacaggccactggtcgggtcttctgccaacatgcgaggcccctacagagagtaacattccgttggtggctggcctctcggctgccggtctctccctgctgactcttgcccctttcctcttatggttacgaaagtgcctgcgcaaggccaaaaagtttgtgccagcatctagctgccagagcctagaaagcgatggttcctaccagaaacctagctatattttatag

SEQ ID NO: 239853 - DNA, 1644 bp, synthetic construct
  misc_feature 1..1644: note = Description of Artificial Sequence: Synthetic coding sequence
  source 1..1644: mol_type = other DNA
atgatcgcgtcacagtttttaagtgccttgaccctggttttattaattaaggaatctggcgcttggtcctataacacatccaccgaagctatgacttacgatgaagcatcggcctattgccaacagagatatacacatctcgtggccattcagaataaagaggaaattgaatatctcaacagtattctttcctactcacccagttactattggatagggatccggaaggttaacaacgtctgggtctgggttggtacacagaagccacttacggaagaggccaaaaactgggcccctggcgaaccaaataaccgacaaaaagatgaggactgtgtggagatatatattaagagggagaaggacgttggcatgtggaacgacgaacgttgtagcaagaagaagttggctctctgctatacagctgcttgtacaaacacaagctgttcaggccatggcgagtgcgtggagaccattaataactacacttgtaaatgtgaccctggattctccggccttaagtgtgagcagatcgtgaattgcacggccttagagagtccagagcacggatcgctcgtgtgttcccatcctctcgggaatttttcatataattcttcatgttctattagctgtgatcgtgggtatctaccgtcctccatggaaacaatgcagtgtatgtcatccggagaatggagcgctcctatcccagcctgtaatgttgtggaatgtgatgctgtgacaaatccggcaaacgggttcgtggaatgcttccagaaccccggaagctttccttggaacacaacttgtactttcgattgcgaggaaggatttgaactcatgggggcacagagtctgcagtgcacatccagcggtaactgggataatgaaaaacctacctgcaaggccgtcacctgccgagccgtgcgccagccacagaatggcagcgtgcggtgtagtcacagccctgccggagaattcacatttaagtcgtcctgtaacttcacttgtgaggagggctttatgcttcaaggacctgctcaggtagagtgcaccactcagggacagtggacccagcagatccctgtctgtgaggctgttcggtgcgatgcggtacaccagccacccaagggtctcgtgcgatgtgctcacagccccatcggagagttcacctacaaatccagctgcgccttctcttgtgaggaaggatttgaactgcacggctcgacccagctggagtgcaccagtcagggacagtggacagaggaggttcccagctgccaggtggtgaagtgctccagcttggccgttccgggtaagattaatatgagttgctccggtgagcccgtttttggcaccgtttgtaaattcgcttgtcccgaaggctggacacttaacggcagcgcagcccgaacgtgcggcgctaccgggcactggtccggactgctacccacatgcgaggctcctacagaatccaacattcccctcgttgccggactttccgcagctgggctgtccctcttgacactggctccttttcttctctggctgcggaagtgtttgcggaaggctaagaagtttgtcccggcatccagttgtcaatcacttgagtcggatggatcatatcaaaagccttcctatatcctatag

SEQ ID NO: 239854 - DNA, 1644 bp, synthetic construct
  misc_feature 1..1644: note = Description of Artificial Sequence: Synthetic coding sequence
  source 1..1644: mol_type = other DNA
atgatcgcttcacagtttcttagcgccttaaccttggttcttctgattaaggagagtggagcctggagttacaatactagcaccgaggccatgacctatgacgaggcctccgcgtattgccagcagcgctacacccaccttgtcgccatccagaataaagaggaaatcgagtatctcaattctatcttatcctactctccttcatattactggatcggaattaggaaggtcaacaatgtatgggtgtgggtgggcacccaaaaaccgcttactgaggaagccaagaactgggctcccggtgaacccaataacagacagaaagatgaggactgcgtcgagatctatatcaaaagggaaaaggacgttgggatgtggaacgacgagagatgctccaagaaaaagttagctctgtgctacacggccgcatgcaccaatacgagctgctctggccatggtgagtgtgtagagacgataaataactatacgtgtaaatgtgatccagggttctcgggtcttaagtgtgaacagattgttaattgcactgccctggagtcacccgaacatgggtctcttgtctgttctcaccctctcggtaacttctcgtataactctagttgctctatttcctgtgacagggggtatctgccctcctccatggagactatgcagtgcatgagttccggggagtggtcagccccaatccccgcttgtaacgtcgtagagtgcgacgccgtgactaaccccgcaaatgggtttgtggaatgttttcaaaatccaggatccttcccgtggaacactacatgcacctttgactgcgaggagggttttgagctcatgggggctcagtccttacaatgtacctctagcgggaattgggataatgaaaagccaacctgcaaagccgttacatgccgagctgtccggcaaccccagaacggctctgtgcggtgctcacacagccctgcaggtgaatttacctttaagtccagttgtaatttcacgtgcgaagaaggctttatgctacagggcccagcccaggtggagtgtacaactcagggacagtggacacagcagatcccagtctgcgaagcgtttcaatgtacagcgctctccaatccggagcggggatatatgaactgcctgccatcggctagtggatctttcaggtacgggagcagctgtgagttctcatgtgaacagggattcgtgctcaaagggtccaagcgactgcaatgcggtcctacgggagagtgggacaacgaaaagcctacatgcgaagttgtgaaatgcagctcactggctgtacctggaaaaatcaacatgtcgtgttccggagagccagtgttcggcactgtttgtaagtttgcctgtccagagggatggacgcttaatggctcggctgcgaggacgtgtggagcgactggtcactggagtggcctgctgccaacatgcgaggccccaacagagtccaacatccctctggtggctggtctgtcagcggcaggcctctccctcctcaccctcgcacccttcctgttatggcttagaaagtgcttgagaaaggctaagaagtttgtgcctgcctcttcttgccagtccctggagtccgacggctcttaccagaagccgagctacattttgtag

SEQ ID NO: 239855 - DNA, 1158 bp, synthetic construct
  misc_feature 1..1158: note = Description of Artificial Sequence: Synthetic coding sequence
  source 1..1158: mol_type = other DNA
atgggatgcaggagaaccagggagggacccagcaaggctatgatctttccttggaagtgccagtccacacaaagagacctgtggaatatttttaaactctggggatggacaatgctgtgctgtgacttcctggcacatcacggtacagattgttggacttatcattactcggagaaacctatgaactggcagagggccaggcgtttttgcagagataattataccgatcttgtggcaatacagaacaaagccgaaatcgaataccttgagaaaacgttgcctttttccaggagctactattggataggaatacggaaaatcggaggcatctggacatgggtgggaacaaacaaatcattgacagaggaagctgagaactggggagacggcgaacctaacaataaaaaaaacaaggaggattgtgtggaaatctacatcaagcggaacaaagatgccggaaaatggaatgatgacgcttgccacaaacttaaagcagcactctgttataccgcatcctgccagccatggtcctgctctgggcacggagaatgtgtcgagattatcaacaattacacctgtaactgcgacgtggggtattacggccctcagtgtcaatttgtgatccaatgcgaacctttagaggccccagagttgggtaccatggactgtacgcaccccctaggaaatttctctttcagcagccaatgcgcatttagctgcagcgagggcacgaatctaacgggtatcgaagaaacaacatgcgggccatttggcaactggtccagcccagaaccaacttgccaagttattcagtgcgaacccctctcagcaccggacctggggatcatgaactgctcgcaccctctggcctcgttttcatttacgtctgcttgcacatttatatgtagcgaggggaccgaactgatcggaaagaagaagaccatatgcgaatcgagtggaatctggtccaatcccagtcccatctgccagaagctcgacaagagttttagtatgatcaaagagggggactacaatccacttttcataccggtagcggttatggtgacagccttctctggactcgcttttattatttggctggccagacggcttaaaaaggggaagaagtccaagaggagcatgaatgatccttactag

SEQ ID NO: 239856 - DNA, 2493 bp, synthetic construct
  misc_feature 1..2493: note = Description of Artificial Sequence: Synthetic coding sequence
  source 1..2493: mol_type = other DNA
atggctaattgtcagatcgcaattttgtaccagcgcttccaacgcgtggtgtttggcatctctcagttactctgcttctccgccctcatcagtgaactcacaaaccagaaggaggtggccgcatggacctatcattacagtaccaaagcatatagttggaacatttccagaaagtattgccagaaccgttacacagaccttgtggccatccagaataaaaatgagatcgattacttgaataaagttttaccttattatagttcttactactggataggcattaggaaaaataataaaacctggacttgggtgggaaccaagaaggccctcacaaacgaggccgaaaactgggctgacaatgaacctaacaataagaggaacaatgaagattgcgttgaaatttacatcaagagcccatcagctccgggtaaatggaatgatgagcattgcctgaagaagaaacatgccctttgctacacagcatcctgccaggacatgtcatgctcgaagcagggagagtgcctggaaactatcggcaactatacttgcagctgttaccccggtttctacggaccagagtgcgaatacgttcgggaatgtggcgagctggagcttccccaacacgtgcttatgaattgcagccatcccctcggcaatttttcatttaactcccagtgtagcttccactgcacagacggataccaggttaatggaccaagcaaactggagtgtctggcttccgggatctggaccaacaagccacctcagtgcctcgctgcccagtgccctccgctgaagataccagagagggggaatatgacctgcctgcatagtgccaaagcctttcagcaccaatcatcctgtagcttctcatgcgaagaaggctttgctctggtagggcctgaggtcgtgcagtgtacagcctctggcgtctggacagcacccgctcctgtctgcaaagccgtccaatgccagcatttagaagctcctagcgaaggcaccatggactgtgtgcatcctcttaccgcctttgcctacgggagtagttgcaagtttgaatgtcagccagggtaccgagtccggggactagatatgctccggtgtatcgattcaggccactggtcggcaccccttccaacatgtgaggctatttcttgcgagcccctagagagtcccgttcacggtagcatggattgcagcccgagcttaagagcatttcagtacgatacaaattgcagttttcggtgcgccgagggctttatgctgcggggtgcggatatcgttagatgcgacaacctgggtcagtggactgcgccagctcctgtgtgccaggcgcttcagtgtcaggatcttcctgtgcctaatgaagctcgtgtgaattgcagccaccccttcggcgctttcagataccagtcggtgtgttcctttacatgtaatgagggtctgctcctggtaggtgccagtgtcttacagtgtctcgccaccggtaactggaactctgtgcccccagaatgtcaggcgatcccctgtactccgctgttatccccgcaaaatggcacaatgacctgtgtccagccgttgggctcgagctcctacaaaagtacctgccagttcatttgtgacgagggctactcgctgtctgggccagagcggctggattgcactagatcaggtcgatggactgactcccctcctatgtgcgaggccatcaaatgccctgagcttttcgctcccgagcaaggatcactcgattgcagcgacactaggggagaatttaacgtgggctcaacttgtcattttagttgtgataacgggttcaaactggagggaccaaataacgtcgagtgtacaaccagcgggaggtggtcagccactccgccaacttgcaagggaatcgcttctctgcccacccccggtgtgcagtgcccagctctcactacacctggccaggggaccatgtactgcaggcatcacccaggcactttcggctttaacaccacttgttactttgggtgtaatgcgggttttactctcataggggattcgactctttcctgccgacccagtggacaatggaccgccgttactcccgcttgccgagctgtcaaatgttccgaactccatgtcaacaagccaatcgctatgaattgctccaatctctggggcaacttttcttatgggtccatatgttcatttcactgcctggaaggccaactgctaaatggatccgcccaaactgcctgccaggagaatggacactggagcacaacagtcccaacttgccaggcaggacctctcaccattcaagaggcattgacttacttcgggggagctgtggcgtctacgattggactgattatggggggtacccttctcgctctcctgagaaagaggtttagacagaaggatgacgggaaatgccccctgaacccgcacagccacttgggaacctatggcgtgttcacgaacgctgcttttgatccgagcccttag

SEQ ID NO: 239857 - DNA, 2307 bp, synthetic construct
  misc_feature 1..2307: note = Description of Artificial Sequence: Synthetic coding sequence
  source 1..2307: mol_type = other DNA
atggccaattgccagattgccatcctctatcaaagatttcaacgtgtggtctttgggatcagccagcttctatgctttagcgctctgatttccgaactgactaaccagaaagaagtggccgcatggacgtatcactacagtacgaaagcgtatagttggaacatcagtagaaaatattgccaaaacaggtacacggacttagtcgctattcaaaataaaaatgaaatcgattatctgaacaaggtcttgccttactattcatcttactactggattggcattaggaaaaacaacaagacctggacttgggttggtacaaagaaggcactgaccaacgaagcggagaattgggcagataacgagccaaataacaagcggaacaacgaagactgcgtggagatctatattaaaagccccagtgcccctgggaaatggaacgatgagcactgccttaagaagaaacacgccttatgttacacagccagctgccaagacatgagctgctcaaaacagggcgaatgtcttgaaacgatagggaactatacttgttcttgctatcctggattttatggaccagagtgtgaatatgtgagagagtgtggggagttggagttaccacagcatgtactgatgaactgttctcacccattaggaaacttctccttcaactctcagtgttcctttcactgcaccgatggctaccaggttaatggccctagtaagttggagtgtctggcaagcggaatctggactaacaagcctccccagtgcctggcagctcagtgcccgcctctcaaaatccccgaaagaggtaacatgacatgcctgcactcagccaaggccttccagcaccagagcagctgttcattcagctgcgaagaaggttttgccttggtagggccagaggtggtgcaatgtacagcatcaggcgtgtggacagctcctgccccagtgtgtaaggccatatcatgcgaacccctcgaaagcccagttcatggaagcatggattgtagcccatctctaagggccttccagtatgacacaaactgctccttcagatgcgcggaaggattcatgttacgcggagcagatatcgtcagatgtgacaaccttggccagtggactgcacctgctcccgtttgtcaggcgctacagtgtcaggacttgcctgttccaaatgaagccagggtgaactgctcccaccctttcggcgcattcaggtaccagagcgtatgcagcttcacatgcaacgagggtctgctcttagtgggagcctctgttctgcagtgcctggcgactggcaactggaacagtgtgccccctgagtgccaggccatcccatgcactcccctcctgtccccacagaatggcaccatgacctgcgttcagcccctgggatcttctagttataaaagcacttgccagttcatctgcgacgaggggtattccctctccggaccagaacgcctcgattgtacccggtcaggtcgctggactgatagcccacccatgtgcgaagcaatcaagtgcccagagttgttcgcaccggagcagggttcactggattgttccgataccagaggagaattcaacgtcgggagcacttgccactttagttgcgacaatggctttaagctggaagggccaaacaatgtggaatgcactacaagcgggaggtggtcagccacccccccaacctgcaaaggtatcgcctctctccctaccccgggagtgcaatgtcccgctctcacaaccccaggccagggcactatgtattgcaggcatcatcctggcacctttggttttaacacaacatgttatttcggctgtaatgcaggttttacacttataggggactcaacgctgtcatgccgaccttccggtcagtggaccgcagtaacaccagcctgccgagctgtcaaatgctctgagctgcatgtcaacaaaccaatagctatgaattgcagtaatctgtggggcaatttctcatacggatccatatgtagctttcattgtctggagggccagttgctcaacggctcggcccaaaccgcgtgtcaggagaatgggcactggagcactaccgtacccacctgccaggccggacccttgactatccaggaagcactgacatactttggtggagctgtggcttcaaccattggactgatcatgggaggcaccctcctcgcgcttctaagaaaacgtttccggcagaaagatgatggaaagtgcccactgaatccccattcccacctgggcacctatggcgtgttcacaaacgccgcattcgatccctctccttag

SEQ ID NO: 239858 - DNA, 2307 bp, synthetic construct
  misc_feature 1..2307: note = Description of Artificial Sequence: Synthetic coding sequence
  source 1..2307: mol_type = other DNA
atggctaactgtcaaatcgctattctctatcaacgattccagagggtagtgtttgggatttcacagcttctgtgctttagcgccctgatcagcgagctgacaaatcagaaagaagtggccgcatggacgtaccactactctaccaaggcgtactcctggaacatctcccggaaatactgtcagaacagatacacagacctggtcgccatccagaacaagaacgagatcgactatctgaacaaggttctcccatactactcttcctactactggatagggatccgcaaaaataataagacttggacttgggtgggcacgaagaaggcacttaccaacgaggccgagaattgggccgataacgagcctaataataagaggaacaatgaggattgtgtcgaaatctatataaagtcaccttctgcccctggcaagtggaacgacgaacactgcctgaaaaagaagcacgcactatgttacaccgcttcctgccaagatatgtcatgctcaaaacagggcgagtgcctggaaacgatcggaaattatacttgtagctgctatcctgggttttacgggccagaatgcgagtacgtccgagagtgcggagaactagaattgccccaacatgttcttatgaactgcagccaccctctgggcaacttttctttcaacagccagtgcagttttcattgcactgacggctatcaggtgaacggcccttctaagcttgagtgcctcgcttccggaatctggacaaataaaccgccacagtgtctggcagtgcagtgccagcacctcgaggcaccctctgaaggcactatggattgtgttcatccgctgacagcctttgcctacggatcatcatgtaagtttgaatgccagcctgggtacagggttcgaggtcttgacatgttgcgatgtattgattctgggcactggtctgctcccttgcccacctgcgaggccatctcatgcgagcctctggaatctcccgtgcacggaagtatggactgctcaccgtccttacgtgcctttcagtatgacacaaattgctccttccgttgcgcagaagggtttatgttgagaggagcagatattgttaggtgcgataatttggggcaatggacagcccctgctccagtgtgccaggcattgcagtgccaagatctgcctgtgccaaatgaggccagggtgaattgctcccacccttttggggcttttcgttaccagagcgtgtgctccttcacgtgcaacgagggtctcttgctcgttggagcaagtgtgctgcagtgcttagccaccggaaattggaactctgtccctcccgaatgtcaggctattccctgcacaccactgctgtccccacagaatggaacgatgacatgcgtgcagcctctgggcagtagcagttacaagtctacctgtcagtttatctgcgatgagggttattctctgtcaggtcccgagcggctggattgcacaaggagcggccgatggacagatagtccacccatgtgcgaggcgatcaagtgtcctgagctctttgcccctgagcagggttctctggactgctcagatactaggggcgagttcaatgttggcagtacatgtcactttagctgcgataacggtttcaagttagaaggtccaaacaacgtagaatgtactaccagcgggagatggagtgccactcctcccacatgtaaaggcatcgcaagcctaccaaccccaggagttcagtgccccgctctcactacgccagggcaaggcacaatgtactgtaggcatcacccaggtaccttcgggtttaataccacatgttacttcggctgcaatgctggcttcactctgattggagactcaacactgagttgtcgtcccagcgggcaatggaccgctgtcactcccgcttgcagagccgtgaaatgctctgagctgcatgtcaacaagcccatagcaatgaactgtagtaatctctggggcaatttttcttacggctcgatctgttcgtttcattgccttgaggggcagctcttgaacggaagcgcccagaccgcctgccaagaaaatgggcactggtcaaccacggtgcccacttgtcaggccggtccgctaaccatccaggaagccttgacctactttgggggtgcagtggccagcaccatcggcctgatcatggggggtaccttgttagcacttctgagaaagcggttccggcagaaagacgacggcaaatgccccctcaacccacactctcacctcggaacatatggggtattcacgaatgcagccttcgatccttccccttag

SEQ ID NO: 239859 - DNA, 1941 bp, synthetic construct
  misc_feature 1..1941: note = Description of Artificial Sequence: Synthetic coding sequence
  source 1..1941: mol_type = other DNA
atggctaattgccaaatcgccattctgtatcagcggttccagcgagttgtttttgggatcagccagttactctgtttttccgccctgatatctgagctcaccaaccaaaaagaggtggctgcctggacatatcactattcaactaaggcatactcctggaacatcagccgcaagtactgccaaaatagatacacagaccttgtggccatccaaaataagaacgaaatcgactacctcaacaaggtgctcccctattattcctcttactattggattggtattcggaaaaacaataagacatggacatgggtgggcacaaagaaagccctaactaatgaagcagagaattgggccgataatgagccaaataataagcgcaacaacgaagactgcgtggagatctatatcaagtctccctctgcaccgggaaagtggaacgatgagcattgccttaaaaaaaaacacgcgctgtgttatacggcctcatgtcaggatatgtcttgcagtaagcagggagagtgcctggagacaatcggaaactatacttgttcttgttacccaggcttctacggcccagaatgcgagtacgtcagagagtgtggagaacttgaactaccacagcatgtgttgatgaactgctcgcaccctttaggaaatttttccttcaattcccagtgctcatttcattgtacagacgggtaccaggtgaacggaccatctaagctcgaatgccttgcaagcgggatatggactaataaaccgccacaatgcctggctgctcaatgtccacccctcaaaatcccagaaagggggaacatgacatgtctgcatagtgccaaggcgttccagcaccagtcttcctgcagcttctcttgtgaggaaggctttgctctggtggggccagaagtcgtgcagtgtaccgcgagcggtgtctggactgctcccgctcccgtgtgtaaggcaatctcgtgcgagccactcgagagccccgtccacgggagcatggattgttctccttctttgcgagcatttcaatatgacacaaattgcagttttagatgcgccgagggttttatgctgaggggtgccgacatcgtgcgctgtgataacctggggcaatggacagccccagctcctgtctgccaggctctgcagtgtcaggacctgcctgtgcctaacgaggcccgagtgaattgcagccatcccttcggtgcgtttcgatatcagagcgtgtgctctttcacctgcaacgaaggtttactcctcgtcggggcttctgttctgcaatgtctggctaccggtaactggaacagcgtgcctccagagtgtcaggggaaatctattgcttctttgcctacacctggggtccagtgtccggctctgacaacacctgggcagggcacaatgtactgtagacatcaccctggaacgttcggatttaacaccacctgctattttggatgcaacgccggatttactctcatcggtgactcgaccctgagctgtagaccttccggccagtggaccgccgtcacccccgcttgcagggcagttaaatgttctgagctccacgtgaataaaccgatcgctatgaattgctcgaatctgtgggggaatttcagttacggatctatttgttcatttcactgcctagagggccagctgctcaatggtagcgcccaaactgcctgtcaggaaaacggacactggtcaaccactgtgccaacatgccaggcaggtccactgacaattcaggaagctttgacctactttggcggagcagtcgcttcaacaattgggttaatcatggggggtaccctgcttgcacttttgcgtaagcggtttcggcaaaaagacgatggcaaatgccccctgaatcctcatagccaccttggaacctacggagtgtttactaacgcagctttcgacccatctccgtag

SEQ ID NO: 239860 - DNA, 2493 bp, synthetic construct
  misc_feature 1..2493: note = Description of Artificial Sequence: Synthetic coding sequence
  source 1..2493: mol_type = other DNA
atggcaaattgccagatcgctatcttatatcaaagattccagcgcgttgttttcggaataagtcaactcttgtgcttttcggccctgatatccgagttgacaaatcaaaaggaggtagccgcatggacctaccactacagtactaaagcttatagttggaacatctctcgtaagtactgtcagaacagatacaccgaccttgtggcgatacagaacaagaatgagatagactatctaaataaagtcctgccatactactcatcgtattactggatcggaatcaggaagaataacaagacttggacctgggtaggaacgaagaaagccctcacaaacgaggcagagaattgggctgacaacgaaccaaacaacaaaaggaataacgaggactgcgtggagatttatatcaaaagtccttccgccccagggaagtggaacgacgagcactgcctcaagaaaaagcacgctctgtgttacactgcgagctgccaggacatgtcctgtagcaagcagggcgaatgcctggaaactataggtaattacacatgttcatgttacccgggtttctatgggccagaatgcgaatacgtgagagaatgcggtgagctggagctcccccagcatgtcctgatgaattgctcgcatccattaggaaatttttccttcaactcccagtgctcattccattgtacagacggttatcaagttaacggaccctccaaactggaatgcctggcctcagggatttggacaaacaaaccacctcagtgcctggcggcacagtgccctccgctcaaaattcctgagcgaggaaatatgacatgccttcatagtgctaaggcatttcaacatcagagcagctgctctttttcctgcgaggaaggttttgcactggttggtcccgaagtggtgcagtgtactgccagcggagtttggacagccccagcccctgtgtgtaaggccgtgcaatgccagcaccttgaggctccctcggagggaactatggattgtgtccaccctctgaccgcattcgcatatgggtcaagctgcaagtttgaatgccaaccgggataccgcgtgagaggtctggatatgcttcgctgtattgactctggtcactggagcgcccctctgcctacctgtgaggctatatcatgtgaacccctcgaaagcccggtacacgggtctatggattgctccccgtcacttagagcttttcagtacgatacgaactgctcttttaggtgtgccgaaggattcatgttacgtggagcagatattgttcggtgtgataacctgggccaatggactgcccctgctcctgtatgtcaagctctgcagtgtcaggatcttcctgtgccaaacgaggctagagtgaattgttcacatccttttggggctttcagatatcagagcgtgtgttcctttacgtgcaatgaggggctgctgttggttggggcatccgtccttcagtgcctggccactggcaactggaacagcgtgcctccagagtgtcaggcaattccatgtacccccctgctgtcgcctcagaacgggaccatgacctgtgtgcagcctttgggcagttcaagctataaaagcacatgccagttcatatgtgatgaagggtattctttgagcggcccagagcgcctggattgtactcggtctgggcgttggactgacagccctccgatgtgtgaagcgattaagtgccccgagttattcgccccagagcagggctcactggactgtagcgacacccggggagagttcaacgtaggttcgacatgccactttagttgtgacaacgggttcaagttagagggcccaaacaatgtagagtgtacgacctctggtaggtggtcggccacaccacccacctgcaaagggattgcctcgctgcctacaccaggcgtgcagtgtccagccttgacaactccaggacaggggaccatgtattgccgccaccatccagggacgtttggcttcaatactacctgttactttggctgcaacgcaggttttactctgataggtgactccacactgtcttgccgaccctccggccaatggacagccgtgacacccgcttgccgtgcagtcaaatgctctgagctccacgtgaacaaaccaatcgctatgaattgtagtaatctgtgggggaacttttcttacggaagcatctgcagcttccattgtctggagggccagttgctgaacggtagcgctcaaacagcctgccaggagaacggccattggagtacgacggtgcccacttgtcaggctggcccactgaccatccaggaggccttgacatattttggcggagctgtagcttctacgatcggattaatcatgggcggaacattgttagcgctcctccgcaagcgcttccgacagaaagacgatggcaaatgtcctctcaaccctcactcccacctgggaacctacggcgtgtttactaatgccgcttttgatcctagcccctag

SEQ ID NO: 239861 - DNA, 1935 bp, synthetic construct
  misc_feature 1..1935: note = Description of Artificial Sequence: Synthetic coding sequence
  source 1..1935: mol_type = other DNA
atggctaattgccagatagctattctctatcagaggtttcagcgcgtcgtcttcggcattagccagctgctatgcttttcagcacttatttccgagcttacaaaccagaaagaggtcgcagcttggacgtaccactacagcaccaaggcttactcctggaatatctcccggaagtactgccagaacaggtataccgatctggtcgccattcagaacaagaacgaaatcgactacttgaataaggtgttgccctattacagttcatactattggatcgggattagaaagaacaacaaaacatggacgtgggtaggaaccaaaaaggccctgacgaacgaggccgagaattgggctgacaatgagccgaacaacaagcgaaacaacgaagactgtgttgaaatctatattaagtccccatctgcacctggcaagtggaatgacgaacactgcctgaaaaagaagcacgccctgtgctataccgcctcatgtcaggatatgagctgcagcaagcaaggcgagtgcctcgaaaccatcgggaactacacatgctcatgctaccctggattttacggcccagagtgtgagtatgtccgggaatgcggggaattagaattaccacaacacgtgttgatgaactgcagccatccgttaggaaatttctcattcaattcccaatgtagctttcactgtaccgacgggtaccaggtgaatggaccttccaagctagaatgtcttgcttcaggcatctggaccaacaaaccccctcaatgtctggccgctcaatgcccaccactgaaaatcccggaacgaggcaacatgacctgcttgcactccgccaaagctttccagcatcaaagctcttgctctttctcatgtgaggagggcttcgcactggtggggcctgaggttgtccagtgtacagcctccggtgtgtggacagccccagctcccgtgtgcaaagcacttcagtgtcaggatttgcccgtgcctaacgaagctagggtgaactgctctcacccctttggggcatttagatatcagtccgtctgtagcttcacttgcaacgaaggcttgcttttggtgggtgcctcagtcctccaatgtctggccacaggaaactggaactcagttccacccgagtgtcaggccatcccgtgtacacctttactgagtccccagaacgggactatgacctgcgtgcaacccctgggtagcagctcgtacaagagcacttgtcagttcatttgcgatgagggatatagtctctccgggcctgagaggctggactgtactagatctggcaggtggacggattccccacccatgtgtgaaggaattgcttcactcccaaccccaggcgtacagtgtccggcactgaccacaccaggccaaggcacaatgtattgtcgtcaccatcccggtacctttgggtttaacacaacctgctattttggctgtaatgcaggcttcacgcttattggagactctactcttagctgcagacctagcggacagtggaccgctgtgacaccagcttgccgcgcagtgaagtgctccgaactacacgtaaataaaccaattgcaatgaattgtagtaacctgtggggaaatttttcctatgggtccatctgctccttccattgcctggaggggcagctgctaaacggatcagcccagacagcttgtcaggaaaacgggcactggagcaccacggtgcctacctgccaggccggacctctcacaattcaggaggcgctaacatattttggaggcgctgttgctagtacaattggactcatcatgggcggtacacttttggccctattgcgtaaaaggttcaggcagaaagatgacggaaaatgcccattgaaccctcattctcacttagggacctatggcgttttcaccaacgctgcctttgatccttccccgtag

SEQ ID NO: 239862 - DNA, 1941 bp, synthetic construct
  misc_feature 1..1941: note = Description of Artificial Sequence: Synthetic coding sequence
  source 1..1941: mol_type = other DNA
atggctaattgtcagatcgctattttataccaacggtttcagcgagttgtgttcggaatctcacagctgctttgttttagtgccctgatttcagaactgaccaaccagaaggaggtggctgcatggacgtaccattatagtaccaaggcctactcttggaacatctcacggaagtactgtcaaaaccgctacacagacctcgtggcaatccagaataagaacgaaattgactatttaaacaaagttcttccatactacagctcctattactggattggaatcagaaagaacaataaaacttggacctgggtgggcacgaagaaggccctcaccaacgaggcggagaattgggctgacaacgagcccaacaacaaacgcaataatgaggattgcgtggagatatacataaagagcccatctgctccaggtaagtggaacgacgagcattgtttgaaaaagaaacacgctctttgctacacagccagctgccaggatatgagctgctctaaacaaggggagtgtctggagaccattggcaactatacttgctcttgctacccgggtttctatgggcctgaatgtgaatacgtaagagaatgcggcgagttagagctgccacagcacgtgttgatgaactgttcccatccactcgggaatttttcattcaatagtcagtgttcttttcattgtactgacggctaccaggtaaacggaccctctaagctggaatgccttgcgagtggtatttggacgaataagccgccacagtgtcttgcagcccagtgccctccactgaaaataccggagcgcggaaatatgacgtgcctgcattccgcaaaagcctttcaacaccagtcctcctgcagctttagctgcgaggaaggatttgcactggtggggcctgaagttgttcagtgtacagcctccggagtctggactgccccagctcccgtgtgcaaggccatctcctgtgaacctctggagagccccgtgcacggtagcatggactgctctccctcattgagagcctttcagtacgataccaattgcagtttccgatgtgccgagggcttcatgctgcggggagcagacatagtacgttgcgacaatcttggacagtggactgcccctgcccctgtttgtcaggccctgcagtgccaagacctgccagtcccaaacgaagctcgcgtgaactgttcccacccttttggggctttccgctatcaaagcgtgtgctcattcacgtgcaatgagggcttgcttctggtgggagcatctgtgctccaatgcctggctacaggcaactggaattccgtccctccggaatgccagggaaaatcgattgcatccctgcctacacccggtgtgcagtgcccagcgcttaccacgcccggacaggggacaatgtactgtcggcatcacccagggacgttcgggtttaacaccacctgttatttcggctgtaacgctggctttacacttataggagacagtaccttgtcgtgtcgtccgagcggccagtggaccgcagtgactcccgcttgtcgggcagtgaagtgttccgaactgcatgtgaacaaacctatcgcaatgaattgctctaatctgtgggggaatttttcatacgggtccatttgttcttttcactgtctggaaggtcagctcctgaacggcagcgctcagaccgcctgccaggagaacggccattggtctaccaccgtcccaacatgtcaagccggacctctcacaatccaggaagctctgacatatttcggaggcgctgtggcgtcaaccatagggctgataatgggtggaaccctactggccttactaaggaaaagattccgccagaaagacgacggcaagtgtcccctgaacccacacagccatcttggcacatacggcgtcttcacaaacgctgcctttgacccaagcccatag

SEQ ID NO: 239863 - DNA, 2307 bp, synthetic construct
  misc_feature 1..2307: note = Description of Artificial Sequence: Synthetic coding sequence
  source 1..2307: mol_type = other DNA
atggccaattgccagatagccattttgtatcaaaggtttcagagagtcgtttttggtatctcccaattactgtgtttcagcgctctgatctccgagctgaccaatcagaaggaagtcgccgcatggacatatcactattctaccaaggcatatagctggaacatttctagaaaatattgccaaaaccgctacacagatctcgtggctattcaaaataaaaatgaaatcgactacctcaataaagtgcttccatactattctagctactactggatcggcattcggaaaaacaataaaacctggacgtgggtgggtaccaaaaaggccctcaccaatgaggctgaaaactgggccgataacgagcccaacaacaagcgcaataatgaagattgcgtggagatatacatcaagtcaccttcagcacccggaaaatggaacgacgagcattgtctgaagaaaaagcatgctctctgctacaccgcaagctgccaggatatgagctgttcaaagcaaggggagtgccttgaaacgatcgggaattacacttgctcttgttatccaggattttacggtccagaatgcgagtatgtgagggagtgcggcgagctggagttacctcaacacgtcctcatgaattgctctcaccctctgggcaacttctccttcaattcacagtgcagttttcactgtactgacggctatcaggtgaacgggccttcaaaactcgagtgtctggccagcgggatctggacaaataagccaccccagtgtttggctgtgcagtgccagcacttagaagctccaagcgaaggaacgatggactgcgtgcacccgttaacggccttcgcttacggctcctcctgtaagttcgagtgtcagcctggctacagggtcaggggcctggatatgcttcggtgtattgattccgggcactggtccgcccctctgcctacctgcgaagccattagctgtgagccactggagtcaccagtccatgggtctatggactgctccccttctctaagggcctttcagtatgatactaattgttcttttaggtgtgcggagggtttcatgcttagaggggctgatatcgttcgttgcgataacctggggcagtggaccgcccctgcccctgtctgccaggcccttcagtgccaagacttgcccgttcctaatgaagcacgcgttaattgttctcacccgtttggggcatttcgctaccaatcagtctgttcattcacttgcaacgagggcctcttgcttgtgggagcatctgtcctgcagtgtctcgcaacaggtaactggaattctgtgccgcctgagtgccaagctatcccatgcactcccctgttgtctccacagaatggcaccatgacctgcgtacagcctctgggttcaagttcttacaagtccacctgtcagtttatctgcgacgaagggtatagtctgtcgggcccagaacggctggattgtacccgatcagggaggtggactgactcaccaccaatgtgcgaggctattaaatgccctgaactgtttgcaccggaacagggaagcctggactgcagcgacacacggggagagttcaacgtcggaagcacctgccatttctcctgcgacaatggattcaaattggagggtcccaataacgttgaatgtacgaccagcgggagatggagtgcaactcctccgacatgtaagggcattgcctcactccctacaccaggcgtccagtgtccggcattaaccactcctggtcagggaacgatgtactgtcgtcaccatcccggaactttcggttttaataccacctgctatttcgggtgtaatgcgggatttactctaatcggagattctactctttcttgcagaccatccgggcagtggactgcagttaccccggcttgccgtgctgtgaagtgttcagagctgcatgtgaacaaacccattgctatgaactgttcgaacctctggggcaacttcagttacggctccatctgttcttttcactgtctggagggccaactgctgaatggatcagcgcagacagcctgccaggaaaacgggcattggtctactactgtgcccacgtgtcaggcaggcccactgaccatacaggaggcactcacttattttggaggagccgtggccagcacaatcggactgatcatgggcggaacattgctagccctgctccgtaaaagattccggcagaaagacgacggcaagtgccccctgaatccccattctcacctaggcacctatggtgtgttcacaaacgccgcattcgatccgtcaccttag

SEQ ID NO: 239864 - DNA, 2307 bp, synthetic construct
  misc_feature 1..2307: note = Description of Artificial Sequence: Synthetic coding sequence
  source 1..2307: mol_type = other DNA
atggcgaactgccagattgccatcttgtatcaacgctttcaacgggtagtttttggcatctcacagctcctctgctttagcgccctgatctcagaacttacgaaccagaaggaggtggctgcatggacctatcattacagcacaaaagcttacagctggaacatatcccggaagtactgtcaaaaccggtatacagatttagtggctatccagaataagaatgagatcgattacctgaataaagtcctgccttactattcctcctattattggattgggatccggaaaaacaataagacctggacctgggtggggactaaaaaggccctcactaatgaggccgaaaattgggcagacaatgagcctaacaacaagcgcaataatgaggactgtgtggagatttatatcaaatcgcctagcgcgccaggaaagtggaatgacgagcactgtcttaaaaaaaaacacgccctttgctacaccgcttcgtgtcaggatatgagctgctcgaagcagggagaatgcttggaaaccatcggaaattatacttgttcctgctatccaggtttttatggacctgaatgcgagtatgtaagggaatgcggggagctggaattgcctcagcatgttttgatgaattgttctcatccactcggcaatttcagtttcaactctcagtgcagttttcactgtacagacggatatcaggttaatgggcctagtaagctggagtgtctggccagcgggatctggaccaacaagcccccacagtgccttgccgctcaatgccccccactgaagattcccgaacgaggcaatatgacttgtttgcattctgccaaagcctttcagcaccagtcatcctgttccttttcttgtgaggaggggttcgcactagttggaccagaggtggtccagtgtaccgcgtcaggagtgtggactgctcctgcccctgtctgtaaggctatctcctgtgaaccattggagtcacccgtgcacggctccatggactgctctccttccttacgcgcatttcagtatgacacaaactgctcatttcgatgtgctgaggggttcatgctgagaggcgctgatattgtgcgatgcgacaatcttggccagtggacggcccctgctcctgtctgccaggccttgcaatgccaggatctgccagttcctaatgaggctagggtgaattgtagtcacccattcggtgccttccgctatcagtctgtctgttcttttacctgcaacgaaggcttgctcctggtcggagcttcagtgcttcaatgtctggctacggggaattggaattcggtcccccctgagtgtcaggcaataccttgtactccacttctgtcgccccaaaatggcacgatgacttgtgtgcagccccttggctcttcctcctacaagtcaacctgccagtttatctgcgatgagggttattccctatccggtcccgagagattagactgtacccggtcggggcgatggacagattcaccacctatgtgcgaagctatcaaatgtccagagctgttcgcccctgagcagggatctcttgactgtagcgacacccgcggagagttcaacgtgggcagtacttgccactttagttgtgataacggcttcaaactggaggggcctaataacgttgagtgcaccactagcggcaggtggtcagcaacaccaccaacatgcaaagggatcgcctccctgcctacccccggagtccagtgccctgccctgacgacgccgggacagggtactatgtactgccggcaccaccctggtaccttcgggtttaatacaacctgttacttcggctgtaacgccggttttactctcattggtgactctacactgtcctgtagaccaagcggccagtggaccgccgttacccccgcatgccgggctgtaaagtgctccgagctgcatgtcaataagccgattgctatgaattgttccaacctctggggtaacttctcttacggcagcatttgtagcttccactgtttagaggggcagctcctcaacggctcagcccagaccgcctgtcaagaaaacggtcattggtccactaccgtgcccacttgccaggccggtcccctgaccatccaggaggccctcacgtatttcggcggagccgttgcttcaactatcggactgattatggggggtactttactcgcccttttgcgtaagagatttagacagaaagatgacggcaaatgtcctctgaaccctcatagccacctcggtacatatggggtgtttactaacgcggcttttgacccttcaccatag

SEQ ID NO: 239865 - DNA, 1935 bp, synthetic construct
  misc_feature 1..1935: note = Description of Artificial Sequence: Synthetic coding sequence
  source 1..1935: mol_type = other DNA
atggctaattgccagattgctatactttaccagaggtttcagcgggtagtgttcggtatctcacagctgttgtgtttttctgctttgatttctgagttgacaaaccaaaaggaggtggctgcatggacgtatcactatagcaccaaagcatatagttggaacatctctagaaaatactgccagaataggtataccgatctagtcgctattcagaacaaaaatgaaatagattatctgaataaagtgctgccgtattactccagctattactggatagggatcaggaagaataacaaaacctggacatgggtggggaccaaaaaagctttgaccaacgaggctgagaactgggccgacaacgagcctaataacaagcggaacaacgaagactgtgtggagatttacatcaagagcccttcagcccctgggaaatggaacgatgagcattgtctcaagaaaaaacacgccttgtgttatactgctagttgccaggacatgagctgttctaaacagggcgaatgcctcgaaactatcggaaactacacttgttcctgttatcccggtttctatgggccagagtgcgagtatgttagagaatgcggggagctggaattaccacagcatgtgttaatgaactgcagtcatcccttgggaaacttctcctttaacagccaatgcagctttcattgtacggacggctaccaagtgaacggaccttctaaattagagtgcctggcaagtggtatttggactaacaagccccctcagtgcctggctgcccaatgccctcctttgaagatacctgaaagagggaatatgacgtgcctccactccgctaaggcttttcagcaccagagctcctgtagttttagttgcgaagaaggtttcgctctcgtgggaccagaggtcgtgcagtgcaccgcctcaggtgtgtggacagcgccagctccagtttgtaaagccctgcagtgccaggatcttcccgtaccaaatgaagccagggttaattgcagtcatccatttggagcgttccgataccaaagtgtgtgctcttttacatgtaacgaaggactgttgctcgttggcgcttccgtcctgcagtgcctagctacaggtaactggaacagcgtgccccctgaatgtcaggctatcccatgcacgcccctgctgtcgccgcagaatggaaccatgacatgcgtgcagcccctcggatcaagcagttataagagcacgtgccaatttatctgtgacgagggctacagcctatctggtcccgagagacttgactgcaccaggtctggcagatggactgactctcctcctatgtgtgagggaattgccagcctgcccaccccgggtgtgcagtgtcctgcgctgactacacccggacaggggactatgtactgccggcatcaccctggaacctttggatttaacactacttgctattttggctgcaacgctggcttcaccctcatcggggactccacactgagttgccgtcccagtggacagtggacagccgttaccccagcgtgccgagcagttaaatgctccgaactgcacgtcaacaaacctatcgcaatgaactgctctaatctttggggcaacttcagttatggcagcatatgttcatttcactgcttagagggccaattgctgaacgggagcgcacagacggcgtgtcaggagaatggtcactggtcgactacggttccaacgtgtcaggcgggtcctctgacaatccaggaagccctgacttactttggaggcgctgttgcatccactattggcctaatcatgggcggaaccttgcttgcgctgctaagaaagcgtttccgtcagaaagacgacgggaagtgtccccttaatccacactcccatctcgggacttacggggtgtttaccaacgctgcctttgatcccagcccatag

SEQ ID NO: 239866 - DNA, 2490 bp, synthetic construct
  misc_feature 1..2490: note = Description of Artificial Sequence: Synthetic coding sequence
  source 1..2490: mol_type = other DNA
gcaaactgccagattgcaattctgtaccagaggtttcaacgcgtagtgttcgggattagccagctgctctgcttctccgcactgatcagcgagttgactaatcaaaaagaagtggctgcctggacatatcactactcgacaaaggcatattcatggaacatatccaggaagtattgccagaaccgctacactgatcttgtggctatccagaataagaatgagattgactacctgaacaaggtgctcccctactactcatcctactattggatcggcatacgcaagaacaacaagacttggacatgggttggcaccaagaaggccttgaccaacgaggctgaaaactgggcagataacgagcctaataataagagaaacaacgaagactgcgtggaaatttacatcaaaagcccttccgcacccggtaaatggaatgacgagcactgtctaaaaaagaaacatgcattgtgttataccgcaagctgccaggatatgtcctgttctaagcaaggcgaatgcctggagactattggtaattacacctgttcttgttatccgggtttttacggaccagaatgtgagtacgtacgtgagtgcggagaattagagttacctcagcatgtgctgatgaactgctctcatcccctcggaaatttcagctttaactcgcagtgttcattccattgcacagatgggtaccaggtgaatgggccaagtaaacttgaatgtctggcgtccggaatatggacgaacaagccacctcaatgcctggctgcccagtgtccacctctcaaaatccccgagagagggaatatgacttgtctgcactctgcaaaggcattccaacatcagagttcatgttcattttcctgcgaggaagggttcgctctggtcggtccggaagtcgttcagtgtaccgcttctggggtctggactgcgcctgcacctgtgtgcaaggccgtccagtgccagcatctggaggccccaagcgagggcactatggattgcgtgcaccctctcactgcatttgcttacggtagtagttgcaagttcgaatgtcagcccggatacagagtgaggggtctagatatgctgagatgcatagattcgggacactggtcggctcctctccccacttgcgaagccatctcatgcgaacccctggaatcacctgtacacgggagcatggactgcagtcctagcctccgagccttccagtacgataccaactgttcattccgatgtgccgaagggtttatgctgcgtggggcagacattgtccgatgcgataatcttggccaatggacagcacctgcgccagtgtgccaggcccttcagtgtcaggatcttcctgtccccaacgaggcgagggtaaattgctctcatccatttggtgcgttcagatatcagtcagtgtgctcttttacttgcaacgaaggactgttactcgttggcgcaagcgtactccagtgcctggccactgggaattggaattctgtgcctcccgagtgccaggcaattccatgtacccccctgctgagtcctcagaatggcacaatgacctgtgtgcagcccttggggtcctcgtcgtacaaaagtacctgccagtttatttgcgacgaagggtatagcctgagtgggcctgagcgattagattgcactcgaagtggacgctggacagatagtccacctatgtgtgaagctattaagtgtcccgagctctttgctccagaacaaggatccctggattgcagcgacactcgtggggaatttaatgtaggcagtacctgccacttcagttgcgacaacggcttcaagctggagggcccaaataatgtggagtgtactacctctggtcgatggtcggccactcccccaacgtgtaagggaatcgccagcttgcccacacccggagtccagtgtcccgctcttaccacacccggacagggcacgatgtactgtaggcaccacccgggtactttcgggttcaacaccacctgttacttcggctgcaacgccggtttcactctcataggggacagcacactatcttgtagaccatccgggcagtggacggccgttactccagcatgccgcgctgtgaaatgcagtgagctgcacgttaataagcctatcgcaatgaattgcagtaacctatggggtaattttagttatgggtccatatgcagttttcattgcctggaaggccagctattgaatggctcagcccagacagcatgccaggaaaatggccactggtccactaccgtgcctacctgtcaggccggtcccctcactattcaagaggcccttacctacttcggcggtgcggtggctagtactatcggactcataatgggtgggacactgctagctctgctcaggaagcgatttcggcagaaggatgacggcaagtgtccgctgaatccacacagccatttggggacttatggcgtgttcaccaacgccgcttttgaccccagtccctag

SEQ ID NO: 239867 - DNA, 1941 bp, synthetic construct
  misc_feature 1..1941: note = Description of Artificial Sequence: Synthetic coding sequence
  source 1..1941: mol_type = other DNA
tgagcaaactgtcagattgccattttgtatcagagattccagagagtggtgtttggcatttctcaacttctatgcttctctgcccttatatcagagctcacaaatcaaaaagaggtggccgcttggacataccattactcgacgaaggcatactcatggaacatttctcgcaaatactgtcaaaatcgctatacagatctcgtggccattcagaataaaaacgaaatcgattatctcaacaaagtcctgccctactactcctcatactattggatcggaatcaggaagaacaacaagacatggacctgggtgggaactaaaaaagccctgaccaacgaagcggagaactgggcagataacgagcctaacaacaaacgcaacaacgaggactgtgtcgaaatttatatcaagagtcccagcgctccaggaaagtggaatgacgaacactgcttaaaaaaaaagcacgccttgtgctacacggcatcttgtcaggacatgagttgcagcaaacagggggagtgcctggaaaccattggaaactacacctgtagctgctaccctggtttctacgggcctgagtgtgagtacgttcgcgaatgtggcgaactcgaactgccccagcatgtgctcatgaattgctcacaccctctcggtaacttttcttttaattctcaatgttcattccactgtaccgacgggtatcaggtgaatgggccaagcaaacttgaatgcctcgcttcgggtatctggactaacaagcctccacagtgcctggctgctcaatgcccacctcttaagatccctgagcgtggcaacatgacttgtctccacagtgcaaaggcattccagcaccaaagcagctgtagcttttcctgcgaggagggatttgctctagtgggtccagaggttgtgcagtgtactgcctccggggtgtggacagcaccagcaccagtttgcaaagccatttcctgcgaaccacttgagagccccgtgcacggttctatggactgttcaccaagcctccgtgcctttcaatacgacacaaactgcagttttaggtgcgctgagggctttatgctgcggggagccgacattgtgcggtgtgataacctaggacaatggaccgcccctgccccagtttgtcaggctctccaatgtcaggatcttccagtgcccaatgaggccagggtaaattgctcacacccctttggtgcattccggtatcagtcggtgtgctcttttacctgcaacgaaggcctgctgctggtgggtgcaagcgtccttcagtgcctagcaactgggaactggaactccgtgccccctgagtgccagggaaaatctatcgcctcccttcctactccaggggttcagtgtcccgcacttacaacacctggtcagggcacaatgtattgccgacaccaccctggcaccttcgggttcaataccacctgctacttcggctgcaacgccggttttacactgatcggcgactccaccttgtcttgcaggccttctgggcagtggacagccgtaacccctgcctgcagggccgtaaaatgctctgagttgcatgtgaataaaccaatagccatgaactgtagtaacttgtggggtaacttcagttatggaagcatatgctcctttcactgtctggagggacaattgctgaatggaagcgcgcagaccgcttgccaggaaaacggacattggtctaccacggtccctacctgccaggctgggccattgacgatccaggaggctcttacttactttggaggtgccgtggcaagtactattggcttgatcatgggtggaacgcttctggctctactgcgcaaacggtttagacagaaggacgacggcaaatgtccactgaatccacatagtcacctgggcacatatggagtgtttactaacgcagcattcgacccatcgccctag

SEQ ID NO: 239868 - DNA, 2262 bp, synthetic construct
  misc_feature 1..2262: note = Description of Artificial Sequence: Synthetic coding sequence
  source 1..2262: mol_type = other DNA
gttgtgttcggcattagccagctcctatgcttttctgccttgatatccgagttaacgaatcaaaaggaagtcgccgcttggacgtaccactacagtacgaaagcctacagctggaacatcagccgcaaatactgccagaaccggtacactgatctggtggccatacagaacaagaacgagatcgattatctgaataaggtgctgccctattactcctcttactattggattggcatccgaaaaaataataaaacttggacatgggtggggacaaagaaagctttgacaaacgaggccgaaaattgggcagacaatgaacccaacaacaagcggaacaacgaggattgtgtggaaatttacattaagagcccaagtgctccagggaagtggaatgacgagcattgcttgaagaagaaacatgcactttgctacactgcatcttgccaggacatgagttgcagcaagcagggcgaatgcctcgagacgattggtaattatacatgtagctgctatccgggtttctacggccctgagtgtgagtatgtgagagagtgcggcgagctggagctgccgcagcacgttctgatgaactgttcccaccctttgggcaatttttcattcaattctcagtgcagcttccattgtaccgatggctatcaggtcaatggtcccagcaagcttgaatgcctggcatccggtatatggacaaataaacctccacagtgcttggcagcccagtgtcctcctctgaagataccggagcggggaaatatgacgtgcctgcattctgcaaaggctttccagcaccagagtagctgctccttctcatgtgaggagggcttcgctctcgtcggtccagaggttgttcaatgtactgcctcgggagtgtggacagctcccgcacctgtttgcaaggccatcagctgcgaacccctggaatcaccagtccatggttcaatggactgcagcccctccctaagagcctttcagtacgacaccaattgctccttcagatgtgctgaaggtttcatgcttcgaggtgctgacattgtcaggtgcgacaacctcggccagtggaccgccccagcccctgtgtgccaggcattacagtgtcaggatctgcctgtacctaatgaagctcgagtgaactgcagccatccctttggtgctttcagatatcagtccgtgtgttccttcacgtgcaacgagggattgctgcttgtcggtgccagcgtcttacagtgtttggctacagggaattggaattctgtgccaccggaatgtcaggcgatcccttgtactccacttctctctccccagaatgggacgatgacatgtgtccagccccttggttccagtagctacaaatctacctgtcagtttatctgcgatgagggatattcactctctggacccgagagactggactgtacccggtcaggcaggtggacagactctcccccaatgtgcgaggctatcaaatgtccggagctattcgcacctgagcagggatcgctggactgctctgatacccgcggagagttcaacgtcggatctacctgccactttagttgtgataatgggtttaaactcgagggcccaaacaatgtggaatgtactacctctgggagatggtccgctactcccccaacatgtaaaggcattgcgtctctgccaacgccaggcgtgcagtgtccggcattgacaacacctgggcaggggactatgtattgccgtcatcacccagggactttcgggtttaacactacttgctacttcggctgtaacgcaggtttcactttgatcggcgactccaccttgtcttgccgtccttccgggcagtggaccgcagtcacgccagcttgtagagctgtgaagtgctcagaactgcacgtcaacaaacctattgccatgaactgtagtaatctctggggcaatttctcctacgggtccatttgctctttccattgtctggagggccagcttcttaatgggagtgcccagaccgcttgtcaggagaatgggcactggagcaccacagtgccgacatgccaagccggtcctcttacaattcaggaggccctgacttatttcggcggagctgtcgcaagcaccatcggtctgatcatggggggaacactacttgccctccttcgaaagcgcttccgccaaaaggatgacggcaagtgtccactgaatccccattcccacctaggcacctacggcgtttttacaaacgcggctttcgatccatcaccgtag

SEQ ID NO: 239869 - DNA, 2373 bp, synthetic construct
  misc_feature 1..2373: note = Description of Artificial Sequence: Synthetic coding sequence
  source 1..2373: mol_type = other DNA
atggccaactgtcagattgctattttatatcaacgcttccagagagtggtgttcgggatctctcagttactctgctttagcgccctcatcagcgagctaaccaatcagaaagaagtggctgcctggacctaccactacagcacaaaggcctattcctggaatatcagccgcaagtattgtcagaataggtacacggatctcgtggccattcaaaacaagaatgagatcgattacctcaacaaggtcttgccatactatagttcatattactggatcgggattaggaaaaataacaagacgtggacttgggtcggtactaaaaaagcccttaccaacgaggcggagaactgggctgacaacgagcccaataacaagaggaacaatgaggattgtgtggaaatttatattaaaagccctagcgccccaggaaaatggaatgatgagcactgtctgaagaaaaaacatgcactctgttacaccgcgagctgtcaggacatgtcatgctctaaacagggcgagtgtctggaaacaatcggtaactatacatgcagctgttatcctgggttttacggacccgaatgcgagtatgttcgtgaatgtggtgagcttgagctaccccaacacgtgctgatgaattgttctcatcctctgggtaacttttccttcaattctcagtgttccttccattgcaccgacggataccaagtaaacggcccttccaagctggagtgtctagctagcggcatctggacgaacaaaccccctcagtgcctcgcagctcagtgtcccccactgaagattcccgagagaggaaacatgacttgcttacattccgcgaaagccttccagcaccagagctcatgcagcttctcgtgtgaggagggttttgctctggtgggcccagaggtagtgcaatgtactgcctctggcgtgtggacggcacccgctccggtgtgtaaagccgtacagtgtcagcatctggaggccccttctgagggcactatggactgcgtccaccctctaaccgcctttgcttatggcagcagctgcaaattcgagtgtcagcctgggtaccgggtccgagggcttgatatgctaagatgcatcgattccggccattggtccgcaccactgcccacctgcgaggcgatatcttgcgagccgctcgagtcccccgtgcacggctccatggactgcagcccttctctgagagcttttcaatatgacactaactgtagcttccgatgcgccgagggtttcatgcttagaggagcagacatcgtgagatgcgacaacctgggccagtggacagcccctgctccagtttgtcaggcactccagtgtcaggatttgcctgttccaaacgaggctcgtgtgaattgtagtcatcccttcggtgcttttaggtaccagagcgtgtgttcatttacatgcaacgagggccttttattggtcggcgcatctgtcttgcaatgtctggcgaccgggaattggaatagcgtgccaccagagtgccaggctataccatgcacacctcttctgagtcctcagaacgggaccatgacctgtgtgcagccactgggtagttcctcgtacaaatccacctgccaatttatttgcgacgaaggctattccttatctgggcctgagcgactggattgtaccaggtccgggaggtggactgacagtcctcctatgtgtgaggccatcaaatgcccggagctctttgcccctgagcagggctccttggattgctcagacaccagaggcgaattcaacgtcggctccacctgccattttagctgtgacaatggcttcaagctggagggacccaataacgttgagtgcaccaccagcggacgatggagcgccaccccacccacctgcaaaggcattgcctctttgccaacacctggcgtccagtgcccagcccttactacaccaggacaggggacaatgtattgtcgacaccacccgggtacatttggcttcaatactacctgttacttcggctgcaacgctgggttcaccttgattggggactccacgttgtcgtgccggccatccggtcagtggaccgccgtcactcctgcctgtagggcagtgaaatgtagcgagctccacgttaacaagcccatagccatgaactgcagcaatttgtggggaaacttctcatacggaagcatctgctcctttcactgtcttgaaggccaactcctgaatgggagtgcccagacggcttgccaagagaacgggcattggtctactactgtgcccacctgtcaagacgatggcaagtgtccgctgaaccctcatagccatctcgggacctacggagtttttaccaacgctgcatttgacccaagcccttag

SEQ ID NO: 239870 - DNA, 450 bp, synthetic construct
  misc_feature 1..450: note = Description of Artificial Sequence: Synthetic coding sequence
  source 1..450: mol_type = other DNA
atgatgaccaaacacaagaagtgtttcatcattgtcggcgtgttgattaccactaatataattactctcatcgtgaaactgacacgggacagccagagcctgtgcccctacgactggatcggattccagaacaaatgttactatttctccaaggaagaaggagattggaactctagtaagtacaattgctccacacagcacgctgatcttactattatcgacaatatagaggagatgaacttcttgcgcagatacaaatgtagttctgaccactggattggcctgaagatggccaaaaatcggacgggtcagtgggtcgacggtgcaacttttactaaatcctttggtatgcgcggtagcgaaggatgcgcctatctctccgatgatggagctgcaacagcccgatgttacacagaaagaaagtggatctgcagaaagcgaattcactag

SEQ ID NO: 239871 - DNA, 1209 bp, synthetic construct
  misc_feature 1..1209: note = Description of Artificial Sequence: Synthetic coding sequence
  source 1..1209: mol_type = other DNA
atgccactgcagcttctgctgctgcttatactgctgggtccgggtaacagcttacagctgtgggatacctgggccgacgaggcggaaaaggctctgggcccattgctggcacgcgatcgcagacaggccaccgagtatgaatatctggattatgactttctacccgagacagagcccccagagatgctccgtaattcaactgacactacaccattgaccggacctggtacccccgaatccacaacggtggagcctgcagcgcgacgatcaacaggcctagatgctggcggtgcagtaaccgaactgacaaccgagctggcaaacatgggaaatctgtccacagactcggctgcgatggagattcagaccacccagcctgcagctactgaggcccagaccacccctcttgccgctacagaagcgcaaaccaccagactaacagctacggaagcccaaactacccccctggcagccacagaagcacagaccacacccccagccgctaccgaggcccaaacaacacagcccactggcttagaagctcagactactgcacccgctgctatggaggcccagacgacggcgccagccgcaatggaagcacagacgacccccccagcagcaatggaagcccagactactcagacaaccgctatggaggcgcagactacagcccctgaggccacggaggcccagactacacagcccacagccactgaggcccagacgacacctctcgctgccatggaggccctgtccacggagccatcggctaccgaagctcttagcatggaaccaaccaccaaacgtggtctcttcatcccgtttagcgtatcttctgttacacataagggcatcccgatggctgctagtaacctctccgtcaactatccagtcggcgctcccgaccacattagtgtaaaacaatgcttgctcgcaatcctcatcttggctctcgtggcaaccatattttttgtctgtacagtggtgctcgctgtgcgactgtccaggaagggacacatgtaccctgtgcggaattactcccctactgaaatggtgtgcatatctagtctgctgcccgatggcggagaaggcccatccgcaacagcgaacgggggactgagcaaggccaaatctcctggtcttacacccgaaccgagggaggaccgggaaggggacgatttaacgttgcactcatttctgccttag

SEQ ID NO: 239872 - DNA, 1239 bp, synthetic construct
  misc_feature 1..1239: note = Description of Artificial Sequence: Synthetic coding sequence
  source 1..1239: mol_type = other DNA
atgcctcttcagctgctcctgctcctaatacttctgggaccaggcaattcactacaactgtgggatacatgggcggacgaagccgagaaggctctgggacctctgctagcgagagaccggaggcaggccaccgaatatgaatacttggattatgattttctgcctgaaaccgaacctccagaaatgttgcgcaacagtactgacacaacacctctgacagggccaggaactccagaatcgactactgttgaaccagcggcaagaagatctaccggcctcgatgctggcggagccgttacagaactgactactgagctcgccaatatggggaacctgtccactgattctgcagctatggagattcagactactcaacccgcagcgaccgaggctcaaactactcaacctgtccccacagaagcgcagactacccccctcgcagcgacggaggcccagacaacccgcctgaccgcgactgaggcccagactacaccactggcagccacagaagcacaaaccacccctcccgcagccactgaggctcagaccacccagccaacaggacttgaggcacagacaaccgcacctgccgctatggaggctcaaacaacagcccctgccgctatggaggcgcaaacaactccacccgctgccatggaggcccaaacaacccagacgactgccatggaagctcagacaactgccccagaggcaacagaggctcagaccacccaaccaacagccaccgaggcacagaccactccactcgccgctatggaggctctcagcactgagccttctgctactgaggccctgtccatggagcctactaccaagcggggattgttcatcccttttagtgtgtcctcagttacccacaaaggcatcccaatggctgcaagtaaccttagcgtgaattatcctgtcggagctcccgaccacatttccgtgaagcagtgcctgcttgctatcttgatcctcgccctggttgccaccatctttttcgtctgcaccgtggtcctagcagtgaggctctcccgcaaaggccatatgtacccggtgcggaattactcacctaccgagatggtttgtatctcctcgctattgcccgatgggggtgaggggccaagcgccaccgcgaatggcggactgagcaaggcgaagtcccctggcttgaccccagaaccgagagaggacagagagggagacgacctcaccctgcattcttttctgccttag

SEQ ID NO: 239873 - DNA, 1419 bp, synthetic construct
  misc_feature 1..1419: note = Description of Artificial Sequence: Synthetic coding sequence
  source 1..1419: mol_type = other DNA
atggcgaccaaatgtggaaattgcggcccagggtactccacccccctcgaggccatgaagggaccgcgagaggagatcgtgtacctaccttgcatttacagaaatacagggacagaagcccctgactaccttgcaacagtcgatgtggacccgaaaagtccccagtactgtcaagtaattcacagactccccatgccgaacttgaaggatgagcttcaccacagcgggtggaacacatgctcaagttgttttggagactccacgaagagtagaacaaaactggttcttccgtccctgatttcatctcgaatctatgtcgtcgacgttggctcagagcctagagctcctaaacttcataaagtcatcgagcccaaagatatacatgccaaatgtgaactggcgttcttacacacctcccattgcctggcctctggggaggtcatgatctcatccctcggcgacgtgaagggcaacggcaaaggcggatttgtgttactggacggcgagacatttgaggtcaagggaacttgggagcggcctgggggagctgcccctctgggctatgacttttggtatcagcccaggcataacgtcatgatctccaccgagtgggctgctccaaatgtcctgcgggacgggttcaatccagcagatgtggaggcaggcttatatggctctcatttatacgtgtgggattggcagaggcacgagattgtccagaccctgtccctgaaggatggactcatccctttagagatcagatttcttcacaaccccgatgctgcccagggcttcgtgggatgtgcgctctcaagcacaattcagcggttctacaagaacgagggcggaacttggtcagtcgagaaggtgatccaggtgcctccaaagaaagtgaaaggttggctgctgcctgagatgccaggcctgatcacagatatccttctttccctcgatgatagattcctctacttcagcaactggcttcacggagacttgcgtcagtatgatatctccgatccacaacggccaagactgaccggccaactttttctcggcggaagcatcgtgaaaggaggccctgtgcaggtacttgaggatgaagagttgaaatcacagcctgaacccctcgtcgtgaaaggcaaacgggtggctggaggcccacaaatgattcagttgtcacttgacggcaagcggctctacatcacgacatccctgtattcagcttgggataagcagttttacccggatttaatcagggaggggagcgtgatgctacaggtggacgtagacacagtgaaaggagggctgaagctaaaccctaatttcctggtggacttcggtaaagaaccactgggaccggctctcgcccacgaactccggtatcctggcggtgattgtagctcagacatctggatctag

SEQ ID NO: 239874 - DNA, 1227 bp, synthetic construct
  misc_feature 1..1227: note = Description of Artificial Sequence: Synthetic coding sequence
  source 1..1227: mol_type = other DNA
atgccaaatctgaaagacgaacttcaccactctggctggaacacatgcagttcttgctttggagactctacgaagagcaggactaaactggtattgcccagtttgatttcatcccgcatctatgtggtcgatgtcggcagcgagcccagggctcccaaactgcacaaagttatcgagccgaaggatatccatgcgaaatgcgaactcgcatttctccacacttcccattgcctggcatccggggaagtaatgatctctagcttaggggacgttaaggggaatggaaaaggcggatttgtgctccttgacggcgaaacatttgaagttaaaggaacgtgggaacgcccaggaggagctgcccctctggggtatgacttctggtatcagcctagacacaacgtgatgattagtaccgagtgggccgcaccgaacgtcttacgcgatggcttcaatcctgctgacgtggaggcaggtctatacggctctcatctttacgtgtgggactggcagaggcacgagatagtacaaaccctgtctttaaaggacggcctcatcccccttgaaattagattccttcacaatcctgatgccgcacaggggttcgtggggtgcgcgctcagctctactatccaacggttctataagaatgagggcggaacctggagcgtggagaaggtaattcaggtgccccctaagaaagtgaagggttggctattacctgaaatgcctgggctcattacagacatcctgctgtctctcgacgaccgcttcctgtacttttcaaactggctccacggtgatctccgtcaatatgacatctcggacccccaaagacccagactgacagggcagctgttcctgggcggatccattgtaaagggtggcccagtgcaggtcttagaggacgaagagctgaaaagtcagccggaaccactggtcgtgaagggtaagagagtcgccggtgggccacagatgatccagctctctttggatggcaaacggctgtacattacaacttcgctgtatagcgcttgggataaacagttttaccccgacctgatcagggagggatcagttatgctgcaagtcgacgtcgacactgttaagggagggctcaagctgaaccctaattttctggtagactttggaaaagagccgcttgggcctgctcttgcccatgagctgaggtaccctgggggagactgttccagcgacatatggatctag

SEQ ID NO: 239875 - DNA, 1233 bp, synthetic construct
  misc_feature 1..1233: note = Description of Artificial Sequence: Synthetic coding sequence
  source 1..1233: mol_type = other DNA
atggccaccaagtgtggtaattgtggtcccggatactccacccccctggaggccatgaagggacccagggaagaaatagtttatctcccatgcatctacagaaacactggaaccgaggcacccgattatttagcgactgtggatgtggatccaaaatccccccaatactgtcaggtaattgaacccaaagatatccacgcaaagtgcgagcttgcctttctgcacacatcgcactgcctagcgagcggtgaggtgatgatcagttctttgggggatgtcaaaggcaatgggaaaggcggtttcgtattgctggacggagaaactttcgaagtcaaaggaacttgggagcggccaggcggtgcggctccactgggctacgacttttggtaccagccacgccacaacgtgatgatttcaactgagtgggccgctcccaatgtcctgcgagatggttttaaccctgccgacgtggaggcagggctgtacggaagtcacctctacgtatgggactggcagcggcatgagattgtgcagaccctgtcactgaaggatggactgataccgctcgagattcgttttctccacaatcctgatgccgcacaaggatttgtaggatgtgctctgagctctactattcaaagattctacaagaatgaggggggtacctggagcgtggaaaaggtgatccaggtgcctccaaagaaggttaagggatggctgctgccggaaatgcccggtctgattaccgatatcttactctctctggacgatagatttctgtactttagcaattggcttcacggggatctcaggcagtacgacatctcagacccacagcgcccacgtttaacaggacagctttttttaggcggatccatcgtgaaaggtggccctgtgcaagttctggaggatgaagaactgaagagtcagcccgagccactcgtggtcaaaggcaagcgggtggcgggtggccctcaaatgatccagctctctctggacggtaaaagattgtacataaccaccagtctctacagcgcctgggacaaacagttctaccccgacctcattagagaaggctccgtgatgctgcaggtggacgttgacactgtgaagggcggacttaaactgaatcctaattttctggttgacttcggaaaggaaccactcggacctgccttggctcacgaattgaggtatccgggaggcgattgctcaagcgatatctggatttag

SEQ ID NO: 239876 - DNA, 1362 bp, synthetic construct
  misc_feature 1..1362: note = Description of Artificial Sequence: Synthetic coding sequence
  source 1..1362: mol_type = other DNA
atgcccggatcctctggagctggaatggaggctgccgtggctcctggtcgcgacgctcccgctcccgctgctagtcagccatcaggatgcggtaagcacaattcgccagaacgcaaagtgtacatggactataatgctacaacccccctcgagcccgaagtcattcaggccatgaccaaagccatgtgggaggcatggggtaacccctctagcccatatagtgcaggcaggaaagcaaaggatattattaatgccgcaagagagtccttggcaaaaatgattgggggtaaacctcaagacatcattttcacaagtggcggaaccgagtcgaataacttggtcattcacagcgtcgtgaagcactttcacgctaatcagacatcgaaaggccatactggtggccaccactcacccgtgaaaggtgccaagccccattttatcacatcctcagtggaacacgattccatccggttaccacttgagcatttggtggaagaacaggtggctgccgttacctttgtacccgtgtccaaggtcagtggacaagctgaagttgacgacatcctggcagctgtccgaccaaccacccgcctggtgacaataatgctggccaacaatgaaactggaatcgtcatgccagtcccagagatctctcagagaataaaagcattgaatcaggagagagtggccgcaggtcttcccccaattctcgtgcacacagacgccgcacaggctttgggaaagcagcgagtggacgtcgaggacctcggcgttgacttcctcactattgtgggacataagttctatgggccacgaattggtgcactctatattagagggttgggcgagtttacgcccctgtatcctatgctctttggaggaggccaggagaggaactttcggcctggtaccgagaataccccaatgattgccggactcgggaaggccgctgagctggtgacccagaactgcgaggcatatgaggcacacatgcgggacgtgcgggattacctagaggagcgactggaggcagagttcggccaaaagcgtattcatctgaattctcagttccctggaactcagaggctccctaatacgtgtaactttagtatccgtgggcctaggctccagggacacgtcgtcctagcccagtgccgcgtccttatggcctcagtgggggcagcatgccatagtgatcacggggatcagccttctcctgtgttgctcagttacggtgttccgtttgacgtcgcaagaaacgcactgcggctgtccgtagggaggtcaacaacgcgtgcagaggtggacttagttgtccaggatttaaaacaggcggttgctcagctggaggatcaagcatag

SEQ ID NO: 239877 - DNA, 708 bp, synthetic construct
  misc_feature 1..708: note = Description of Artificial Sequence: Synthetic coding sequence
  source 1..708: mol_type = other DNA
ttttcaaacccgttctgtggagagactttcccgaggaagcctgacctgaaaggcacacatagatgggcgccacaaccttccgaaggcggtcaagcaccctttcactatttcctggggggtacgaggctccatcccgctgcccctggcgctcctggcggtcgtacttccggttccctgcttaacgtgaagatgatgaaaatgaagaccttcatgatgatttgcttccatctgatcaatacagttaccttcgttccggtgtctaaggtctcggggcaggctgaagtcgatgacatcttggcagcagtacgcccaacgacgcgccttgtgaccatcatgttggctaataatgaaacggggattgtcatgccagttccagagatctctcagaggatcaaggcactcaaccaggaaagggttgccgctggcttgccccctatcctcgtacacactgatgccgcacaagcgcttggcaaacaaagagtcgatgtagaggatctgggggtcgatttcctgaccatcgtggggcacaagttctacggccctaggataggagcactttacattcgcggactgggcgaattcacaccgctatacccaatgctcttcggagggggacaggaacgcaatttcagacctggcacggagaacactccaatgatagccggtctcggaaaagtttctccgggagagctggaagagatgtcctag

SEQ ID NO: 239878 - DNA, 954 bp, synthetic construct
  misc_feature 1..954: note = Description of Artificial Sequence: Synthetic coding sequence
  source 1..954: mol_type = other DNA
atggaggctgccgtggcgcctgggagagacgccccagcacctgcggcaagccagccatccgggtgtggaaaacataacagccctgaacgcaaggtgtatatggattataacgctaccactcccctggagcccgaggtgatccaggccatgaccaaggctatgtgggaggcctgggggaatccaagttcaccttatagcgccggacggaaggctaaggatatcattaacgcggcaagagaaagtttagcaaaaatgataggcggaaaaccacaagatattattttcacatcaggcggtaccgagtcgaacaacctggtaatccacagcgtggtgaaacattttcatgcgaatcagaccagcaaaggtcatactggtggacatcatagcccagtcaaaggtgcgaagcctcactttattacaagttcagtggagcacgactccatccggctcccactggagcatctggtcgaggagcaggtcgccgcagtgaccttcgtgcctgtgtctaaggtgtcaggccaagccgaggtcgatgacatacttgctgccgtgcgcccaacgacacgacttgtgacaataatgttagctaacaacgaaaccggcatcgtcatgcctgtcccggaaatttcccagcggatcaaggccctgaatcaggagcgggtcgctgcagggctgcctcccatactggtgcacacagatgcagcgcaagctctgggcaaacagcgggtcgacgtggaggacctcggcgtggacttccttaccatcgtcggccacaagttttacggaccgcgaattggggcactgtatatcaggggtctaggtgaatttaccccactttatccaatgctgtttggcggaggacaggaacggaacttccgcccaggtacggagaacactcctatgattgctggactgggtaaggtcagccccggagaacttgaggagatgtcatag

SEQ ID NO: 239879 - DNA, 1056 bp, synthetic construct
  misc_feature 1..1056: note = Description of Artificial Sequence: Synthetic coding sequence
  source 1..1056: mol_type = other DNA
atggaagccgctgtcgcgccaggcagggacgccccagcacccgcagctagtcagccgtccggatgtgggaagcacaactctcccgaacggaaggtatacatggactacaatgctaccactccacttgagcctgaggtgatacaggccatgaccaaggcgatgtgggaggcctggggaaatccctcttccccttactccgctgccgtaaccttcgttccagtgagcaaagtgagtgggcaggccgaagtcgatgacattctggccgcagttcggccaacgacccgcctagtgacaatcatgctcgcaaataacgagactggtattgtgatgcctgtgccagaaatcagtcagagaattaaggctctgaatcaggaacgtgtggctgcgggtctgccaccaatcctcgtccatacagatgctgcccaagctctggggaaacagcgtgttgatgtggaggatttgggggtcgactttctcactatcgtgggacacaagttctacggaccaagaatcggcgctctgtacatcaggggactgggcgagtttacccctctgtaccccatgttatttggtggtggtcaggaacgaaactttaggcctgggacggaaaatacgcctatgattgcaggcctcggaaaggcagctgagcttgtgacccagaattgtgaagcctacgaggcgcatatgcgtgatgttagggattatctggaggagcgcctggaggccgagttcggacagaaaaggatccacctcaatagtcagttccccggtacccaaaggttgcctaacacttgtaactttagcatccgtggacctcggctccaaggacatgttgtgttggcccagtgtcgcgtactcatggcgtctgtgggggcagcctgccacagtgaccacggcgaccaaccgtctccagtccttcttagctacggggtacccttcgacgtggcgcgtaatgctctcaggttgtctgttgggaggtctaccactagggccgaggtggatctcgtcgtccaggacctgaagcaggcagtggcccagctggaagaccaggcctag

SEQ ID NO: 239880 - DNA, 720 bp, synthetic construct
  misc_feature 1..720: note = Description of Artificial Sequence: Synthetic coding sequence
  source 1..720: mol_type = other DNA
atggaagccgcagtagcacctggccgtgacgctcctgcacccgcagcgtcccagccctcaggctgtggtaaacacaactctccagagagaaaagtgtacatggattataacgcaacaacacctctggaacctgaggtgatccaggccatgacgaaagccatgtgggaagcttggggcaacccaagcagcccatattccgcgggacgcaaggcaaaggacatcattaacgctgctcgcgaaagcctcgcgaaaatgatcggcggtaagccccaagacataatctttacaagtggcggtaccgaggcggctgagctcgtgacccagaattgcgaggcctatgaagctcatatgcgcgacgtacgggactatcttgaagaacgtctcgaagcggagtttggacagaagcggatccacctgaacagccaattcccgggaacacagcgattacctaatacatgtaacttctctattagaggccctcgtctacaaggacacgtggttctggcacagtgccgggtcctgatggcctctgtgggagcggcttgccacagcgaccatggcgatcagccaagtcctgttttgctctcatacggcgttccattcgatgtggctaggaacgccctgcgactcagcgtgggacggagcactactcgcgcagaagtagacctcgtggtgcaagacctaaagcaggccgtggcccaactggaggaccaggcctag

SEQ ID NO: 239881 - DNA, 1338 bp, synthetic construct
  misc_feature 1..1338: note = Description of Artificial Sequence: Synthetic coding sequence
  source 1..1338: mol_type = other DNA
atggaggccgcagtggcacccggacgagatgctccagcaccagccgctagtcagccgagcggttgtggcaaacacaactctcctgagcggaaagtatacatggactacaatgcaacgaccccactggaacccgaagttatccaagcaatgaccaaggcgatgtgggaagcctggggcaacccctcctctccttatagcgccggacgtaaggctaaagacataatcaatgcagcacgggagtccttggccaaaatgatcgggggtaagccacaggatatcatatttacctctggcggaacagagagcaacaaccttgtgattcactcagtggtgaagcactttcatgccaatcaaacgtcaaaggggcacaccggcggtcatcatagccccgttaagggagcgaaaccccatttcatcacctcaagtgtggagcacgactctattcgcctcccattagagcaccttgtcgaggaacaggtcgcagccgtcacatttgtgccagtctccaaggttagtggacaggctgaggtggacgacatactcgccgcagtccgccctacaacacgtctggttaccattatgctggcaaataacgagaccggtatcgtgatgccagtgccagaaatctcacagcgaatcaaggccctcaaccaggagcgagtggcagcaggccttccacctatcttagttcatacagacgcagcccaggcattgggcaagcagagggtggacgttgaagatctgggagtggactttctgacaatagttggacataaattctacggccctcgaatcggggcactttatattcgtgggcttggagaattcacacctctgtatcccatgctcttcggcggaggccaagagcgaaatttccgcccaggtaccgaaaatacgccgatgatcgccggtctggggaaggcagccgagctcgtaactcagaactgtgaggcctacgaggctcacatgcgggatgtgagggattacctcgaagagcggctcgaggcagagttcggccagaagcgaatccatttaaattcgcaatttcccggaactcagcgactgccgaatacatgcaacttttccatcaggggcccaaggctacagggtcacgttgtgctggcccagtgtcgggttctcatggcaagcgtcggagccgcttgccacagtgaccacggagatcagccttctccggtactcctctcatacggagttccgttcgacgtcgcaagaaatgccctccgactcagcgtggggcgatccaccactcgcgctgaagtggacctcgtcgttcaagacttaaagcaagcagtcgcgcagctcgaagatcaggcttag

SEQ ID NO: 239882 - DNA, 966 bp, synthetic construct
  misc_feature 1..966: note = Description of Artificial Sequence: Synthetic coding sequence
  source 1..966: mol_type = other DNA
atgagcacacgggaaagcttcaatcccgagtcgtacgagctggataagagcttccgcctgacacgctttaccgaacttaaaggcactgggtgtaaggtcccccaggatgtgctccagaagcttctggagtccctgcaggagaatcattttcaggaagatgagcaattcctcggcgcagtcatgcccagactgggcattggcatggacacatgtgtgattcccctccgccacggcggactgtctctggtacagaccaccgactacatctatcctatagtagacgacccttacatgatgggcagaattgcatgtgctaacgtgctgagcgatctctacgctatgggggtcactgaatgcgataatatgctgatgctcttgggggtttcgaacaaaatgacggatagggagcgagataaggtgatgccactgataattcagggatttaaagatgcagcagaggaggccggaacgagcgtgaccggcggacagacggtcctgaatccctggattgtattgggtggggtagctacaaccgtgtgtcaacccaatgagtttatcatgcccgataatgcagtgccaggagacgtgttggttctgactaaaccgctcgggacccaagtcgccgtggcagtccaccagtggttggatattcctgagaagtggaacaagatcaaactggtggttacccaagaggacgtggaattggcctatcaggaggccatgatgaatatggcaaggctaaacaggactggcggactgcttatttgcctcccccgtgaacaggcggctaggttctgtgccgagatcaagtcccccaagtacggtgagggccatcaggcttggatcattggcatagtcgagaaaggcaataggacagcacgcataatagataaacctcgaattattgaggtcgcaccccaggtggctactcaaaatgtgaatcccaccccaggtgccactagctag

SEQ ID NO: 239883 - DNA, 1179 bp, synthetic construct
  misc_feature 1..1179: note = Description of Artificial Sequence: Synthetic coding sequence
  source 1..1179: mol_type = other DNA
atgtccaccagagagagtttcaaccccgagtcttacgaactcgataagagcttcagactgaccaggtttaccgagctgaaaggcactggctgtaaggtccctcaagacgttctgcagaaactgctagagtcattgcaggaaaatcatttccaggaagacgaacagtttctgggggctgttatgccaaggctgggaataggcatggatacatgcgtcataccactgcgccatgggggactgtctctagttcaaacaactgattacatttaccctatagttgacgacccctacatgatgggccgtattgcctgtgctaatgtcctgagcgacctttacgccatgggcgtgacagagtgcgataacatgctgatgctgcttggcgtgtccaacaagatgacggatcgggagcgtgacaaggtgatgccacttattatccagggatttaaagacgccgcagaagaagccggaacctctgtgactggaggccagaccgtcttaaacccctggattgtgctcggaggggtggccaccactgtatgtcagcccaacgaatttatcatgcctgataatgcagtgcccggtgatgttttggtcctgacgaagccgctcggcacccaggtcgctgtggccgtgcaccagtggttggacatcccggaaaaatggaataagattaaactggtcgtgactcaggaggacgtggagctcgcttatcaggaggccatgatgaacatggcaagactgaaccgcacggccgctgggctcatgcacaccttcaatgcccatgccgcaactgatattaccggttttggtatactcgggcacgcgcaaaatctggctaaacaacagagaaatgaagtgtcattcgttattcacaacctgcctgtgcttgccaaaatggcagccgtatctaaggcctgcgggaatatgtttggtttgatgcacgggacttgcccagaaacaagcgggggactgttgatttgcctcccgagagagcaggccgcaagattttgtgccgaaatcaagagccccaaatacggagagggccatcaagcatggatcatcggcattgttgaaaaaggcaaccggacagcacgcatcattgataagccacggattattgaagtggctccccaggtcgctactcagaatgtaaacccaaccccgggtgccacatcgtag

SEQ ID NO: 239884 - DNA, 966 bp, synthetic construct
  misc_feature 1..966: note = Description of Artificial Sequence: Synthetic coding sequence
  source 1..966: mol_type = other DNA
atgagtactcgggagagtttcaatccagaatcatatgagctcgacaaatccttccggttaacgcgattcaccgaactgaaaggcactggctgcaaggtgccacaggacgtcttgcagaaactgctggagagccttcaagagaatcactttcaggaagacgagcaattcctgggcgcagtcatgccacgcctgggaataggcatggacacttgcgttattcctctgagacatggcggactgtctctggttcaaaccaccgactacatttaccctatcgttgacgacccctacatgatgggtagaatcgcatgtgccaacgtgctctccgatctctacgccatgggtgttacggagtgcgataacatgctgatgctgctgggcgtgagtaataaaatgactgacagggaacgcgataaggttatgcctcttattatccagggatttaaagacgcagcagaggaagccggaacgtcagttaccggcggacagacagtgctgaacccctggatcgtgctgggtggcgtggctacaactgtttgtcagccaaatgagtttatcatgcccgataacgcagttcctggagacgtcctcgttctgactaagccgttgggaacgcaggtggcagtggccgtgcatcagtggcttgatattcctgaaaaatggaacaaaataaaactggtcgtgacgcaggaggatgtggaactcgcttaccaggaagccatgatgaacatggctcgcctgaatcgcaccggcggactgctgatttgtttgcctagggaacaagctgcccgtttttgcgcagaaattaagagccctaaatatggcgaaggacatcaggcctggatcatcggcatagtggagaagggaaacaggacggcaagaattatcgataagcctcgcatcatcgaggtggcccctcaggtcgccacccagaatgtaaatcctactccaggcgcaacaagttag

SEQ ID NO: 239885 - DNA, 501 bp, synthetic construct
  misc_feature 1..501: note = Description of Artificial Sequence: Synthetic coding sequence
  source 1..501: mol_type = other DNA
atgtctacaagggagtcatttaaccccgagtcctacgagctggacaagagcttcaggcttacccgctttaccgaactgaagggcacaggttgtaaggtgccgcaagacgtactccaaaagttgctcgaaagccttcaggagaaccactttcaagaagacgagcagtttctcggagccgtgatgccaagactcggaattggcatggacacctgtgtgatcccccttaggcacgggggtctgagtctggtacagactaccgattacatctaccccatagtggatgacccatatatgatggggaggatagcttgcgctaacgtgcttagcgacctgtacgcaatgggggtcaccgaatgtgacaatatgctgatgctgctgggggtgtctaataaaatgaccgatcgcgaaagagacaaagttatgcccctgataattcagggatttaaagacgccgctgaggaggccggaacatcagtgactggcggacagaccgtcctatag

SEQ ID NO: 239886 - DNA, 279 bp, synthetic construct
  misc_feature 1..279: note = Description of Artificial Sequence: Synthetic coding sequence
  source 1..279: mol_type = other DNA
atggatacctgcgttatcccactgcgtcatggtggcctctcattggtgcagaccaccgactatatttacccgatcgtagacgacccatacatgatggggagaatcgcatgtgctaacgttctgagtgatttgtacgcaatgggagtcacagagtgtgataacatgctaatgctgctcggcgtgagcaacaagatgacagatagagaaagggataaagtcatgcccctcattatccagggtttcaaggacgcggctgaggaagctggaaccagtgtgtag

SEQ ID NO: 239887 - DNA, 978 bp, synthetic construct
  misc_feature 1..978: note = Description of Artificial Sequence: Synthetic coding sequence
  source 1..978: mol_type = other DNA
atggatacgtgcgtgattccgttgcgccacggagggttgtccttggtgcaaaccacagattatatttaccccatcgtggatgacccctacatgatggggcgtatcgcctgcgcaaatgtgctgtcagacctttacgcaatgggggtcactgagtgcgacaatatgcttatgcttctgggcgtctctaacaagatgacagaccgagagcgagacaaggttatgccactcataattcagggatttaaagatgccgctgaggaggccggtacctctgtaactggcggacaaacagtgctcaacccctggatagtactgggcggtgtagcaacaaccgtgtgtcagccgaatgaattcataatgccggacaacgccgtgcccggagatgtcctagttctcacaaagccactcggcactcaggtggccgtcgccgtgcaccaatggctcgacattccggagaagtggaataaaatcaagttagtggtgacccaagaagacgtggagctggcttaccaggaagccatgatgaatatggctagattgaatcgtaccgctgccggtctaatgcatacttttaacgcccacgctgcgacagatatcaccggttttgggatactgggccatgcacagaatctggctaaacaacagagaaacgaagtgagctttgtcatccacaacctcccagtcctcgctaagatggctgccgtctccaaagcatgcggaaacatgtttggcctcatgcatgggacatgcccagagacctccggcggacttctaatctgtcttccaagggaacaggcggctcgcttttgtgccgagatcaaaagcccaaagtacggcgagggacatcaggcatggatcattgggattgttgagaaaggcaaccggaccgccaggattatcgacaagcctcggatcatagaggtggctccacaagtggccactcagaacgtcaatccaacacccggagcaacatcttag

SEQ ID NO: 239888 - DNA, 975 bp, synthetic construct
  misc_feature 1..975: note = Description of Artificial Sequence: Synthetic coding sequence
  source 1..975: mol_type = other DNA
atgagcactagagagtccttcaaccctgagagctacgagttggacaagagtttccgacttacaagatttacagaactgaaaggtactggttgtaaagtcccccaagatgtgctccagaaactcctcgagtctctgcaggaaaaccacttccaagaggacgaacagtttctgggcgctgtgatgcccagacttgggattggcatggacacatgtgttatacccctccgacacggcggtctttccttggtgcagacaacagactatatttatccgatagtggacgacccatacatgatggggcgtattgcatgcgcaaacgttctctctgacctgtacgccatgggagtgacggagtgcgataacatgcttatgctgctgggggtttccaacaaaatgaccgacagggaacgtgacaaagtcatgcctctgataatccagggatttaaagatgctgccgaagaggccggtacgtcagtgactggcggtcagacagtactgaatccttggatcgtgctcggcggagtagccacaacagtgtgccagcccaatgagttcataatgcccgacaatgccgtgccgggagatgtcctggttctcacgaaacctctgggaactcaggtcgcagtggccgtgcaccaatggctggatatcccagagaaatggaataaaatcaaactggtggttacccaggaagatgtcgaactggcctaccaagaggcaatgatgaatatggcacgacttaacagaactgctgctgggctgatgcatacttttaacgctcatgccgctacagatataactggcttcggtattctagggcatgcccaaaacctcgccaaacagcagcgtaacgaagtgtcttttgtcatccataacctacccgtgctcgccaaaatggcggcagttagcaaggcctgcggcaatatgtttgggcttatgcacggtacttgccctgaaacaagcgatgtgcaatag

SEQ ID NO: 239889 - DNA, 1200 bp, synthetic construct
  misc_feature 1..1200: note = Description of Artificial Sequence: Synthetic coding sequence
  source 1..1200: mol_type = other DNA
atggctgaagcaagcgcaacaggcgcatgtggcgaggccatggccgctgcagaaggatcttccggccctgccggattgacactaggcaggctgacagggttctccgggatgaagggactggtaggcggtcaggaggaagccagtcaagaggccggtcttccagctggagccggaccctctcctacatttcctgccctggggattggtatggatagctgcgttataccattaagacacggaggcttaagccttgtacagaccacagactttttttatccgcttgttgaagacccctacatgatgggaagaatcgcatgcgctaatgtgctatcagatttgtatgccatgggcatcactgaatgcgataacatgctcatgttactgagtgtatctcagtctatgtcagaggaagagcgagaaaaagtgaccccgctgatggttaagggattccgagacgccgctgaggagggagggaccgcggttactgggggtcagacggtcgtaaacccttggatcatcatcggtggagtagcaaccgttgtttgccagcctaatgagtttatcatgccagacagcgcagtggtgggcgatgtcctagtcctgacaaagcccctaggcacacaagtagctgttaatgcgcaccagtggctggacaatccagaacggtggaataaggtgaagatggtggtgagccgagaggaagtggaacttgcttaccaagaggctatgttcaacatggccacactcaatagaaccgccgctggcctgatgcacacgtttaacgcgcacgcagcgactgatataacaggcttcggcattctgggccattcccagaacctagccaaacaacagagaaatgaggttagctttgtgatacacaacctgcctattatcgcaaaaatggctgcagtgtcgaaggcctccggcaggtttggacttctgcagggaacatccgccgagacatcaggcggtctgctcatttgccttccgagggagcaggctgcccgtttttgttccgaaatcaagtctagcaagtacggtgaaggccatcaggcgtggatcgttggcatcgtggaaaaaggtaatcggaccgccaggattattgataagcccagggtcatcgaagtgttaccccgaggcgctactgctgccgtgctggctccagatagttcaaatgcttcctctgagccatcttcatag

SEQ ID NO: 239890 - DNA, 1452 bp, synthetic construct
  misc_feature 1..1452: note = Description of Artificial Sequence: Synthetic coding sequence
  source 1..1452: mol_type = other DNA
  misc_feature 1..177: note = DNA
  misc_feature 178: note = RNA
  misc_feature 179..1344: note = DNA
  misc_feature 1345: note = RNA
  misc_feature 1346..1452: note = DNA
atggccgaggcgtccgccaccggagcttgtggcgaagctatggccgctgccgagggcagctccggaccagctgggcttactctcggtcggtcgtttagcaactataggccgttcgagcctcaggctctggggctatccccaagctggaggctcactggctttagcggtatgaagggctgagggtgcaaagtgcctcaggaggctttgctcaagctgctggctggtctgacccggcctgatgtcaggcctccacttggcaggggcctggtggggggtcaggaggaggcatcccaggaagccggtctccctgcgggagcaggtcctagtcccacttttccagccttgggcatagggatggactcctgtgtaatcccactgcgtcacggaggcttgtctctggttcagacaacagatttcttctatcctctggtggaggatccctacatgatgggacgcatcgcatgcgcaaatgtccttagcgatctgtatgctatgggtataactgagtgcgacaatatgctcatgttgctttctgtctcacaatcaatgtccgaggaagagagggaaaaggtgacacctctgatggtaaaagggttcagggacgctgcagaagagggcggaaccgccgtgactggcggtcaaaccgtcgtcaacccgtggattattattggcggtgtggccactgtagtgtgccagcccaacgagttcatcatgccagatagcgctgtcgtcggcgacgtgctggttctgacaaaaccactgggcacccaagtcgcagtaaacgctcaccaatggcttgacaatccggaacggtggaacaaagtcaaaatggtggtgagcagagaggaagtggaattggcctatcaagaagcaatgtttaacatggcaacattgaaccgaactgctgctggactgatgcatacattcaatgctcacgcggctactgatattactgggtttggtattctcgggcactcacaaaacctcgctaaacagcagaggaatgaggtgagtttcgttatccacaatcttcctattattgccaagatggccgcagtttccaaggcttccggccgttttggcctcctgcaaggcacctctgcggagacctctgggggtctcctgatctgcttgccccgtgagcaggccgcacgtttttgcagcgagattaagagcagcaagtacggagaggggcaccaggcctggatcgtcggaattgtggagaaggggaaccgaacagcacgcatcatagacaaacccagggttatcgaggtgttgcctcgaggcgctaccgccgctgtgttggcacccgactcttctaacgcctctagcgagccgagctcatgagacgagcggaccgaagttgtgtggacgcttgaaccactgagcactattacagacggctcacaggagcttattgtaaggaacttccaaaggagactgcctgcatag

SEQ ID NO: 239891 - DNA, 1347 bp, synthetic construct
  misc_feature 1..1347: note = Description of Artificial Sequence: Synthetic coding sequence
  source 1..1347: mol_type = other DNA
  misc_feature 1..177: note = DNA
  misc_feature 178: note = RNA
  misc_feature 179..1347: note = DNA
atggctgaagcctctgcaaccggcgcttgcggcgaagcaatggctgcagctgagggctcatccggacccgcaggcttaactcttggaaggtccttcagcaattatagacctttcgagccccaagccctggggctttcaccaagctggaggttaacaggtttttctggcatgaagggctgaggctgcaaggttcctcaagaggctctcctgaagctgctggctggcttgacaagacctgatgtccgtcccccactgggcagggggctggtgggcggacaggaggaagcgtcacaggaagccggactgcctgccggagcaggaccgtctccaacatttcctgctctcggaatcgggatggactcctgtgtcatccccctgagacacgggggactgtctctcgtgcagacgacggactttttttaccccctggtggaggatccatatatgatgggacggatcgcttgcgcaaacgtactgagtgacctgtatgctatgggcatcaccgagtgtgataacatgctgatgttgctgagtgtatcacaaagcatgtctgaagaagagcgggagaaagtcactcccctcatggtcaaagggttccgggatgccgcagaggaaggaggcactgctgtgaccgggggacagaccgtcgtaaatccgtggatcatcattggcggagtggctaccgtcgtgtgtcaacctaacgaattcatcatgccagactctgcagtggtgggggacgtactagtccttaccaagcctttgggcacgcaggtcgccgtcaatgctcaccagtggctcgacaacccggagaggtggaacaaggtgaagatggttgtgtccagggaggaggtggaactagcctaccaggaagccatgttcaacatggcaaccctcaaccgcacagccgctggattgatgcatacttttaatgctcatgctgcaactgacatcaccggtttcggaatactgggccacagccagaacctggcgaagcagcagcgcaacgaagtctccttcgtaattcacaatttgccaatcattgcaaagatggcagcagtgtccaaggccagcggaagatttgggcttctgcagggcacatccgccgagacgagcgggggattgcttatctgtctgcccagggagcaggcagcaagattctgctcagaaatcaagtcaagcaaatatggcgaaggacatcaggcgtggatcgttggcattgtggaaaaaggtaacagaactgcccgtataatcgataaaccgagagtcattgaggtgctcccccgaggggcaactgctgccgtcctggctcccgactcctccaatgctagctctgaacccagctcttag

SEQ ID NO: 239892 - DNA, 1176 bp, synthetic construct
  misc_feature 1..1176: note = Description of Artificial Sequence: Synthetic coding sequence
  source 1..1176: mol_type = other DNA
atggcagaagcgtccgccacgggcgcatgtggcgaggccatggcagctgccgagggtagctcggggccagctgggctgaccctcggcaggtctttttccaattaccgtccatttgagccacaggaagctggattgccggcaggcgcaggcccatccccaacctttcccgcactcggcatcgggatggattcatgtgtgattcctttgagacacggcggactgagtctagtacagaccactgacttcttctatcccttggtggaggatccctatatgatggggagaattgcgtgtgccaatgtgctgtctgatctgtatgctatggggatcaccgagtgtgacaacatgctgatgctactttctgtatcccagagcatgtctgaagaagagagggaaaaagtaacgcctcttatggtcaagggttttcgggacgccgcagaagagggtggcactgctgtgacaggtggacaaaccgtcgtgaacccttggattatcatcggtggtgtggcgaccgtcgtttgtcagcccaacgagttcatcatgcctgatagcgccgtagtgggtgatgttcttgtcctcactaaaccactgggaacccaggttgctgtgaatgcacaccaatggctagataatcccgaacgatggaataaagtgaagatggtagtgtcccgcgaggaagtggagctggcctaccaggaggcaatgttcaatatggccactctgaacagaactgctgccggactaatgcacacatttaacgcccatgctgcaacggacatcacaggctttgggattctgggtcacagccagaatctcgcgaaacaacagcgtaatgaagtgtcctttgtgatccacaacttgcccattatcgctaagatggcagcagtctccaaggccagtggacgcttcggcctcttgcagggcacgtcggccgaaacttctggcggactgctgatttgtctcccacgcgaacaggccgctagattttgttctgagatcaagtcttctaaatacggggagggacaccaggcctggatagtcggcattgtagagaagggaaaccgaaccgccaggattattgacaaacctagagtcattgaagtacttccgaggggagccactgctgctgtcttggcaccagactcctcaaacgcgtccagtgaaccgtccagctag

SEQ ID NO: 239893 - DNA, 1671 bp, synthetic construct
  misc_feature 1..1671: note = Description of Artificial Sequence: Synthetic coding sequence
  source 1..1671: mol_type = other DNA
atggggagagctcgtcctgggcagaggggccctccttctccaggacctgcagctcagcccccagctccccctaggcggcgagccaggagtctagccctgttgggcgctctgctggcagcagcagcagcggcagccgtccgggtgtgtgcccgacacgctgaggcccaggccgctgccaggcaggaactcgctctcaagacactcggcacagacgggttgtttctcttctcaagtttagatacagacggtgacatgtacatttcccccgaggaattcaagccaattgctgaaaaactcaccggctccactccagccgcatcctgtgaggaagaggagctgcccccagacccatcggaggagaccctgacgatcgaggcaagatttcaaccactgctccctgaaaccatgaccaagagcaaagatggattcttgggcgttagcagactggccttatcaggactgcgcaattggaccgcagccgcatcaccgagtgccgtttttgccacaaggcattttcagccatttctgcctccccctgggcaagagttaggcgagccgtggtggatcatcccttctgaactgtcaatgtttaccggatacttatcaaataaccgattctacccgcctccacctaaaggaaaggaggttataatccaccgcctgttgtctatgtttcacccaaggcccttcgtcaagactcgatttgctccacagggcgcagtagcctgtctcactgccatcagtgacttctactacaccgtaatgtttagaattcatgccgaattccagctgtccgaaccacctgattttcccttttggttttcccccgctcagtttactggccacattatcctttcaaaagacgccacccacgtgcgagacttcagactgttcgtcccgaaccatagatccctaaacgttgatatggagtggctctacggggctagcgaatcctcaaatatggaagtggatatcggctacattccacaaatggagctcgaggccacgggcccttctgtgccctcagtgatcctggatgaggatggctccatgatcgatagccatctcccatcaggtgaacctctgcagtttgtgtttgaagaaattaagtggcagcaagaactcagctgggaggaggctgcaaggcgtctagaggttgctatgtacccattcaaaaaggtatcatacctcccattcacagaagccttcgaccgcgcaaaggccgaaaataagctcgtccattcaatactgctttggggggctctggacgaccaatcttgccactgttctggcaggacactgcgagaaaccgtgttggaatcatctccaattctgactctgctgaatgagagtttcatttccacctggagcttggtcaaagaactggaagagctgcagaataaccaggagaactcctcgcatcagaagctggccggacttcacctggagaagtatagcttccccgttgagatgatgatttgcttacccaacggaactgtggtgcatcacataaacgccaattactttctcgacatcaccagcgtgaaaccagaagagatcgaaagcaatctcttctctttcagctcaacgttcgaagatccttccacagcaacttatatgcagttcctcaaggagggacttagacgcggactcccattacttcagccatag

SEQ ID NO: 239894 - DNA, 1773 bp, synthetic construct
  misc_feature 1..1773: note = Description of Artificial Sequence: Synthetic coding sequence
  source 1..1773: mol_type = other DNA
  misc_feature 1..378: note = DNA
  misc_feature 379: note = RNA
  misc_feature 380..1383: note = DNA
  misc_feature 1384: note = RNA
  misc_feature 1385..1773: note = DNA
atgggccgagcaagacccggtcagcgcggacccccaagtcctggccctgcagcccagcctcctgcccctcctcgcaggcgggctcgctctctggcccttctgggggctctcctggcagccgcagcggcagcggctgtcagggtttgcgcccgacacgcagaagctcaggccgcagctcgtcaggaattggctctgaaaacactaggaaccgatggactatttctgttttcttctcttgacaccgacggcgatatgtatatctctcctgaagagtttaagcctatagccgagaagctcactggtagttgctctgtcacccagaccggagtacagtggtgtagccatagctcactccaaccgcagctcccatggctgaactgaagttcgtgcctgagccttttgcggagtacacccgctgcctcgtgtgaggaggaggaattgcccccagacccctccgaagaaacgcttacaatcgaggctaggttccagccccttctgccagaaacaatgaccaagtctaaagatgggttcctgggtgtgtctcgcctggccctttcaggactgcggaattggacggcggcagctagtccttcagctgtatttgcaacacgccattttcaaccattcttgcccccacccggacaagagctgggcgagccttggtggattattccaagtgagctgtcaatgttcactggctacctaagcaataaccgattttacccaccaccaccgaagggaaaggaggtcattatccaccgtctgttgtctatgttccacccaaggcctttcgtgaaaacaagattcgcaccacaaggagcagttgcatgcctgacagccatctccgacttttattacacggtgatgtttcggattcatgctgaatttcagctgtctgaacctccagattttccattttggtttagccctgcacagtttactgggcacattatcctgtccaaagacgccactcacgttcgggactttaggctgtttgtgccaaaccataggtcactcaatgtagacatggaatggttgtatggggcaagcgaatcatctaatatggaggtggacatcgggtacatcccacaaatggagttggaggcaaccggcccatccgtaccttcagtgatcctggacgaggatggctccatgatcgacagccacttgccgagcggcgaaccgctgcagttcgtgtttgaagagataaagtggcagcaggagctttcctgggaggaggcggcacgacggctggaggtcgccatgtatccttttaagaaggtgtcatatctgccatttactgaagcctttgacagagccaaagccgagaataagctggtccactcgatcctactgtggggcgctctggatgaccaaagctgttgagggtccggtagaacactccgtgagaccgtgctggaatcttcccctatcctgactctcttgaacgagagcttcatcagcacgtggagcttggttaaggaattagaagagttgcagaacaatcaggaaaacagctctcaccagaaacttgccggtcttcacctggaaaagtactcattcccggttgaaatgatgatttgtctacctaatggaaccgtcgttcatcacattaatgcaaactatttcctcgacataaccagcgtaaagcctgaagagatcgagagcaatcttttctccttctcaagtacattcgaggatccctctaccgccacgtatatgcaatttctaaaggagggtcttcgtcgtggactccccctgctacagccgtag

SEQ ID NO: 239895 - DNA, 1671 bp, synthetic construct
  misc_feature 1..1671: note = Description of Artificial Sequence: Synthetic coding sequence
  source 1..1671: mol_type = other DNA
  misc_feature 1..1281: note = DNA
  misc_feature 1282: note = RNA
  misc_feature 1283..1671: note = DNA
atgggccgtgctcggccaggtcaacggggacctccctcccctggtcccgctgcgcagcctccggcacccccacgccgacgcgctaggtcactggccttgctgggggctctccttgccgcagcggcagccgcagcagtgcgagtgtgtgccagacatgccgaagcccaggcagcggcacgacaggagctggctttgaagactttggggactgatggattatttctgttttcctccctggatacggacggagacatgtacatttctccagaagaattcaaaccaattgccgaaaaactcaccgggtcgactcccgcagcctcatgtgaagaggaggaactgccacctgacccctcagaagagacactcactatcgaggccaggtttcagcctctattgccagaaacaatgacaaaatctaaagacggttttcttggagtctcaagactcgccctttccggcttgaggaactggaccgccgctgcttcaccaagtgccgtgtttgccactaggcacttccagcctttccttccgcctcccggtcaggaactgggagagccctggtggatcatcccctctgaactgtccatgtttactggctatttaagtaacaatcgattctatcctccgcctccaaagggtaaagaggtaatcatccatcgccttctgtccatgtttcatccaaggcccttcgtgaagacccgcttcgcccctcagggagccgtggcctgcttgaccgccatatcagatttttattacaccgtgatgttccgaatccacgcagagtttcagctttctgagcctccagatttccccttctggttctcgccggcacaatttacaggtcatattatactctcaaaagatgcaacgcacgtgagagatttcagattatttgttccaaaccaccggtctctcaatgttgatatggaatggctgtatggggcttcagagagtagcaatatggaggttgacatcggttacatcccgcagatggaactagaggcaacaggtccttcagtcccatctgtgattttagatgaggacggatctatgatcgacagtcaccttccatctggcgaacctctccagttcgtcttcgaagagattaagtggcaacaggagctttcatgggaggaagcggcacgcagactggaggtagccatgtatccttttaagaaggtgagttatctacctttcaccgaagcttttgacagagcgaaagcagagaataaactggttcatagcattctcctttggggtgctctggacgaccaaagttgttgaggctctggacggacgctgagggagaccgtcctggaaagctctccaatcttgactctgctcaatgaaagctttatcagtacttggagtctggtcaaggaacttgaggaactgcaaaataaccaggagaattcaagccatcagaaactggcaggcctgcacctcgaaaaatactcatttccagtcgaaatgatgatttgtctgcccaacggaacagtcgtgcatcacatcaatgctaactactttttggacataacaagtgttaagccagaggagatcgaatccaatttgttctctttctcttctacattcgaagatccctcgacagcgacatatatgcagtttctcaaagaggggttgcgcaggggattaccattgttacagccatag

SEQ ID NO: 239896 - DNA, 1146 bp, synthetic construct
  misc_feature 1..1146: note = Description of Artificial Sequence: Synthetic coding sequence
  source 1..1146: mol_type = other DNA
  misc_feature 1..174: note = DNA
  misc_feature 175: note = RNA
  misc_feature 176..897: note = DNA
  misc_feature 898: note = RNA
  misc_feature 899..951: note = DNA
  misc_feature 952: note = RNA
  misc_feature 953..987: note = DNA
  misc_feature 988: note = RNA
  misc_feature 989..1032: note = DNA
  misc_feature 1033: note = RNA
  misc_feature 1034..1053: note = DNA
  misc_feature 1054: note = RNA
  misc_feature 1055..1098: note = DNA
  misc_feature 1099: note = RNA
  misc_feature 1100..1104: note = DNA
  misc_feature 1105: note = RNA
  misc_feature 1106..1125: note = DNA
  misc_feature 1126: note = RNA
  misc_feature 1127..1131: note = DNA
  misc_feature 1132: note = RNA
  misc_feature 1133..1146: note = DNA
atgtggcggtccctcggtctcgccctggctctctgtctcctcccctctgggggaaccgaaagccaggaccagtccagcctgtgtaagcagccgcctgcttggtctattcgggatcaggatcctatgctgaatagcaatgggagcgtcaccgtggtggccctgctgcaggccagttgatatctgtgcattctgcaggcgtccaagttggaagacctacgtgtgaaactgaaaaaggagggctatagcaacatctcctacattgtcgtaaaccaccagggtatcagttctcgcttgaagtacacgcaccttaaaaataaagtcagcgagcacatcccagtgtaccagcaggaagaaaaccagacggatgtgtggactctgctgaacggttccaaagacgattttctgatctatgacaggtgcggccgacttgtgtatcatctgggcttgccattctccttcctgacgttcccctacgtagaagaggcgattaagattgcctattgcgagaagaaatgtggaaattgctccctgacgacacttaaagacgaggatttttgtaaacgcgtgagccttgcaacagttgacaagacagtagaaacccctagcccgcactatcatcacgaacatcaccacaatcacggacatcagcatttaggatctagtgaattgtccgagaatcagcagccaggagcgcctaacgcacccacacaccccgctccacccggtctgcaccaccaccacaagcacaagggacagcaccgacagggacatcctgagaatcgcgatatgcctgcctcagaggatctgcaggatttacagaagaagctgtgccgaaagcggtgcataaatcaactgctgtgcaagcttccaaccgactccgaactcgcccctagaagttgatgttgtcattgcagacatctgatctttgagaaaaccggcagcgccatcacttgacagtgtaaggagaaccttccatccctgtgttcctgacaggggcttagggcagaagagaacatcaccgagtcctgccagtgacgtctgccgcctgctgcctgacagatcagccagcaactgatccccacagaggccagcgcatcatgacgctgaaagaaccaggccaaaaagtgagaatgaccgagtaactag

SEQ ID NO: 239897 - DNA, 630 bp, synthetic construct
  misc_feature 1..630: note = Description of Artificial Sequence: Synthetic coding sequence
  source 1..630: mol_type = other DNA
  misc_feature 1..174: note = DNA
  misc_feature 175: note = RNA
  misc_feature 176..630: note = DNA
atgtggagatccctcggccttgcgttggcgctgtgtctgttacctagcggcggaacagagtcgcaggatcagagctccctctgcaaacagccccctgcttggtccatccgggaccaggaccccatgctgaattcaaatggttctgtgaccgtggtggctctgctgcaggccagttgatacctgtgtattcttcaagcgtctaagctagaggatctgagagtgaagttaaagaaggagggatacagtaatatctcctacatcgtggttaaccatcagggaatcagctccagactgaaatatacccacctgaagaacaaggtgtcagagcatatcccagtgtaccagcaggaagagaatcagacagacgtgtggactctgctgaacggcagtaaagacgactttttaatttatgatcgttgtggacgactcgtctaccatttgggcctccccttcagtttcctgacctttccatacgtggaggaggcaataaagatagcctactgcgaaaagaagtgcgggaactgctccctcacaacactaaaggatgaggatttttgtaaaagagtaagcctggctaccgttgacaaaaccgtagaaaccccaagtccccattaccaccacgagcattag

SEQ ID NO: 239898 - DNA, 1146 bp, synthetic construct
  misc_feature 1..1146: note = Description of Artificial Sequence: Synthetic coding sequence
  source 1..1146: mol_type = other DNA
  misc_feature 1..174: note = DNA
  misc_feature 175: note = RNA
  misc_feature 176..897: note = DNA
  misc_feature 898: note = RNA
  misc_feature 899..951: note = DNA
  misc_feature 952: note = RNA
  misc_feature 953..987: note = DNA
  misc_feature 988: note = RNA
  misc_feature 989..1032: note = DNA
  misc_feature 1033: note = RNA
  misc_feature 1034..1053: note = DNA
  misc_feature 1054: note = RNA
  misc_feature 1055..1098: note = DNA
  misc_feature 1099: note = RNA
  misc_feature 1100..1104: note = DNA
  misc_feature 1105: note = RNA
  misc_feature 1106..1125: note = DNA
  misc_feature 1126: note = RNA
  misc_feature 1127..1131: note = DNA
  misc_feature 1132: note = RNA
  misc_feature 1133..1146: note = DNA
atgtggaggtcacttggattagccctggccctctgtctcctgccctcaggcggaaccgagtcacaggatcagagctccttgtgtaagcagccccctgcttggtcaatccgggatcaggatcctatgctgaactccaatggatccgtgactgtggtagccctgttgcaggctagctgatatctctgcatcctgcaggctagtaaactagaagatcttcgagtgaagctgaaaaaggagggttattccaatatatcttacattgtcgtgaatcaccagggaattagttctcggctgaagtacacacatctcaaaaataaagtctccgagcatattcccgtgtaccagcaagaggagaaccagactgacgtctggacactgctgaacgggtctaaggacgatttccttatctacgacaggtgtgggaggttggtctaccacctagggctgccattcagcttcctaacttttccctatgtggaggaggcaataaagattgcctactgcgagaaaaaatgtggaaactgctctctaacgaccctaaaagacgaagacttttgtaaacgcgtctctctggccactgtcgacaaaaccgtggagaccccatccccccattaccatcatgagcaccatcataaccatggccaccaacatctggggagctctgagctctccgagaatcagcagcccggtgctccaaatgcccctacccacccagctcctcccggactgcaccatcaccacaaacataaaggacagcataggcaaggtcacccagaaaatagggatatgcctgcctctgaagatctacaggatctgcaaaagaagctttgccgcaaacggtgcatcaatcagctgctgtgcaagctgccaaccgactcagagctggccccaagatcgtgatgttgccattgcaggcacctgattttcgagaagacaggctctgcgatcacttgacagtgcaaagaaaacctgccatcactgtgtagttgacaggggttgcgggcagaagagaatatcaccgagtcgtgccagtgacggttgcccccagcggcatgacaaatctcgcagcaactgattcctactgaggcctcagccagctgacgttgaaagaatcaagctaaaaagtgagagtgacccagtaactag

SEQ ID NO: 239899 - DNA, 933 bp, synthetic construct
  misc_feature 1..933: note = Description of Artificial Sequence: Synthetic coding sequence
  source 1..933: mol_type = other DNA
  misc_feature 1..174: note = DNA
  misc_feature 175: note = RNA
  misc_feature 176..897: note = DNA
  misc_feature 898: note = RNA
  misc_feature 899..933: note = DNA
atgtggagaagtcttggcttagctctggccttgtgtttgttacctagtggcggtaccgaatcgcaggatcaatcaagcctgtgtaagcagcccccagcttggtctatccgagatcaggatcctatgttgaatagcaatggttcggtgaccgtcgtggcactcctccaggcatcgtgatatctgtgcatcctgcaggcgagtaagctggaagacctgagggtcaagctgaagaaagaagggtacagtaatatttcttacattgtagtcaatcatcagggcattagctcgcggctcaaatatacccacctcaaaaataaggtgtccgagcacattcccgtgtatcagcaggaggaaaaccaaacagatgtttggaccttgctgaatgggagtaaggacgattttctaatctacgataggtgtggaagactcgtgtaccatctcgggcttcctttctctttcctgaccttcccttacgtggaggaagccattaagatcgcatattgcgaaaagaagtgcggcaactgttctttaaccaccctgaaggacgaggacttctgcaagagggtgtctctggcaactgtggacaaaacggtggagaccccctctccgcactaccatcacgaacatcatcacaaccacggacaccaacatctggggtcatccgaactcagcgagaaccaacagcccggtgctccgaacgccccaacccatcccgcacctccaggcttacatcaccaccacaaacataagggccagcaccgccaaggtcatcccgaaaatcgcgatatgccagcatccgaagacctgcaggacctgcagaagaagctatgtcgtaaaaggtgtattaatcaactgctttgcaaactcccaaccgactccgaacttgcgccaagaagctgatgctgtcattgtcggcacctcatattcgagtag

SEQ ID NO: 239900 - DNA, 1146 bp, synthetic construct
  misc_feature 1..1146: note = Description of Artificial Sequence: Synthetic coding sequence
  source 1..1146: mol_type = other DNA
  misc_feature 1..174: note = DNA
  misc_feature 175: note = RNA
  misc_feature 176..897: note = DNA
  misc_feature 898: note = RNA
  misc_feature 899..951: note = DNA
  misc_feature 952: note = RNA
  misc_feature 953..987: note = DNA
  misc_feature 988: note = RNA
  misc_feature 989..1032: note = DNA
  misc_feature 1033: note = RNA
  misc_feature 1034..1053: note = DNA
  misc_feature 1054: note = RNA
  misc_feature 1055..1098: note = DNA
  misc_feature 1099: note = RNA
  misc_feature 1100..1104: note = DNA
  misc_feature 1105: note = RNA
  misc_feature 1106..1125: note = DNA
  misc_feature 1126: note = RNA
  misc_feature 1127..1131: note = DNA
  misc_feature 1132: note = RNA
  misc_feature 1133..1146: note = DNA
atgtggaggtccctcggtctggccctggctctctgcctccttcccagcggagggactgaatcacaggatcaaagttcgctgtgtaagcaacccccagcttggtccatcagggatcaagacccaatgctcaactcgaatggcagtgtgacagtagtagctttgcttcaggcttcgtgatatctgtgtattctccaggcaagcaagcttgaagacttacgggtgaagcttaagaaagagggatactcaaacatctcatacatcgtcgttaaccaccaaggcatttcaagcaggctgaaatacacgcatctgaagaataaggtgagcgagcacatcccagtttaccagcaagaagagaaccagaccgatgtctggacactgttgaacggctctaaagacgatttcctgatatatgacagatgcggaagattggtgtaccacttgggacttcctttctcttttcttacctttccgtatgtggaggaggcaatcaaaatcgcttattgcgagaagaaatgcggaaattgtagtctgaccacattgaaagacgaagacttctgcaaaagagtgagtctcgccactgtggacaagaccgtggaaacccccagcccccactaccaccatgagcaccaccacaaccacgggcatcagcacttagggtcgtccgagttgagcgaaaatcagcagccaggggctcccaatgccccaacacatccggcaccacccggacttcaccaccatcataagcacaagggccagcatcggcagggacaccctgagaatagggacatgcctgcatcggaagatctgcaggacctgcagaaaaagctgtgtcgaaaacgttgcatcaaccaattactgtgtaaactacctaccgatagcgagcttgccccaagatcttgatgttgccattgtcgccaccttatctttgagaagactgggagtgccatcacctgacagtgcaaggaaaatctgccctcactgtgcagctgacagggactgcgagcagaagaaaacattaccgaatcctgtcagtgacgcctgccgcctgccgcatgacagattagtcaacagttgattcccacagaggcgagcgcttcttgacgatgaaagaatcaggcaaagaagtgagagtgaccgtccaactag

SEQ ID NO: 239901 - DNA, 264 bp, synthetic construct
  misc_feature 1..264: note = Description of Artificial Sequence: Synthetic coding sequence
  source 1..264: mol_type = other DNA
  misc_feature 1..36: note = DNA
  misc_feature 37: note = RNA
  misc_feature 38..264: note = DNA
atggctctggccgtgagagttgtgtattgtggggcttgaggatataaaagcaaatacctccaactcaagaaaaagttagaggatgagttccctgggcgattagacatttgcggtgaaggaactcctcaggcaactggcttctttgaggtcatggtcgccggtaaattgattcacagtaagaagaaaggtgacggctatgttgatacggagagtaagttcctcaagctggtagcagcgattaaagcagcgttagcacagggatag

SEQ ID NO: 239902 - DNA, 267 bp, synthetic construct
  misc_feature 1..267: note = Description of Artificial Sequence: Synthetic coding sequence
  source 1..267: mol_type = other DNA
atggccctggccgtaagagttgtctattgctgtggagccggaggctataaatcgaagtatctgcagttaaaaaagaagctggaggacgagttcccagggcgactcgacatatgcggcgagggaactccccaggccactggcttcttcgaagttatggttgccggtaagctcatacactccaaaaagaagggcgatgggtatgtggacacagaatctaaatttctgaagctcgtggcagcgatcaaggccgctctcgctcaggggtag

SEQ ID NO: 239903 - DNA, 351 bp, synthetic construct
  misc_feature 1..351: note = Description of Artificial Sequence: Synthetic coding sequence
  source 1..351: mol_type = other DNA
  misc_feature 1..282: note = DNA
  misc_feature 283: note = RNA
  misc_feature 284..351: note = DNA
atgagtttctgttcattctttgggggagaggtctttcaaaaccactttgagcccggtgtctatgtctgtgccaaatgcggctacgaactgtttagttctcggagcaaatatgcacactcttctccttggcccgcattcacagaaactattcatgcagatagtgtcgccaaaagaccggagcataatcggtctgaagccttgaaagtaagttgtggtaagtgcggcaacggcttgggacatgaatttctcaatgatgggcctaaacctggccagagtcgcttttgaatctttagctctagtttgaaattcgtccccaaaggaaaagagactagcgccagccagggccactag

SEQ ID NO: 239904 - DNA, 681 bp, synthetic construct
  misc_feature 1..681: note = Description of Artificial Sequence: Synthetic coding sequence
  source 1..681: mol_type = other DNA
atgagtttctgctcatttttcggaggcgaagtctttcagaaccactttgaacctggggtttatgtgtgcgcaaagtgtggatatgagctgttctcctcacggtcaaaatatgcccactccagtccttggccagcctttacagagaccatccacgcggattccgtagccaagcgcccagagcacaacaggagtgaagcgttgaaagtaaggggacatagaggtggcggtggcacgggagctgccagagagtcaagggaacccgtcccccctagcagcctctgtctgccgcattcctcaagagggctcgaggcttctatccctggtcttctgcccttacctggttcttgccaccccaggctctcaggggaacctggattgcttgtacagatgtgggaaactggccaagtttcttgtactggctcaagaacgaaagtgaatctgttatgccgccgaagcgcttgggaaattggtgtgtgggaggaaacgcccagcgctagtcccagcaaaggcctgcattgtggttgtataatggcgagatcgtctccaagttgtctggttatctttccaggggttctgtggcaggtgtggcagtgggtggggcctcgcgtgcctgaaaggcggcctcaggctggcgctgtgccaatactgaatatccagcagctcgcggaagtctgcccatag

SEQ ID NO: 239905 - DNA, 2328 bp, synthetic construct
  misc_feature 1..2328: note = Description of Artificial Sequence: Synthetic coding sequence
  source 1..2328: mol_type = other DNA
atggcctctgctggtcatattattaccctacttctctggggttacctcctggagctgtggacaggaggccacacagcagataccactcaccccaggttaagattgagccataaggaattactgaacctgaatcgcacaagcatcttccactcacccttcggcttccttgacttgcacactatgctcctcgacgagtatcaggagagactttttgtggggggaagagacctagtgtactcactgtcgctggaacgtatttccgacggctataaggaaattcattggccttccactgcccttaagatggaagaatgcattatgaaaggcaaagatgctggggaatgtgcaaattatgtgagggtcttacatcattataacaggacgcaccttctgacctgtggaaccggtgcattcgaccctgtatgcgcattcattagggtcggctatcatcttgaggaccctctgttccatctggagtcgcccagatctgagcgcggtagggggagatgtccattcgacccttctagttcgttcatctctaccctaatcgggtccgaactttttgccggactgtactctgactattggtctcgcgacgctgccattttcaggtctatgggcaggctcgctcacatcaggacagagcacgatgatgaacgcttgctcaaagagccgaaatttgtcggctcatacatgatccccgacaacgaggaccgggacgataataaagtgtacttcttttttactgagaaagctctcgaggctgaaaacaacgcgcatgccatctacacacgcgtgggacgactgtgcgttaatgatgtgggaggtcaaaggattctggttaataagtggtccacctttttgaaagcccgtctcgtctgcagtgttcctggcatgaacgggatagacacatactttgacgaattggaagacgtttttctgttgcccacacgcgaccacaagaacccagtcatattcggtctgtttaacactacaagtaacatcttcagaggacatgcaatctgcgtctatcacatgtccagcattagggctgcattcaacggtccgtacgcccataaggagggtccggagtatcattggtcggtctacgaaggcaaagttccctacccaagaccaggatcttgtgcctcaaaggtgaatggcggacgatacgggactaccaaggattatcccgacgacgcgatcagatttgccagatcacaccccctcatgtatcaagccatcaaacccgcacataaaaagccaatcctggtaaagactgatggcaaatataacctgaaacaaatagctgtagaccgggttgaagctgaggacgggcaatacgatgtcctctttatcgggacagataatggaattgtgctgaaggttattacaatctataatcaggagatggagagtatggaggaagttattctggaggagctacagatttttaaagaccctgtgcccatcatatcaatggaaatctcttcaaaaagacagcaactgtatatcggcagcgcttctgcggtcgctcaggtcaggttccatcactgtgatatgtatggctccgcctgcgctgattgctgcctggccagggacccttattgcgcttgggatggcatatcatgttcccgctactacccgacaggaacccatgccaaacggcgttttagacgccaggatgtgcggcacgggaacgcagcacagcagtgtttcgggcagcagttcgtaggcgacgcactcgataagaccgaagaacacctcgcttatggtatcgagaataattcaactctcttggagtgcacacccagaagtctccaggcaaaggtgatatggttcgtccaaaaaggccgagaaacacgtaaggaggaggtgaagacagacgatagagtcgtaaaaatggatctggggctgctgttcctgaggctgcataagtcagacgctggcacctacttctgccagactgtggagcattcctttgttcatacggtgaggaaaatcacactagaggttgttgaagaagagaaggttgaagacatgttcaacaaggatgatgaggaggacaggcaccaccgcatgccttgtcccgctcagtcctcaatctcccaaggcgcaaaaccgtggtataaggaattcctccagctgatcgggtatagtaactttcaaagagtggaggagtactgcgagaaggtgtggtgtactgaccgtaaaaggaaaaagctcaaaatgagcccctcaaaatggaaatacgcaaaccctcaggaaaagaaattgcgaagcaagcctgaacactaccgactgccgaggcacaccctagattcttag

SEQ ID NO: 239906 - DNA, 2148 bp, synthetic construct
  misc_feature 1..2148: note = Description of Artificial Sequence: Synthetic coding sequence
  source 1..2148: mol_type = other DNA
atgttgttggacgagtaccaggaacgcctgttcgtgggcggacgggatcttgtatatagcctttcattggagcggatctcagacggatataaggagatacactggcccagtaccgccttaaagatggaggaatgcattatgaagggtaaggacgccggagaatgtgccaattatgtgcgagtactgcaccattacaaccgaactcatttactcacttgcggtaccggagccttcgatcccgtgtgcgcgttcattcgtgttgggtatcatctggaagatccgctgttccacctggaatcacctagatcagaacgaggccgtggcaggtgccctttcgatcccagctcatcattcatcagcactttgatcggcagcgagctgtttgcaggcctgtacagtgattattggtctagagacgcagctatctttaggtcaatggggagattggcccatatacggactgaacacgacgacgagaggctacttaaggaacccaaatttgtaggatcatacatgattcccgataatgaagatagagatgataacaaagtgtacttcttctttacagaaaaggccctcgaagctgaaaataatgcacacgcgatatacacaagggtcggcaggctctgtgtcaatgacgttggaggacagagaatcctggtcaacaaatggagcacctttcttaaggctcgcttggtgtgctctgtgccaggaatgaacgggattgacacatacttcgacgagctcgaagacgtgttcttgctgcctacccgagaccataaaaacccagtgatctttggcctgtttaacacaacctctaacatttttagaggccacgcgatctgtgtttaccatatgagctcaataagagctgcgtttaacgggccttacgcacataaagaggggccagagtaccattggagcgtctatgagggaaaagtgccatacccacggcctggctcatgcgcatctaaagtaaacgggggtcggtatggaactacaaaggattatcccgatgacgctattcggtttgccagatctcacccattgatgtatcaggctatcaagcctgctcataaaaagccgatcctggtgaagaccgacgggaaatataatttgaagcagatcgccgtcgacagagttgaagccgaggatggtcagtacgatgtcctgttcatcgggactgataatggcatcgtcctcaaggtcattactatctataatcaggaaatggaaagcatggaagaagtcattctagaggaactgcagatcttcaaagaccctgtccccattatcagtatggaaattagcagtaagcgccagcagctctatatcggcagtgccagcgcggtagcccaagtgcggtttcatcactgtgacatgtatggcagcgcctgcgccgattgttgtttagcgcgagatccatactgtgcgtgggacggcatcagctgcagtcgttattacccaacaggaacccacgccaagcgcagatttagaaggcaagatgtaagacacggaaatgctgcccagcagtgcttcggacaacaatttgtgggtgacgctctggacaaaacagaggagcacctggcctatggaatcgaaaataactctactctgttggaatgtaccccgagaagcttgcaagccaaggtgatctggtttgtacagaaagggagagaaacacgcaaggaagaggtcaagacagacgatcgtgttgtgaaaatggacctggggctcctgtttcttcgtttacacaaatcagatgctggtacatacttctgccaaactgtggaacactcgttcgttcacactgtgaggaagattaccttagaagtcgtagaagaggaaaaagtagaagatatgttcaataaggacgatgaggaggacagacaccacagaatgccatgcccagcccagtctagcatctcgcagggcgctaagccctggtacaaagagttcttgcagctgataggttactctaacttccagagggtagaggagtactgcgaaaaggtgtggtgtacagatagaaagcgaaagaagctgaaaatgagtccctctaagtggaagtacgcgaacccccaggaaaaaaagcttagatcaaagcctgagcactatagattaccacgacacacactggatagttag

SEQ ID NO: 239907 - DNA, 2301 bp, synthetic construct
  misc_feature 1..2301: note = Description of Artificial Sequence: Synthetic coding sequence
  source 1..2301: mol_type = other DNA
atggcgtccgcaggccatataatcacattactactttggggctacctgttagagttatggaccggaggtcatacagctgataccactcaccctcggctgcgcctgtcacacaaagaattacttaacttgaacaggacctctatattccactctcctttcggcttcttggacttgcatactatgctcctcgatgagtaccaagagaggctgtttgttgggggaagagacctggtgtactctctctccctagagagaatcagcgatggttacaaggaaattcactggccaagcaccgccctgaaaatggaggaatgtatcatgaagggaaaagacgccggtgaatgcgcgaactatgtccgggtccttcatcactataacaggactcatctgttgacctgtggaaccggcgctttcgaccccgtgtgcgccttcatacgagtcggctatcatttggaagatcccttgttccacctcgaaagtcccagaagcgagagagggcgaggacggtgccccttcgatccgagtagctctttcatctcgacattgatcggctccgaattattcgccggtctgtattcagactattggagccgagacgctgctattttcaggtccatggggaggctcgcccatattcgcacagaacacgacgacgagcggctgctgaaggagcccaagttcgtgggctcctatatgatcccagataacgaagacagggacgacaacaaggtgtacttttttttcacggagaaagcgttggaagcagagaacaacgcacacgcaatctatacccgcgtcggcaggctgtgcgtaaatgatgtggggggacagcgtatccttgtgaataagtggagcacctttttgaaggccaggctggtatgctcagtccctggcatgaatggcattgacacctactttgatgaactggaggatgtgttcttacttcctactagagaccacaagaatccagtcatttttggcttgtttaatacaaccagcaacatcttcaggggacatgctatttgcgtatatcacatgagttcgatcagggccgcattcaacgggccatacgctcataaagagggaccggaatatcactggtccgtttacgaggggaaagtcccatacccaaggcccggaagttgcgcttccaaggtgaatggaggacggtatggaacaaccaaagattaccccgacgacgctattcgtttcgccaggagccaccccctgatgtaccaggccattaagcctgctcacaaaaagccaattcttgtgaagactgatgggaaatataatctcaaacagattgccgttgatcgagtggaggctgaagacgggcagtacgacgtgttgttcattggtacagacaacggaatagtgctgaaagtgatcaccatctataatcaggagatggaatctatggaagaagtcattcttgaagaactgcagatctttaaggatccagtgcccataatatcaatggagatcagtagcaagaggcagcagctgtatattggttccgcctccgcagtggcccaggtgagattccaccactgcgacatgtacggttcagcgtgtgcagactgctgtctcgcacgcgatccttactgcgcatgggacggtattagttgttcaaggtactatcctacgggaacacacgccaagcgcagatttcgtcgtcaggatgtgaggcatggaaacgccgctcagcagtgtttcggccagcagtttgtaggcgatgctcttgataagaccgaagaacacttggcctatggaattgaaaacaacagtacgctgctggagtgtaccccccgatccctacaggcaaaagtgatttggtttgtccagaaaggccgtgaaacccgaaaagaagaagtgaagaccgacgaccgggtagttaaaatggacttagggcttctcttcctgagattgcacaaatccgacgctggtacatatttttgtcagaccgtcgaacactcattcgtgcacaccgtacggaagataacactggaggtggttgaggaggaaaaggtcgaagacatgttcaataaggacgatgaggaggacagacaccatcgcatgccatgccccgcacagtcaagtataagtcagggagccaagccctggtataaggagtttctgcaacttattgggtactccaacttccagagagtggaagagtattgcgaaaaggtttggtgtacagacaggaaaagaaaaaagttgaagatgagtccatcgaaatggaaatacgcaaacccacaacactacagactgcctcgccatacccttgactcctag

SEQ ID NO: 239908 - DNA, 2286 bp, synthetic construct
  misc_feature 1..2286: note = Description of Artificial Sequence: Synthetic coding sequence
  source 1..2286: mol_type = other DNA
atggccctgcccgcactgggcctcgatccttggagtctgctcgggctgttcctgttccagctccttcagctcctattgcccaccacaaccgccggaggcggaggacaggggccaatgcctcgcgtgcggtactatgcaggcgacgagaggcgtgccttaagtttttttcaccagaaagggcttcaagacttcgatacactgttactctcaggcgatggaaatacattgtacgtcggtgcacgcgaagccatcctcgcgttggacatccaggatccaggtgtgccaaggctgaaaaatatgatcccatggccagcctccgaccgaaaaaagtctgagtgtgcttttaaaaagaaatcgaacgaaacacagtgcttcaattttatcagggttttggtatcttacaacgtcacccatctgtatacctgcggcactttcgctttttcgcccgcttgcaccttcatcgaactgcaggacagctatctgcttcctatcagcgaagacaaagtgatggagggtaagggacagtccccttttgaccccgcacacaaacataccgctgtgcttgtcgatgggatgctgtattccggaaccatgaataatttcctgggatccgagccaattctgatgagaactctgggtagccagcccgtcctaaagaccgacaatttccttagatggctgcatcacgatgccagttttgtggcggcaatcccttcaacccaggtcgtttacttcttttttgaggaaacggcttcagaatttgactttttcgagcggctgcacacctcacgggtggcacgcgtctgtaagaacgatgtcgggggagaaaaacttttgcagaaaaaatggacaacatttctgaaggctcagctgctgtgtactcaacctggacaactgccttttaacgttattcgacatgccgttctccttcccgcagactcccccacagcacctcacatttacgctgttttcacgtcccaatggcaggttgggggtacccgctcctcggctgtgtgcgcgtttagcctgttggacattgagagagtcttcaaggggaaatataaggaactgaataaggaaacttctcgctggaccacatatcgtggcccagagactaatcccagacctgggtcatgttccgtgggtccaagtagcgacaaggccctcactttcatgaaagaccattttttgatggacgagcaagtcgtgggcacacccctgctggtcaagtctggcgtggagtatacgcggctcgcagtagagaccgctcagggtttggacggccactcacatctagtgatgtacttagggactacaacaggaagcctccacaaggctgtggtgtcaggagattcttctgcccacctggtggaagagattcagctgtttcctgatcccgagccagtgcggaacctgcagctcgcacctactcagggggcagttttcgtcggcttctcgggaggagtttggcgagtccctcgcgcaaactgctccgtttatgagagctgcgtggattgcgttttggccagggatcctcattgcgcttgggatccggagagcaggacttgctgcttacttagcgcgcctaaccttaactcgtggaagcaggacatggaaagaggaaaccctgaatgggcctgtgcctccgggcctatgagccgctccttaagaccccagtcccggccacagataatcaaggaagtgctggccgtgcccaacagcattctagagcttccctgccctcatctcagcgccttagccagctattactggagccacggaccggctgccgttccggaggcctcaagcacagtatataatgggtctcttttactgatcgtgcaggatggtgtcggcggactgtaccaatgttgggcaaccgagaacggattcagctacccagtgatctcgtactgggtggacagccaggaccagacactggctctcgacccagaacttgccggtattccgcgtgagcacgtaaaggtgcccctcactcgggtgtccgggggagctgctctggccgcacagcagagctattggccccacttcgtaaccgttacagtgctcttcgcactggtgctgtcaggcgctctgatcatcttggtagccagccctctccgcgctctccgtgctaggggcaaggtgcagggatgtgaaacgcttaggcctggggagaaggctcccctatctcgggagcagcatcttcagtcaccaaaagagtgtagaacttcagccagcgacgtggatgccgacaataactgccttggaacggaggtcgcctag

SEQ ID NO: 239909 - DNA, 2286 bp, synthetic construct
  misc_feature 1..2286: note = Description of Artificial Sequence: Synthetic coding sequence
  source 1..2286: mol_type = other DNA
atggctctgcccgcattaggactggatccatggagcctgctgggcctatttctatttcaactcttgcaactgctgctgcctactaccaccgccggagggggaggccaaggcccaatgcccagagtaaggtactatgccggagatgagaggagagccttatcattttttcaccagaaagggctccaggattttgataccctgttgctgagcggggatggaaatacactttatgtcggggcacgggaagctattttagctctagacatccaggaccctggcgtgcccagactgaaaaacatgatcccctggccagcctctgacagaaaaaaaagtgaatgtgcgtttaaaaagaagagtaacgagacgcagtgtttcaactttatacgggtcttagtgtcctacaatgtgacccacctctacacatgtggaacattcgccttctctccagcctgcactttcattgaactccaggactcctacctgcttccaatttccgaggataaggtaatggaaggcaaggggcagtccccctttgatcccgctcataagcataccgcagtgttggttgacggcatgctgtacagcggtaccatgaataattttttaggcagtgaacctatattgatgcgcacactggggagtcagccagtgttgaagactgacaatttcctgaggtggttacaccacgacgcctcttttgtggctgctattccatcaacccaggtcgtgtactttttctttgaagagactgcatctgagttcgacttctttgagagactgcacacttctcgggtggccagggtatgcaagaacgatgtcggaggagagaaactgctgcaaaagaaatggacaacctttctcaaggcccagttgttatgcacccagcccggacagctcccctttaacgtcatccggcacgcggtgttgctgcctgctgactcccccaccgctccccatatctatgctgtgttcacttctcagtggcaggtgggcggaacaagaagctccgcagtgtgtgcattctcactgctggacattgagcgggtgttcaaaggcaaatacaaagagttgaataaggagaccagccggtggacgacatacaggggccctgagaccaaccccagacctggatcctgcagtgtgggtccgtcttcagataaggcgctgacatttatgaaagaccacttcctcatggatgagcaggtggtgggtaccccattgcttgtcaagtcgggagtggaatacactaggctcgcagtggagacagcccaggggctcgatgggcacagtcatctggtaatgtatctgggcacaacaactggcagtctacataaagctgtggtgagtggcgactcctccgcccacctggtagaggaaatccaactttttccagaccctgagcccgtaaggaacctgcagctcgcccctactcagggggcagtgttcgtaggtttcagcgggggtgtgtggagggtgccaagggccaattgcagcgtttacgagtcctgcgtggattgcgtgctggccagggacccccattgcgcctgggaccccgagtccagaacctgctgcctcttgtctgccccaaatctcaacagctggaaacaggacatggagcggggaaatcccgagtgggcatgcgcatcagggccaatgtctcgatcgcttagaccccaatcccgccctcagatcattaaggaggtgcttgccgtccccaactccattctcgagttgccatgtcctcacctatctgccctggccagttactactggtcccatggcccagcagccgtaccagaggcttcaagtaccgtatacaatgggtctttattgctcatcgtgcaggatggagtggggggactgtaccagtgttgggccacagagaatgggttcagctaccccgtgattagctactgggtcgactctcaggaccaaactctggcgctcgaccctgagctcgccggtatcccgcgagaacatgtgaaagtgccattgacgcgcgtaagcggaggagctgctttagcagcccagcagtcttactggcctcacttcgtgacagtcacggtgcttttcgcgctagtgctgtctggcgctctgatcatcctggtagcatctcctctcagagcgctccgcgcaagaggcaaggtacagggatgtgagacgctgaggccaggagagaaggctcccttgtctagagagcaacatctgcaatcacccaaagaatgccgcactagtgcttcagacgtcgacgccgataataactgtctaggcacagaggtcgcctag

SEQ ID NO: 239910 - DNA, 2172 bp, synthetic construct
  misc_feature 1..2172: note = Description of Artificial Sequence: Synthetic coding sequence
  source 1..2172: mol_type = other DNA
atgccccgagtcaggtactacgctggcgatgaacgacgtgccctgagctttttccaccagaagggactgcaggactttgatactttgctattgagtggagacggcaacacactttatgtgggtgcgcgtgaggccatattggcactggacattcaggacccgggagtcccgaggttgaagaatatgatcccctggcccgcatcagatcggaagaaaagtgagtgcgccttcaaaaaaaaaagcaatgaaacgcagtgttttaacttcattagggttctggtcagctataatgtgacgcatttatacacatgcgggacattcgccttcagtccagcgtgcacgttcatcgagctgcaagactcctacttgctgccaatctccgaggacaaagtgatggaaggcaagggccaaagtccctttgaccccgctcacaaacatacagccgtgctggttgacggaatgctctatagcggaacaatgaacaatttcctggggtccgagccgattctgatgcgcaccctagggtctcagccagtgctaaagactgacaattttctgcgctggttacaccacgacgcaagttttgtcgcagcaatcccatctacccaagtggtatactttttcttcgaagaaaccgcctcggaatttgacttctttgagcgcctgcatactagcagggtcgccagagtctgtaagaacgacgtaggaggggaaaagctcctgcaaaaaaaatggacaaccttcttgaaggcccaactgctgtgcactcaacccggtcagttgccgttcaacgttatccgacatgccgtgctactcccggcagactcaccaaccgctccccacatctatgcggtgtttactagtcagtggcaggtcggaggcacgcgcagctcagccgtttgcgcattctccttgctagacatcgagcgagtgtttaagggcaaatacaaagagctgaataaggagacatcccgatggactacctacaggggaccagagacgaaccccaggcccggatcctgttctgtagggcctagtagcgacaaggctctcacttttatgaaggaccacttcctgatggacgagcaggtggtcggcacacctcttttagtcaagtcaggagtcgaatacacccggttggccgttgaaacagcacaggggctcgacggacacagtcacctcgtaatgtacttaggaaccactacgggttccctccacaaagcagtggtgagtggagattctagcgctcacctggtcgaggagatccagctgttccctgacccagagccagtgcgaaacctgcaattggctcccacacagggggctgtttttgtgggattcagcggaggggtgtggcgggtgccacgagctaattgcagcgtgtatgagtcttgcgttgactgcgttttagcaagggatccacactgtgcttgggaccctgagtctcgaacctgctgtctgctcagtgccccaaatctcaatagctggaaacaggacatggagagaggtaaccccgagtgggcgtgtgccagtggcccaatgagtagaagtttgaggcctcagagtcgaccacagattattaaagaagtgctcgctgtcccaaattccattctggagttaccctgtccacacttgtccgctctggcctcttattattggagccacggacctgctgccgtgccggaagcttcctcgacagtgtataatggtagcctactgctgatcgttcaggacggtgtgggagggctgtatcagtgttgggccacagaaaacggcttttcgtacccagtgatttcctactgggtcgactctcaggatcaaactctcgcattggacccggagctagccggtatccctagagagcacgtaaaggtgcccttgaccagagtctcagggggtgctgcccttgccgctcagcagtcttactggccacatttcgtgaccgtgacagtccttttcgctctcgtcctgagtggcgctttgattattctggtggcaagcccactaagggcattacgagcacgcggtaaggtgcaagggtgtgagaccctccgccctggcgaaaaagctcccctcagccgcgagcagcatctgcagtcaccaaaagaatgtcggaccagcgcatccgacgtcgacgccgacaacaattgcctgggaacagaggtggcctag

SEQ ID NO: 239911 - DNA, 1890 bp, synthetic construct
  misc_feature 1..1890: note = Description of Artificial Sequence: Synthetic coding sequence
  source 1..1890: mol_type = other DNA
atgattccatggcctgcctcagaccggaagaagtccgaatgcgctttcaagaaaaaaagtaacgaagagcttcaggatagttacttgttgcccattagcgaggataaggtgatggaaggtaaggggcagagtccattcgatccagctcacaagcatacggccgtgttggtggatggcatgctttactcaggaactatgaataacttcttgggctctgagcccatactaatgagaaccttggggagtcagcccgtcttaaaaaccgataattttttgagatggttgcatcacgatgcctcttttgtggcagcgatccccagcacgcaagtggtctatttctttttcgaggagacggcctcagaatttgacttcttcgagcgtctccacacgagccgagtcgctcgggtctgtaaaaacgacgttgggggagagaaactactgcaaaagaaatggaccacattcctaaaagcacaattactgtgcacacagccagggcaacttccatttaacgtcattcgccatgctgtgctcctgcctgctgattctcccaccgctccacacatatatgcagtgttcacatcacagtggcaggtcgggggtacccggagttcagcagtctgcgctttctccctgcttgatatcgagagggtttttaaaggcaagtacaaggaattgaataaggaaacatcccggtggactacctatagagggcctgagacgaacccgcgaccaggcagttgtagcgtcgggccatctagtgacaaagcactgacatttatgaaggaccattttctgatggatgagcaggtggtgggaaccccccttttggtgaaatccggggtggagtacacccggcttgctgttgaaaccgcccaaggcctggatggacattcacatctcgtgatgtatctggggaccacgaccggttcactgcataaagcagtggtatctggggattcgtccgcacatctcgttgaggagatccagctgttccccgatccagaacctgtccggaatctgcagcttgcccctacccaaggggcagtcttcgtcggcttttccggaggcgtgtggcgggttcccagagcgaattgtagtgtatacgagagctgcgtggattgtgtgctggctagagatccccactgtgcttgggatcctgagtcacggacctgctgtctcctttccgcacccaatttgaacagttggaaacaagatatggaacgtggcaacccggagtgggcatgcgccagcggaccaatgtcccgatcgctcagaccccaaagccgtccacagataatcaaagaggttctggctgtccccaatagtatactggaactgccctgccctcacctctccgcacttgctagctactactggagccacggacctgcggctgtgccggaagcctccagcacggtgtacaatggatctcttttgttaatcgtgcaagatggtgtcggagggctttaccaatgttgggctacggaaaacgggttttcataccccgtgatctcttactgggtggactcgcaggaccaaactctagccctggaccctgaactcgccggaatcccaagagagcacgtgaaggtccccctgacccgagtctccggcggtgctgctctggccgctcagcagagctattggccccactttgtcactgtcacagtcctgttcgcgttagtgctgtcaggcgcacttattatcctggtggcatccccactgcgagctctccgagccagagggaaagtgcagggatgcgagacactgagacccggagaaaaggcacccctgtcccgggaacagcacttgcagagccctaaagagtgccggacaagtgcttccgacgttgacgcagataacaactgtctcggcactgaagtagcatag

SEQ ID NO: 239912 - DNA, 2286 bp, synthetic construct
  misc_feature 1..2286: note = Description of Artificial Sequence: Synthetic coding sequence
  source 1..2286: mol_type = other DNA
atggcactgcccgctctcggactggacccctggagcctcctaggactgtttttgttccaactattacagcttcttttgcccacaacaactgccggtgggggagggcagggcccaatgccccgtgtccgatactatgctggtgatgaacgccgtgccctgtccttcttccatcagaagggacttcaagattttgatacgctgttgctgtcgggggatggaaacaccctgtatgtgggcgcaagggaggccatccttgcccttgacatccaggatcctggtgtcccaaggctcaaaaatatgattccttggcctgctagcgaccggaagaaatctgaatgtgccttcaaaaagaaatcaaacgaaacgcaatgtttcaatttcattagggtactagtctcgtataatgttacccacctgtatacttgtggaactttcgcgttttccccggcttgcactttcatcgagttgcaggattcctatctgctgccaatttccgaggataaggtcatggaggggaaaggacaatccccttttgaccctgcacataaacataccgcagtccttgtggacggaatgctttactctggcaccatgaataacttcctggggtcagaaccaatactcatgagaactctgggaagccaacccgttttgaagaccgacaacttcctgcgctggctccaccacgatgcttcgttcgttgctgcgatcccctcaacacaagtggtatactttttctttgaggaaacggccagcgaattcgatttcttcgagcgcctgcacacctcacgggtagccagagtgtgtaaaaatgacgtgggcggagaaaagctgctgcagaaaaagtggacaacctttctaaaagcacagcttctgtgtacccaacccggtcaactccctttcaacgtgatcaggcacgcagtccttctccctgccgattcacccaccgcccctcacatctacgccgtctttactagtcagtggcaggtggggggtacacggtcaagcgccgtttgcgccttttctcttctggacatcgaacgtgtgttcaagggcaagtacaaggagctgaacaaagaaacctctagatggacaacctaccgcggtcctgaaaccaacccacggcctggctcttgtagtgtgggcccaagctcagataaggctctgacttttatgaaggatcacttcctaatggatgaacaagtcgtgggcactcctttgctagttaagtcaggggtcgagtacactagactggcggtcgagactgctcagggattggacggacactctcacctggtgatgtatctcggaaccacgactggcagcttgcataaagccgtggtctccggcgattcctcagcccacttggtggaggagatacagctatttcccgatcccgaaccagtccggaatctgcagcttgcacccactcagggagccgtgtttgtgggattcagcggcggtgtgtggcgagtcccacgcgctaattgcagcgtgtacgagagctgtgtggattgtgtgcttgcacgggacccacattgcgcctgggatcctgaatcaaggacatgttgtctgttatctgccccaaacttgaactcatggaagcaggacatggaaagaggtaatcctgaatgggcctgtgcttccgggcctatgtcccgaagcctcagaccacagagcagaccccagattataaaagaggtgctggccgtgcctaactctatattagaacttccatgtccacacctgtccgctttggcatcttactactggtcccatggaccagctgcggtgcctgaggcaagcagtacagtctataatgggtccctgcttctcatcgtgcaagatggcgtggggggattgtatcagtgctgggcgacggaaaatggctttagctacccagtgatttcatattgggttgacagtcaagatcagaccctggcgttagaccctgagttggccggaattccccgagagcacgtcaaagtgcccctcactagagtgtctggaggcgctgcgctggcagcccaacaatcttactggccccactttgtaactgtaactgtgctgtttgccctcgtgttaagcggggctctgattatactggtggcatcacctctgcgggctctgagagcccgaggcaaggtacagggctgtgagaccctgcggcctggcgagaaggcaccactgtcaagagagcagcatcttcagtcaccaaaagaatgccgtacctctgctagcgatgtggatgcagacaacaactgtctcgggactgaggtcgcttag

SEQ ID NO: 239913 - DNA, 1890 bp, synthetic construct
  misc_feature 1..1890: note = Description of Artificial Sequence: Synthetic coding sequence
  source 1..1890: mol_type = other DNA
atgattccttggcccgcttctgacaggaagaagagtgaatgcgcctttaaaaaaaagagcaacgaggaactgcaagatagttacctgctgccaatttctgaggacaaggtcatggaaggcaaggggcagtcgcctttcgatcctgcacacaagcatacagccgttctggtagatggaatgttgtactcgggtactatgaataactttttgggttcagagcccatcctaatgagaacattgggttctcagcctgtgctcaagactgataatttcctgcggtggctccaccatgatgcctccttcgtagctgcaatcccaagtacacaggtggtgtattttttcttcgaggaaactgcttcagagtttgactttttcgagagactccatacctcacgcgttgcgagagtgtgcaagaatgacgtgggcggagagaagcttctgcagaagaaatggacaacattcctcaaagcccagcttctgtgtacccagccgggtcaactcccatttaacgtgattcgccacgccgttctgctgccggctgactcccccaccgccccacacatatacgccgtgttcacctcccagtggcaagttggaggcaccagaagcagtgctgtctgtgctttctctctgctcgacattgaacgagtgttcaaaggcaagtacaaggagttgaataaggagacttcgcgctggactacctataggggcccagagactaacccacgtccaggttcttgcagtgttggacccagcagcgataaggcattgaccttcatgaaggatcacttcttgatggatgaacaagttgtagggactcccctgctggtgaaaagtggcgtggagtacacaagattggctgtcgaaactgctcagggattggatggccactcgcacctcgtgatgtacttgggcacgaccactggatccctgcataaggctgtggtaagtggggattctagcgcccacctggtcgaggaaatccagttattcccagaccccgaaccagtgaggaatctgcagctcgcacccacccagggcgctgtcttcgttggattctcaggtggggtgtggcgggtaccaagagctaattgttccgtgtatgagtcatgtgttgactgtgtgctggccagggaccctcattgcgcctgggaccccgagagtcgcacgtgttgtctgttatcggcgccaaaccttaatagctggaagcaggacatggagcgtggaaaccctgaatgggcctgcgcctcaggcccaatgtcacgaagcctccggcctcagagccgccctcaaattattaaggaagtattagcggtccctaactctatcctggagctgccgtgtccccacctgagtgcgcttgctagttattactggtcacatggtcctgccgcagtgcctgaggcttcaagcactgtatataatggttctttacttctcattgtccaggacggagtaggcggactctatcagtgctgggctaccgaaaacggcttctcctatccagtgatctcctattgggtggacagccaagatcaaacgttagccttagacccagagctggccggtatccccagagagcatgtcaaagtccccctgacccgggtatctgggggagcagccctcgccgctcagcagtcctactggccccatttcgtcaccgttacagtgctattcgccctcgtcctttcaggagcgcttatcatcttagtggcttcccctttgcgggcattgcgggctcgcggtaaagtccagggctgcgagactctgcgccctggtgagaaggcccctctgagccgggaacaacatctgcagtcgcccaaggagtgcaggaccagtgcctcagacgtagacgcagacaacaattgtttgggaaccgaagtcgcctag

SEQ ID NO: 239914 - DNA, 663 bp, synthetic construct
  misc_feature 1..663: note = Description of Artificial Sequence: Synthetic coding sequence
  source 1..663: mol_type = other DNA
atgattccttggcctgcttccgatcgcaagaagtccgagtgcgctttcaaaaagaaaagtaacgaaacccagtgcttcaattttataagggtgctggtgtcctacaacgtgacgcatctttacacctgcggcacctttgctttttcccccgcatgtacatttatcgagctgcaggattcctatcttttgcccatcagcgaagataaagtaatggagggaaaagggcaatctccatttgaccccgctcataagcacaccgccgtactggttgatggaatgttgtattctggcaccatgaacaactttttgggcagcgaacctattttgatgcggacgctggggtctcaaccagtgttgaaaaccgataattttctgagatggctccaccatgatgctagcttcgtcgcagcaataccatccacccaagtagtttatttcttctttgaggaaacagctagcgagttcgactttttcgaacgcctccatacatccagagtggctcgggtgtgcaagaatgacgtaggtggggagaaactgttacagaagaagtggacaacatttctgaaggcccagcttctctgcacccagcctggccagctcccctttaatgtcatccggcacgctgtgttattaccggcagactctcctactgctcctcactag

SEQ ID NO: 239915 - DNA, 966 bp, synthetic construct
  misc_feature 1..966: note = Description of Artificial Sequence: Synthetic coding sequence
  source 1..966: mol_type = other DNA
atggctcttcccgcattgggactcgacccttggagcctgttagggctgttcctcttccagctgttacaactcttgcttcccacaaccacagccggagggggtggacagggccctatgcctcgtgtgagatattacgccggagatgaacgacgggctctgagtttcttccaccagaagggattgcaggacttcgataccctgctgctgtctggcgacggaaacaccctttatgtcggtgctcgcgaggcaatcctggcactggacattcaggaccctggcgtcccacggctaaagaatatgattccgtggcccgcatccgaccggaaaaagtcagaatgtgctttcaaaaagaagtctaatgagacacaatgcttcaacttcataagggtgctcgtatcttacaatgtcactcatctgtacacctgcggcaccttcgcattttcccctgcatgcaccttcatcgagttacaggattcttaccttttaccgatatctgaagataaagtgatggaaggaaaagggcaaagtcccttcgacccagcacacaagcatacagcagtgctggtggatggtatgctttatagtggaacaatgaacaattttcttgggtctgagcctattctcatgcggactctggggtctcaaccggtgcttaaaaccgacaacttcttgcggtggctgcatcacgatgccagctttgtggcagctatccccagcacacaagtggtctacttttttttcgaagaaacggccagtgagttcgacttcttcgagcggctgcatacaagccgggtcgcaagagtgtgcaaaaacgatgtcggcggtgaaaagctcctccagaaaaagtggacaacattcctcaaagctcagttgctgtgcactcagcctggccagctccccttcaacgtgattagacatgcggtgcttttacctgctgatagtcctactgccccacacatttattag

SEQ ID NO: 239916 - DNA, 711 bp, synthetic construct
  misc_feature 1..711: note = Description of Artificial Sequence: Synthetic coding sequence
  source 1..711: mol_type = other DNA
atggccctgcctgccctgggcctcgatccctggtccctgcttggactgtttctgttccagctgctgcagctgctcctgccgacaactaccgcgggaggagggggacagggacctatgcctcgagtgcgatactacgccggtgacgagagaagagcacttagcttttttcaccagaagggcctccaagacttcgatactttactcctgtctggagatggcaacaccctgtacgttggcgctcgggaagctatcctggcgcttgatattcaggatcccggagtgcccaggctgaagaatatgattccatggcccgctagtgatcgcaaaaaatccgagtgcgctttcaagaagaaatcaaatgaggagcttcaagactcatatctactgccaatcagcgaagacaaagtcatggagggcaagggccagagcccctttgatcccgcacataaacacactgccgttctcgtcgatggaatgctgtatagcggtactatgaacaatttcctagggtcggagccaattttaatgcggaccctcggtagccagccagtgctcaagaccgacaatttcctgcgatggctgcatcacgatgcttctttcgttgccgcaatcccctcgacacaggtcgtctacttttttttcgaagagactgcaagtgaattcgattttttcgagcgcttacatacatcccgagtggctagagtgtgctag

SEQ ID NO: 239917 - DNA, 2172 bp, synthetic construct
  misc_feature 1..2172: note = Description of Artificial Sequence: Synthetic coding sequence
  source 1..2172: mol_type = other DNA
atgcccagagtgagatattacgccggagatgaaagacgggctctgtccttctttcatcagaagggccttcaggactttgataccctgctactctccggcgatggcaacacactttatgtgggggctagagaagctatcctagccctggacattcaggacccaggcgtgccacgactgaagaacatgataccatggcctgcgtcagatcgcaaaaagtcggagtgtgcattcaagaaaaagtctaacgaaacgcagtgcttcaacttcattcgggtactagtaagctataacgtcacccacctgtatacatgcgggactttcgcctttagtccggcatgcactttcatagagctccaagacagctacttgcttccaatctcagaggataaggtgatggagggaaagggccaatctccattcgatcccgcacataaacacacagccgtgctcgttgacggtatgctctacagtggcaccatgaacaactttctcggatctgagcccatcctaatgcgcaccctggggtcgcagcccgtgctgaaaactgataactttctccgatggctgcaccacgatgccagctttgttgctgccatcccctccacccaggttgtctatttcttctttgaagaaaccgcgtccgagtttgattttttcgagcgacttcacaccagccgcgttgctagggtttgcaagaacgacgtaggcggagagaaactgctgcagaagaaatggaccacatttctgaaggctcagcttctctgcactcagccaggtcaattgccattcaacgtcatcagacacgctgtgcttctgcctgcagattcacctacagctcctcatatctacgctgtgttcacttcccagtggcaggtgggtggaactcggagctccgcggtctgcgcattttccttactcgatattgagagggtcttcaaaggaaaatataaggagctgaacaaagaaactagtcgatggacaacttaccggggaccggagaccaatcccaggcctggtagctgttctgtagggccatcaagcgacaaggctctgaccttcatgaaggatcactttctaatggacgaacaagtcgtcggaacaccactgctggttaaatctggagtggagtatactaggctcgccgttgagacagctcaggggctagacggtcacagtcacctggttatgtatctgggaactactaccggatccctgcacaaggccgttgtgtccggcgactcatccgcacaccttgtggaggaaattcagcttttccctgatcctgagcccgtgaggaatttgcagctggccccaactcaaggagccgttttcgtaggattcagtggtggcgtgtggcgagtgccccgagctaattgtagtgtgtatgagtcttgtgtggattgtgtcttagcccgtgacccacactgcgcatgggaccccgagtcacgaacctgttgtctgcttagtgcccctaacctgaacagttggaaacaggatatggaaaggggaaaccccgagtgggcctgcgcttctgggccaatgagtaggtctctccgtccacagtcaagaccacagattatcaaagaagttttggccgtgccaaattccatcctagagctgccctgcccacacctgtccgctttggcgagctactattggtctcacggccctgccgcagtgcctgaagcatctagtacagtgtacaatggatccctccttctgattgtccaagacggagtcgggggactctatcagtgttgggccactgagaatggcttcagctatcctgttatctcttattgggttgattcccaggatcaaacgctggccctggatccggagctggctggcatcccgcgagaacacgtgaaagtgcctctaacacgagttagtggaggggctgccctcgctgcccaacagtcttactggccccactttgtcacagtcactgtgttgttcgctctggtgttaagcggcgcactcatcattctcgtagcctcaccgctgcgggcactccgagcccgaggaaaggtgcaggggtgtgagaccctgagaccgggagagaaggctccactctctcgggagcaacacctccagtcccctaaagaatgtcgtacatcagccagcgacgtggatgccgataacaactgtctgggaaccgaggtcgcctag

SEQ ID NO: 239918 - DNA, 3225 bp, synthetic construct
  misc_feature 1..3225: note = Description of Artificial Sequence: Synthetic coding sequence
  source 1..3225: mol_type = other DNA
atgaaagggacgtgcgtcattgcatggctcttcagtagtttggggctatggcgcctggcccaccccgaagcacaggggaccacccaatgccagaggaccgaacaccccgtaatcagctataaggaaatcggcccatggctgcgcgagtttagagctaagaacgccgtagatttctcccagctgacctttgatcccggacagaaggaactcgtcgtgggagcgcgaaactatttattccgcttacagttagaggacctctccctcattcaggccgtggaatgggagtgtgacgaggctacaaaaaaggcctgttactcgaaagggaagagtaaagaggaatgtcaaaactacatacgggtcctcctcgttggcggtgacaggctgttcacttgtggaacaaacgccttcactccagtgtgcactaaccgcagcttgagtaacctaaccgagatacatgatcagatatcgggcatggccaggtgcccgtactcgccacaacacaattctacagccctgttgaccgcgggaggcgagttgtatgccgctaccgctatggactttccgggtagggatcctgctatttaccggagcctcggcattctgcccccactgcggaccgcgcagtacaactctaagtggcttaatgagcctaatttcgtaagcagctacgacattggcaattttacctacttctttttcagggagaacgcagtcgagcacgactgtgggaaaaccgtgttctcacgcgctgccagagtttgcaagaacgatatcggcggacggttcctgcttgaagatacatggacaacatttatgaaagcacgcttaaattgttcccgccctggggaggtgccattttactacaacgagctgcagagcacattcttcctacccgagctcgatctgatatacggcatctttaccaccaacgtgaatagcattgccgcttcagctgtgtgcgtctttaatctctcagcaattgctcaggctttcagtgggccatttaaataccaggagaattctcgctccgcctggctgccctaccccaatccgaatcctcactttcagtgtgggacagtcgatcaaggactttacgttaatttgactgagaggaacttgcaagatgcccagaagttcattctcatgcatgaggtggtgcagcctgtgacaaccgttccctcttttatggaagacaactctaggttctcccatgtggccgttgatgtggtgcagggtagagaggccctagtccacattatttacctggccacagactacggaacaattaagaaggtaagggtgcccctaaaccagacatccagctcgtgtttgctggaggaaattgaactgtttcctgaaaggagaagagaacctatcagatcactgcaaattctccattcgcagtcggttctgtttgtgggcttgagagagcacgtggtgaagatccccttgaaacgatgccagttctatagaacgcggtctacttgcatcggggcacaggatccttattgtgggtgggatgtggtgatgaagaaatgtacctcactcgaggagtcgctgagtatgacacagtgggaacagagtattagtgcttgccccacacgaaatctgactgttgacggccacttcggagtgtggagcccctggactccctgtacccatactgatggatcagctgtgggaagttgcctgtgtagaaccaggagctgcgattcccccgctccccagtgcggtggatggcagtgcgaaggccctgggatggagattgccaactgcagccgcaatggtggctggactccatggacctcatggtctccatgtagcaccacctgcggcataggctttcaggtgcgccagaggagttgctccaatcccacccctaggcatgggggacgcgtctgcgttggacagaatagggaggagagatactgcaatgaacacttgctatgcccgcctcatatgttctggacaggctggggtccatgggagcggtgcaccgcacagtgcggtgggggaattcaagccagacgacggatatgcgagaacggtccagactgcgcagggtgcaatgtggaatatcagtcatgtaacaccaatccttgtccggaacttaagaagactacaccctggacaccgtggacccccgtgaatatttccgacaatggcggacactatgaacaacgattccggtacacttgtaaggctagactcgcagacccgaacctcctggaggtggggaggcagcgaatcgaaatgagatattgctcctccgatgggacatcggggtgtagcacagacggcctcagcggcgacttcctcagagcgggtagatactcggcccacaccgtgaacggggcttggagtgcttggacgagctggtcccagtgcagccgcgattgcagccggggaattcggaataggaaaagagtgtgtaacaacccagagccaaagtatggcggaatgccatgcttggggccaagcttggagtatcaggagtgcaatatactgccttgtccagttgacggcgtctggagttgctggtcaccctggaccaagtgtagcgcaacttgtggtggcggtcactacatgagaacaagatcctgtagcaaccctgctccagcctacggcggtgatatttgcctgggccttcacaccgaagaagccttgtgtaatactcaaccctgcccagagtcgtggtccgaatggagtgactggagcgagtgtgaggcatcaggagtccaggtgcgcgctagacagtgtatattactgtttcccatgggttctcagtgctcgggcaatactactgaaagtaggccctgcgtatttgattctaatttcatccccgaagtgtctgtcgcccgaagctcatctgttgaggaaaaacgttgtggcgaatttaatatgtttcacatgatcgccgtgggactgtcttcatcaattctaggatgcctgcttactcttttggtctacacttactgtcaacgttaccagcaacaaagtcatgacgccactgttatccaccccgtatcccccgctccattaaatacatccattaccaatcatatcaacaaactggataagtacgatagcgtagaggccattaaagcgtttaacaaaaacaacctcattttggaagagcgcaacaaatattttaatcctcacctgacgggcaaaacctacagcaatgcttatttcaccgacctgaataactatgacgagtactag

SEQ ID NO: 239919 - DNA, 765 bp, synthetic construct
  misc_feature 1..765: note = Description of Artificial Sequence: Synthetic coding sequence
  source 1..765: mol_type = other DNA
atgaaggggacatgcgttattgcatggctgttttcgagcctcggtttgtggcgcctcgcccaccccgaagcccagggtaccactcagtgccagaggactgagcaccccgtcattagttacaaggagattggcccatggcttcgtgagttcagggctaaaaatgctgtggacttcagtcagctcactttcgatccaggtcaaaaagagttggttgtgggcgcaagaaactacttgttccgtctgcaactcgaagacttgtccctcatccaggccgtggaatgggagtgtgacgaggcgactaagaaggcgtgctatagcaaaggaaagagcaaggaagaatgccaaaactacatccgtgttctcttggtgggcggtgatcgactctttacctgtggaactaacgccttcacacccgtgtgcacaaacagatccttgagtaacctgactgagatccacgatcaaatcagcggcatggcgcgatgtccgtattcgccacagcacaacagcactgcattgcttactgccggtggcgaactctatgccgctactgccatggactttccaggcagggaccctgcaatttacaggtcacttggcatcctacctcccctgaggacggcacagtacaattcgaagtggcttaacgagcccaactttgtgtcatcctacgacataggtaacttcacctacttcttttttagggagaacgccgtggagcacgactgtggtaagactgtattctcccgtgccgctcgggtctgttag

SEQ ID NO: 239920 - DNA, 2001 bp, synthetic construct
  misc_feature 1..2001: note = Description of Artificial Sequence: Synthetic coding sequence
  source 1..2001: mol_type = other DNA
atgacaccacctccgccaggcagggctgcacccagcgctccgagagcacgggtccccggtcctccagccagattaggcctcccgctccggctccgtctactgctactcctctgggccgctgctgcctccgcccagggtcacctgcgtagtgggccacggatcttcgcagtctggaagggccatgtggggcaggaccgagtcgatttcggccaaacggaacctcacacggttctgttccatgaacccggatcatccagcgtgtgggtgggcggaaggggaaaggtatacctcttcgacttcccggagggaaaaaacgcctctgtgcgcaccgtgaatattggaagcaccaaggggtcatgtctggataaaagagactgtgagaattacattacccttctagagagaaggagcgagggactccttgcttgtggtactaacgcgagacatccatcgtgctggaatctggtgaatggcaccgttgtccccctgggcgaaatgagaggctatgcccctttctctccagacgaaaattccctggtgctgttcgagggcgacgaagtatattctaccattagaaagcaagagtataatggtaaaatcccccgttttcgtcgcattcggggagaaagtgaactatatacatctgacacagtcatgcagaatcctcagtttattaaagctacaattgtgcaccaggaccaggcttacgacgacaagatttattatttctttcgcgaggataaccctgacaagaatcccgaagcccctctgaatgtgagcagggttgcacagctctgtcgcggtgatcagggaggcgaatcatccctctctgtctcgaagtggaatactttcttgaaggccatgcttgtctgttcagatgcagcgaccaacaagaactttaacagactgcaagacgtgtttctcttgcccgatccatctggacagtggagagacacccgcgtctatggagtgttctctaatccgtggaactactctgctgtttgtgtgtattctctgggggacattgacaaggtgttcaggacaagttcgttgaagggctaccactcgtcattacccaaccccaggcccggtaagtgcctgcccgatcagcaacctatcccaacagagaccttccaggtggcagatagacatcctgaggtcgcccagcgagtggagccgatgggtccactgaaaactccactatttcactctaagtaccactaccaaaaggtagctgtccacaggatgcaggcttctcacggcgagactttccatgtgttatatctgactactgaccgaggcaccatccataaggtcgtggaacccggagaacaggaacactcctttgccttcaatattatggagatccagcccttccggcgagccgctgcgatccaaactatgtccctcgacgcagagaggcggaaactgtacgtgagctcccagtgggaagtttctcaggtgccactcgacctttgcgaggtgtatggcggagggtgccatggatgcttaatgtccagagatccctattgcggatgggaccagggcagatgcatctctatctatagtagcgaacgatcagtactgcagagcataaatcctgccgaacctcacaaggagtgtcctaacccaaagccagacaaagctcctctgcagaaagtgtcactggccccaaattcccggtactacctgtcctgcccaatggagagtcgtcatgccacctatagttggcggcacaaagagaatgtggaacaaagctgcgagccaggtcaccaaagccctaattgtatactgtttatcgagaatctgacagcccaacagtacggccactacttttgcgaagctcaggagggatcttacttccgcgaggctcagcactggcagctgttaccagaagatggtattatggcagagcacttgttgggacatgcttgcgctctggccgcatctctctggctgggcgtcctgcccacccttacacttgggctcctggtccattag

SEQ ID NO: 239921 - DNA, 1506 bp, synthetic construct
  misc_feature 1..1506: note = Description of Artificial Sequence: Synthetic coding sequence
  source 1..1506: mol_type = other DNA
atgaggggttatgctccattttctcccgacgaaaactcccttgtactgtttgagggggatgaggtctactccactatacggaaacaggagtacaacggcaagatacctcgctttagacgcattagaggggagagcgagctgtatacctcggataccgtgatgcagaatccgcagtttatcaaggccaccattgtacaccaggaccaagcatatgatgacaaaatttattatttcttcagagaggacaacccggacaagaaccctgaggcaccactgaatgttagtcgggtggcccagctatgcagaggcgaccagggaggagaatcttctctgagtgtcagtaaatggaacacgtttctaaaagctatgcttgtgtgcagtgatgccgctacaaacaaaaattttaaccggttgcaggatgttttcttactgcctgacccgtccggccaatggagggatacccgcgtctacggagtcttctctaacccttggaactacagtgcagtgtgtgtgtacagccttggggatatagataaggtcttccgcacgtcttctctgaaggggtatcattcttcactcccaaatccaagacctgggaaatgtctgcccgaccaacagccgatcccgacggagacatttcaggttgcagacaggcacccggaggtcgcccagcgcgtggagcctatggggcctctgaaaactcccttgtttcacagtaagtatcactaccagaaagtggccgttcaccgcatgcaggcaagccatggcgagactttccacgtcctttacctcaccacagaccggggaaccatccacaaggtggtggagccaggtgagcaggaacattctttcgctttcaacatcatggagattcagccttttagacgggctgcagctatccagaccatgagcctggacgccgagcggagaaaactgtacgtttcttctcagtgggaggtctcccaggtgccgctggacctgtgcgaagtttatggaggcggttgtcatggttgcctgatgtctcgtgacccttactgcggctgggaccagggtaggtgcatttcgatctactcctccgaacgctcggtgctacagagcatcaatccagcggaaccgcataaagaatgtcctaacccaaaacctgataaagcaccattgcaaaaggtgagcctggcacctaactcccggtattacttgagctgtcctatggagtcgagacacgcaacgtactcatggagacacaaggagaacgtggagcagagttgcgagccgggacaccagagccccaactgcattctgttcatcgagaacttgacagcccaacaatatggccattatttttgcgaggcccaggaaggaagctacttcagggaggcccagcactggcagctactgccagaagatggaatcatggctgaacacttactgggacacgcctgcgccttggcagctagcctctggctaggagtccttcctaccctgactctgggactactggttcactag

SEQ ID NO: 239922 - DNA, 1959 bp, synthetic construct
  misc_feature 1..1959: note = Description of Artificial Sequence: Synthetic coding sequence
  source 1..1959: mol_type = other DNA
atgaccccccctccacccggtagagccgcaccaagcgcacctcgtgcaagggtccccggaccacctgcgagattaggcctgcctttacgcctccggctgctgctgctgctgtgggctgccgctgcaagtgctcaggggcatctcagatcagggcctcggatattcgccgtatggaaaggacacgtgggacaggacagagtcgactttggtcagaccgagcctcataccgtgctgttccacgaaccgggatcgagctctgtctgggttgggggacggggaaaggtatacctcttcgacttccctgaggggaagaacgcctccgtgcgcacggattgcgaaaactacataacattgctcgagaggcggagcgagggcctgctagcttgtggaactaatgccaggcatcctagctgttggaatctggtcaatggaactgtggtccctctgggtgagatgcggggttatgctcctttttcacccgacgagaacagtctggtcctgtttgagggggatgaagtctatagcaccatccggaagcaagagtataacggcaagatacccaggttccggcgtatccggggagaaagcgagctgtataccagtgatacagttatgcaaaacccacaattcatcaaggctactatcgtgcaccaagaccaagcttatgatgacaagatctactatttctttagagaggataatcccgacaagaatccggaggcacctctgaatgtgtcgcgcgtggcacagctctgtcgcggagatcaggggggagagagctctttgagtgtttctaaatggaatacttttctgaaagctatgttggtgtgcagtgatgccgctacgaacaaaaacttcaataggctccaggacgtgttcttattgcccgatcccagtgggcaatggagagacaccagggtgtatggtgtgttctctaacccttggaactacagcgctgtctgtgtctattctttgggtgacattgacaaggtattccgaaccagttcccttaagggttaccattccagcctgcccaacccacggccaggtaagtgcttgcctgaccagcaacctatccccacggaaacattccaggttgccgatcgtcacccagaagtcgctcaacgagtcgaacctatgggtcccctgaaaaccccattgtttcacagcaagtatcactatcagaaagtggctgttcacagaatgcaagccagccacggggaaaccttccacgtcctctatctgacgaccgaccggggaacaatccataaagttgtggaacccggtgagcaggagcacagcttcgcatttaacattatggagatccaaccctttcgaagggcggcagccatccaaacaatgtccctcgacgcggaaagaagaaaactatacgtgtctagccagtgggaggtgtctcaagtgcccctggatctatgtgaggtatatggaggaggatgccatggctgtttaatgagcagggacccctactgtggatgggatcagggacgctgcatttccatttatagctccgagaggtcagtgctccagtcaattaatcctgcagagcctcacaaggagtgtccaaaccccaagccagataaagcaccgctccagaaagtctctttggcccctaactctcgctactatcttagttgcccgatggagtcgcggcatgccacttacagctggcggcataaagaaaatgttgagcagtcctgtgaaccgggtcaccagagtcctaactgtatcctcttcattgaaaacctcactgctcagcaatacggccattatttctgtgaggcccaggagggctcctacttcagggaggcacaacattggcagctgctgcctgaggatggtataatggctgagcacctcctggggcatgcctgtgctttagccgcatcgttgtggcttggcgttctcccaaccttgacactgggcctcctggtgcattag

SEQ ID NO: 239923 - DNA, 1209 bp, synthetic construct
  misc_feature 1..1209: note = Description of Artificial Sequence: Synthetic coding sequence
  source 1..1209: mol_type = other DNA
atgaagcccaacataatattcgtcctgagtctcctgctgatactggagaagcaagccgcagttatgggtcagaagggtggcagcaaggggagacttcccagcgaattttctcagttcccccatggacagaaagggcagcactacagcggccaaaaagggaagcagcaaactgagagcaagggctcatttagcatacagtacacataccacgttgacgctaatgatcatgaccagtcccgcaagtcacaacagtatgacctgaatgctttgcataagacaactaaatcacagagacatctaggcggttcacaacaactcctacataataagcaggagggcagagaccatgacaagagcaaagggcactttcatagagtcgtgatccaccataaaggaggaaaggcacataggggtactcagaacccttcacaagaccaggggaatagccctagcggcaaaggcattagcagtcagtacagcaataccgaggaaaggctgtgggtgcatgggctttccaaggagcagacatcagtatcaggggcacaaaagggcagaaaacaaggcggatcccagagcagttatgtcctgcaaacagaggaattggtcgcaaataaacagcaacgggaaacgaagaatagtcaccagaataaaggacactaccaaaacgtggtagaggtgcgagaggaacattcttccaaagttcagacatctctctgtcccgctcatcaggataagttacaacacggtagcaaggatattttctctacccaggatgagctcctggtttacaacaaaaatcagcatcagaccaaaaacctgaaccaggaccagcagcacgggagaaaggctaacaagattagttaccagagcagtagcaccgaagagcgaaggctccactatggagaaaacggtgtgcagaaggacgtatctcagaggagtatctacagtcaaactgaaaaactagtggctggaaaaagccagattcaagctccaaaccccaagcaggagccctggcatggggaaaacgcaaaaggcgaaagcggccagagcactaatcgagagcaagatcttctatctcatgagcagaaaggtcggcaccagcacggctcacatggcggtttggacatcgtgatcattgaacaggaagatgactctgatcgacacctcgcgcaacacttaaacaatgaccggaatccgcttttcacttag

SEQ ID NO: 239924 - DNA, 1389 bp, synthetic construct
  misc_feature 1..1389: note = Description of Artificial Sequence: Synthetic coding sequence
  source 1..1389: mol_type = other DNA
atgaagcctaatatcatttttgtgctgagtctgctgctcatcttagaaaaacaggccgcagtgatgggacagaaaggaggctctaagggacggctgccgtctgaatttagccagttcccccatgggcagaagggccagcattacagtggacaaaaagggaagcagcagaccgagagcaagggatccttttcaatacagtacacttaccacgtggatgctaatgaccacgatcagagccggaaatctcagcagtacgatctgaacgcacttcacaaaacgaccaaatcgcaaagacacctcgggggttctcaacagctgttgcacaataaacaggaggggagagatcatgataagtccaagggacactttcaccgcgtcgtcattcaccacaagggcggaaaagcacataggggcacgcagaacccatctcaggatcaggggaatagcccttctgggaaaggcatttcttcacaatactcaaacactgaggagcggctgtgggtgcacgggctgtctaaggaacagaccagcgtgagtggggctcagaagggtagaaaacagggaggaagccagagtagctacgtgctccagacagaggagcttgttgctaacaagcagcagcgcgagactaaaaactctcaccagaacaaaggacattaccagaatgtggtggaagtccgggaggaacactccagtaaggtccagacttcactatgtcccgcacaccaggacaagctgcaacacggctcaaaagacatcttctccactcaggacgagttgctggtgtacaacaaaaatcaacaccagaccaagaatcttaatcaggaccaacagcatgggaggaaggccaacaaaatctcctatcaatccagcagcaccgaagagcgcaggctgcactacggtgagaacggagtacagaaagacgtaagccagagttcaatctacagtcagacagaggaaaaggcccagggcaaaagccaaaagcagataacaatccctagccaggagcaggagcattcacagaaggctaacaaaatatcctaccagtcctcctctacagaggagaggcgtctgcattatggagagaatggggtgcagaaggacgtgtcccagcgctcaatatactcccagactgagaagcttgtcgctggaaagagtcagatccaggccccaaacccaaaacaagaaccctggcatggtgagaacgccaagggcgagtctggacagagcaccaatcgggaacaggatctcttgtcacacgagcagaagggcagacaccagcacggctcccatggaggtcttgacattgtaatcattgaacaggaggacgactctgatcgccatctggctcagcatctgaataacgatcggaatcctctgttcacctag

SEQ ID NO: 239925 - DNA, 1749 bp, synthetic construct
  misc_feature 1..1749: note = Description of Artificial Sequence: Synthetic coding sequence
  source 1..1749: mol_type = other DNA
atgaaatccatcatcctgttcgtgctcagtctgctgctcatcttggagaagcaggcagcagtgatgggacagaagggaggctccaagggacaactgccctccggcagctcccaatttccccatgggcagaaggggcaacattattttggtcagaaagatcagcagcacacgaagtccaagggatccttctccatccaacacacctaccatgtcgacatcaacgatcacgactggaccaggaaaagtcagcagtacgaccttaatgctttacataaggcaactaagagcaaacaacatttgggtggatcacaacaattactcaattataagcaggaggggagagaccatgacaaaagcaaaggccactttcatatgattgtgatacatcataagggagggcaggcccatcatgggactcaaaatcctagtcaagaccagggtaatagccccagtggcaaagggctgtcttctcaatgttcaaacaccgaaaagaggctgtgggtgcacggcctatctaaggagcaggcctcagccagtggggctcagaagggaagaacccaaggtggctcccagtcatcatatgttttacagaccgaagaactcgttgtcaataaacagcagcgagaaacgaagaatagccatcagaacaaggggcactatcagaacgtcgtggacgtacgagaggaacatagctccaagctgcagaccagtctgcatcccgctcatcaggataggctccagcatggccctaaggacatttttactacccaggatgagttgcttgtttataataagaatcaacatcagactaaaaatctcagccaagaccaggaacacggaaggaaggcacacaagatttcttacccatcgtcgcggactgaagaacgtcagctgcatcacggggagaagtccgtacagaaggacgtgtccaagggtagcattagtatccagaccgaggaaaaaatacacggcaaatcccagaatcaagtaaccatccactcccaggatcaggaacacggtcacaaagagaacaaaatctcttatcagtcttccagtaccgaggagaggcacttaaactgtggtgagaaaggtatccagaaaggcgtgagcaaggggagcatctccatacagaccgaggaacagatccacggaaaatctcaaaatcaggttcgcattccatcacaagcacaggaatacggtcacaaagagaacaagataagctatcagtcatcctcaaccgaagaacgcaggctgaacagtggagagaaagacgtgcaaaagggggtcagcaagggtagcatttccattcagacagaagaaaaaatacacggaaagagtcagaaccaggttactattccatcccaggaccaagaacacggacataaggagaataaaatgtcttaccagagcagttcaaccgaggaacgcaggctgaactacggtggaaaaagcacccaaaaggacgtgtcccagtcatccatttcatttcagattgaaaagttggttgaaggcaaatcccagatccagactcccaacccaaatcaggatcagtggtcaggacagaacgctaagggcaagagcggacagagcgccgactcgaagcaagatctgctgagccatgagcaaaagggcagatacaagcaggagtcatctgaaagtcacaacatcgtgatcaccgaacacgaagtcgctcaggacgatcatctgacacagcagtacaatgaggataggaatcccatctcaacctag

SEQ ID NO: 239926 - DNA, 447 bp, synthetic construct
  misc_feature 1..447: note = Description of Artificial Sequence: Synthetic coding sequence
  source 1..447: mol_type = other DNA
atggccgagtcggattgggacacagtgaccgtcttgcgaaagaagggacccacagctgctcaggcaaagtcgaaacaggctatcctagccgctcagcgcagaggcgaagacgtggagacctcgaaaaagtgggccgctggtcagaataaacagcacagtatcacgaaaaacacagcaaagctggaccgagagactgaggagctgcatcacgaccgggttaccttagaagtcgggaaagtcattcagcagggccgacagtcgaagggtcttactcaaaaagacctggccaccaaaatcaacgaaaaacctcaagtcattgcagactatgagtctggtagggcaatccctaataatcaggtgctaggcaaaatcgaacgagcaatcggactgaaactacgcggaaaggatattggaaagccaatcgaaaaggggcctagggcaaagtag

SEQ ID NO: 239927 - DNA, 8120 bp, synthetic construct
  misc_feature 1..8120: note = Description of Artificial Sequence: Synthetic coding sequence
  source 1..8120: mol_type = other DNA
atgagtacctgctgctggtgtacacccggaggagctagcacaattgatttcctaaaacggtacgcgtcaaacactccttcaggtgagttccagaccgccgatgaagatttatgttactgtctggaatgcgtggccgaatatcacaaggcaagggacgaactgcccttcctacatgaagtactctgggagttagagactctgcgcctcattaatcactttgagaagtccatgaaagcagaaatcggtgacgacgacgagctatatattgtggacaacaacggggaaatgccactgtttgacattacaggtcaagacttcgagaataagctgagagtccccctgcttgaaatcctgaagtatccttaccttctcttacacgagagagttaatgaattgtgcgtagaggctctatgtcgaatggagcaagcgaactgctcttttcaggttttcgacaagcatcctgggatatacctgtttcttgtccacccaaacgagatggtgaggcggtgggccatcctcacagccaggaatctgggcaaggtggaccgcgatgattactatgatctgcaggaggtgctactatgcctctttaaggtgatagagctggggctgctggagagtccggacatttacacatccagtgtgcttgagaagggcaaattaatacttctgccatcccatatgtacgatactacaaactacaaatcctattggctcgggatttgtatgcttctgacaattctggaggagcaggctatggacagtttgctgctggggtccgacaaacagaacgactttatgcagagcattctgcatacgatggaacgggaggccgatgacgactcagtagacccgttctggcccgctctgcactgttttatggttatcctggaccgactaggctcaaaagtgtggggccagctgatggacccaattgtggccttccagacgatcatcaataatgcctcctataaccgggagatcagacatatccggaatagctcagtgagaacaaaactcgagcccgaatcatacttagacgatatggtgacctgctcacaaatcgtgtacaactacaacccagagaaaaccaaaaaagactctggctggaggacagccatctgtcccgattattgtcccaacatgtacgaggaaatggagacacttgctagtgtgttacagagcgacattggacaggacatgcgcgtccacaatagcacattcctgtggtttattccgttcgtccagtcccttatggacctcaaggacctgggagtggcttacattgcccaggtggtgaaccacctctacagtgaggtgaaggaggtgctgaatcagactgacgccgtttgcgacaaagtgacagaatttttcctcctgattctggtcagcgttatagagctccacaggaataagaagtgcctccacctgctttgggtctcctctcaacagtgggtggaggccgtcgtcaagtgcgccaagctccccacgactgcgttcacgagatcctcggaaaaaagctcagggaactgcagtaagggcaccgccatgatttcatcactctctctgcattctatgcctagtaactccgtgcagttggcatacgtgcagctgatcagaagtctcctgaaggagggttaccagcttggtcaacaatcactctgcaagagattctgggataagttaaacctcttcctacgcggtaacctgtcactgggctggcagcttacctcgcaggaaacacatgagttgcagtcctgcctgaaacaaataattcggaacattaagttcaaagccccaccctgcaatacctttgtggatctgacatccgcatgcaaaatcagtccggcaagttacaataaggaggagagcgaacaaatgggaaagacttccagaaaagacatgcactgcttggaggccagctcgccaacctttagtaaggagccaatgaaggtccaggattcagtgctgattaaagccgataacacaatcgaaggcgacaacaacgagcagaattacattaaggatgttaagttggaagaccaccttctggcaggcagttgcctgaagcagtcttctaaaaacatttttacggagcgcgctgaggaccaaattaagatctccactcgtaaacagaagtcagtgaaggaaattagtagctatacccctaaggactgtacctcccggaatggtccggagcgaggttgcgacaggggaataatagttagcacacgtctccttacggattcgtctacagacgctctggagaaagtatcgacttctaatgaagatttttccttaaaagacgacgcactggcaaaaacctctaaacgtaagaccaaagtgcagaaagacgagatctgcgccaaactttcccacgtcatcaagaaacagcatcgcaaaagtactcttgtcgacaacactataaatctggacgaaaacctaacagtgagcaacattgagtcattctacagccggaaggacacaggcgttcagaagggcgatgggttcattcacaatctgagtctggacccatccggtgtgcttgacgataagaatggtgagcaaaaatcccagaataatgtcctccctaaggagaagcagttaaaaaacgaggaacttgtaatcttctctttccacgagaacaattgtaaaattcaggagttccacgtggacggcaaggaactgataccctttacagagatgaccaatgcttctgagaaaaaatccagccctttcaaagacctcatgaccgttcctgagtctcgggatgaggaaatgagtaactctacctcagtgatttattctaacctgactcgggagcaggcgcctgacattagtcccaaatccgatacactaaccgacagccagattgatcgcgacttgcataagttgtccctactggcccaggcttcggtcataacttttccctccgatagtccccaaaactcaagtcagctccagcggaaggtcaaagaggataaaagatgtttcacggcaaaccagaacaacgttggtgacacctctcgcggacaggtgatcattattagtgatagtgatgatgatgatgacgaaaggatactctcacttgagaaactgacaaagcaggacaaaatctgcttagaacgagaacaccccgaacaacacgtgtcaaccgtcaacagcaaagaagagaaaaacccggtcaaggaggaaaagaccgaaaccttatttcagttcgaggaaagtgattcccagtgcttcgagttcgaaagctcttcagaggtattctcggtgtggcaggaccacccggatgataataacagtgtccaggacggtgagaagaagtgtttggctccgatcgcaaataccacaaacggtcagggatgtacagactacgtgtcggaagtcgtaaaaaagggggctgagggtattgaagagcatacacgtccgagatccatctcagtcgaggaattctgcgagattgaggtgaagaagccgaaaaggaagcggtcagagaagcccatggccgaggatcccgttaggccaagtagcagcgttagaaatgaggggcagagtgacacaaataagagggacttagttggaaacgatttcaagagcattgacaggcgaacatcaactccgaatagcagaatacagcgggctacaacagtgtcccagaaaaagtccagtaagctgtgtacatgtaccgagccaatcaggaaggtcccggtgagtaagacaccaaagaaaacccactcagacgctaagaagggccagaatcgcagcagcaattatttgagctgtcgtaccaccccggctatcgttcctcctaagaaattcaggcagtgtccagagcccaccagcactgctgagaaactgggcctgaagaaaggaccaagaaaggcctacgaactgtcccaacgcagcctggactacgtggctcagctgagggatcacgggaagaccgtcggggtagtcgacactcggaaaaaaacaaagctgatctcaccccagaacctgtcagtaaggaacaacaaaaaacttcttactagccaggagttgcaaatgcaaagacagattaggcccaaatcccagaagaatcgcaggagactgagtgactgcgaaagcaccgacgtaaaaagagccggatcacacacagcccagaactccgacatctttgttcccgagtccgatcgctctgactataattgtacagggggaaccgaggtgctcgccaacagtaaccgtaaacagctcattaagtgcatgccatcggagccggaaacaatcaaagcaaaacatggctcccctgccactgacgacgcatgtccattgaatcaatgcgactcagtggttcttaacgggacagtgccaaccaatgaagtaattgtttcaacctccgaggacccactgggcggaggtgaccccaccgcgagacacattgagatggccgctctgaaagagggcgaacctgacagtagcagcgacgctgaagaggacaacctgttcctgacgcaaaatgaccccgaggacatggatctttgtagtcagatggagaacgataactacaagctgatcgagctgatccacggtaaagacactgtggaggtggaggaggattcagtgtcccgtccgcagctggagagtctgagtggtactaaatgtaagtataaagactgcttagaaaccactaaaaatcagggggaatactgtccaaagcacagtgaagtgaaggcagcagacgaagatgtctttaggaagcccggactgccccctcctgctagcaagccattgagacccactaccaaaatattttcatccaagagcacgagcagaattgcagggctgagcaaaagccttgaaacgtcaagcgctctgtccccctcactcaagaataagagtaaaggtattcagtcaatcctgaaggtgccacagccagtgccacttattgctcagaagcccgtgggcgaaatgaaaaattcgtgtaacgtcctgcatccacagtccccaaataacagcaacaggcaaggctgtaaggtcccatttggcgaatcaaaatacttcccaagttcctcccctgtgaacattttgctgtccagtcagtccgtcagtgacacattcgtgaaagaagtgctcaaatggaaatacgagatgtttttaaactttggccagtgcggacctcccgcaagcttatgccagtctatttcccggcctgttcccgtgcgattccataactatggtgattacttcaacgtgtttttcccgttgatggtgctgaataccttcgaaaccgttgcccaagagtggctcaatagccccaaccgagaaaacttctaccaactccaggtgaggaaatttcccgcagactatatcaaatattgggagttcgcagtgtacctggaagaatgtgagctagccaagcaactgtatcccaaagagaatgacctggtgttcttggctcctgagcggattaatgaagaaaagaaagacaccgagcgaaacgatatccaggacttacacgagtaccattccggttatgtgcataagttccggaggacaagtgtcatgcggaacggaaagaccgaatgttacctaagtatccagactcaagaaaacttcccagccaatctcaatgagctagtcaactgcatcgtgatctcatctttggttacaacacagcgcaaactcaaagctatgtctcttctcggttcccggaatcagctggcgagagcagtactgaatccaaatccaatggacttctgtaccaaggaccttttaacgacaactagcgaacgcattatcgcgtacttgagagacttcaatgaagaccagaagaaggctattgagacagcgtacgccatggtaaagcatagcccctctgtcgcaaaaatctgcctcatccacgggccacccggtacgggaaaaagtaagactatcgtgggcctactgtatcgtttgttgacagaaaaccaacggaaaggccattctgacgagaactcaaatgctaagatcaagcagaatcgcgtcctagtgtgtgcaccctcgaatgccgcagtcgacgaattgatgaagaagatcatcctggaatttaaagaaaagtgtaaagataagaaaaatcccttggggaactgcggtgatataaatctagtgaggctagggccagagaagagtatcaactctgaggtcttgaagttcagtctcgactctcaggttaaccaccggatgaagaaggaacttccgtcccacgtgcaggcgatgcacaagaggaaggagtttttggattatcagctggatgaacttagtcggcagagagccctgtgtagagggggtagggagatccaacgccaggaactcgacgaaaacatcagcaaagtctcaaaagagaggcaggagctggcgagcaagattaaagaggtccaagggagaccccagaagacccagtcaattatcattctggagtcccatattatatgctgtacactctcaacatctggcggtctcctgctggagtccgcctttcgtggccaggggggagttccatttagctgcgtaattgttgatgaggctggtcagtcctgtgagatagagacccttacccctctaatccacaggtgcaataagcttatcctggtgggtgaccccaaacagttgccaccaaccgtgatctccatgaaagcacaggagtatggctacgatcaaagtatgatggcgaggttttgcaggctgctcgaggaaaacgtggagcataacatgattagccgcctgcccatcctgcagctgactgtacagtataggatgcatcccgacatttgcctttttccttccaattatgtgtacaatcgaaatcttaagacaaatagacagacggaggctattcggtgttccagtgactggcctttccagccctatttggtcttcgatgttggggatggcagcgagaggcgtgataacgacagctatattaacgttcaggagattaaactagtgatggaaattatcaaactaattaaggacaagcgcaaagacgttagcttccggaatatcggcatcattactcattacaaggcccagaagaccatgatccagaaagatctggataaagaattcgaccgcaagggcccagccgaagtggacacagtcgatgcctttcaaggtaggcaaaaggactgcgtgattgtcacttgcgtaagagccaattctatacagggcagcatcggcttcctggcttccctgcaaagactgaatgtgactattacacgggctaaatattccttgtttattctaggacacctcaggacacttatgcagctcctcccacgcagcttctgcgtgcatgtgaaccactctccctttttttcccccgagcctaagtacttgcactgggcattgaaggaaaaccagcactggaaccagctgatacaggatgcccagaagaggggagcaataatcaagacttgtgacaaaaactatcgacacgatgcggttaaaatcctcaaacttaaacccgttctgcaaaggagcctgactcacccccctacgatcgccccagaaggcagtagaccccagggaggtctcccctcgtctaagttggacagcggattcgcaaagacttccgtcgcggcatccctctaccataccccgtctgactccaaggaaattactttaaccgtaacaagtaaggacccagagcgaccgccagtccatgatcagcttcaggatccaaggctcttgaaaaggatgggaatcgaggtgaaagggggaatctttctctgggacccacagccttcttccccccagcacccgggtgccacccctcctacaggtgaacctgggttccctgtcgtgcaccaagacctgtcccacatccagcagccagccgctgtggtggccgcactctcatctcacaaacctcctgtacgaggcgaaccgccagccgcaagtcctgaggccagcacatgtcagtctaaatgtgacgaccccgaagaggagctgtgccatagaagagaagccagagctttcagcgagggtgagcaagaaaaatgtgggtcggagacacaccacacccggaggaactctagatgggacaaaaggaccctggaacaagaggactctagctctaagaaaaggaagctgttata

SEQ ID NO: 239928 - DNA, 7934 bp, synthetic construct
  misc_feature 1..7934: note = Description of Artificial Sequence: Synthetic coding sequence
  source 1..7934: mol_type = other DNA
atgtcaacatgctgctggtgcacccctgggggtgcgagtaccatagactttctgaagcgatacgcatctaataccccctccggtgagttccaaaccgccgacgaagatctttgctattgcctggaatgcgtagccgaatatcacaaggcacgggacgagctaccattcctgcatgaagtgctatgggaattagagacattaagactgatcaaccacttcgaaaagagtatgaaggccgagataggagacgacgatgaattgtacattgtcgataataatggcgaaatgcccttgtttgacatcacaggacaggacttcgagaataagttgagagtccccctgttagagatcttaaagtacccctatcttctgctacacgagcgggtcaatgaactctgcgtggaggctctgtgtcgtatggagcaggccaattgttctttccaggtgttcgataaacacccgggtatctacctgttcctggtgcatccaaatgagatggtaaggaggtgggccatccttacagctaggaatttaggaaaggtggatcgtgacgactactatgatttgcaagaggtgttgctgtgtctttttaaggtgatcgaactgggcttactcgagtcccctgatatctatacgagctcagtgttagagaaagggaaattaatcctgctgccttctcatatgtatgacaccaccaattacaaatcttattggctgggcatttgtatgctgctgactattctcgaagaacaggcgatggactcccttctcctgggtagtgataagcagaatgactttatgcaatccattctgcatactatggagcgagaggctgacgatgattcagtggatcctttttggcctgccctgcattgtttcatggtcattctggaccgcctcggttccaaagtgtggggccagcttatggatcctatcgtggcctttcagacgatcataaacaatgccagttacaaccgggagatcagacacatcaggaacagcagtgtccggaccaagctggaacctgaatcctacttggacgatatggtcacttgttcacagattgtctacaactataatcctgaaaagacaaagaaagactccgggtggcggactgccatctgccctgactactgccccaatatgtacgaagagatggaaacactggcttctgtactgcagtctgatattggtcaggacatgagagtccacaactctacttttctgtggtttatacccttcgtgcagtctctgatggatctgaaggacctcggagtggcatatatcgcccaggtggtgaatcatctgtattctgaagtgaaggaggtgttaaaccagaccgacgccgtatgtgataaagttaccgagttttttctattaattcttgtgtccgtgatcgagttgcacagaaataagaagtgcctgcatctgctctgggtctcttcacagcaatgggtcgaagccgtcgtcaagtgcgctaaactgcccacaaccgccttcacccgtagctccgaaaagagttccgggaactgttccaagggcaccgctatgatcagttcactcagccttcacagtatgcccagtaactcggttcagttggcttatgttcagctgatcaggtcgcttctgaaggaggggtaccagctcgggcagcaatctttatgtaagagattctgggacaaattaaacctattcttgaggggcaacctatcacttggctggcaactgactagccaggagacccacgagctgcagtcctgcctcaaacaaattataaggaacatcaaattcaaagctcccccttgcaatacgtttgttgatttgacctccgcctgcaagatttcacctgcctcttataataaggaggaaagcgaacagatgggtaaaacttcacgcaaagatatgcattgtctggaagcctcttcgcctacctttagcaaagagccaatgaaggtgcaggatagcgtgctaattaaggctgacaacaccattgaaggcgacaacaatgaacaaaattacatcaaagacgttaagctggaggatcatttactggcaggcagctgcctaaaacagagctctaaaaacatcttcactgaacgcgcagaagaccagataaaaatctctactagaaagcagaagtcagtcaaggaaatctcaagctacaccccaaaggactgtaccagccgaaatggtcccgagcgcggatgcgaccgcggaattatcgtctctacacgtctgctgaccgattcttccaccgacgccttggagaaagtttccacatccaacgaagacttcagcctgaaggatgacgctctggccaaaactagcaagagaaaaactaaggtgcagaaagatgagatttgtgcaaagctatcccatgtgatcaaaaaacagcatcgcaagagcacgctggtggacaataccattaatctggatgaaaacctcaccgtctccaacattgaatctttttactctaggaaggatactggtgtccagaagggggatggttttattcacaatctgtctctagatccctccggagtccttgatgacaaaaatggcgaacagaagagccaaaataatgtactgcctaaagaaaagcaattgaaaaatgaagaattggtgattttcagctttcatgagaataattgtaagatccaggagtttcacgtggacggaaaggagctgataccgttcaccgagatgaccaacgcctcggagaagaaatcctcaccattcaaagatttaatgactgtacccgaatcacgtgacgaagaaatgtcaaacagcaccagtgtcatatacagcaatttgaccagagagcaggccccagacatttcccctaaatctgatacgctaactgattctcagatcgatcgggacttacataaactttctctccttgcacaagcaagcgtgatcacttttcccagcgacagcccccagaattcctcccagctgcagcgcaaagtcaaagaggataagaggtgttttacagccaaccagaacaatgtgggggacacgtcccgtggacaggtcataatcataagcgactcggacgacgatgatgacgaacgcatattgagtctggaaaaactgaccaagcaggacaagatctgtctcgaacgggaacaccccgaacagcatgtttctaccgtcaattccaaggaggagaaaaaccctgtgaaggaggaaaaaaccgaaacgctattccagttcgaggagtccgattctcaatgctttgaatttgaatctagtagcgaggttttctccgtgtggcaggaccatccagacgacaataatagtgttcaggatggtgagaaaaagtgcctagccccaattgcgaacacaacaaacggacagggatgtactgattacgtatccgaagttgtgaagaaaggtgccgagggtatcgaggaacatacaaggccaaggtccatcagcgtggaggagttctgcgagatcgaagttaagaagcccaagcgaaagcggtcagaaaaacctatggccgaagatccagtgcgaccgagcagcagtgtgcggaacgagggacagtcagacaccaataagcgcgatttggtaggaaacgattttaaaagcatagataggaggacatctactcctaatagtaggatccaacgagccaccactgtctctcagaaaaaaagctctaaactatgcacatgcaccgagcctattagaaaggtgcccgtgtctaaaacccctaagaaaacacatagcgatgctaaaaaagggcagaacaggagcagcaattacctttcatgtaggactacaccagcgattgtgcctcccaagaagttcagacagtgtcctgagcccaccagcactgctgagaaacttggtctcaagaaggggccacgcaaagcctacgagctcagccagcgctctttggattacgtagcgcagctgagagatcacggaaagaccgtcggcgttgttgatactcgaaaaaaaactaaactgataagcccacagaatttatcagtgcggaataataaaaaattattaacatcacaggagttgcagatgcagcggcagatacgaccgaaatctcagaagaaccgcagaagactgtccgattgtgaaagtaccgacgttaaaagagccggttcacacaccgcccagaattctgacatatttgtgccagagtccgacaggtcagattataattgtacggggggaacagaggtgctggctaattctaatcgcaagcaactcatcaagtgtatgcccagcgagcccgaaactatcaaggctaagcatgggtcccctgcgacagatgacgcctgtccactgaatcagtgtgatagtgttgtcctcaatgggaccgtgccaacaaatgaagttatcgtatctaccagtgaagatccattagggggaggggacccaaccgccaggcatatagaaatggctgctctgaaagaaggcgaacccgatagctcgagtgacgctgaggaagacaacctttttctgacgcaaaacgatcctgaggacatggacctgtgctctcagatggagaacgataattataaactcatcgagctgattcacggcaaggatacagtggaggtggaggaggacagtgtatcacgaccacagctggagtcgctttccggcaccaagtgcaagtacaaagattgtttggagacgacaaagaaccagggagagtactgccccaagcacagtgaggttaaggccgctgacgaagatgtgttccgaaaaccaggccttcccccaccggctagcaaacctctgaggccaacaactaagatcttttcctctaaaagtaccagccgcattgcaggactgtcaaagagtctggaaaccagctcagccctcagccccagtttaaaaaacaaatccaagggtattcaaagtatcctcaaagtgcctcaaccagtgccacttatcgcacagaagcccgtgggcgaaatgaagaattcttgtaacgttttgcacccccagagccctaacaattcaaaccgacaggggtgtaaagttccattcggtgagtccaagtatttcccctcctctagccctgtgaacatcttgctctcaagccagagcgtgtccgacaccttcgtcaaagaggtgctgaaatggaagtacgaaatgtttctaaattttggccaatgtgggccaccagcaagcttgtgtcagtcaatcagtcgacccgtgcccgtgaggttccataactacggcgattactttaatgtgttcttcccactgatggtgcttaatacctttgagaccgtggcccaggaatggttaaatagcccgaatagggaaaatttctaccagctgcaagtgcgcaaattcccagccgactatataaaatattgggaattcgcagtttacctcgaggaatgcgaacttgctaagcaactgtatcctaaagaaaacgatctggtgttcctagcacctgaacgtatcaatgaggaaaaaaaggacactgagagaaacgacattcaggaccttcacgagtatcatagcggatacgttcataaattcagaaggacttctgtgatgcgtaacggcaaaacagagtgttatcttagtatccaaacccaggagaatttccccgcaaatctcaacgagctggtgaactgtatcgttatttcttctcttgtcacaacccagcgcaaactcaaggcaatgtctctactcggcagtcggaaccagcttgccagagctgtgctcaatccaaatcccatggatttctgtactaaggatctgctgaccacaacgtcggagcgcataattgcgtatctgagggatttcaatgaggaccagaaaaaggccatcgaaacggcctatgcgatggtgaaacattcaccctccgtggccaagatctgcctgatacacggacctccgggaacagggaagtccaagactatcgtggggctattatataggctgttgaccgagaatcagagaaagggccactccgatgagaactcgaatgccaagatcaaacagaaccgcgttctggtctgcgccccatcgaacgccgctgtggacgagcttatgaagaaaatcatcctcgagttcaaagagaagtgtaaggataaaaagaaccccctgggaaactgcggtgatataaacctggtccgtctgggaccggagaaaagtataaattcagaagtgttaaaattttcactggactctcaggtgaatcatcggatgaaaaaagagttgccatctcatgttcaggctatgcacaagaggaaagaattcctcgactatcagctggatgagctgagtagacagcgcgctctctgccgtgggggtagggagatccaacggcaggagttggatgaaaacatttctaaagtgagtaaagagcgccaggagctggcctccaagatcaaagaagtgcagggccgtcctcaaaagacacagagcatcataatcctcgagagccacatcatctgctgcaccctgagtacttcaggaggtttactcctggaaagcgctttccgtggccaggggggtgttcccttctcctgtgtcattgtggacgaggccggacagtcatgcgagatcgaaaccctgaccccattaatacacagatgtaataaactgatcttagtgggtgaccccaagcagttaccccctacagttatctcaatgaaggcccaagaatacgggtatgaccaatcaatgatggcgaggttctgcagactcctggaggagaacgtagagcacaatatgatctccaggcttcccattcttcagctgaccgtccagtatcgtatgcacccagacatatgtctgttccctagtaactatgtttacaacagaaatttaaagacaaaccgccagactgaagccatccggtgttcaagtgattggcccttccagccatacctggttttcgacgtcggtgacggatccgagagacgagataatgacagctatattaacgtccaggagatcaaacttgtcatggaaattattaagctgatcaaggataaaaggaaagacgtctcctttcggaatatcggcataatcactcactataaagcccagaaaaccatgatccagaaagatttggacaaagaattcgatcggaagggctttttagccagcctgcagcgtctgaacgtgacgattaccagagccaagtattctctcttcatcctggggcatctgcgaactctaatggagaaccaacactggaatcagttaatacaggatgcccagaaaagaggagccattatcaagacttgcgataagaattatcgtcacgatgcagtcaagatcctaaagctcaagcctgttctccaacgaagcctgacgcatcctccgaccatagctccggaagggtctaggccgcaaggaggtctgcccagttctaaactcgactcaggatttgcgaaaacaagcgtagctgcttctctgtaccatacccctagtgatagcaaggagataactctgactgtaactagcaaggacccagagagacctcccgttcatgaccaacttcaagatccgaggctgcttaaacgaatggggatagaagttaagggtggcatttttctgtgggacccccagccatcctcaccgcagcatccaggagccacaccccctaccggggagcctggctttcctgtggttcaccaggatctgtctcatatccagcagccagctgcagtggtggcagccctgtctagccacaaacccccagtacgtggggaacccccagcagcctcacctgaggcttctacttgtcagtcaaagtgtgatgatcccgaagaagagctctgtcatcgcagggaggccagggctttctctgagggcgaacaagaaaagtgcggttccgagactcaccatacccgtcgaaattcacgctgggacaagaggacactcgagcaggaagatagcagctctaaaaagcggaaactgttgta

SEQ ID NO: 239929 - DNA, 2847 bp, synthetic construct
  misc_feature 1..2847: note = Description of Artificial Sequence: Synthetic coding sequence
  source 1..2847: mol_type = other DNA
gtagcacaggaatggctgaattcccctaatagagaaaacttttatcagttgcaggttagaaagttcccggcagattacatcaagtactgggaattcgcagtttacttggaagaatgtgagctcgcgaaacagctttatcccaaggaaaatgacctcgtcttcttagctcccgaacgcattaacgaggagaaaaaggataccgaacgcaatgacatacaggatctacacgaatatcacagcggatacgtccataagttcaggaggacgtcagtaatgagaaatggtaaaaccgagtgctatttatccattcagacccaggaaaattttcctgccaatcttaatgaacttgtcaactgtatcgtgatctctagcctcgtaactacccagcggaagcttaaggctatgtcactgctgggatctaggaatcaactcgcgagagccgtcctaaaccctaaccctatggatttttgcacaaaggatctgttgaccaccacatcagaacgcattattgcctatctgagagattttaatgaggatcagaagaaggccattgagaccgcctatgcaatggttaaacactcgccaagcgtcgccaagatttgcttgattcacggcccacctggcactgggaagagtaagacaatcgtcggcctactttacagactgctcactgagaatcaacgaaaaggccattcagatgaaaatagcaatgctaaaatcaagcaaaatagagttctggtctgcgctcctagcaatgcagcagtggatgaacttatgaaaaaaatcatattggagttcaaggaaaagtgtaaagataagaaaaatcccttggggaactgcggggatatcaatctcgttcggctgggtcccgaaaaatccattaacagcgaagtactcaaattctctctcgacagccaagtcaatcacaggatgaagaaagagctgcccagccatgtccaggccatgcataaaagaaaagagtttctggactaccagctggacgagctaagcagacaaagggcgttatgccggggagggagagaaatacagaggcaggaactggacgagaacatctcaaaggtctctaaggaacgccaggagctggcctctaaaattaaggaggttcaggggaggcctcaaaaaacacagtccataataatcctggaatcacacattatctgctgcaccctgtccaccagcggcggactcctacttgagtcagccttccggggacaggggggagttcccttctcctgcgtaattgtggacgaggctgggcagtcttgtgagatcgagaccctgacgcccctcatccacaggtgcaacaagctcattctcgttggggaccccaagcaattacccccaacagtgatctccatgaaggctcaagagtacgggtatgaccagagcatgatggcgagattttgtcgcctcctggaggagaatgtggagcataacatgatctctcgccttcccatattgcagcttactgtacaatatcgaatgcacccagacatatgtctgtttccttctaattatgtctacaaccgtaacttgaaaaccaatcgacagaccgaggccatccgctgttctagcgactggccttttcagccttatctggtgttcgacgtgggtgatgggtcagaacgacgtgacaacgactcttacatcaatgtccaggaaatcaagctcgtaatggagatcatcaaactcattaaggataagcgaaaagatgtgagtttcaggaatatcgggatcatcacgcattacaaagcgcagaaaactatgattcagaaagatctggataaagagttcgacaggaaaggaccagcagaggtggacacagtcgacgcctttcagggcaggcagaaagactgcgtcatcgtgacatgtgtgagagcgaacagcatacaaggcagtataggttttttggctagtttgcagaggttgaacgttaccatcacacgcgctaaatacagcctgttcattctgggtcatttgcggacactgatgcagctgctcccgcgaagtttttgtgtgcatgttaaccatagccctttcttctcaccagagccgaagtacctccactgggcactgaaagagaaccaacactggaaccagctgatccaggacgcccagaaaaggggggctatcataaagacatgcgataaaaactacaggcacgatgcagtaaagattttgaaattgaaaccagtcctgcagagatccctcacacacccccctactatcgctcctgaaggcagcaggccgcagggcggtctcccctcctcgaagctggattcaggttttgccaagacaagcgttgccgcatctctttatcatactccgtcagactccaaggagatcacgctaacagtgaccagcaaagatccggagcggcctccagtccacgatcagctccaggacccacgtctgctgaagcgcatgggcatagaggtcaagggtgggattttcctgtgggatccccaacctagctcacctcagcaccccggtgcaactcctcccacgggcgagccaggattcccagtggtgcaccaggacctgagtcacatccagcagccggctgccgttgtcgccgctctgtcttcccataagcctccagttcggggtgaaccaccagccgctagcccggaggcctcaacatgtcagagcaaatgtgacgatcctgaagaagagctctgccataggcgtgaggcgcgtgcatttagcgaaggcgaacaggagaagtgtggctctgagacacatcatacaaggagaaactctcgatgggataagaggacactggaacaggaggattcatcatccaagaaacgaaagctgctgtag

SEQ ID NO: 239930 - DNA, 1269 bp, synthetic construct
  misc_feature 1..1269: note = Description of Artificial Sequence: Synthetic coding sequence
  source 1..1269: mol_type = other DNA
atgtcgacatcctatggttgtttctggaggcgcttcatccacgggatcggacgttccggagatatcagcgcagtacagcccaaggccgcagggtcatcgttgctcaacaagattaccaactctttggtgctcgacattatcaagttggccggagtacacacagtggcgaactgcttcgtggttccgatggcgaccggcatgtcgttaactctgtgtttcctgacattgcggcacaagaggcctaaggcgaaatacattatctggccccgaattgatcaaaagtcatgtttcaagagcatgataaccgccggattcgagcccgtcgtaatagagaacgtgctggagggagatgagctgcgtaccgatttaaaagctgtggaagctaaggtccaagagctcgggcctgactgcatcctttgtatccactctacaaccagctgcttcgctccccgtgtgcccgaccgtctagaagaactcgccgtgatttgtgccaattacgacatcccacatattgtaaacaacgcttacggggtgcaaagcagcaagtgtatgcacctaattcaacagggggctcgcgtcggcagaatcgacgctttcgtccagtcgctggataagaactttatggttcccgtgggtggggcaattattgccggattcaacgatagctttatccaggagatcagtaaaatgtacccgggaagggccagcgcctcccctagcctcgacgttctaataactttactgagcttgggttcaaacggctacaagaaactgctgaaggagcgcaaggagatgttttcttacctctcaaaccagataaaaaaattatctgaggcttacaatgagagattgctgcacacacctcacaatccaatctcactagccatgactttaaaaacacttgacgaacatcgagacaaagccgttacacagcttgggagcatgcttttcactcgtcaggtgtcgggcgcacgggtggtcccattgggatctatgcagacagtcagcggctataccttcaggggtttcatgagtcacacaaacaactatccctgcgcatacctgaatgccgcttccgctataggaatgaagatgcaggacgtagacttgttcataaagaggctcgaccgttgcctgaaagcagtacggaaagagagatccaaagaatctgatgacaactacgataaaacagaggacgtagacatcgaagagatggcccttaagctcgacaacgtgcttctggacacttatcaggacgcatcatcgtag

SEQ ID NO: 239931 - DNA, 1506 bp, synthetic construct
  misc_feature 1..1506: note = Description of Artificial Sequence: Synthetic coding sequence
  source 1..1506: mol_type = other DNA
atgaaccgcgagtcatttgccgcaggcgaacgactggtaagccctgcctatgtgagacaggggtgcgaggctaggcgcagtcacgagcaccttattcggttgctccttgagaagggaaagtgccctgagaatgggtgggacgaaagtacgttggagctgtttctgcacgagctggccataatggacagcaacaattttctgggcaactgcggcgtgggcgaacgcgagggcagggtcgcttctgcactggttgcccgtcgacactaccgttttatacatggcatagggagatctggtgatattagtgccgttcagcccaaggccgcagggtcaagtttgttgaataagatcactaatagcctggtcctcgacatcatcaaactcgccggagttcataccgtggcaaactgcttcgtggtccctatggcaacaggaatgtctttaactctttgcttcttaaccctgagacacaagcgccctaaagccaaatatataatttggcccagaatcgaccagaagtcttgtttcaagagtatgattacagccggttttgagccagtggtcatagagaatgtcttggaaggtgatgagctcaggaccgatctgaaggccgtcgaggccaaagttcaagaacttggccctgattgtatactgtgcattcactctactactagctgcttcgcaccacgggttcccgatcgcctcgaggaactggcagtgatttgtgcaaactacgatattcctcacatcgtcaacaatgcctatggcgtgcaatccagcaagtgtatgcacttaattcagcagggagcccgagtaggcaggattgatgcttttgtccagtctctggataaaaattttatggtgcctgtgggcggagctatcatagccggattcaatgacagtttcatacaggagatcagcaagatgtatcctggcagagcttctgcctcccccagtctggacgtcctaatcacactgttgtccttaggcagcaacggttataagaagttgcttaaggagaggaaggagatgttctcctacctctcgaatcagattaagaaactctctgaggcctataacgagaggctactgcatacaccacataatccaattagtctggctatgacccttaaaactctggacgagcatcgcgacaaggctgtgactcaactcggcagcatgttattcacccgccaagtttccggggcacgggtcgtgcctctaggctctatgcagacagtgagcggttacaccttccgcggtttcatgtctcataccaacaattatccctgtgcgtacctgaatgctgcatctgctataggcatgaagatgcaggatgtggacctttttatcaagcgcctggatcgctgtctcaaagcggtgcgcaaggaacggagcaaagaatctgacgataattatgacaaaacagaggacgttgacattgaagagatggcacttaaattagataatgtactgcttgacacatatcaggatgcatccagttag

SEQ ID NO: 239932 - DNA, 903 bp, synthetic construct
  misc_feature 1..903: note = Description of Artificial Sequence: Synthetic coding sequence
  source 1..903: mol_type = other DNA
atggagggcgtgttgtacaaatggaccaattatctgacgggctggcagcccagatggtttgttctggacaacggtatcctgtcatactatgactctcaggatgatgtttgcaagggcagcaaagggtctatcaagatggccgtatgtgagatcaaagttcactctgcagataacacgagaatggagctcattatacccggagagcagcacttttatatgaaagccgtgaatgccgcagaaaggcagcggtggctggtggccctgggatcctccaaagcttgcttaaccgacaccaggactaagaaggaaaaggagattagcgagacctcagaatcgctaaaaactaagatgtctgagctccgcctatactgcgacttgcttatgcagcaggtgcatacaatacaggaattcgtgcaccacgacgagaaccatagcagcccatctgctgagaacatgaatgaggcctcatcactgctcagcgcaacttgcaacacttttatcactaccctggaggagtgtgtcaagatcgcaaacgccaagttcaaaccagagatgtttcagctgcaccatccagatccactggtgagccctgtgtccccctctcctgtgcagatgatgaagcgatccgtctctcatcccggttcatgtagctcagaaagaagtagccactccatcaaggaaccggtttccaccttgcaccgcttgagccaaagacggagacgcacttacagcgacacagactcctgttccgatattccgcttgaggaccccgatcgacccgttcattgttccaaaaatactcttaatggcgatttggcgagcgccacaatcccagaggagtctcggctcatggcaaaaaagcagagtgaatccgaggacactctgcccagcttctcctcctag

SEQ ID NO: 239933 - DNA, 1104 bp, synthetic construct
  misc_feature 1..1104: note = Description of Artificial Sequence: Synthetic coding sequence
  source 1..1104: mol_type = other DNA
atggacaaggaatatgtagggtttgctgcactgcctaatcagttgcatcgaaagtctgtaaagaaggggtttgatttcaccctgatggtggcaggcgagagtgggctgggcaagtcgacattaatcaactccctgttcctaaccaacctatatgaggaccgccaggtcccagaggcctccgcacgactgacccagaccctcgccatcgagcggcgaggcgtcgagatcgaggagggcggagtaaaggtgaaactcaccttggttgatacccctggatttggcgatagcgtggactgttccgactgttggttaccggtcgttaagttcatagaggagcaatttgagcagtatctcagagatgagtccgggctgaacaggaaaaatatccaggattcgagggtacactgctgtctctactttattagcccctttgggcgtggactcagaccactggatgtagctttcttgagagctgtgcacgaaaaagtgaacataatcccggtgatcgggaaagcagacgctctgatgcctcaagaaacacaagcccttaagcagaagatccgagatcaactgaaagaggaagagatacatatttatcagttcccagaatgcgactctgacgaagacgaagacttcaagcggcaagacgctgagatgaaggagagtatacccttcgccgtggtcggatcttgcgaggtggtgcgcgatggcggtaaccgccctgtgcgtgggaggagatacagctgggggacggtcgaggtggaaaatccccatcattgtgattttttaaatctcaggcgcatgcttgtacagacacacctgcaggatctgaaagaggtgacgcacgatttgctttacgagggctaccgcgctcgctgtctgcagagtctggctcgacccggtgcacgagaccgagccagccgatcgaaattgagtcgccaatccgccacagaaatcccgctgcctatgttgcctctcgctgatactgagaaactcattcgtgagaaggacgaggagctccggagaatgcaggagatgctcgagaaaatgcaggcccaaatgcaacagtctcaggctcagggggaacagagtgatgccttatag

SEQ ID NO: 239934 - DNA, 1104 bp, synthetic construct
  misc_feature 1..1104: note = Description of Artificial Sequence: Synthetic coding sequence
  source 1..1104: mol_type = other DNA
atggacaaggagtatgtggggtttgctgcgttacccaatcagctgcatcgaaagagtgtgaaaaaagggtttgactttacgctgatggttgcgggtgagtcagggctggggaaaagtaccctgattaactccctgttcctgaccaacttatacgaggaccgccaggtgccagaggccagcgcacgactgacacaaactcttgccatagaaagacggggtgtggagatagaagagggcggagtaaaagtcaaactgaccctggtggatacccccggattcggagactccgttgattgcagcgactgctggcttccagtcgttaagtttatagaggagcagttcgagcagtacctccgggatgagtccgggctgaaccgtaagaacatccaggacagtcgagtccattgttgtctctactttatttccccttttgggaggggactgagacctctcgatgtggccttcttgagggccgtgcatgaaaaggttaatattatccccgtgataggaaaggccgatgcactaatgccacaagagacacaagcactcaagcagaagatcagggatcaactgaaggaggaggagatccacatatatcaatttcctgaatgtgactccgatgaggatgaagactttaagaggcaggatgcggaaatgaaagagagtatacccttcgcggtggttggctcatgcgaagttgtccgtgacgggggtaatcgcccagtacggggacgccgatacagctgggggaccgtggaggttgagaacccacatcattgtgactttctcaacctgcgacggatgcttgtgcaaacgcatctccaggatttgaaagaggtgacacacgatttgctctatgagggctatagagcacggtgcctccagtcacttgccagacccggtgctagagacagggcctcaagaagtaaactttcacgccagagcgccacggagattcctctgcccatgctgccactcgccgataccgaaaagctgattcgcgagaaagatgaagaattgcgcaggatgcaggaaatgctggagaaaatgcaggcccagatgcaacagtcacaggcccaaggcgagcagtccgacgccctttag

SEQ ID NO: 239935 - DNA, 966 bp, synthetic construct
  misc_feature 1..966: note = Description of Artificial Sequence: Synthetic coding sequence
  source 1..966: mol_type = other DNA
atgatgaatcggtattaccaaccaatagttgactatattgacgcccagttcgaggcatacctgcaggaagagttaaagataaaaagaagtctgtttacctaccacgacagtagaatacacgtgtgcttatacttcatttcgcctactggccattccctgaagaccttggacctgttgaccatgaaaaacctcgattccaaagttaacattataccagtgatcgccaaggcagacaccgtatcaaagaccgagctgcaaaagtttaagatcaagctcatgtccgagctcgtaagcaacggtgtgcagatctaccaattccccacggatgatgacaccattgctaaagtgaacgcagccatgaatggtcagctgccattcgcagtcgttggttctatggatgaggtgaaggtgggaaacaagatggtgaaagcgaggcaatatccatggggcgtggtacaggtcgagaacgaaaaccattgtgactttgtgaagttgcgggaaatgctcatttgcaccaacatggaggacttaagagagcagacccacacccgccactacgagctctaccgcagatgcaagttggaagaaatgggatttacagatgtgggcccagagaacaagcccgtgtctgtccaggaaacatacgaggccaagcgccatgaatttcatggggaacgacagcgcaaagaagaagagatgaagcagatgttcgtgcagcgagtgaaagagaaggaggccatcctaaaggaggccgagagagaactgcaggcaaagtttgagcacctcaaacgactgcatcaagaagagagaatgaagctggaagaaaagcgaaggcttttagaggaggagatcatcgccttctccaaaaagaaagctaccagtgaaatatttcattcacaatcgttcctcgctacagggagcaatctacggaaggacaaggatcggaagaattccaacttcctgtag

SEQ ID NO: 239936 - DNA, 954 bp, synthetic construct
  misc_feature 1..954: note = Description of Artificial Sequence: Synthetic coding sequence
  source 1..954: mol_type = other DNA
atgagtgggcacgtgggattcgagtcacttcccgatcagcttgtgaatcgctcaatccagcaaggtttttgtttcaatatactctgcgttggcgaaactggaattggcaaatccactctgatagacaccctcttcaatacaaatttcgaggactatgagtcctcccacttttgtcctaacgttaaattgaaggctcagacgtacgagctgcaggagagtaacgtgcaactgaagctgacaatagtgaatacagtgggattcggtgatcagattaacaaggaggaatcctaccagcccatcgtcgattacattgacgctcagttcgaggcctatctgcaagaggaactgaaaattaagaggagcctatttacctaccatgatagccggattcatgtttgtctttacttcatcagccctaccggtcactccttgaagaccctggacctgttgactatgaagaacctcgatagcaaagtgaatatcatccctgtgattgcaaaggctgataccgtatccaaaacggagctgcagaagtttaagattaagctgatgtccgaattagtgagcaacggagttcaaatctatcaatttcctactgacgacgatactattgctaaggtaaacgccgctatgaacggccaactacctttcgcagtggtggggtcgatggacgaagttaaggtggggaataaaatggtgaaagcaaggcagtatccatggggtgtcgtacaggtggagaacgaaaatcattgcgatttcgtcaaactgcgagagatgctaatatgcacaaacatggaggaccttcgcgaacagactcacacgcggcattatgagctgtaccgccgttgcaagctggaggagatgggatttaccgacgtgggtcctgaaaacaaaccagtgagctataggcccaacctgagtacactccgcgatttcaccaaaaagcgggagtag

SEQ ID NO: 239937 - DNA, 1635 bp, synthetic construct
  misc_feature 1..1635: note = Description of Artificial Sequence: Synthetic coding sequence
  source 1..1635: mol_type = other DNA
atggcctcaagtgaagtggccagacacctgctcttccagtcccatatggcgactaagacaacctgcatgagttcacagggctcagacgatgagcagataaagagagaaaatataagaagcctcacgatgtcagggcatgttgggttcgaatcactgcctgatcaactggttaacagaagcatacagcagggattctgcttcaatattctctgcgtaggcgagactggcatcggcaagtcgaccctcatcgatactctgttcaatactaatttcgaggattatgagtccagccacttttgtcctaacgtcaagctcaaggcacagacctacgagctccaggaatcaaacgtccaactcaagctgacaatagtgaataccgtgggttttggggatcagattaacaaagaagaaagctaccaacccatagtcgactacattgacgctcagttcgaggcatatctacaggaggagttgaagattaagaggtccctgttcacctatcatgattctcgtattcacgtatgtctgtactttatatccccaaccggacatagcttgaagactcttgacttgctgaccatgaagaatctggatagcaaggtgaacatcatccctgttatagctaaggccgatacagtgtcgaagaccgaactccagaaatttaagattaagttaatgagcgaattggtctcaaacggagtccagatttaccagttccctaccgacgatgacaccatcgccaaggttaacgctgctatgaacggtcagttgccatttgccgtggtgggttctatggatgaggtgaaagtgggaaacaagatggtgaaagcgagacagtatccttggggagtggtccaagtggagaacgagaatcactgtgacttcgtaaagctgagagaaatgttaatctgtacgaacatggaggacctaagggagcagacccacactcggcactatgaactgtatcgacgttgtaagctggaggagatggggtttaccgacgtggggccagaaaataagcccgtgtccgtgcaagagacgtatgaagcaaagagacacgagttccacggagagcgacagcggaaggaggaggaaatgaaacagatgtttgtgcaacgggtcaaagagaaggaggcgatcttaaaggaagctgagagagagcttcaggccaagttcgaacatctgaagcgcctgcatcaggaggaacgtatgaagttagaagagaagcgccgtcttctcgaggaggagattatcgcttttagtaaaaaaaaagccacctcggaaatcttccatagtcagtccttccttgctaccggaagtaacctaagaaaagacaaagatagaaagaaggagcctggatgccgcttcgaactgctgtgcattgacgttagagcctgcgaaacaaacggcggtagaaaagatgccgagaaagctccaattttttgcaagacagaggttcccgagcatcgcaggagctccagccaggccaacttcatcaagaaaaagcttgaggtgtgcttcgacttcgccgttatctgcttcatcacctccatatttggcgagcagcctcaattactgatttttatggagaagtacttccaggttcaggggcagtatatctcccagtctgagtag

SEQ ID NO: 239938 - DNA, 1365 bp, synthetic construct
  misc_feature 1..1365: note = Description of Artificial Sequence: Synthetic coding sequence
  source 1..1365: mol_type = other DNA
atggcctccagtgaggtggcccgtcacctactcttccagtcccacatggccaccaaaaccacctgcatgtctagccagggcagcgacgatgaacaaatcaaaagggaaaatatcagatcactgaccatgtctggccacgtcggatttgaatccttacccgatcagcttgtgaacagatccattcagcaaggattttgcttcaatatcctttgtgtgggcgagaccggcattggaaaaagcacactcatcgatactctcttcaatacaaattttgaggattatgagagcagtcacttctgtccaaacgtgaagttgaaggcccaaacatatgaattacaggagtcaaacgtgcaattaaagctgaccattgttaataccgtgggctttggagaccagattaacaaagaagaatcttatcagcccattgttgattatattgatgcccagtttgaggcttatttacaggaggagctgaagatcaagcggtccctatttacttaccacgatagtcggatacacgtgtgcctgtactttattagtccaaccggccatagcctgaaaaccttggaccttctcaccatgaaaaacctggacagcaaggttaatatcattcccgttattgccaaagccgacaccgttagcaaaacagagttgcagaaatttaaaattaagcttatgtcggagcttgtgtcaaacggcgtccagatctaccagtttccaactgacgacgatacaattgccaaggtgaacgctgctatgaatgggcagttaccctttgcagtcgttgggtccatggatgaggtgaaagttgggaataagatggtgaaggccagacagtatccttggggggtggtacaggtggaaaatgaaaaccattgcgactttgtgaagttacgggagatgttgatctgcactaatatggaagacttacgcgaacagacccacacccgccactacgaattataccgcagatgcaagctcgaagagatgggctttacagatgtgggaccggaaaataaaccagtctctgtgcaggaaacctacgaggcaaaacgccatgaatttcacggcgagcgacagagaaaggaagaagagatgaagcagatgttcgtgcaacgggtaaaggaaaaagaagccattcttaaggaggccgaacgagaactgcaggccaagttcgaacacttgaagaggttgcaccaggaggagaggatgaagcttgaggaaaaaaggcgactgctcgaagaggagataatcgcgttctcaaagaaaaaagccacctcagagattttccattctcagtccttcctcgccactggttccaacctgcgcaaggacaaagaccggaaaaactcaaactttctctag

SEQ ID NO: 239939 - DNA, 1296 bp, synthetic construct
  misc_feature 1..1296: note = Description of Artificial Sequence: Synthetic coding sequence
  source 1..1296: mol_type = other DNA
atggctagtagcgaagtagcacgacaccttaagagggagaatattcgaagtcttactatgagtggtcacgtgggcttcgagtccttgccagaccagctggtgaatcggtcaattcagcaaggcttctgcttcaatatcctgtgtgtcggggagactggaataggtaagtccacactcattgataccctatttaataccaactttgaggactatgagagtagtcacttttgtcccaatgtcaagctgaaagcgcagacgtatgaactgcaggagtctaatgtgcaactgaaattaacaatcgtgaacactgtgggattcggagaccagatcaataaggaagaaagctatcagcccattgtggactatatcgacgcccaattcgaagcctacctccaggaggagctaaagattaagcggagtctcttcacctatcacgatagccggattcatgtttgcctttactttatcagtcctactggacattctttgaaaaccctggatctcttaactatgaaaaatctggatagcaaggtgaatattatcccagtgatcgccaaagctgatactgtaagcaagacagagctgcagaaattcaagatcaagttgatgtccgagctggtctcaaatggagtacagatctatcagtttccaacggatgatgataccatcgccaaggttaatgcagctatgaacggccaactgccctttgccgtcgtgggctctatggatgaggtcaaggtcggcaacaagatggtcaaagccagacagtatccatggggagtggtacaggtagagaacgaaaaccattgtgatttcgttaagctgagagaaatgctgatttgcactaacatggaagatctgagagagcagacccacactcggcattatgaactctatcggagatgcaaactcgaggagatgggatttacagatgtcggacccgagaataagcctgtttcggtgcaggagacctacgaagcaaagagacacgaattccacggcgaacgtcagaggaaggaagaggaaatgaaacagatgtttgttcagcgtgtgaaggagaaggaggccattctcaaggaagccgagcgagaattgcaggccaagttcgagcacctgaagcgacttcaccaggaggagagaatgaaactggaggaaaagagacggctgcttgaagaggagattatcgctttctccaagaagaaggccaccagtgagatcttccatagccagagctttctggctaccggcagcaatcttcgcaaagataaagaccgcaagaatagcaatttcttgtag

SEQ ID NO: 239940 - DNA, 1353 bp, synthetic construct
  misc_feature 1..1353: note = Description of Artificial Sequence: Synthetic coding sequence
  source 1..1353: mol_type = other DNA
atggccagctcagaagtcgcacggcacctcttgttccagtcccacatggcgacaaaaaccacatgcatgagcagccaaggcagtgatgacgaacagatcaaacgagaaaatatccggtccctcaccatgtccggtcacgtgggctttgagagcctgcctgaccagctcgtcaatagatctatccaacaaggattttgctttaacatactctgtgtcggagagaccggaatcggtaagtccaccctcatcgacacgctcttcaacaccaacttcgaagactatgaatcttcacatttttgcccaaacgtgaaactgaaggcgcagacctacgagctgcaggaatctaacgtgcagctcaagctcaccattgtcaacacagtgggattcggtgaccagatcaacaaggaggagagttaccagcccatcgtcgattatatcgatgcccagtttgaagcgtacctccaggaggaacttaagataaagaggtctctcttcacatatcacgatagtaggatacatgtttgcctttattttatatccccaactggacattctctgaaaacgctggatctgctcacaatgaaaaacctggattccaaagtcaacataattccggtcatagccaaggcagatacagtgagcaagactgagctgcagaagttcaaaattaagctgatgtccgagctcgtaagtaacggcgtgcagatctaccagtttccaacggatgacgataccatcgccaaggtgaacgccgcaatgaatggccagctcccatttgccgtggtgggctccatggatgaggtgaaggttggcaacaaaatggtcaaggcccgacagtacccctggggagtcgttcaagtggagaatgagaaccactgtgattttgtaaaactgagggaaatgctgatatgtacaaacatggaggaccttcgagaacagacccatactaggcactacgagttataccggagatgcaagctcgaagagatgggttttacagacgtgggtcccgaaaataaacctgtatccgtccaagagacgtacgaggcaaagcggcatgagttccatggagagaggcagaggaaagaggaagagatgaagcagatgttcgtccagcgagtcaaagagaaagaagccattctgaaggaggcggaacgagaactgcaggcgaaattcgagcatctgaagcgcctgcaccaggaggaacggatgaaattggaggagaagcgtcgcctgctcgaagaggaaatcattgcctttagcaaaaagaaggctacttcggagatttttcactcacaatcctttctggccacgggtagcaacttgcggaaagacaaggatcgcaaaaagtag

SEQ ID NO: 239941 - DNA, 1422 bp, synthetic construct
  misc_feature 1..1422: note = Description of Artificial Sequence: Synthetic coding sequence
  source 1..1422: mol_type = other DNA
atggccaccaaaaccacatgcatgagcagccagggctcggacgacgagcagatcaaaagagaaaacattaggagccttaccatgtcggggcatgtcggatttgagagccttcctgaccagctggtgaaccgatctattcaacaaggattctgctttaacatcctgtgcgtgggagagacgggcatcggaaagtctacactgatcgacactctttttaacactaacttcgaggactacgagagtagccacttttgccctaacgtaaaactgaaagcccagacttatgaactgcaagagtcaaacgtgcagttgaagctgacaatcgtgaacacggtgggttttggcgatcaaattaacaaggaggaatcataccagcccatagtggattacatcgatgcccagtttgaagcataccttcaagaagaactaaagatcaagcggtcattgtttacataccacgactctcgaatacacgtgtgcctatactttattagtcccactggacattccttgaagacactcgaccttttgacgatgaaaaatctggactctaaggtgaatatcattcctgtgatagccaaggccgatactgttagcaagacagagctccagaagtttaagataaagctgatgtccgagctggtaagcaacggggtccagatttatcagtttcctacagacgatgacacaattgcaaaagtgaatgctgccatgaacgggcagttgccattcgccgttgtgggtagtatggacgaagttaaagtcggcaacaagatggtcaaagccaggcagtacccttggggggtggttcaggtcgagaatgagaatcactgcgattttgtgaaactgagagagatgctgatttgtactaacatggaggacctgcgcgagcagactcatactaggcactacgagctttaccgcaggtgtaagctagaggagatggggttcaccgacgtgggacccgagaataagccggtgagcgtgcaggagacctatgaggcaaaacgtcacgaattccacggggagagacagcgaaaagaagaggagatgaaacagatgtttgtacagcgggttaaggagaaggaagccattttaaaagaggcggagagggaattgcaggctaagttcgagcacctgaaacgcctgcaccaggaggagagaatgaaattggaagaaaaacggaggctgctggaagaagagattatcgcgttttccaaaaaaaaggccacctcagaaatattccattctcagtcctttctggctacagggtcaaatctccgtaaggataaggaccgcaagaaggaacccggatgtcggtttgaattgctgtgtattgatgttcgtgcctgcgaaacaaatggcggaaggaaggatgctgagaaggggagagagggacactctgcaagaggtcagccttag

SEQ ID NO: 239942 - DNA, 852 bp, synthetic construct
  misc_feature 1..852: note = Description of Artificial Sequence: Synthetic coding sequence
  source 1..852: mol_type = other DNA
atggcttcgtccgaagttgctcggcacttgctgtttcaatcacacatggccactaagacgacgtgtatgtcttcacagggctctgacgacgagcaaatcgtgaatattattccggtgatcgcgaaagcagacactgtgtccaagactgagctgcagaagttcaagataaaactgatgagcgaacttgtctccaatggcgtgcaaatttaccagtttcccaccgatgacgatactatcgccaaagtcaacgctgcaatgaatgggcagcttcctttcgcagtcgttgggtcaatggacgaggtcaaggtgggcaataagatggttaaggccagacagtacccctggggagtagttcaagttgaaaatgaaaaccattgtgattttgtgaagctgagggaaatgttaatctgcaccaatatggaggacctgcgtgagcagacccataccaggcattatgaactctatcgccgatgcaagctggaggaaatggggttcaccgacgttggtcctgaaaacaagccagtgagcgtgcaggaaacttacgaggccaagagacatgagttccatggagagagacagagaaaagaagaggagatgaagcaaatgttcgtacagagagtgaaagaaaaggaagccattctgaaggaagccgaaagagaattgcaggctaaattcgaacacttgaagagattgcatcaagaggagagaatgaagctcgaagagaagaggaggctacttgaggaagagattatcgcctttagcaagaagaaagccactagcgagatcttccactcacagtcttttctggcaactggcagtaatttgaggaaagacaaggataggaaaaagtag

SEQ ID NO: 239943 - DNA, 1290 bp, synthetic construct
  misc_feature 1..1290: note = Description of Artificial Sequence: Synthetic coding sequence
  source 1..1290: mol_type = other DNA
atggctgtcgcggtcggcaggcctagcaatgaggagttgcgtaatctctctctaagtggccatgttggttttgactcactgccagatcagctggtgaataagtcaacatcccagggcttttgcttcaacattctatgcgtcggagagaccggcatcggaaaatctaccctgatggataccctttttaacacgaaatttgagtccgacccggcaacacacaatgaacccggagtgcggctcaaggccaggtcctacgaactgcaggaaagcaacgttcgtttaaagctgacaatcgtcgatactgtcgggttcggcgatcaaataaacaaggacgacagttacaagcctatcgtcgagtacattgatgctcagtttgaagcgtacctgcaggaggaactgaagatcaagcgttctctttttaattatcacgacacccgaatccacgcttgcctgtattttatagcacctacagggcattctttaaaaagtctggatctcgtgacaatgaaaaaattggattcgaaagttaacatcattcccatcatcgctaaggcagacacaatcgctaaaaacgagctccacaagtttaagagtaagatcatgtccgagctcgtgagcaatggcgtgcagatataccaattccccactgacgaagagactgttgctgaaattaacgccactatgagtgtccaccttcccttcgcagtcgtgggatccaccgaggaggtgaagatcggcaacaagatggccaaggcaaggcagtacccctggggcgttgtgcaggtagagaacgaaaatcactgtgacttcgtgaagctaagagaaatgctgatcagggtcaatatggaggatctgcgggagcaaactcatacacgccactacgagctgtatcgcagatgtaagttggaagagatgggttttaaagatacagacccagattctaaacctttctctctgcaagaaacgtatgaggccaagagaaatgagtttctgggagagctacagaagaaggaggaagagatgaggcagatgttcgtcatgcgagtcaaggagaaagaggctgagctgaaggaggccgaaaaggagctgcacgagaagttcgatctattaaagagaactcatcaggaagaaaagaagaaagtcgaggacaaaaagaaggagcttgaagaggaggtgaataattttcagaaaaaaaaggcggctgctcagctgctgcaatctcaggcacagcaaagcggggctcagcagacaaagaaggacaaggataagaaaaacgcttcctttacctag

SEQ ID NO: 239944 - DNA, 1278 bp, synthetic construct
  misc_feature 1..1278: note = Description of Artificial Sequence: Synthetic coding sequence
  source 1..1278: mol_type = other DNA
atggccgtggcagtgggacggccaagcaatgaggagcttaggaacctatcactctcgggtcacgtgggctttgactctttacctgatcagctagtaaataaatccacctcgcaagggttctgcttcaacattctttgtgttggcgaaaccgggatcggcaaatccacactcatggacactctttttaacaccaagttcgaatcggatcccgctactcacaacgagccaggggtgcgcttgaaagctcgaagctacgagttgcaggagagcaatgtccgtctcaagctgacgatcgtcgatactgttggattcggtgatcagattaacaaggacgactcctataaacccatcgtagagtacatcgacgcacagtttgaggcctacctacaagaggagctcaaaatcaaacgaagcttattcaattaccatgatactcggatccatgcctgcctgtattttattgctccaacaggtcattccctcaaaagtctggacttggtgacaatgaagaagctggactcaaaagtgaatatcatcccaattattgctaaagccgatacgatcgccaagaacgagctccacaagtttaagagcaagatcatgtcagagctggtgtcgaatggggtccagatctatcagtttcctacagatgaggagactgtggccgagatcaacgccactatgagcgtccacctgccctttgcggtagtggggtcaactgaagaggttaagattggcaataaaatggctaaggctcgtcagtacccttggggcgttgtgcaagtggaaaatgagaaccactgtgattttgtcaaacttcgcgagatgctaatccgcgtgaatatggaagatttacgcgagcagacacatacacgccattacgagctgtatcggcgatgtaagctcgaggaaatggggttcaaggacactgatccggactccaagccgttctccctgcaagagacctatgaagccaaacggaacgaattcttgggagagctgcagaaaaaagaagaggaaatgcggcaaatgttcgttatgcgcgtcaaggaaaaagaagccgagctgaaagaggcggaaaaggagcttcacgagaaatttgacctactgaaacgaacacaccaggaagaaaagaaaaaagtcgaggacaaaaagaaggaacttgaagaagaggtaaacaactttcaaaaaaagaaggcagcagctcagctgctccagtctcaggcacagcagtcgggggcacaacagactaagaaagacaaggataaaaagaaatag

SEQ ID NO: 239945 - DNA, 1320 bp, synthetic construct
  misc_feature 1..1320: note = Description of Artificial Sequence: Synthetic coding sequence
  source 1..1320: mol_type = other DNA
atggaagaacggaagcctgcccacgtcttgaggagctttaaatacgctgctttcatgaatgaggagttgcgaaacctgtcattatcaggccatgtcgggttcgattcactgccggaccaattggtcaacaaaagcacatcacagggattttgtttcaacatcctgtgtgtcggcgagacaggaattgggaaatcaaccctgatggatacccttttcaacacaaaattcgagagcgaccctgccactcacaatgaacccggagtgcggttgaaggcaaggtcttacgagcttcaggaatcaaatgtgcggctgaagctgacgatcgtggacaccgtgggctttggtgaccagattaacaaagatgattcttacaagccgatcgtggagtatatcgatgcacagttcgaggcctatctccaagaggagttaaaaattaaaaggtctcttttcaattatcatgacacccggatacatgcctgtctctattttatcgccccaacaggccatagcctgaaaagcctcgacctggtcaccatgaagaagctcgacagcaaggtgaatatcatcccaatcattgcgaaagcagatactattgctaaaaacgagttgcacaagttcaaaagtaagatcatgtccgaactggtaagtaatggtgtgcaaatctatcagttccctacagacgaggagactgtcgccgaaatcaacgccactatgtctgtacatcttccctttgcagtagtgggctcaactgaggaggtaaagattggtaacaagatggctaaggccagacagtacccatggggggtggtccaagtagagaatgagaatcattgcgactttgtgaagctacgtgagatgcttatccgtgtaaacatggaggatttgagagagcaaacccatacaaggcactacgagctgtatagacgctgtaagctggaggagatgggcttcaaggatacggaccctgacagcaaaccattcagtctccaagagacatatgaggcaaagcgcaatgaattcttaggggaactccaaaagaaagaggaagagatgagacagatgtttgtgatgcgagtgaaggaaaaagaggccgagttgaaagaggctgagaaggagctgcacgagaagtttgatctcttgaaacgcacgcaccaagaggagaagaagaaagtcgaagataagaagaaagagctggaggaggaggtaaataatttccagaaaaagaaagcagctgcccagcttctgcagtcgcaggcacagcaatcaggggctcagcagactaagaaggacaaggacaagaagaacgcaagcttcacttag

SEQ ID NO: 239946 - DNA, 1077 bp, synthetic construct
  misc_feature 1..1077: note = Description of Artificial Sequence: Synthetic coding sequence
  source 1..1077: mol_type = other DNA
atggatcccttgcgcaggtcgccatccccttgcctgtcctcccagccgtcatccccctctacacccccttgcgagatgttgggccctgtggggatcgaggcagttctggatcaacttaaaatcaaagctatgaagatgggcttcgagtttaatattatggtggtggggcagtcgggactgggcaaaagcaccatggtgaatactctgttcaagagtaaggtttggaaatcaaatccgcctggccttggagtgcctacgccgcagacactgcagctgcacagcctcactcacgttatagaagagaaaggcgtgaagctgaagctgactgtgactgatactccaggttttggagatcagataaacaacgacaattgttgggacccaatattaggctatatcaatgagcagtatgaacagtacttgcaggaggaaatccttattaccaggcagcgacatataccggacacacgggtacactgctgcgtctacttcgtgccccctactgggcattgcctgcgccctctcgatatcgagttcctgcagagactgtgtagaacagtcaatgtggtgcccgttattgctcgcgcagattcactcaccatggaggagagagaggcttttagacgcagaatacaacagaatctgaggacccattgtatcgatgtgtacccacagatgtgttttgacgaggatattaacgataaaattctaaattctaaattacgcgacaggattcctttcgccgtagtgggcgctgatcaggaacaccttgtgaatggacgctgcgttctcggtcgcaagactaagtggggaattatagaggtggaaaacatggcccattgtgagtttccactgttgagggatcttctcatccggagtcacctgcaggacctgaaggatatcacccacaacatccactacgagaattatcgcgtaattagattgaatgagtcacatcttctccccaggggcccagggtgggtcaacttggcacctgccagtccgggacagttgacaacaccgcgaacctttaaagtctgtcgtggtgctcacgatgatagcgacgatgagttctag

SEQ ID NO: 239947 - DNA, 939 bp, synthetic construct
  misc_feature 1..939: note = Description of Artificial Sequence: Synthetic coding sequence
  source 1..939: mol_type = other DNA
atggacccgttaaggcgcagccccagtccctgcctatcatcccaaccctccagtccttcgactccgccttgcgaaatgctcggaccggtggggatcgaagccgtgctcgatcaacttaagatcaaggcgatgaagatgggttttgaatttaatatcatggtggtgggccagtccggcctgggcaagtctacaatggttaacactctattcaagtcaaaggtctggaaatccaatcctccaggtctcggcgtcccgaccccccagactctgcagctgcactcattgacacatgtaatcgaggaaaaaggtgtcaagctgaaactgacagttacagatacaccaggtttcggagaccagattaataatgacaattgcctccgccctttggacatcgagttcctgcagcggctgtgcaggactgtaaacgttgtgcccgtgattgcgagagcagactctctcactatggaagagcgtgaggccttcaggagacgcattcaacagaacctgaggacccactgcatcgacgtgtatccgcagatgtgcttcgatgaagatattaacgacaaaatactgaacagcaagctcagagatcgaatcccatttgcggttgttggtgcggaccaggagcacttggtcaacgggcgttgcgttctggggagaaagaccaagtggggtattatcgaggtagaaaatatggcacattgcgaattcccactcctcagagatcttttgattaggagccatctccaagatttgaaagacattacacacaacatccactacgagaattatcgggtgattagacttaatgagtcccacctgctgccacggggaccagggtgggtgaatctggcccctgcctcgcccggacagttaacaacccccaggactttcaaagtctgcagaggcgcacacgacgattccgacgatgagttctag

SEQ ID NO: 239948 - DNA, 1299 bp, synthetic construct
  misc_feature 1..1299: note = Description of Artificial Sequence: Synthetic coding sequence
  source 1..1299: mol_type = other DNA
atggcagagcgcactatggccatgcccacccagatccctgctgatggagatacccagaaggagaataatatcaggtgtcttaccactatcggccatttcgggtttgagtgcttgccaaaccagctggtctctagaagcatacgccaggggtttacttttaacattctctgtgtgggcgagacaggtattggtaaatctaccctaattgacacactttttaatacaaatcttaaggataacaagtcctcgcatttctatagcaatgtgggcctgcagattcagacctacgagctgcaggagtctaatgtacagctgaagctgacagtggtggaaactgtgggttatggtgaccagatcgacaaagaagcatcctaccagccaatagtcgattacattgacgcacagtttgaggcctacctacaggaagaattgaagattaagcgttccctatttgaatatcatgattcacgtgtgcacgtgtgcttgtactttatcagtcccacaggccatagcctgaagtccctcgatttactgacgatgaagaacttagactcaaaagtgaacattattccactcattgccaaggccgacactatatcaaaaaatgatctgcagaccttcaaaaataaaatcatgtctgaactgatcagcaacggcatccagatttatcagctcccgactgatgaggagacagctgctcaagccaactcgagcgtgtcaggcttacttcccttcgctgtcgtgggctccaccgacgaagttaaggttgggaaaagaatggtgcgcggacgccactatccatggggcgttttgcaggtagagaacgagaaccactgtgacttcgtaaaactcagagatatgctgttgtgcaccaacatggaaaatcttaaagaaaagactcatacccaacactatgagtgttacagataccagaagcttcagaagatgggatttacagatgtgggcccaaataatcaaccagtcagctttcaggagatcttcgaagccaagcggcaggaattttatgaccagtgccagagggaggaggaagaactgaagcagagattcatgcagagagttaaggagaaggaagctacctttaaagaggcagagaaagagttacaggacaaatttgaacaccttaaaatgatccagcaggaggaaatacgtaaactggaagaggagaagaagcaacttgagggtgaaatcatcgacttttacaagatgaaagccgcaagcgaagccttgcaaactcaattgagtactgacactaagaaggataagcatcggaagaagtag

SEQ ID NO: 239949 - DNA, 1086 bp, synthetic construct
  misc_feature 1..1086: note = Description of Artificial Sequence: Synthetic coding sequence
  source 1..1086: mol_type = other DNA
atgagcaaacagcagcctacacaattcattaaccccgaaacacccggttatgtaggctttgcaaacctacctaatcaggtgcatcggaaatccgtgaagaaagggttcgaattcacattgatggtggtgggcgaatctgggctaggcaaatcaaccctcataaatagcctgttccttactgatttgtatcccgagagggtcattccaggcgcagccgagaagatagaacgcacagttcagatcgaagcttctacagtggaaatcgaagaacgaggtgtcaaactgcggctcacagtggtcgatacgcccggatatggggacgctattaactgtcgggactgtttcaagacaatcattagttatattgatgagcagtttgaacggtatctgcacgacgaaagcggtctgaatcgtagacacatcattgacaatcgagtgcactgttgcttttattttattagccctttcgggcatgggctcaagccgttggatgtggcatttatgaaggccatccacaataaagttaatatcgtcccagtgattgcaaaggcagacactctgacactaaaggagagagaacggctgaagaagcgcattcttgatgaaatcgaggagcacaacataaaaatctatcacctccccgacgccgaatccgatgaggacgaggactttaaggagcagactagactcctcaaagcatctatcccctttagtgtcgtcggcagcaaccagctgattgaggctaagggcaaaaaagtccgtggacgtctgtacccttggggcgttgtcgaagtagaaaacccagagcacaatgacttccttaagctgcgcaccatgctgatcacacacatgcaggacttgcaggaggtgacccaagacctccattatgaaaacttccgctcggagcgtctgaagcggggaggaagaaaagttgaaaatgaagatatgaataaggaccaaatactactggagaaagaggctgaacttaggaggatgcaggaaatgatcgccaggatgcaggcccagatgcagatgcaaatgcaggggggtgatggtgatgggggtgcgctgggtcaccacgtgtag

SEQ ID NO: 239950 - DNA, 1086 bp, synthetic construct
  misc_feature 1..1086: note = Description of Artificial Sequence: Synthetic coding sequence
  source 1..1086: mol_type = other DNA
atgtctaagcagcagcccacgcaattcataaatcctgagacccccggatatgtggggtttgccaacctgccaaaccaagtccatagaaagagcgtgaagaagggtttcgagtttactcttatggtggtgggggaatccgggcttgggaagtcaactctgattaactccctctttctgacggatctctaccctgagcgagtaattcctggcgcagctgagaaaatcgaacgaacagttcagatcgaggccagtaccgtcgagattgaggaaagaggcgtcaagttacgccttactgttgttgacacccctggttatggcgacgctatcaattgcagggactgcttcaagaccatcattagctacattgacgaacaatttgagcggtacctgcacgacgaaagtggcttgaacaggagacatattattgacaatcgagttcattgttgcttttatttcatttcaccgtttggacacggcctgaaacctttggacgtggcgttcatgaaggcgatacataacaaggttaatatcgttccagtgattgccaaggcggatacacttacactgaaggagagagagaggctgaagaaacgaatcctagacgaaatagaagaacataatatcaaaatctaccacttgccagacgctgaatccgatgaagacgaggacttcaaggagcaaacacgtcttttgaaagcatctatccccttctcagtcgtgggtagtaaccagctgatcgaggcaaaagggaaaaaggtccgaggtcgcctatacccatggggggtggtagaagtggagaatcctgagcataacgacttccttaagttacgtacaatgctgatcacacacatgcaagacctgcaggaagtgacacaggacctgcattacgagaattttagaagcgagcgccttaagcggggtggccgaaaggtcgaaaatgaagatatgaataaggatcagatccttttggaaaaggaggctgagttacggcgaatgcaggaaatgattgcacggatgcaggcccaaatgcagatgcagatgcagggtggagacggcgacggtggagcgctgggacatcacgtgtag

SEQ ID NO: 239951 - DNA, 1191 bp, synthetic construct
  misc_feature 1..1191: note = Description of Artificial Sequence: Synthetic coding sequence
  source 1..1191: mol_type = other DNA
atgccctggatttctgagggcagagcaactcgaccgtgcctgagagttccttctgccaggcggggagatgagggcctgcaccaacgcgacgaggctagccaaaagatgtcaaaacagcagcccacccagtttatcaatccagagacaccgggatatgtcgggttcgcgaacctgccaaaccaggtacaccgaaagtcagtcaagaaaggttttgagtttactctgatggtggtcggagaaagcggtctgggcaagagtactttgattaactctctctttctcactgacttgtatcctgagagagttatccccggtgcggctgagaagatagaacgtacagttcagatcgaagcttcaacggtcgaaatcgaagagcgtggggtgaaactacgactaaccgtggtggatacgcctgggtatggagatgccatcaactgccgggattgctttaaaaccatcattagctacattgatgaacagttcgaaagatatctgcacgacgagagcggtctgaaccggcgtcacataatagacaaccgggttcattgctgtttctacttcatcagtcccttcgggcacggcctcaaacctctagacgtagcttttatgaaggccatccataataaggtcaacatcgtaccagtgatcgcaaaggccgatactttgaccctgaaggaaagagagcggctgaagaaacgaattctcgatgagatagaggaacacaatataaagatctaccacttgcccgacgcagagtccgatgaagacgaagacttcaaagagcagacacgactcctaaaggcctccattccatttagtgtcgtaggaagcaatcaactgatcgaggctaaaggcaagaaagtgcgagggaggctttacccttggggggttgttgaggtagaaaaccctgaacacaacgacttcctgaagctgcgtactatgttgattacacatatgcaggatctgcaggaagtgactcaggatttgcactatgagaacttccggtccgagcggttaaagagaggtggcagaaaggtggagaacgaagatatgaacaaagatcaaattctgctggagaaagaagcagagttaaggagaatgcaggaaatgatcgctagaatgcaggctcagatgcagatgcagatgcaggggggtgatggggatggaggggctctagggcatcacgtctag

SEQ ID NO: 239952 - DNA, 1086 bp, synthetic construct
  misc_feature 1..1086: note = Description of Artificial Sequence: Synthetic coding sequence
  source 1..1086: mol_type = other DNA
atgtctaagcagcagccaactcagtttatcaatcctgaaacacctggatacgtgggcttcgctaacctgcccaaccaggtgcatagaaaatctgtcaaaaagggcttcgagttcaccttaatggtggtcggcgagtccgggcttgggaagtcaaccctgatcaactccctctttttgactgacttgtaccctgagcgtgtgattccgggtgccgcagagaagatagagcgcacagtgcaaatcgaggcgtctacagttgagatagaagaacgcggagtaaagctgcggttgaccgtggtggatactcccggatacggtgatgccattaactgcagggattgcttcaagacaattatcagctacatcgatgagcagtttgagaggtacctccacgatgagagtgggcttaacaggaggcatatcatcgataaccgcgtgcactgttgtttttatttcattagccctttcggtcacgggctgaagccactggatgtcgcttttatgaaggctattcacaacaaagtgaatatcgtgcccgtgatcgcaaaggccgatactctgactcttaaggaacgcgaacggcttaagaagcggatcctggacgagatagaagagcataacataaaaatttatcatctcccagatgctgagtccgatgaggatgaggatttcaaagaacagacaaggctgttaaaggcctctatcccgttttcagtggtgggctcgaaccagcttatagaagccaaaggaaaaaaagtccgcggaagattatacccttggggcgtcgtcgaggtcgagaacccagagcacaatgactttctcaagttgcgaaccatgttgattactcatatgcaggatttgcaggaggttacccaagaccttcactacgagaatttccgctcggagagactgaagagaggcggacgcaaagtggaaaatgaagatatgaacaaggaccagatacttctggaaaaagaggccgaactgcgcaggatgcaagagatgatcgctcggatgcaggcccaaatgcagatgcagatgcaagggggtgatggtgacggcggtgctttggggcatcacgtctag

SEQ ID NO: 239953 - DNA, 1086 bp, synthetic construct
  misc_feature 1..1086: note = Description of Artificial Sequence: Synthetic coding sequence
  source 1..1086: mol_type = other DNA
atgagcaagcaacaacctacccagtttattaaccccgagacacccggatatgtggggttcgccaacctccccaaccaggtccacaggaaaagtgtgaaaaaaggctttgaattcactctgatggtggtcggagaatccggtcttggcaagtctaccttgataaatagcctcttcctgactgatctgtatcctgaacgcgtgatcccaggagcggctgagaaaatcgaacgtaccgtgcagattgaagcaagtacagtcgagattgaagagagaggagtgaaactaaggctcaccgtggttgacaccccgggatacggagatgccatcaactgcagagattgtttcaagactattattagttacatcgacgaacagtttgaaagatatctgcatgatgaatcaggactcaatcgcagacatatcatcgataatagagtacattgctgcttttacttcattagtcctttcgggcacggactgaagcctctggatgtagcgtttatgaaggcgattcacaataaagtgaatattgtcccagttatcgccaaagctgacactttaacattgaaagaaagagaaagactgaaaaaacgcatactcgacgaaatcgaggaacacaatatcaagatctatcatttacctgacgccgaaagcgatgaggacgaggacttcaaggagcagacccgattgttaaaggcatccattcctttcagcgtggtaggctcaaaccagctgatcgaggcaaagggcaagaaagtgagaggcaggctgtacccatggggcgtagtcgaggtggaaaaccccgagcacaacgattttcttaagctgaggaccatgctcatcacccacatgcaagacctgcaagaggttacccaggatctgcattacgaaaatttcaggagcgaacgccttaagagagggggacgcaaagtcgagaacgaagacatgaacaaggaccagatcctgctggagaaggaggctgaactgcgtcgtatgcaagagatgattgcaagaatgcaagcccagatgcaaatgcagatgcaaggcggagatggcgacggaggcgctctgggccaccacgtctag

SEQ ID NO: 239954 - DNA, 159 bp, synthetic construct
  misc_feature 1..159: note = Description of Artificial Sequence: Synthetic coding sequence
  source 1..159: mol_type = other DNA
atgtctaagcagcaaccgacccagtttatcaacccggagacacccggttacgtgggcttcgccaatctgccaaatcaggtgcatcgcaagagtgtcaagaagggcttcgagtttacactcatggtggtcggggagagcgggttaggaaagagtacttag

SEQ ID NO: 239955 - DNA, 153 bp, synthetic construct
  misc_feature 1..153: note = Description of Artificial Sequence: Synthetic coding sequence
  source 1..153: mol_type = other DNA
atgagcaagcagcaacctacgcaatttatcaatcctgaaacccccggttatgtgggcttcgctaatctccctaatcaggttcaccgtaagtctgttaaaaaaggcttcgagttcacgctgatggttgttggggagtccggtctgggtaaatag

SEQ ID NO: 239956 - DNA, 72 bp, synthetic construct
  misc_feature 1..72: note = Description of Artificial Sequence: Synthetic coding sequence
  source 1..72: mol_type = other DNA
atgtcaaaacagcagcctactcagtttattaatcccgaaacacctggctacgttgggttcgcgaatctgtag

SEQ ID NO: 239957 - DNA, 447 bp, synthetic construct
  misc_feature 1..447: note = Description of Artificial Sequence: Synthetic coding sequence
  source 1..447: mol_type = other DNA
atgagtaaacagcaacccacccaatttattaaccctgagacgcccggttacgtcgggtttgccaatttaccaaaccaggtgcaccggaaaagcgttaagaagggatttgaatttaccctcatggtagtaggcgaaagcgggctaggtaagtccactctgattaatagcttgttcttaacagatctgtaccccgagcgggtgattccaggcgctgccgagaaaattgaaagaaccgtgcagatcgaagcatctaccgttgagatcgaggaacggggtgtgaaacttaggttaacagtggttgacactcctggatacggggatgccattaactgccgcgattgtttcaagacaattatatcttatatagacgaacagttcgagaggtacctgcatgacgagtccggactcaatcgcagacacatcatcgataatcgcgtgcactgttag

SEQ ID NO: 239958 - DNA, 396 bp, synthetic construct
  misc_feature 1..396: note = Description of Artificial Sequence: Synthetic coding sequence
  source 1..396: mol_type = other DNA
atgtccaaacaacaaccaactcagttcatcaatcccgagactcccggatatgtgggcttcgcaaacctcccgaatcaggtgcataggaagagcgtcaagaagggttttgaatttactttgatggtggtgggtgagagtggactcgggaaaagcactctgatcaacagcctgtttctgaccgacctgtatcctgagagggtgatccctggcgcagccgaaaagatagaaagaaccgtccagatagaagcttccacagtggagattgaagagaggggtgttaagctgaggctgacggttgtggacacaccaggctacggcgacgccattaattgcagagactgtttcaagaccattatttcctatatcgacgagcagttcgagaggtatctacactag

SEQ ID NO: 239959 - DNA, 219 bp, synthetic construct
  misc_feature 1..219: note = Description of Artificial Sequence: Synthetic coding sequence
  source 1..219: mol_type = other DNA
atgtctaagcaacagcccacccaatttattaaccctgaaacccctggttacgtgggatttgcaaaccttcccaaccaggtacatagaaaaagtgtgaaaaagggattcgagtttacccttatggtcgtcggggagtctggactggggaaaagcactctgatcaacagcctgtttctgacagatctctatcccgagcgcgtcatccccggagccgcatag

SEQ ID NO: 239960 - DNA, 219 bp, synthetic construct
  misc_feature 1..219: note = Description of Artificial Sequence: Synthetic coding sequence
  source 1..219: mol_type = other DNA
atgtctaagcagcagcccacgcaattcatcaaccccgagacaccaggatacgtcggatttgccaatctccccaatcaggtgcatagaaaatctgtcaaaaagggcttcgagttcacccttatggtagtgggggagtcagggttgggtaaatcgaccctaataaactcattattccttacagacctataccccgagagagtgatccccggagctgcgtag

SEQ ID NO: 239961 - DNA, 522 bp, synthetic construct
  misc_feature 1..522: note = Description of Artificial Sequence: Synthetic coding sequence
  source 1..522: mol_type = other DNA
atgagcaagcagcaacctacacagttcatcaacccagaaacgcccggatacgtgggctttgcaaacctcccaaatcaggtccaccggaaatctgtcaagaaagggttcgagtttaccctgatggtggtgggagaatctggtctgggcaaatctacactgatcaactctctgttcttaaccgatctgtatcccgaacgtgtaattcctggcgcagctgaaaagattgaaaggaccgtccagattgaagcctctacggtggagatcgaagagcggggtgtgaagttgcggctgacagtggtggatactcctggttatggcgatgcaattaattgtagggattgcttcaagacgatcataagttatatcgacgagcagtttgagagatacttgcacgacgaaagtgggttaaacaggcggcacattattgataacagggtgcactgttgtttctatttcatttcgccgttcggtcacgggctcaaacctctggacgttgcgtttatgaaagcaatccataattag

SEQ ID NO: 239962 - DNA, 90 bp, synthetic construct
  misc_feature 1..90: note = Description of Artificial Sequence: Synthetic coding sequence
  source 1..90: mol_type = other DNA
taagagatgatcgcaaggatgcaggcgcaaatgcaaatgcaaatgcagggaggagacggcgatggcggtgccctcggacaccacgtctag

SEQ ID NO: 239963 - DNA, 861 bp, synthetic construct
  misc_feature 1..861: note = Description of Artificial Sequence: Synthetic coding sequence
  source 1..861: mol_type = other DNA
atgtccaaggggcagtctggcttggggaaatcaacacttgtgaatacactgttcaagtctcaggttagtcgcaaggcttcttcctggaaccgtgaggagaaaatccccaagacggtggaaatcaaagccatcggccatgtcatagaggagggcggagtcaaaatgaaactgaccgtcatagatacaccaggattcggcgatcaaattaacaacgagaactgttgggagcctattgaaaagtatattaacgaacagtacgaaaagtttttaaaagaggaggtcaacattgccagaaagaaacgcatcccagacacccgcgtgcattgttgcttgtactttatctcccccacgggccatagtttgcggccattggatttggagtttatgaaacatctctccaaggtggtgaatataattccagttatcgccaaggccgacaccatgactctggaggaaaagagcgagtttaagcagcgagtgaggaaggaattggaggttaatggtattgagttttacccccagaaagagttcgacgaagatcttgaagacaagaccgagaacgacaagattcgtcaggagtccatgcccttcgccgtagtcgggagtgataaggaataccaggtgaacggcaaaagggtactcggcaggaagactccctggggaattattgaagtagaaaatttaaaccattgtgagtttgctctactgagggattttgtgatccgaacccatctgcaggacctcaaagaagtgactcataacattcactacgagacatacagagcaaaaagactgaacgataatggtggcctcccccctgtgtccgtagatacagaggaatcccacgattctaatccttag

SEQ ID NO: 239964 - DNA, 252 bp, synthetic construct
  misc_feature 1..252: note = Description of Artificial Sequence: Synthetic coding sequence
  source 1..252: mol_type = other DNA
atgagcaaagggctgcccgaaaccagaacggacgcagcaatgtctgagttagttccggaacccaggcctaaacctgccgtgcctatgaaaccaatgtccattaattctaacctgctgggatatatcggcatcgacacaatcatcgagcagatgcgaaagaagaccatgaaaacaggcttcgactttaacatcatggtcgtcgccggatctccattacggagcacgagcatgtcaagcactagatccagttag

SEQ ID NO: 239965 - DNA, 1053 bp, synthetic construct
  misc_feature 1..1053: note = Description of Artificial Sequence: Synthetic coding sequence
  source 1..1053: mol_type = other DNA
atgtcaaaagggctgcccgaaactcggacggacgcagctatgagcgagctcgtccccgaaccaagacccaagcccgcagtgcccatgaagccaatgagtattaatagtaatctgcttggctatatcggtattgatactataatagagcagatgcgaaaaaaaacaatgaagaccgggtttgattttaacattatggtcgttggacaatccggccttggcaagagcaccttggtaaatactctgttcaaaagtcaggtgagccggaaagccagctcctggaaccgcgaggaaaagattccaaaaaccgtcgaaatcaaggccataggacacgttatcgaagagggaggcgtgaagatgaagctgactgtcatcgacactcctggttttggcgaccagattaacaatgagaactgttgggaacccatcgagaagtatataaacgagcagtacgagaaatttctgaaggaagaagtgaatattgctcgtaagaagcgcatacctgatactagggtgcattgttgtctctatttcatctcacctacaggtcattctttgcggcctctggatctggaatttatgaaacatctttccaaggtggttaatataatccccgtcatagcgaaggcagatactatgacactcgaggagaaatctgaatttaaacagcgggtgagaaaggaattggaggttaatggcatagagttctatccgcaaaaggagtttgatgaggacctcgaagataaaactgaaaatgacaagatccgacaggaatccatgccctttgctgtggtggggtcggataaggagtatcaggtaaatggaaaacgcgtgctgggaagaaagacaccctggggcattatcgaagtggagaacctcaaccactgcgaatttgcgctgctaagagattttgtgatccggacacaccttcaggaccttaaggaagtgacccacaacatacactatgagacataccgtgccaagcgtctgaatgataatggaggcctaccgccagtcagcgtggacaccgaagagagccatgactctaacccttag

SEQ ID NO: 239966 - DNA, 1077 bp, synthetic construct
  misc_feature 1..1077: note = Description of Artificial Sequence: Synthetic coding sequence
  source 1..1077: mol_type = other DNA
atgtctaagggcttgcccgagactagaacagacgcggctatgagtgagctagtgcctgagccaaggcccaaacccgctgtccctatgaagccaatgagcatcaattccaacttattgggatacattggcatcgacaccatcatagaacaaatgcgaaagaagacgatgaagacaggattcgattttaatatcatggtcgtaggtcagtctggtctggggaagtcaaccttggtcaataccttgttcaaatcccaggtgagcagaaaagcgagcagctggaacagagaagagaagattcctaagaccgtggaaatcaaggcgatcggacacgtgatcgaagaaggcggagtgaagatgaagctaactgtgattgacacccccggtttcggggaccaaatcaataacgaaaattgttgggaacccatcgagaaatacatcaatgaacagtacgagaaatttctcaaagaggaggtgaacatcgcccgaaagaaacgaatccctgacactcgggtccactgttgtctctattttattagccctactgggcacagcctgaggcccctggacctggaattcatgaagcatctgtccaaggtggtgaacatcattccggttattgctaaggctgatacaatgaccctggaagagaagagcgaatttaagcaaagggtgaggaaggaattggaagttaatggcattgagttctacccccagaaggagtttgacgaagatctggaggataagacagagaatgacaagatccggcaggagagcatgccatttgcggtggtaggaagcgacaaggagtaccaggtcaacgggaaaagggtgttggggagaaagaccccttggggaattatagaagtagagaacttaaatcactgcgagtttgccctgctcagagatttcgtgatacgcacacaccttcaggatctcaaggaggtaacccacaacatacattatgaaacatatcgtgcgaagcggcttaatgacaacggaggcctgccaccgggagaaggtctgctgggcacagttctgcctcctgtacccgcaacgccctgcccaaccgccgaatag

SEQ ID NO: 239967 - DNA, 885 bp, synthetic construct
  misc_feature 1..885: note = Description of Artificial Sequence: Synthetic coding sequence
  source 1..885: mol_type = other DNA
atgtccaaggggcagagcggattggggaagtccaccttagtcaatacgctcttcaaatcccaagtgtcacggaaagccagtagttggaaccgggaagagaagatccctaaaactgtagagattaaggccattggccacgtgattgaggagggaggagttaagatgaagctcacagtcatcgataccccaggattcggagatcaaattaacaacgaaaattgttgggagcccatcgagaagtacattaatgaacaatacgaaaagtttctcaaggaggaagtgaatatcgcccgaaagaagcggattcctgacacgcgtgttcattgttgcttatatttcatcagccccaccggtcattcactgaggcccttggacctggaattcatgaaacatctaagtaaggttgtgaatattatccccgtcatagcgaaagccgacactatgacacttgaggagaagtctgaattcaagcagcgagtgcggaaggagttggaggtaaatgggatcgagttttatccccagaaagaatttgatgaggaccttgaggacaagaccgagaatgataaaatacggcaggagagcatgcccttcgcagttgtcggcagtgacaaggaataccaggttaacggcaaacgggttttaggcagaaagacaccgtggggtatcattgaagtggaaaatttgaatcattgtgaatttgccctgctaagggacttcgttattaggacccaccttcaggacttgaaagaggtcactcacaacatccattatgaaacctaccgcgctaagcgccttaatgataatggagggctgcctcctggtgaggggctcttgggtactgtgttgcctccggtccccgcaaccccatgccccacagcagagtag

SEQ ID NO: 239968 - DNA, 537 bp, synthetic construct
  misc_feature 1..537: note = Description of Artificial Sequence: Synthetic coding sequence
  source 1..537: mol_type = other DNA
atgtctgagttggttcccgaacccagacccaaaccagctgtcccaatgaaacccatgtctatcaattccaatctgttaggatatataggtatcgacaccataattgagcagatgaggaaaaaaaccatgaagaccggattcgattttaatatcatggtggttgggcagtccggcctgggcaagagcacacttgtgaacactttattcaagtcacaggtatctcgcaaggcatcttcctggaatagagaagaaaaaatccctaaaaccgtggagattaaggctattgggcatgtcatcgaggaaggtggcgtcaagatgaaacttactgtgattgacacaccgggtttcggcgaccaaatcaacaacgaaaattgttgggaaccaatcgagaagtacattaatgaacaatacgagaagtttcttaaggaggaggttaacattgcccgaaagaagcgtatccccgacacaagggtgcactgttgcctatactttatttctcccacaggtcacagtctccggccactcgatctggagtag

SEQ ID NO: 239969 - DNA, 1137 bp, synthetic construct
  misc_feature 1..1137: note = Description of Artificial Sequence: Synthetic coding sequence
  source 1..1137: mol_type = other DNA
atggacagtctggcggctccgcaagataggctggtcgaacagcttctgtcccctagaacgcaggcccaacggcgtctgaaggacatcgacaagcagtacgtcggattcgccacactgcctaatcaggtgcacagaaagtcggtgaaaaaagggttcgatttcaccttaatggtggccggtgaatccggactgggcaaaagcacactggtgcactctttgttcctgaccgacctctataaggaccgaaagctattatccgccgaggagcgcatatctcagaccgtcgaaatactgaagcacacagtcgatattgaggaaaagggcgtgaagctaaagttgaccattgtggacacccctgggtttggggacgcggtaaataacaccgaatgctggaagccaatcactgactacgtggaccagcaatttgagcaatatttcagagacgaatcagggcttaaccggaagaacatacaggataatcgcgtgcattgctgtctctactttatatcccctttcgggcacggactcagacctgttgatgtcggattcatgaaggcgttacatgaaaaagtcaatattgttcctctaattgccaaagcagactgtctagttccatcggagattaggaagctgaaagagaggatcagggaagaaatcgacaagttcggaattcatgtctaccagtttccagagtgtgatagtgacgaggatgaggattttaaacagcaggaccgcgagttgaaggaaagcgccccatttgcagtcatagggagcaacactgttgtggaagcaaagggccagcgggtgagagggaggttgtatccgtggggaatcgttgaggtggaaaatcaagcgcactgcgacttcgttaaactaagaaatatgttgattaggacccacatgcacgacctgaaagacgtgacgtgcgacgtgcactatgaaaattatcgagcacactgcattcaacaaatgacctctaagctgactcaggattctaggatggagagcccaatccccattcttcctttgcctactcctgatgccgaaacagagaaacttatccgcatgaaagacgaggagctgcgaagaatgcaggaaatgcttcaacggatgaaacagcaaatgcaggatcagtag

SEQ ID NO: 239970 - DNA, 969 bp, synthetic construct
  misc_feature 1..969: note = Description of Artificial Sequence: Synthetic coding sequence
  source 1..969: mol_type = other DNA
atggttgccggagaaagtgggttgggaaaatcaaccctggttcactctttattccttactgacctgtataaagatcgaaaactgctgagcgccgaggaaagaatttcccagaccgtcgagattttaaaacatactgtggacattgaggaaaaaggcgtaaaactcaaactcacaattgtcgacactccaggcttcggcgacgccgtgaacaacaccgagtgttggaagcccatcacagattacgtggaccagcagttcgagcagtactttcgggacgaatctggcttgaaccgcaaaaacattcaagacaacagagtccattgttgtctgtatttcatctcccccttcggccacggactacggcctgtagacgtgggattcatgaaagcgctgcacgagaaagtgaacatcgtgcccctgatagcgaaggccgattgcctggtgccttcggaaattagaaaactgaaagaacgtatccgcgaagagattgataagttcggtatccacgtctaccaatttcccgagtgcgatagcgacgaagacgaggacttcaagcagcaagacagagaactgaaggagtccgccccattcgccgtgatcggctcgaatactgtggtggaggcaaaggggcagcgtgtgcgaggcaggctgtacccttgggggatcgtagaagtggaaaatcaggcccactgtgattttgtaaagctcagaaacatgctgatccgcacacacatgcatgacctgaaggatgtcacatgtgatgtccattacgagaactacagggctcattgtatccagcaaatgacctccaaactgactcaggactctcggatggaatctcctattcccattctgccattaccaaccccagatgctgagaccgagaaactgatccgtatgaaggacgaggagctgcgtcgtatgcaggaaatgctgcagaggatgaagcagcagatgcaggatcagtag

SEQ ID NO: 239971 - DNA, 1041 bp, synthetic construct
  misc_feature 1..1041: note = Description of Artificial Sequence: Synthetic coding sequence
  source 1..1041: mol_type = other DNA
atggacagcctggcggctccccaggatagacttgtggaacaactcctatccccgaggactcaggcacaacgcaggctaaaggatatcgataaacagtatgtgggcttcgccaccctgcctaatcaggtgcaccggaagtcagtgaaaaagggttttgatttcacactgatggtagctggagaaagcggcctgggcaagtccacgttggtgcactctctttttctgaccgatctatataaagataggaaactcttatccgctgaggagcgcatcagccaaacagtcgaaattctgaaacacacagtggatatcgaagagaaaggggtcaaactgaaactcaccatcgtcgatacccctggcttcggagatgctgttaataataccgaatgctggaagccaatcaccgactacgtggatcagcagtttgagcagtatttcagagatgagagtgggttgaatagaaagaacattcaagataaccgtgtgcattgctgcttgtactttatttcaccgtttgggcacggcttgagaccagtggacgttggatttatgaaagctctgcatgagaaggtgaacattgtgcccctcatagccaaggctgactgtctggtcccaagcgagattaggaaattgaaagaaagaattcgtgaggaaatcgataaattcggaatccatgtgtatcagtttccagaatgtgacagcgatgaggatgaggactttaagcagcaggatcgggagcttaaagagagcgccccttttgccgtgattggcagcaataccgttgttgaagccaaaggacagagggtgagagggcgtctatatccctggggaatcgtggagggcgcactgagactgagagaagccgctcagcatgctcacccccacgcatatgctagacctcagggcagagatgtgagaagagctctgagggaactaccgagggcactccaccctgccgacgaccaacagacggaccctggccagccccacggcgagcctcatcccgacccggcagcagctcatccaggaagacgggactag

SEQ ID NO: 239972 - DNA, 450 bp, synthetic construct
  misc_feature 1..450: note = Description of Artificial Sequence: Synthetic coding sequence
  source 1..450: mol_type = other DNA
cttcctaaccaggtccatcgcaaatcagtgaagaaaggttttgattttactctgatggtggctggggagtctggcctggggaaaagcactctagtgcatagcctgttccttaccgatttatacaaggatagaaagctgcttagcgccgaagaacggatatcacaaacggtagaaattttaaagcatactgttgacatagaggagaagggcgtgaagttgaagctcaccatagtggataccccaggttttggagacgccgtcaataacaccgaatgctggaagccaattacagactatgttgaccagcaattcgagcagtatttcagagatgagagcgggttaaaccgcaagaatatacaagacaatagagtgcactgctgcctgtattttatatccccattcggtcacggactgagacctgtggatggctttcacgaaggcattgcttag

SEQ ID NO: 239973 - DNA, 1110 bp, synthetic construct
  misc_feature 1..1110: note = Description of Artificial Sequence: Synthetic coding sequence
  source 1..1110: mol_type = other DNA
atgtcaacgggtctgcgttacaagagtaagctcgcgacacctgaggacaaacaggacatagacaaacaatatgtgggttttgccactcttcccaaccaggtgcatcgaaaatctgtgaagaaaggatttgacttcactctaatggttgctggtgaaagcggactggggaaaagtaccctggttcacagcctcttcctgaccgacttgtacaaagaccggaagctacttagcgctgaggagagaatcagccagaccgtcgagattctgaagcacacagtggacatagaggagaaaggcgttaagctgaagctcactatcgtggatacccctggtttcggggatgctgttaacaatactgagtgttggaaaccaatcacagattatgtcgatcaacagtttgaacagtatttccgagatgaatcgggattaaatagaaagaatatccaggataatcgggttcattgctgtctgtattttatctctcccttcggtcatggattaaggcccgtcgatgtggggttcatgaaggcactgcacgagaaggtcaatatagtccccctaatcgcaaaagccgattgtctggtgccctccgagattcgaaaattaaaggagcggattcgcgaagagatagacaagtttgggatccatgtctatcagttcccagagtgtgattcagatgaagatgaagattttaaacagcaggatagggaactcaaagagagcgcacccttcgcggttattgggtctaacaccgttgtcgaggccaagggccaacgtgtgagggggagactgtacccctgggggatagttgaggtggagaaccaggctcactgcgactttgtgaaactgcggaatatgctgattcgaacacatatgcacgacttgaaggatgtaacgtgcgatgttcattatgagaattatagagctcactgcatccagcagatgacgtctaagctgacacaagactcacgcatggagagtcctattccgatcctgccacttcccacacctgacgcggagacagagaagctgattcgcatgaaggacgaagagcttagaagaatgcaggagatgttgcaacgcatgaagcaacagatgcaggaccagtag

SEQ ID NO: 239974 - DNA, 1137 bp, synthetic construct
  misc_feature 1..1137: note = Description of Artificial Sequence: Synthetic coding sequence
  source 1..1137: mol_type = other DNA
atggatagcctggccgctcctcaagacaggcttgtcgagcaattgctgtctccccgaacacaggcacagcgacgccttaaggacattgacaaacaatatgttggctttgccactttgcctaaccaggttcaccggaaatctgtgaaaaagggctttgacttcacactgatggtcgccggagagtccggattggggaagagcactctagtccactccctgtttctaaccgatctctataaggatcgtaagctgcttagcgctgaagaaaggatttcacagaccgtggaaatcttaaagcatactgtcgacatagaggaaaaaggagtgaagcttaagctgacaatcgtcgatactccaggatttggcgacgccgtaaacaacacagaatgttggaaacccattaccgattacgtcgaccagcaattcgagcagtactttagagatgaaagtggcctgaaccgtaagaacatccaggacaaccgggtgcattgttgcctatacttcatcagtccattcgggcacgggctgcggcctgtggacgttggattcatgaaggccctccacgaaaaggtcaacatcgtgccgcttattgcaaaggctgattgtctggtgccctccgagatcaggaagttgaaggagcgcatcagagaggagatagacaagttcgggatccacgtgtaccagtttccggaatgtgatagcgacgaggacgaggactttaagcaacaggacagggaattgaaggaaagcgcgccttttgccgttattggaagcaacacagtcgttgaagctaagggacagagagtgcggggaagactgtatccctggggcatcgttgaagtggagaatcaggcccattgcgacttcgttaaactccggaacatgctgattcggacccacatgcatgacttgaaagacgtgacatgtgatgttcattacgagaattatcgggcacactgtatccagcagatgacatcaaaattgacacaggactcacgcatggagagtcccatacccatcctccctctacccacacccgacgccgagaccgagaaactcatcaggatgaaagatgaggagctgcggagaatgcaagagatgctccaaagaatgaaacagcagatgcaggaccagtag

SEQ ID NO: 239975 - DNA, 1305 bp, synthetic construct
  misc_feature 1..1305: note = Description of Artificial Sequence: Synthetic coding sequence
  source 1..1305: mol_type = other DNA
atggcagccactgacattgcccgtcaagttggggaagggtgccggaccgttcccctcgctggacacgtcggctttgattcgttgcccgatcaattggtgaataaatcagtcagccaaggtttttgctttaacattctgtgcgtcggagagactggcctgggaaagagtacactcatggataccctgttcaacaccaaatttgaaggagagccggcaactcatactcaaccaggcgtccaactgcagtccaatacctacgacctgcaggagtcaaacgtacggctgaaactcaccattgtgagcactgtaggtttcggggatcagattaataaggaggactcctacaagccaattgtcgagttcattgatgcgcaatttgaggcctacctgcaggaggagctgaagatccgacgcgtactgcatacatatcacgacagtcggattcacgtttgtctatatttcatagcccctaccggccatagccttaagagtctcgacttagtgacaatgaaaaagttggattcaaaggtgaatattattcctattatagccaaagcagatgcgatttctaagtctgagctaaccaagtttaaaataaagataacatctgaactagtgagtaatggtgttcaaatctaccagtttcccactgatgatgaatctgttgccgagattaatggtaccatgaatgctcatttgccctttgccgtgattgggtctactgaggaactgaaaatcggcaataagatgatgcgggcaaggcagtacccctggggcaccgttcaggttgaaaacgaggctcactgtgatttcgttaaactgcgggagatgcttatccgggtgaatatggaagatcttagggaacagactcacactcggcattacgaactttaccgcagatgcaaattggaggaaatggggtttaaggacactgacccagactctaaaccattttctctgcaagagacatacgaagccaaacgcaacgaattcctgggcgagttgcagaaaaaagaggaagagatgcgccagatgttcgttcagcgggtgaaggaaaaggaggccgaattaaaagaggctgaaaaggagctgcacgagaagttcgaccggctgaaaaaactccatcaagacgagaagaaaaagctagaggacaagaagaagtctctggatgatgaggtgaacgctttcaagcagcgcaagaccgcagctgagctcctgcagagccaggggagccaagctggcggaagccagacactgaaaagggacaaggaaaaaaaaaacaatccatggctatgtacagaatag

SEQ ID NO: 239976 - DNA, 1290 bp, synthetic construct
  misc_feature 1..1290: note = Description of Artificial Sequence: Synthetic coding sequence
  source 1..1290: mol_type = other DNA
atggcagccacagatattgccagacaggtgggcgaaggctgtcgcactgttcccctagccggacacgtcgggttcgatagtttgcctgatcagctggtgaacaagtccgtgtcgcaaggcttttgtttcaatatcttgtgtgtaggagagactggtctgggaaaatcaacgctgatggatactctgttcaacacaaaattcgaaggcgaacctgccacccacacgcagcccggagtacaactgcagtccaatacctacgaccttcaggaatccaacgtcaggctgaaacttaccatcgtgagtaccgtggggttcggcgaccaaataaacaaagaagatagttacaagccgatagtggaattcatagacgctcagttcgaggcctatttacaggaggaactgaagatcaggagagttctccacacttaccacgatagccggattcatgtgtgtctgtattttatagcccctaccgggcattcactcaaatcactggacctggtcaccatgaagaagttggacagcaaagtgaacattattcctattatcgcaaaagccgatgccattagtaaaagcgaacttaccaagttcaagatcaagattacaagtgaattagtcagtaacggtgtgcaaatctatcaattcccaacggatgatgagagtgttgccgagatcaatggcaccatgaacgcccaccttccctttgccgttattggcagcacggaggagcttaagatcgggaacaaaatgatgagggccagacaatacccctggggaaccgtccaggtcgagaatgaggcccactgtgactttgttaaacttagggaaatgctgattagggtgaacatggaggatttaagagaacagacgcatacccgtcactatgagctctatagaagatgtaagctggaggagatgggattcaaggacacagatccggatagcaagcctttttccttgcaggagacctacgaggccaaacggaatgagtttctgggcgagttgcagaaaaaggaggaggagatgcgccagatgttcgtccaacgggtgaaggaaaaagaggccgagctgaaggaggccgagaaggagctgcacgaaaagtttgatcgacttaaaaaactgcaccaagacgagaaaaagaagctggaggataaaaagaaaagcttagacgacgaagtaaatgcctttaagcaaaggaaaaccgcagcggagctcctccaatcccagggatctcaggcaggagggtctcagactctaaagcgtgacaaagagaagaagaattttttttag

SEQ ID NO: 239977 - DNA, 1296 bp, synthetic construct
  misc_feature 1..1296: note = Description of Artificial Sequence: Synthetic coding sequence
  source 1..1296: mol_type = other DNA
atggccgctaccgatatcgctaggcaagtcggagagggctgtaggaccgtgccactggccggacacgtgggattcgacagcctgccagatcagctggtcaacaagagcgttagtcagggattctgctttaatatcttgtgtgtcggcgaaactgggttgggtaaatcaactctcatggacactctcttcaatactaagttcgaaggcgaaccagctacacacacccagccgggtgtgcaactgcagtccaacacatacgacctccaggaaagcaatgtccggcttaagttaaccatcgtttcgacagtaggcttcggcgatcagatcaataaggaagattcttacaaaccaatagtcgaattcattgacgcgcagttcgaggcatacctccaggaggagctgaagatcagacgagttctccatacctaccatgattcaagaattcacgtgtgcctttactttatcgctcccactggccatagcctgaagtcacttgatcttgtgaccatgaagaaattggattctaaagtcaacataattccaatcatcgcaaaagccgacgcaataagcaaatctgaacttaccaagtttaagattaaaataacatccgaactcgtgtctaacggtgtgcagatctaccagttcccaactgatgatgagtctgtggcagagatcaacggaactatgaatgcgcacctcccattcgccgtgattgggagtactgaagagctgaagattgggaacaagatgatgcgagccaggcagtacccctggggcacagtgcaggtggagaacgaagcccattgtgactttgtaaagttgcgggagatgttaatccgggtgaatatggaagacctgagagagcaaactcataccagacactacgaattgtatagacggtgcaagttggaggaaatggggtttaaggatacggatcctgactcaaaaccttttagcctgcaagagacgtatgaagccaagcgaaatgagttcttgggagagctccaaaagaaggaggaggagatgcgacaaatgttcgtgcagagagtgaaggagaaggaagctgaactcaaggaagctgagaaggaactccatgagaagtttgatagactgaagaaactgcaccaggatgagaagaaaaaactcgaggacaagaagaagtcgctggacgacgaggtgaacgctttcaagcagcggaaaacggctgcggagctactgcagagccagggttctcaagctggcggttctcaaactttgaagcgggataaggaaaagaaaaacctaggattcttgtag

SEQ ID NO: 239978 - DNA, 1284 bp, synthetic construct
  misc_feature 1..1284: note = Description of Artificial Sequence: Synthetic coding sequence
  source 1..1284: mol_type = other DNA
atggctgccacggatattgcacggcaagtgggagaggggtgcagaacagtacctctggcgggtcatgttggctttgatagcttgcctgatcagctggttaataagagcgtgagccagggcttctgttttaatatactgtgcgtgggtgaaactggcctgggcaaatcaacactgatggatactctgttcaacaccaaattcgaaggggagccagcaacacacacgcagccaggcgtgcaactgcaatccaatacctatgaccttcaggaaagcaacgtgcggctcaagctgactatcgtaagcaccgttggattcggcgatcagatcaataaagaggatagctataaaccaatcgtagagttcattgacgctcaatttgaggcctacctccaggaggagctgaaaataagaagagtgttgcatacataccatgactcgcggatccacgtttgtttgtatttcattgctcctaccggtcattctcttaaaagtctcgacctggtgactatgaaaaaactggactcaaaagtgaatatcatcccgatcatcgctaaggccgatgctatttccaagtcagagcttactaaatttaaaattaaaattactagtgaactagtgtcaaacggagtgcagatctatcagtttccaacagatgatgagtctgtggcggagattaatgggactatgaatgcgcacctcccttttgcagtgattggatcaaccgaggaactgaaaattggaaacaagatgatgcgggctcggcaatatccttggggcaccgtgcaggtggagaatgaggcccactgcgactttgtcaagctccgggagatgttgatccgggtgaacatggaggaccttcgggagcagacccacacaaggcactatgaactttacaggcgatgtaagctcgaagaaatgggttttaaggacaccgatccagactccaaaccattttccctacaggaaacctatgaggctaaacgcaacgagttcctcggggaactgcagaagaaagaagaagaaatgagacagatgtttgtgcagagggtgaaggagaaagaggccgaactaaaagaagccgaaaaggaactgcatgagaaatttgacaggttaaagaagctgcatcaagacgagaagaagaagctggaggacaagaaaaaatcattagatgacgaggtcaatgccttcaaacagagaaagactgccgctgaactccttcaatcccagggtagtcaggctgggggatctcagactctgaagcgcgacaaagaaaagaaaaattag

SEQ ID NO: 239979 - DNA, 1284 bp, synthetic construct
  misc_feature 1..1284: note = Description of Artificial Sequence: Synthetic coding sequence
  source 1..1284: mol_type = other DNA
atggccgctaccgatattgcacgacaagtgggcgagggatgtaggaccgtaccattggccggacacgttggatttgactctctgcctgaccaactagtaaataaaagtgtgtctcagggcttttgcttcaatatcttatgtgtcggagaaaccggactgggaaagagtacgctgatggatacactcttcaataccaagttcgagggggaacctgctacccatacacagcccggtgtccagctacagtccaacacatatgatttacaggaatcgaacgtccgtctgaagctcactattgttagcacagtgggattcggagatcagattaataaagaagactcatacaagcccatcgtcgagttcatcgatgctcagttcgaagcctatttacaggaggagctgaaaattaggagagtgcttcatacttatcacgatagtagaatacatgtgtgtctgtatttcatagctccaactggacacagtctgaagtctctggacttggttactatgaaaaagcttgactcgaaggtcaacatcatcccgatcatcgcaaaagctgacgcaatctccaaatcggaactcacgaagttcaagattaagatcacttcggaattggtgtcaaacggggtgcagatctaccagtttccaactgatgatgaaagcgtggctgagattaacggtactatgaacgcgcatctgccattcgcagtgatcgggagtaccgaagaactgaagattggaaataagatgatgcgggctaggcagtatccatggggcactgtgcaagtggaaaacgaggcacactgtgactttgtaaagctgagagagatgttgatccgagtcaacatggaggacttgcgcgaacagacgcatacaaggcattacgaactttatcggcgatgcaagctggaagaaatgggcttcaaagacacagaccccgacagcaagcccttctcactacaggagacgtacgaagcaaagcgaaacgagttcttgggggagctgcagaagaaggaagaagaaatgcgacagatgtttgtgcagagagtgaaggaaaaagaggccgagttaaaggaggccgagaaggagcttcatgaaaaattcgatcgtttaaagaaactacaccaggatgaaaaaaagaagttagaagataaaaagaagtccctggacgatgaggtgaacgcatttaagcagcgcaagaccgccgctgagttgctccagtcacagggatctcaggccggaggcagtcagactctgaagcgggataaagaaaaaaagaactag

SEQ ID NO: 239980 - DNA, 1110 bp, synthetic construct
  misc_feature 1..1110: note = Description of Artificial Sequence: Synthetic coding sequence
  source 1..1110: mol_type = other DNA
atggacacattgtttaacacgaagttcgagggagagcctgcgactcacactcagcctggcgtgcagctgcagtcaaacacctatgacctccaggaaagcaatgtcaggttgaagctgaccatcgtgtccacggtcggatttggtgatcagatcaacaaggaggacagctataaaccaatcgttgaatttatagatgcccagtttgaggcttaccttcaggaggaactgaaaattagacgggtcctgcacacataccatgattctaggattcacgtgtgcctgtatttcatcgctccaacaggccattccctgaagagtttggatctggttacaatgaagaaattagattccaaggtaaatataataccaataatcgccaaggctgacgccatttcaaagagcgagctgaccaaattcaagatcaagatcaccagcgaattggtctctaacggcgtgcagatttatcaattccctacagacgacgagtcagtggccgaaatcaacgggacgatgaatgctcacctgccgttcgcagtgataggttcaaccgaagaattgaaaattggaaacaaaatgatgagagcccgacagtatccgtggggcactgtgcaggtcgagaatgaagcgcactgcgacttcgtgaaactccgggagatgctgatccgagtgaatatggaggatctgcgggagcagacgcacacaagacattacgaactgtatagacgatgcaagctggaagagatgggctttaaggatacggatcccgatagcaaaccatttagtttgcaagaaacttacgaggccaaaagaaatgagtttttgggcgagctacagaagaaagaggaagagatgaggcagatgtttgtgcagagggttaaggagaaagaggccgagctcaaggaggcggagaaagagctgcacgagaagttcgaccgcctcaaaaagttgcaccaggatgagaaaaagaagctggaggacaaaaaaaaaagccttgacgatgaagttaatgcttttaagcagcgaaagaccgccgctgaacttcttcagagccagggtagccaggccggaggtagccagactctaaagagagacaaagaaaaaaagaagtag

SEQ ID NO: 239981 - DNA, 1374 bp, synthetic construct
  misc_feature 1..1374: note = Description of Artificial Sequence: Synthetic coding sequence
  source 1..1374: mol_type = other DNA
atggccgctacagacatcgcaagacaggtcttcggccgacgaaggctactcctactcggctttgagactgtcgggttttctgccgcatgtacagaggagggcggacatatgcttcgcaggggcgagggctgccgcaccgtgccactcgctggtcacgtagggtttgacagtctcccagatcaactggtgaataaaagtgtcagccaaggcttttgcttcaatatactctgcgttggtgaaaccggtctggggaagtctaccctcatggacaccctgtttaatactaagttcgagggggaaccagctacgcacacacagcctggtgtgcagcttcagagcaatacctatgacttgcaagagtccaatgtgcgtctcaagctgacgatcgtaagcactgtcggtttcggtgaccagattaataaggaggattcgtataaacctatagtcgagtttattgacgcacagttcgaggcctatctccaggaagagctaaagattagacgggtgctacacacctatcatgactctaggattcatgtatgtctgtattttatcgcgcctactggccacagcctaaagagcctggatctggtaactatgaaaaagctggacagtaaggtgaacatcattcccatcatagcaaaagccgatgctatctcaaagagcgagctcacaaagtttaaaatcaagatcacaagcgagctggtctcaaatggagtacaaatttatcagttccccacagacgacgagtcagtagccgagatcaacgggactatgaacgcacatctgccgttcgcagtcataggctccacagaagaacttaaaatcggaaataagatgatgcgtgcacgccagtatccctgggggaccgtgcaggtcgaaaatgaggcacattgtgattttgtcaaattgagggaaatgctgattcgggtgaatatggaagatctacgtgaacaaacccacaccaggcactacgagctctatagacgatgtaaattggaggaaatgggcttcaaggacacagacccagattccaaacctttcagcctacaggaaacatacgaagccaaacgcaacgagtttctgggagaactacagaagaaagaagaggaaatgagacaaatgtttgtgcaacgggtaaaggagaaagaagctgagttgaaggaagccgaaaaggagctgcatgagaaatttgaccgacttaagaaactgcatcaggatgaaaagaagaagctggaagataaaaagaagtccctggacgatgaggtgaacgcttttaaacagcgcaaaactgccgcagagcttctgcagtctcagggctcccaggccggagggtcccagaccctgaaacgcgataaggagaagaaaaagtag

SEQ ID NO: 239982 - DNA, 1284 bp, synthetic construct
  misc_feature 1..1284: note = Description of Artificial Sequence: Synthetic coding sequence
  source 1..1284: mol_type = other DNA
atggctgccaccgacattgctcgccaggtcggcgaggggtgtaggacggtgcctctggcaggtcacgtgggattcgactctttgcccgaccagttggtaaataaatcagtatcccagggattctgcttcaacatcttatgtgtgggtgaaactgggctgggcaaatccaccctcatggatacactcttcaacaccaaatttgaaggagaacctgccactcacacacagcccggagtccaactacagtccaacacttatgacctccaggagagtaacgtgagactcaagctcaccatcgtaagtactgtggggttcggagatcagatcaacaaagaggacagttacaagccaattgtggaatttatcgatgcgcaattcgaggcctacctgcaggaagagctgaaaattcgcagggttcttcacacgtatcatgacagcaggattcatgtctgtctttacttcatcgccccaactggtcacagtctgaagtctctcgatctggtaaccatgaaaaagttggactctaaggtcaacatcattcctatcatagctaaggccgacgcaattagcaaatctgagctgacgaaatttaagataaaaatcacatccgagcttgtatcaaatggggttcaaatctatcaatttcccacggacgacgagagtgtcgctgaaattaacgggacgatgaatgctcacctgcctttcgccgttatagggtcgaccgaggaactaaagatcgggaataagatgatgcgggcacggcaatatccttggggtactgttcaagtcgaaaatgaggcgcattgcgatttcgtgaagctgcgtgagatgctgatcagagtgaacatggaggatctcagagagcaaacgcataccagacactatgagctctaccggcgatgcaaactcgaagagatgggattcaaggatacggacccagactcaaagccattctcactccaggaaacctatgaggcaaagaggaacgaattccttggcgagttgcagaagaaggaagaagagatgagacaaatgtttgtgcagagggtcaaagaaaaagaagccgaactcaaggaagccgagaaagaactgcacgaaaaatttgatagactgaagaagctgcaccaggacgaaaagaaaaagctagaggacaagaagaagagtctcgatgacgaagtgaacgcatttaaacagcggaaaaccgcagctgagctgctgcaatcccaaggctcacaggctggagggagtcagacactaaagagggataaggagaagaagaattag

SEQ ID NO: 239983 - DNA, 804 bp, synthetic construct
  misc_feature 1..804: note = Description of Artificial Sequence: Synthetic coding sequence
  source 1..804: mol_type = other DNA
atggccgcaacagacattgccagacaggtaggggaaggatgtcgcactgtaccgctggcgggacatgtcggttttgatagtctgccagaccaactcgtaaataagagcgtgagccaggggttctgttttaatatcctgtgcgtgggcgagacaggactcggcaagagtaccttgatggataccttatttaatacaaagttcgagggcgagccagccacacacactcaacccggagtgcaactgcaatcaaatacctatgatctacaggaatccaacgtgcgactgaagctgacaattgtttctaccgtgggttttggcgaccaaattaacaaggaggatagctataagcccatcgtagagtttatcgacgcccagttcgaagcttacctgcaggaggagttgaagattaggcgagttcttcacacgtatcacgatagcagaattcatgtgtgtctgtacttcatcgcacctactggacactctctgaaatctctcgatctggtgaccatgaaaaaacttgacagtaaagtgaatatcataccaattatagcgaaggccgacgctatcagtaagtcagaacttacaaaatttaaaatcaagatcactagtgagctcgtctctaacggagtgcaaatataccagtttccaactgacgacgagtctgttgcagaaatcaatggcaccatgaatgcccacttgccattcgctgtgataggatctacagaggagctgaaaatcggcaacaaaatgatgcgcgctagacagtatccatggggaacggtgcagggtagtagccaggtttag

SEQ ID NO: 239984 - DNA, 1452 bp, synthetic construct
  misc_feature 1..1452: note = Description of Artificial Sequence: Synthetic coding sequence
  source 1..1452: mol_type = other DNA
atggctgccactgatttggagagattcagtaacgcggagcctgagcccaggagtttgagtttgggaggccatgtgggcttcgattcactccccgaccagctggtatctaaatccgtcactcaggggttctcatttaacatcttatgtgtgggggagactggtatcggtaaatccacccttatgaacactctgtttaacacaactttcgagaccgaggaggcgtcgcatcacgaggcttgtgttaggctgaggccacagacctatgatctccaggagtctaatgtccaactgaagctgaccatcgtcgacgccgtgggatttggggaccaaattaataaagacgagagctatcgcccaattgtggattacattgacgcacaattcgaaaactacctgcaggaagagctgaaaattcgtcgctccttgttcgattatcatgatacccgaattcatgtctgcctgtacttcattacccctacgggacactctctaaagagtcttgatctggttacaatgaagaagctggacagcaaagtgaacatcatcccaatcatcgcaaaagcagacaccatctccaagagtgagctgcataagttcaagattaagatcatgggggaactggtgtcaaatggcgtgcagatttaccaatttccgaccgatgatgaagcagtggccgagataaatgcggtgatgaacgcacaccttccatttgcagtggtgggctccaccgaagaagtaaaggtgggaaataagttggtgagggctcgtcagtatccttggggagtagtccaggtcgagaacgaaaaccattgcgactttgttaagctgcgtgagatgttgatccgcgtgaatatggaagatctacgggagcagacacactctagacactatgagctgtataggaggtgcaagttggaagagatgggatttcaggactccgacggagattctcaaccgttttcgctccaggaaacctacgaagcaaagcgtaaggagttcctcagcgaactgcagcgcaaagaagaggaaatgaggcaaatgttcgtcaataaggtgaaggagactgagctggagctgaaagagaaggagcgcgagttgcatgagaagttcgagcacctgaaaagggtgcaccaggaggaaaaacgcaaggtcgaggagaagcgtcgggaactggaggaggagactaacgccttcaacagaagaaaggcagcggtggaggctctgcagagccaggccctccatgcaacctctcaacagcccctccggaaggacaaggacaagaaaaataggagtgacatcggtgcccaccagcctgggatgtccctaagctccagcaaagtaatgatgaccaaggcgtccgttgagccgctgaactgctcttcttggtggccagctatacagtgctgcagttgcttggtccgggatgctacttggcgggagggttttttgtag

SEQ ID NO: 239985 - DNA, 1110 bp, synthetic construct
  misc_feature 1..1110: note = Description of Artificial Sequence: Synthetic coding sequence
  source 1..1110: mol_type = other DNA
atgaacaccttattcaatacaactttcgagacagaggaagcttctcatcacgaggcttgcgttcgtctacgcccacagacctatgatctgcaggagagcaacgtccaactcaaactgacaatcgtggacgcagtgggcttcggcgatcagattaacaaggatgagagctaccgccctatagtcgattacatcgacgctcagtttgagaactacctgcaggaagagctaaagatcaggcggagcctgttcgattatcacgatacccgcatccatgtgtgcctgtattttatcacgcctaccggtcattctctcaagagccttgatctcgtcactatgaagaagctggacagcaaggttaacataattcctatcatcgctaaagctgatactattagtaaaagcgagctccacaagttcaaaatcaagattatgggagaactggtgtccaacggcgttcagatttaccagtttccgacggatgacgaggctgtggcagaaatcaatgctgtgatgaacgcccacctaccattcgcagttgtaggctctactgaagaggttaaagttggaaacaagctggtccgcgcacgccagtacccttggggcgtcgtgcaagtagagaacgaaaaccactgcgatttcgttaaactaagagagatgctgatcagagttaatatggaagacctgagggagcaaacccactcaaggcattacgagctgtatcgcagatgcaagttggaagagatgggtttccaggactctgacggagactcccagcccttttcccttcaagagacctacgaagctaaacgcaaggagtttctctccgagttgcagaggaaagaagaggagatgaggcagatgttcgtaaataaggtcaaggaaaccgaactggagcttaaggaaaaagagcgggagctgcatgaaaagttcgagcacctgaagagagtgcatcaagaggagaagagaaaggtcgaagagaagaggagagaactggaagaggaaactaatgcatttaatcgcaggaaggccgctgtggaggctctacaatcacaggcacttcatgcaacctcccagcagcccctgaggaaggataaagacaagaagaattag

SEQ ID NO: 239986 - DNA, 1290 bp, synthetic construct
  misc_feature 1..1290: note = Description of Artificial Sequence: Synthetic coding sequence
  source 1..1290: mol_type = other DNA
atggctgccaccgacctggagagattttctaatgcagagcccgagcccagatccctgagcctgggcggtcacgtgggctttgacagtctgcctgaccagctggttagtaaaagcgtgacccaggggttcagcttcaacatactgtgtgttggagagaccggtatcgggaagtcaaccctgatgaacaccttgttcaacacaactttcgagacagaggaagcgagccaccacgaggcgtgtgtcaggctgaggcctcaaacgtacgacctgcaggaatctaatgtgcagctcaagctgacaattgtcgatgctgtggggttcggagatcaaatcaataaagacgaaagttatcgcccaatcgtcgattacattgatgctcagtttgaaaactatctccaggaggaactgaagataagaaggtccctgttcgactaccatgatacaaggatccatgtctgtctttattttatcacccctaccgggcattcactgaaatcgctggatctggtgaccatgaagaagttagactccaaggtcaatatcatacccataattgcaaaagccgataccattagtaagagtgaactgcacaaatttaagatcaaaatcatgggagaactcgtctcaaatggcgtccagatttatcagtttcctacagatgatgaagcagtagctgagattaacgctgtcatgaatgctcatctccctttcgctgttgtgggctctacagaggaggtgaaggttggaaacaaacttgtgagagcccgtcagtacccatggggagtcgttcaggtggagaatgaaaaccactgtgacttcgtcaagctcagggagatgctgatcagagtaaacatggaggacctgcgggagcaaacccacagcagacattacgagctttataggagatgcaagttggaggaaatgggcttccaggacagcgacggagatagccagcctttctccctacaggaaacttacgaggcgaagcggaaggaatttctgagtgaacttcagcgaaaggaggaagagatgcgtcagatgtttgttaacaaagttaaggagactgagttagaactgaaggagaaggagcgagaactccacgagaaattcgagcacctgaagcgcgttcaccaggaggagaagaggaaagttgaagagaagagaagggaacttgaagaggaaacaaatgcatttaaccgaaggaaggcggctgttgaagctctgcagtcacaggccctacatgccaccagccagcagcctctcagaaaggataaggataagaaaaactag

SEQ ID NO: 239987 - DNA, 1329 bp, synthetic construct
  misc_feature 1..1329: note = Description of Artificial Sequence: Synthetic coding sequence
  source 1..1329: mol_type = other DNA
atggccgctactgacctcgagcgcttctctaacgctgaaccggagccgaggtcgttatccttaggagggcacgtgggctttgattctctgccagatcagctggtgagtaagtcagtaacccagggcttttcgtttaatatcctctgtgttggtgaaactggaataggcaagagtacacttatgaacacattgtttaacacaacttttgagactgaagaggcttctcaccatgaagcttgcgttcggttgcgccctcagacgtatgatctgcaggagagtaatgtgcaacttaagctcactatcgtcgatgccgtaggatttggagatcagataaataaagacgaatcgtaccgtccaatcgtagactatatagacgcacagtttgaaaactacctccaggaagaactaaagatccgccgtagcctcttcgattatcatgacacacggatccacgtatgcctgtattttatcaccccaaccggacattccctcaagagcctggatcttgtgaccatgaaaaagcttgactctaaagtgaatataattccaataatcgctaaagcagacacaatcagtaagtcagagttacacaagttcaagattaaaatcatgggtgagctagtctctaatggcgtgcagatctatcagttccctaccgatgacgaggcagtcgccgagatcaatgccgtgatgaacgcccacctgccctttgcagtggtaggatcaacagaagaggttaaggtgggtaataagctagtcagggcacggcagtatccttggggggttgtgcaagttgagaacgagaaccactgcgacttcgtgaaacttagggaaatgttaattagagtgaatatggaagatctgagggagcaaacccactctcgacattacgagctatatcgcaggtgcaagctggaggaaatggggttccaagattccgatggagactctcagcccttctccctacaggagacatacgaggccaagcgcaaagagttcctttctgaacttcagcggaaagaggaagaaatgagacaaatgtttgtgaataaagttaaagagacagaactcgagttgaaggagaaagagagagagttgcacgagaagttcgagcacctgaaaagagtccatcaagaggaaaaacggaaggtggaagagaagcggcgtgagctggaggaagaaaccaatgcctttaaccgacggaaggcggcagttgaggcgctccaatcccaggccctacatgccacctcacagcaacctctccgcaaggacaaggacaagaagaaggcctctggctggtctagtatttatagcgtcaccatcccatag

SEQ ID NO: 239988 - DNA, 1707 bp, synthetic construct
  misc_feature 1..1707: note = Description of Artificial Sequence: Synthetic coding sequence
  source 1..1707: mol_type = other DNA
atggagagagaccgaatttcagccttaaaacggagctttgaagtggaagaagtagagactccgaattcaactccacccagacgcgtccagactcccttgctccgagcaactgtggccagctccacgcagaaattccaggatctgggagtcaagaatagtgagccatctgcacgtcacgtcgattcactgtctcagaggagccctaaggcaagtctgagacgcgttgagctgtctggaccaaaggccgcagagcccgtgtctcggaggacagagctgagcatcgatataagctccaaacaggttgagaatgctggagctatcgggcctagcaggttcggcctcaaacgggcagaagtgctaggacacaaaactccagagccggctcctcggaggaccgagatcacgatcgttaagcctcaggagtcggctcataggcgaatggaaccgccagccagcaaagtacccgaagtcccgacagctccagccacagatgctgctccaaaacgcgtcgaaattcaaatgcctaaacctgctgaggcgcctactgctccctcgccggcacagactctcgaaaatagtgagccggcaccggtgtcacagcttcagtcacgactcgagcccaagccacagcctcccgtcgccgaggctacccccagatcccaagaggccactgaggccgcaccctcttgtgtcggagacatggccgacactcctcgagatgccggactaaaacaggccccagcgtcccgcaatgaaaaggcacctgttgattttggttatgtcggaatcgacagcatactggaacagatgcgccgaaaggctatgaaacaaggcttcgaattcaatataatggtggtcggtcagtccggcctaggtaagtcaaccctgattaatacattgttcaagagtaagatatcaaggaaatccgtgcagcctaccagtgaggagcgcattccgaaaactatagaaatcaagtctatcactcatgatattgaagaaaagggggtaagaatgaaactcactgtgatcgatacaccgggattcggggatcacattaataatgagaattgctggcagccaatcatgaaatttataaatgaccagtacgaaaagtatctacaggaggaagtaaacatcaatagaaagaagcggattccggatactagagtgcattgctgcctgtattttatccccgcaacaggtcactctcttcgccctctggatatcgaattcatgaagcgcctgagcaaggtggtcaacatagttccagtcatcgcaaaggccgatactttgactctcgaagaacgagtccacttcaagcagagaataactgcggatcttctttcaaatggtatcgatgtgtacccacaaaaggaatttgatgaggattccgaggacaggttggtaaacgaaaagttcagagagatgatcccttttgcagtagtcggcagcgatcacgaatatcaggtaaacgggaaacggatccttgggagaaagacaaaatggggcactattgaggtggagaataccactcactgtgaattcgcatacttgcgggacctgctcatccggacacatatgcagaatatcaaagatatcacctcctccatccactttgaagcttaccgtgtaaagcggctcaatgagggctcttctgcaatggccaatgggatggaggaaaaggagccagaggcgccagaaatgtag

SEQ ID NO: 239989 - DNA, 591 bp, synthetic construct
  misc_feature 1..591: note = Description of Artificial Sequence: Synthetic coding sequence
  source 1..591: mol_type = other DNA
atggcagacactccacgcgatgctggcctcaagcaggctcccgctagtagaaacgagaaggctcccgtcgatttcggatacgtgggaatcgactccattctcgaacagatgagaagaaaggcgatgaagcagggattcgaatttaacataatggttgtgggccagagtggcctcggcaagtcgactctgatcaacacacttttcaaatccaagatctcccggaagagcgtgcagccaaccagcgaggaacgcatacccaaaacaattgagataaagtcaatcacccacgatatcgaggagaagggagttcggatgaagcttaccgtaatcgacacgcctggatttggcgatcacatcaacaacgagaattgttggcagcctataatgaaatttataaacgaccagtacgagaagtatctgcaagaagaagttaatatcaatcggaaaaaaaggatacctgacacacgcgtgcactgttgtctatacttcattcccgctacaggacattccctgcccctgttagagcagaaggtccctctttctcagccctccgcagattgcctggccagatgcggtgacagactggagtag

SEQ ID NO: 239990 - DNA, 1740 bp, synthetic construct
  misc_feature 1..1740: note = Description of Artificial Sequence: Synthetic coding sequence
  source 1..1740: mol_type = other DNA
atgagcgaccccgcagttaacgcccagctcgatggcattatcagtgattttgaggccctgaaaaggtcattcgaagtagaagaggtcgagactcctaactctactcctccacgaagagtacaaactccactgttaagagctaccgtggcttcctccactcagaaattccaggacctgggtgtgaaaaattccgaaccatcagcacgccatgtggactctctaagccaacgctccccaaaagcctcattgaggcgggtggagctgagcggccctaaggccgctgagcccgtctcacgccgaacagagctatccattgatattagcagcaagcaggtcgagaatgccggagcaatagggccaagtaggttcgggctcaaacgagctgaagtgctgggacataaaacaccagagccggctcctaggcggaccgaaattactattgttaagccccaggagtccgctcatcgtagaatggaaccacctgcctcgaaggtccctgaggttccaaccgcaccggcaactgacgctgctcctaagagggttgagattcagatgcccaagcccgctgaggcgcctacagccccttcccctgctcagaccctagaaaacagcgagcccgcaccagtgtctcagctccagtccagattggaacccaagcctcagccccctgttgcagaagccacccctcggagtcaggaggccacagaagccgctccctcatgtgtgggagatatggctgacacacctagggacgcgggtctcaaacaggcaccagcttcccggaatgagaaggctccggtggacttcggatacgtgggcattgactctatcctcgagcagatgaggcggaaggccatgaaacaggggttcgagttcaacatcatggtcgtcgggcagtcagggctcgggaaatccaccctcataaacaccctgttcaagtctaagatctcgagaaaatctgttcagcccaccagcgaagaacggatccccaagactattgaaattaagtccatcacccacgatatcgaagaaaaaggggtgagaatgaagcttacagtcatcgacacccccggattcggcgatcatattaacaacgaaaactgttggcagcccattatgaaatttattaatgatcagtacgagaagtatcttcaagaggaggtaaacatcaaccgcaagaagcgtataccggacactcgggtgcactgttgtttgtattttattcctgctacaggacattctctcagaccactcgatattgaatttatgaaacgcctttcaaaagtcgtgaatatcgtaccggtcatcgcaaaggcagacaccctcactcttgaagagagagtccacttcaagcagcgtatcaccgccgacctgctcagcaatgggattgatgtctatccacagaaagagtttgacgaagattctgaggatcgactggtcaatgaaaaattccgagagatgattcctttcgccgtggtagggtccgaccacgagtatcaggtgaatgggaagaggattcttggcaggaagaccaaatgggggactattgaggtagagaacacaacacattgcgaattcgcttatctgagggacctgttgatccgcacccacatgcagaacatcaaggatatcactagcagcatacacttcgaggcatatagggttaaaaggctgaatgagggctctagcgcgatggctaacggaatggaggagaaggagccagaggcccctgaaatgtag

SEQ ID NO: 239991 - DNA, 1761 bp, synthetic construct
  misc_feature 1..1761: note = Description of Artificial Sequence: Synthetic coding sequence
  source 1..1761: mol_type = other DNA
atgaaaaagagctattctggaggcacaagaaccagctcaggccgactgagacgcctgggcgacagctctggccctgccctgaaaagaagctttgaagttgaggaggtggagactccaaacagcacacctcccagacgcgtgcagacacctttgctccgggctaccgttgcctcttccacccagaagtttcaggacctgggcgtaaagaattcggagccgagcgctcgacacgtagacagcctgtcccagcggagtcctaaagcaagcctgcggcgagtggaattatccggtcccaaagcggcagagcctgtgtccaggagaacagagctgtccattgacatttccagcaagcaagtcgagaatgcaggcgctattggtccctctagatttggactaaagcgcgcagaagttttaggccacaaaacacccgaacccgctccccgacgaaccgaaatcactattgtcaaaccccaggaatccgcgcacagacgaatggagcctcccgcttccaaggttccggaggtgccaactgctcctgccacggacgcagctccaaaacgagtcgagatccagatgcctaagcccgctgaggcccctaccgctccaagtcccgcacagacgctggaaaactctgagcccgctcctgtttcccaactgcagtctcgtctggaacccaagccccagcctcccgtcgctgaggctactccacgctctcaggaagcgacagaggctgctcctagctgcgttggagatatggcagatactccccgagacgctggtctcaaacaggcccctgccagtcggaatgagaaggcccctgtggatttcggctacgttggcattgacagtattttggagcagatgaggaggaaggcgatgaaacagggcttcgaatttaacattatggtggtggggcaaagtggcctgggaaagtccacacttataaacaccctgtttaagagtaagatcagtagaaagagcgtacagccaaccagcgaggaaaggatccccaaaacaattgagatcaagtctatcacccacgacatcgaggagaagggtgtgcgcatgaagcttacggtgatagacacaccagggtttggggaccacatcaataatgagaactgctggcagcctattatgaagtttatcaacgaccagtacgagaagtacctgcaggaggaagtgaacatcaatcggaaaaagaggataccagatacaagagtccactgctgtctatattttatccctgccaccggccattccctacggccactagacatcgagttcatgaagcggctgagtaaagttgtcaacatcgtgccagtcattgctaaagctgacaccttgactctggaggagcgcgtgcacttcaagcaaaggattacagccgatcttctatcaaatgggatagatgtgtacccccagaaggaatttgatgaggacagcgaagatagactcgtgaacgagaaatttagggaaatgataccattcgctgtcgtcggttcagatcatgaataccaggtaaacgggaagagaatcctcgggagaaaaaccaagtggggcactatcgaggttgagaacaccactcattgtgagttcgcctacttgagggacttgctaatccggactcatatgcagaatattaaagatattacttctagcatccatttcgaagcctatagggtgaagcgcctgaacgaggggtcctcagccatggccaatggtatggaggagaaggagccagaggctcccgagatgtag

SEQ ID NO: 239992 - DNA, 1425 bp, synthetic construct
  misc_feature 1..1425: note = Description of Artificial Sequence: Synthetic coding sequence
  source 1..1425: mol_type = other DNA
atgggatctagcttttgggagggcctacaggtcgcagtgggactgccacaaggttgctggccgcagggcttagatagcggcgaacccgctgaggggggacagttggaagctgccccagtgtgcattgtcacacgtcagagcaaggaaaccgctggtcccactttgggtcgaggtggttggcggcaggggtctctgcgcaggggcaagggcacttcctgcagatgccgccaacttagtcccggacacgggcctgggaggctgacaggctgtggggagtgccatcgactcccttgcaggggcttggtatctggatttactggcctacgcggtcaggaggaggatgacctcgctttttgtctggcaacaattggttctgacagacaggcgactgaggcagctcccagctgtgtgggggacatggcggataccccaagggatgccggactgaaacaggcgccagcaagtcgcaacgagaaagcacccgtggattttggatatgttggtatcgatagtattttggagcagatgcgccgtaaagccatgaagcagggcttcgagttcaacatcatggtggtcggccagtctggcctcggaaagagtaccctcatcaacactctattcaagtctaaaatatccagaaaaagtgtgcagcccacctccgaagaaaggattcctaagaccatcgaaatcaaaagcattacgcacgacatcgaggaaaaaggcgtccgcatgaaactaacagtgatagacactcctggcttcggtgaccacatcaataacgagaattgctggcagcccatcatgaagtttatcaacgaccagtacgagaaatatctgcaggaggaggtgaacatcaacagaaaaaagcggattcctgataccagagtacactgctgcctctacttcatccctgccaccggtcactctctacgccctcttgacatcgaattcatgaagcggctaagtaaggttgttaacatcgtgcccgtgatagccaaggccgatactttgacgctggaggaaagagtccactttaagcaacggattaccgccgaccttctgtcgaacggaatcgacgtgtacccccaaaaggagtttgatgaagattctgaggataggttggttaatgaaaagttcagagagatgatacccttcgccgtcgtggggagtgaccatgagtaccaggtaaatggaaagagaattcttggaaggaaaacaaagtggggaacaatcgaggtcgaaaacaccacccactgcgagtttgcttatttacgcgatttgctgatacgaacccacatgcagaatatcaaggacattacatccagcattcactttgaggcctatcgagtgaagcgactcaacgagggaagttctgctatggccaatgggatggaggagaaagagcccgaggctccagaaatgtag

SEQ ID NO: 239993 - DNA, 1269 bp, synthetic construct
  misc_feature 1..1269: note = Description of Artificial Sequence: Synthetic coding sequence
  source 1..1269: mol_type = other DNA
atggagccacctgcctcaaaagtgccggaggtccctactgcacccgctacagacgccgctcccaaacgcgttgaaattcagatgccaaaaccagccgaagcccctacagccccaagcccagctcaaacactcgagaatagtgagcccgcacccgtctcccagctccaatctcgcctagagccaaaacctcaaccgccagttgccgaagcgactccacggtctcaagaagctactgaggcagcacccagctgtgttggggacatggccgacaccccaagagatgccggattgaagcaggccccagcgagccgcaatgaaaaggcaccagtggattttggctacgtaggaatcgatagcatactggaacagatgagacgcaaggcaatgaaacaaggcttcgaattcaacatcatggtggtcggccaaagtggattagggaaatcaacccttatcaataccctcttcaaaagcaaaatatcccgcaagtccgtgcaaccaacatcagaggagcgcatccccaaaaccattgaaatcaaaagcatcacacacgacattgaagagaagggggtccgcatgaagctcaccgtaatagatactcccggtttcggagatcatattaataacgaaaattgctggcaacctatcatgaagttcattaatgaccaatacgaaaagtaccttcaggaggaggtcaacatcaatagaaaaaagaggatcccagacaccagggtgcattgttgtctctacttcatcccagctactggtcactctctcaggcccctcgacattgagttcatgaagagattgtcaaaggtagtcaacattgtgcctgtgatagctaaggccgacactcttacgctggaggagagggttcatttcaagcagaggatcacagcagacctgctgagtaacggcatcgacgtgtacccacagaaagagtttgacgaagacagtgaggaccgccttgtaaacgaaaagtttcgagaaatgatcccttttgcagtggtggggagtgatcatgagtatcaggtaaacgggaagcggatcctggggagaaaaacaaaatggggaactatcgaagtggaaaacacaacacactgtgagtttgcgtatctgcgtgatttgctgattcggacacacatgcagaacatcaaggatataacatcgagtatccattttgaggcatatcgggtaaagcgactgaacgagggcagctcagcgatggccaatggtatggaggaaaaagagcctgaggctccggaaatgtag

SEQ ID NO: 239994 - DNA, 1008 bp, synthetic construct
  misc_feature 1..1008: note = Description of Artificial Sequence: Synthetic coding sequence
  source 1..1008: mol_type = other DNA
atggctgacacgccaagggacgcaggccttaagcaagcacccgcatctcgaaacgaaaaggccccagtggattttggctatgttgggatagactctatcctggaacagatgcgacgcaaggccatgaaacagggattcgagtttaatattatggtggtaggccagtcaggactgggcaaatcgacactcatcaacactctgttcaagagtaagatttctcggaaaagtgtacagcctacttctgaagagagaatccccaaaaccatagagatcaagtcaatcacccacgatattgaggaaaaaggggtacggatgaagttgactgtgattgatacccctggattcggtgatcacattaataacgaaaattgttggcagccaatcatgaaatttattaacgatcagtacgagaagtacctccaggaggaggtgaacattaataggaaaaaaagaattcctgacacgcgtgtgcactgctgtctgtacttcattcctgccaccggccactctctgcgaccactggatatcgaattcatgaaaagactgtccaaagtggtaaacattgtgccagtcatagcgaaagcagataccctgaccctggaagaaagagtgcatttcaagcagaggatcactgctgatttgcttagcaacggaatagatgtataccctcaaaaagagtttgatgaggattccgaagatcgactggtcaacgagaagtttagggagatgatcccctttgccgtcgtggggtctgatcatgaatatcaggtcaacgggaagcgaattttgggcagaaagacaaaatggggaactattgaagtggagaacacaacacattgtgaatttgcctacctcagagatctcttgatccgtacgcacatgcaaaatataaaggatattacaagttccattcacttcgaggcctaccgagtaaagagactgaacgaggggtcatccgcaatggccaacggcatggaagagaaggagcccgaagcgcctgaaatgtag

SEQ ID NO: 239995 - DNA, 1269 bp, synthetic construct
  misc_feature 1..1269: note = Description of Artificial Sequence: Synthetic coding sequence
  source 1..1269: mol_type = other DNA
atggagccgccagcttctaaggttcccgaggtgcctacagcccctgccactgatgccgctccgaagcgagtcgagattcagatgccaaaacctgccgaggcgccaaccgctccatctcctgcacagacgctggagaattccgagcccgcacctgtcagccagctgcagagtaggctcgaacctaagccgcagccgcctgtggcggaggccacccccaggagccaggaagcaactgaagcagctccctcttgcgtgggagacatggctgacacccccagagacgccggattgaagcaggctccagccagtcgaaatgagaaggcacctgtggactttgggtatgtcggaatagactcaattctggaacagatgcggagaaaggcgatgaaacaggggttcgaattcaacattatggtagtgggccaatctggcttaggcaaatccacgctgattaatactctgtttaagtcaaagatcagtaggaagagcgtgcagcctacttctgaagagcgcatccctaagactatagagattaagtcaatcactcatgatatcgaggaaaagggcgttaggatgaaactcacggttattgacacaccaggttttggtgaccatattaataatgagaactgttggcagcctattatgaaattcattaacgaccagtacgaaaaatacttgcaggaggaagtgaatatcaatcggaaaaagaggattcccgacaccagggttcactgttgtctttatttcataccggcaaccggccattctctccggccactggatatagaattcatgaagagactgtctaaagttgttaacatcgtgcccgtgattgcaaaagccgacaccttgactctggaggaacgagtgcacttcaaacagagaataacggccgatctcctctctaacgggatcgacgtttatcctcagaaggaattcgacgaagatagtgaggatcgtttggtcaacgaaaaattcagagaaatgatcccctttgccgttgtgggtagcgatcatgaataccaggtcaacgggaaaagaatcctcggcagaaaaacaaaatggggaacaattgaagtcgagaatacgacacattgtgagtttgcctatctgagagatctgctgataaggacccatatgcagaatatcaaggacattacctcatccattcacttcgaagcctaccgcgtcaaaagactaaatgagggcagttctgctatggccaacgggatggaagaaaaagagccagaggcccctgagatgtag

SEQ ID NO: 239996 - DNA, 1089 bp, synthetic construct
  misc_feature 1..1089: note = Description of Artificial Sequence: Synthetic coding sequence
  source 1..1089: mol_type = other DNA
atggccggagctgggtgtaccgggacatggagctggttgtgggggacggcgacagaggcagcccctagctgcgtcggggacatggccgatactccaagagacgctggtttgaagcaggcacctgcctccagaaacgagaaagcccctgttgactttggctacgtaggcatagactccatactcgaacagatgagacggaaagctatgaaacagggcttcgaattcaacattatggtcgtgggacagtcaggcttgggcaaatctaccctcattaacacactctttaaatcaaagatcagccgcaagagcgtgcagccgactagcgaggagcggattcccaagaccatagagattaaaagcattacccatgatatcgaagaaaaaggcgttcgcatgaaactgacagtgattgacactccgggtttcggcgaccatatcaataacgaaaactgctggcagcctataatgaagtttatcaatgatcagtatgagaagtacctccaggaggaggtgaacattaaccgtaagaaaaggatccccgatactcgcgtgcattgctgcctatactttatcccagccaccggccacagcctccgcccactcgacatcgagtttatgaagcgcctgagtaaagtggtaaatatagttcctgtgattgctaaagcagatacactgactcttgaggaaagggtgcatttcaaacagcggatcacagcagacctcctctcgaatggcatcgatgtctacccacaaaaagaattcgacgaagactccgaagacagactagttaacgaaaagttccgcgagatgatccccttcgccgttgtgggtagcgatcatgaataccaggtaaacggaaagcggatcctcgggagaaagaccaagtggggcacaatcgaggtggaaaacactactcattgcgaattcgcatatctccgagacctcttaatcaggactcatatgcaaaatattaaggacatcaccagttctattcacttcgaagcctaccgggtaaaaaggctgaatgaaggtagctccgccatggcgaacggaatggaggaaaaagaacctgaggcacccgaaatgtag

SEQ ID NO: 239997 - DNA, 582 bp, synthetic construct
  misc_feature 1..582: note = Description of Artificial Sequence: Synthetic coding sequence
  source 1..582: mol_type = other DNA
atgaccctgtgtcctcaggcctggctgcctgagggtagcgaagagcagctccggtgcgctgaccacccaagttgtggggtgctgagcgccggaccctggggaggaggacaggcttcgcatcttcagcgaagccccgtaggatgtaccttgccgtcgattccgatcggacccgtgccctggtctgtgagcgagcccagaggcgaatgttccccaccaggagcacccggacctcccgcaaggcacatggtatggcctagtctgtctccctatccctgccccgcacctaagggtcgcaagctgcagggccctttacccccaaccgcacagcctctccaggctccatggcaattgcctctgctagaacaaaaggtgcccttaagtcaaccctctgcagactgctggccagatgccggaacgggatggaacgagggtggtgtcttcatctctcttccttctccctctcacgccacgccagcacctaccggcctgcaggtgctgctcatgcgctgggatcttatcgaagacaaaaaggaaggggagatgacacccacccccagctcaccatcattcgagaaggtctag

SEQ ID NO: 239998 - DNA, 1071 bp, synthetic construct
  misc_feature 1..1071: note = Description of Artificial Sequence: Synthetic coding sequence
  source 1..1071: mol_type = other DNA
atggctatgtcttacgtcaaggatgatatctttcggatctacattaaggaaaaaaaagagtgtagacgggaccaccgcccaccttgcgcacaagaagcgccacgtaacatggtgcaccctaacgtgatctgcgatggttgtaatgggccagtagttggaaccaggtataagtgtagcgtctgccctgattacgacctttgttcagtgtgcgaaggaaaaggactccaccggggtcacaccaagctggccttcccatctcctttcggccatttgtctgagggattttcccactcacggtggctgcgaaaagtgaagcatgggcatttcggttggcctggctgggaaatgggccctcctgggaattggagtcccagacccccaagagccggagaggccaggcctggaccaacagctgagtccgcgtccggacctagcgaggacccaagtgtcaatttcctcaaaaacgtgggggaaagcgtggctgccgcactgagcccgctcgggatcgaagtggacatagatgtcgagcacggtggcaaacggagcaggttgacccccgtaagtccggagtcaagttcaacagaggagaagtcttctagtcagccttcgagttgttgctctgacccctccaagcctgggggaaacgttgaaggggcaacacagtcactggctgagcagatgagaaagattgccttggaaagtgagggacgccctgaggaacagatggaaagcgataattgcagcggcggtgatgacgattggacgcatttaagctccaaagaggtggaccctagcactggagaactgcagtctctgcagatgcctgaatcggaaggcccttcaagcctggatcccagccaagaaggtcccaccggtctgaaagaagccgctttgtaccctcaccttccgcctgaagctgacccccgactcatcgagtccctttctcagatgctcagtatgggatttagcgatgaaggtggttggctgacccggctgctccagacgaagaactatgacatcggagcagcactggataccatccagtatagtaaacaccccccaccactgtag

SEQ ID NO: 239999 - DNA, 1071 bp, synthetic construct
  misc_feature 1..1071: note = Description of Artificial Sequence: Synthetic coding sequence
  source 1..1071: mol_type = other DNA
atggccatgtcctatgtgaaggacgatattttcagaatatatattaaggagaaaaaggaatgcagaagggatcatcgccctccttgcgctcaagaggctccaagaaacatggtccacccgaatgtgatttgtgacggctgtaatgggcctgtggtcggtacacgctacaaatgtagtgtttgcccagactatgatctctgtagcgtctgcgagggaaaggggctgcatcggggacatacaaaattagcattcccctccccatttggtcacctgtctgaaggatttagccacagtagatggctgagaaaggtgaaacatggtcatttcggatggccaggctgggaaatgggccctccaggcaactggagcccgagaccacctcgcgctggtgaggccaggcccggtcccaccgccgaatccgcatctggacctagtgaggatcccagcgtgaactttctgaagaacgtcggggagtcggtggcagctgccctgtctcccctgggaatagaggtggacattgatgtcgagcacgggggtaagcgctctagactgaccccagtgtctcctgaaagcagctccaccgaagagaagagctcctcgcagccgagtagttgttgttcggacccgagtaaaccagggggtaatgttgaaggtgcgacgcagtctttagcagaacagatgagaaagatcgcactggaatccgaaggccgaccagaagaacagatggaaagtgataattgcagcggcggagatgatgattggacccatctgagttctaaagaggtggatccaagcacgggagagctacagtctctccagatgcctgagagcgagggcccaagttctcttgatccaagtcaagaaggccctacaggactgaaagaagcggcattgtatccacacctgcccccagaggcagatccaagactcatcgagtcactctctcaaatgctgtcaatgggattctctgacgaaggtggatggctgacccgtcttcttcagaccaagaattacgacatcggggctgctctcgatactatccaatacagcaaacatcccccacccctttag

SEQ ID NO: 240000 - DNA, 1323 bp, synthetic construct
  misc_feature 1..1323: note = Description of Artificial Sequence: Synthetic coding sequence
  source 1..1323: mol_type = other DNA
atggcatctctgacagtgaaggcatacctgctgggaaaagaggacgccgctcgtgagatacgccgatttagcttttgctgctcaccagaacctgaagccgaggcagaggccgcagccggtccaggaccatgcgaaagactactgtccagagttgctgcgttgtttccagctctgcgaccagggggtttccaggcacactacagagatgaagacggagacctcgttgccttttccagtgatgaggagttaaccatggctatgtcttatgtgaaggacgatatatttaggatatatatcaaagaaaagaaagagtgtcgtcgcgatcatcgtcccccatgcgcacaggaggcgccaaggaacatggttcatccaaatgttatctgtgacgggtgtaatggaccagtggttggcaccagatataagtgctcagtttgtccagattacgacctctgctctgtgtgcgagggcaaaggtcttcaccggggacacactaagctagctttcccgtcaccttttggacatctctccgaaggcttttcccatagcagatggctgagaaaagtgaagcacggacacttcggctggccgggatgggaaatgggtccacccggtaactggtcaccacggccaccaagggccggagaggcgagaccaggacctaccgcggagagcgcatctgggccttctgaagatccttccgtcaatttcctgaagaatgtgggtgaatccgttgcagccgctttatctcctcttggtattgaagtcgacatagacgtggaacacggtggaaagagatctcgcttaacccctgtcagcccggagtcaagcagtaccgaggagaagtccagcagccagccttcatcatgctgttctgacccttcaaagcctgggggaaatgttgagggcgctacacagagtctggctgaacaaatgaggaagatcgcgctggaatccgaggggcgtcctgaggagcaaatggaatccgacaattgttccgggggtgacgacgattggactcacctgagcagcaaagaagttgaccccagtactggcgaactccagtccctgcagatgccagaaagcgaggggccatccagcctcgatcctagccaggaggggccaactggactcaaggaggctgctctttacccgcatcttcccccagaagcagaccctagactgatcgagagcctctctcagatgctgagcatgggcttctccgacgaggggggatggttgactcgtcttctgcagacgaagaattacgacatcggagcagccttggatactattcagtacagcaaacacccgcctcccctctag

SEQ ID NO: 240001 - DNA, 1071 bp, synthetic construct
  misc_feature 1..1071: note = Description of Artificial Sequence: Synthetic coding sequence
  source 1..1071: mol_type = other DNA
atggccatgtcatacgttaaggacgacattttccgaatctatattaaagagaagaaggagtgtcggcgagaccacaggcctccctgcgcccaggaagcccctcgaaatatggtgcaccccaatgtgatctgcgacgggtgtaatggcccagtagtgggcacaaggtataaatgctcggtatgtcctgactacgacttatgttctgtctgtgagggtaaaggcctccatagagggcacactaagctggcgttcccctcccctttcggccatctttccgaaggattttctcactctagatggctgcggaaagtcaaacatggacactttggctggccagggtgggagatgggccctcctggaaattggtcccctcgccctcctcgcgctggcgaggccaggcccggacctactgcagagtcagctagcggaccttctgaagacccttccgtgaattttctgaaaaatgtgggagagtctgtggcagccgcattgagcccactgggtattgaggttgacatcgatgtggaacatggcggaaagcgcagccggctgacaccagtcagcccagagagcagttctactgaggagaaaagcagctcccagcctagttcttgttgttccgacccttctaaaccaggcggtaatgttgagggtgccacccagtctctcgctgaacagatgcgcaagattgcactggagtctgagggcaggcccgaagaacagatggagtctgacaattgtagtggcggtgatgacgactggactcacctctctagtaaggaggtggatccttcaaccggagagttacagtccctacaaatgcccgaaagcgagggtccttcaagtttagatccctcccaggaaggacctaccgggttgaaagaggccgcactgtacccacacttaccccctgaggcagaccccagactgattgagtctttgagccagatgctgtctatggggtttagtgacgaaggaggctggctgacaaggctgttgcagaccaaaaactacgacattggtgccgctctcgatacaatccagtattctaaacatcctccacctctgtag

SEQ ID NO: 240002 - DNA, 423 bp, synthetic construct
  misc_feature 1..423: note = Description of Artificial Sequence: Synthetic coding sequence
  source 1..423: mol_type = other DNA
atggccatgtcctatgtgaaagacgatattttccgcatctatatcaaggaaaaaaaggaatgtcgtagagatcacaggcctccgtgtgcccaggaagcccctaggaacatggtgcacccgaacgtgatctgcgatgggtgcaatgggcctgtggtgggcacaagatacaaatgcagcgtgtgtcctgactacgatttgtgttccgtgtgtgaggggaaggggctgcacaggggtcacaccaaactcgccttcccctcaccttttgggcacctgagtgagggctttagtcactcccggtggttgagaaaggtcaagcacggtcatttcgggtggcccggatgggagatgggcccacctggcaattggtcacctagacccccacgggctggggaagccaggcccggacccaccgctgagagctag

SEQ ID NO: 240003 - DNA, 891 bp, synthetic construct
  misc_feature 1..891: note = Description of Artificial Sequence: Synthetic coding sequence
  source 1..891: mol_type = other DNA
atgacttcgagcgaaagcacacttaaaagaaaaaaaagtgccggaggaactacggcgcacagagtcctcaggaggcgacctttcgggcatctgagcgagggattctcacacagcagatggttacgaaaggttaagcacgggcattttggctggcccggttgggagatgggccctcctggcaattggtctccaaggcctccaagagcgggtgaggccagaccaggaccgactgcggagagtgcgtcaggtccctctgaggacccaagtgtcaacttccttaaaaacgttggcgaatcagtggcagctgcactatctccattgggtatcgaggtggatattgatgtggagcatgggggtaagaggagccgcctgacccccgtgagccccgagtcatcctctactgaggaaaagagtagcagccagcctagcagctgttgctctgacccatccaaacctgggggaaacgtagaaggggcaacccagagcctggctgaacagatgcgaaaaattgccttggagtcggagggtcgacctgaagaacagatggaaagtgacaactgttccgggggagacgacgattggacccatctgagcagcaaggaagtggacccaagcaccggtgagctccaatcactgcagatgcctgagtccgagggacctagtagcttggatccgtcacaggagggccctacaggactcaaagaagctgctctgtacccacatctccctccagaggcagaccctcgtttgattgaatcactttctcagatgttaagtatggggttttctgacgagggaggttggctaaccagactcctacaaaccaaaaactacgacattggcgcagcactggacacaatacagtactcaaaacatcccccacccctgtag

SEQ ID NO: 240004 - DNA, 504 bp, synthetic construct
  misc_feature 1..504: note = Description of Artificial Sequence: Synthetic coding sequence
  source 1..504: mol_type = other DNA
atggcaatgtcatatgtgaaagatgacattttccgaatctacatcaaagaaaaaaaggagtgtagacgcgatcatagaccaccatgtgcccaggaggctcccaggaacatggtgcaccccaacgtcatatgcgatggatgtaacggacccgttgtggggaccaggtataagtgttccgtatgccctgactacgatctgtgcagtgtttgcgaagggaagggattacatcggggacacaccaaattggcttttccaagtcctttcgggcacctcagtgaaggattctcccacagccgctggcttcgcaaggtaaaacacgggcattttggatggcctggctgggagatgggtcctcccggaaactggtccccacggccaccgagagcgggagaggcacgcccaggtccaactgcagagtctgcatcaggaccgtcagaggacccatccgttaacttcctaaaaaatgtgggagagtctgttgctgcagcccttagtccattatag

SEQ ID NO: 240005 - DNA, 477 bp, synthetic construct
  misc_feature 1..477: note = Description of Artificial Sequence: Synthetic coding sequence
  source 1..477: mol_type = other DNA
atgatgcagaagctgcttaagtgctcaaggctcgtactggcattggctctgatacttgtgctagaatcttctgtgcagggctatcctaccagaagagcacggtatcagtgggtcaggtgcaacccagattctaatagtgccaactgcctggaggagaagggacctatgttcgagctattacctggagaatccaacaagatcccgaggctgcgcaccgacctctttccaaagacccggatacaggacttgaacagaatctttccgttaagtgaagattactccggttccggcttcggtagcggctccggcagtgggagtggatccggaagtggctttctgacggaaatggagcaagattatcagttggtggatgagtccgacgccttccacgataatctgaggagccttgaccggaatctcccgagcgactcacaagacctgggccagcacgggctggaagaggactttatgctctag

SEQ ID NO: 240006 - DNA, 987 bp, synthetic construct
  misc_feature 1..987: note = Description of Artificial Sequence: Synthetic coding sequence
  source 1..987: mol_type = other DNA
atgatgagcggcgaacctttgcacgtgaagaccccaatacgggactccatggcgttatccaaaatggccggaacgagcgtctatctgaaaatggatagcgctcagccttctggcagtttcaaaatcagaggaatcggccatttttgcaagaggtgggccaaacagggatgcgcccacttcgtgtgcagctctgccggtaacgccggtatggcagccgcttatgcagcaaggcagttaggcgttcccgcaacaatcgtggtcccgtcgactacaccagcgcttaccatcgaaaggctgaaaaatgagggcgctacggtgaaagtggtgggggagctattagacgaggcctttgaactcgctaaggccttggccaagaacaatcccggatgggtctatattccgcctttcgacgatcctctaatctgggagggtcatgccagcatcgtaaaagagctgaaagagacactttgggaaaagcccggagcaatagcccttagcgtcggaggcggtggactgctttgcggggtggtacagggattgcaagaagtgggctggggagatgtgcccgtcattgccatggaaacgttcggcgctcatagcttccatgctgctactacagctggcaagctcgtgtcccttcccaagattactagcgttgccaaagccttgggagtgaaaactgtgggcgctcaggcattgaagctatttcaggaacacccaatcttcagtgaggtgatctcagaccaggaagctgtcgccgctatcgagaagttcgtggacgatgaaaaaattttagtggagcctgcgtgtggagcggcactggcagctgtgtactcccatgtcatccagaagctccaactggaagggaatcttcgaactccactgcccagtttggtggtaattgtctgtgggggtagcaacatttctttggcacagctcagagcgttgaaagagcagctgggcatgaccaatagactgccgaagtag

SEQ ID NO: 240007 - DNA, 657 bp, synthetic construct
  misc_feature 1..657: note = Description of Artificial Sequence: Synthetic coding sequence
  source 1..657: mol_type = other DNA
atgatgtctggggaacccctacacgtgaagacacccatccgggacagcatggccctctccaagatggcaggtacctctgtctatctgaaaatggacagtgcccagccttcaggcagttttaagataaggggcatcggccacttttgcaaacgatgggctaaacagggatgcgctcactttgtgtgcagctccgctgggaacgcgggtatggcagctgcctacgcagctcgtcagcttggagtgcccgcaactattgttgttccttccacaacccccgcacttacaatcgaacggctaaagaacgaaggcgctaccgtgaaagtcgtcggagagctgctagacgaagccttcgaattagctaaagctctcgccaaaaataacccgggttgggtgtacattccacctttcgacgaccctctgatttgggaaggtcatgcctcaatcgtgaaagagctgaaggagacactgtgggaaaaacctggagcaatcgccctgtcggtgggaggcggaggtctgctgtgcggggtggtccagggcctgcaggaggtgggttggggggatgtccccgtgatcgccatggaaaccttcggtgcccacagcttccacgcagcgaccactgctgggaaactggttagtttgcccaagataaccaggtag

SEQ ID NO: 240008 - DNA, 1452 bp, synthetic construct
  misc_feature 1..1452: note = Description of Artificial Sequence: Synthetic coding sequence
  source 1..1452: mol_type = other DNA
atgaccatgcctgtcaatggcgctcacaaagacgctgatctctggtccagtcatgataaaatgctcgctcaacccctcaaggacagcgacgttgaagtatacaacataatcaaaaaggaatccaacagacaacgcgtcggcttggagcttatcgcttccgaaaatttcgcctctagggccgtgttggaggctctgggaagctgtctcaacaataagtatagtgaggggtatcctggccagaggtattatggaggcactgaatttatcgatgaattagagacattatgccagaaaagggccctgcaggcctataagctcgatcctcagtgctggggagtcaatgtgcaaccctactccgggagtccggctaattttgctgtctatactgccctggttgagccgcacggaagaatcatgggactcgacctgcctgatggcggtcacctaacgcacggctttatgaccgataagaagaaaattagcgctacctccatttttttcgagtccatgccttacaaagtgaatcccgatacagggtatatcaattacgaccaactcgaggagaatgctagactcttccacccaaagctgatcattgccggtacctcctgctactcacgaaatctagaatacgccagactgagaaagattgcagatgaaaacggagcataccttatggccgatatggcccacatttcaggactggtcgccgcaggagtggtcccctcccctttcgagcattgtcacgtggtgacaaccacaacccataaaacattaagaggctgccgggcagggatgattttctacaggaaaggcgtgaaaagcgtcgaccctaagacaggaaaggaaattttgtacaatcttgagagtttaataaactccgccgtatttcccggtttgcaggggggaccccacaaccacgccatcgccggagtggccgtggcactgaaacaggccatgactcttgaattcaaagtataccaacaccaggtggtagccaattgtcgtgcactatccgaggccctcacggaactgggatacaagatcgtcacaggtgggtccgacaatcaccttattctggtagatttgagatctaagggaaccgatggcggaagagccgagaaggtcctcgaagcatgttcaatcgcctgcaacaagaatacatgccctggtgaccgctctgccttgcggccttcaggactgcgattaggaactcccgctctcacttctcgcggattgttagaaaaagatttccagaaagtcgctcactttattcaccgaggtatcgagctaaccctgcagatccagtctgacaccggagtgcgagccaccctcaaggagtttaaggagcggctcgcaggagacaagtaccaggcggctgtccaggcactcagggaagaagtcgagagcttcgcctcactctttcccttgcctggcctacccgatttctag

SEQ ID NO: 240009 - DNA, 378 bp, synthetic construct
  misc_feature 1..378: note = Description of Artificial Sequence: Synthetic coding sequence
  source 1..378: mol_type = other DNA
atgcgctatcttctccaagtggctcagttggtgtggttgactgtggactcaaggggcatcgggggtactttggatcacgccggtttctctatctgtatatttaccgtcccacctttgagcttttttgggctgtgcgaagcccagacctttgggctgtcaggaagcaagtctccagcactgcatcgctattacgggggtactgagttcatcgacgaactcgagacattgtgccaaaagagagcattgcaggcctataaattggaccctcaatgctggggggtgaacgtgccaactcaggtcctagtcagctctatctggcccggtgctgcctcatcctgtgcttccccaagagcggatatgcaccaggaggaatcttag

SEQ ID NO: 240010 - DNA, 1212 bp, synthetic construct
  misc_feature 1..1212: note = Description of Artificial Sequence: Synthetic coding sequence
  source 1..1212: mol_type = other DNA
atgaccatgccggtcaatggtgcgcacaaggacgccgacctctggtcgtcgcatgataaaatgctggctcagccattaaaagacagcgatgtggaagtgtacaacattatcaagaaagagtccaataggcagagagtgggacttgaactgatcgcttccgaaaatttcgcaagtagagctgtgctggaagccctgggaagctgtcttaacaacaagtatagtgagggctatccaggccagcgctattatggtgggacagagtttatcgatgaactggagacactgtgccagaagcgggctctccaggcctacaagcttgatcctcagtgctggggagtgaatgtgcagccatattctggctctcctgcgaactttgccgtatatactgctttggtagaacctcacgggaggatcatgggtctcgacctccctgacggcggacacctgacccatggctttatgacagacaaaaagaagatatccgctacgtccattttctttgagtctatgccttacaaggtaaacccggacactggatatataaactacgatcaactcgaggaaaacgcacggctgttccatcccaaactgatcatcgccggaacgtcttgctactcaagaaaccttgagtatgctaggctcaggaaaatagcagatgaaaacggagcctacttgatggcagacatggcccatatctcaggcctggtggcggctggggtggttccaagcccttttgagcattgccacgttgtcacaacaacaacccataagaccctcagaggctgcagagctggcatgatattttaccggaaggggggttcagataaccacctcatcctggtggacctccgatctaaggggaccgacgggggacgcgctgaaaaggtgctagaggcttgctcaatagcgtgtaacaagaacacatgcccaggcgatagaagcgcgctgcgcccatcggggctgcggctaggaacacctgccctcacctctaggggactgctggaaaaggacttccagaaagtagcacactttattcatcgtggcatcgagcttactttgcagattcagagcgacacaggagtgagagcaacactgaaggagtttaaagagcgccttgccggagataagtaccaggcagcagtccaagcattacgggaggaagtggagtccttcgcaagtctgtttcctctgccgggactaccagacttttag

SEQ ID NO: 240011 - DNA, 1335 bp, synthetic construct
  misc_feature 1..1335: note = Description of Artificial Sequence: Synthetic coding sequence
  source 1..1335: mol_type = other DNA
atgacaatgcccgtaaacggggctcataaggacgccgacctctggtctagtcacgataaaatgctcgcccagccactcaaagattctgacgtggaggtgtataatattattaaaaaagaatcaaaccgccagcgtgttggacttgaactgattgcatccgagaacttcgccagtcgcgcagttctcgaggccctgggctcttgcctgaacaataagtactctgagggctatcccggacaaaggtactacggaggtaccgagttcatcgacgagctcgaaacactctgccagaagagagctttgcaggcttacaagctcgacccccagtgttggggggtcaacgtacagccctactccgggtcaccggctaactttgccgtctatacagctttggtggagccgcacggccgaattatgggactggacttgcctgacggtggacacctgacccacggcttcatgaccgacaaaaaaaagataagtgctacctctattttctttgaaagtatgccatacaaagtaaaccccgacacagggtacatcaactatgatcagctggaggaaaacgcgagactctttcaccccaaactcatcatagcaggcaccagctgttacagcaggaatctcgagtacgccaggctgaggaaaattgccgatgagaacggcgcatacctgatggcagacatggctcacatctccggcctggtagcggctggagtcgtgccctcacccttcgagcattgtcatgtcgtgactactacaacgcacaagactcttcggggatgtagggccggtatgattttttaccgcaaaggagttgccgtggccctgaaacaggccatgacactggagtttaaagtgtatcagcatcaggtggtggccaattgtcgcgcattatccgaagcactgacagagctgggatacaaaatcgtgactggaggatccgataaccacctgatactggtggacctccgaagcaaagggacggatgggggtagagctgagaaagtgctggaggcctgcagcatagcctgcaataaaaatacatgtcctggcgatcgtagcgccctgcggccaagtgggctcagactgggcacacccgctctgacgagtcggggactgctggagaaggactttcagaaggtggctcattttatacatagggggatcgaactcacactgcaaatccaatctgatacaggcgtgagagcaactctgaaggagtttaaggagaggttagccggagataaataccaggccgctgtgcaggcgctgcgcgaagaagtagagtcctttgcctccctttttcctcttcccggactgcccgatttttag

SEQ ID NO: 240012 - DNA, 285 bp, synthetic construct
  misc_feature 1..285: note = Description of Artificial Sequence: Synthetic coding sequence
  source 1..285: mol_type = other DNA
atgacaatgcctgtgaatggagcacacaaggatgctgacctgtggagctcacacgacaagatgctggcacagccgctaaaagacagcgatgtcgaggtatacaatataattaagaaagagtccaaccgtcagagagtgggccttgaactaatcgcctcagagaacttcgcttcaagagcagtacttgaggcactgggctcctgtctgaataataagtactccgaaggttaccccggacaacgttacgtgaatatcttcaaaggcctggtcctaactcagtcttag

SEQ ID NO: 240013 - DNA, 777 bp, synthetic construct
  misc_feature 1..777: note = Description of Artificial Sequence: Synthetic coding sequence
  source 1..777: mol_type = other DNA
atggcggacatggcacatatctctggactcgtggcagccggtgtcgtgccatccccttttgagcactgccacgtggtgacaacgaccacgcataagacgctgcggggttgtagggccggtatgatcttctatcggaagggggtcaagagcgtcgacccaaagactggaaaggagatcctatataacctggaaagcctgatcaattccgccgtcttcccaggactgcaagggggacctcacaaccacgcaatcgcgggagtggccgtagccctgaagcaagcgatgacactcgagtttaaggtgtaccagcaccaggtcgttgctaattgccgggcactctccgaagcgctaacggagcttggatataagatcgttacgggcggatcagataaccacctgatattagtggacctgcggagcaaggggactgatggaggacgcgctgaaaaggtactcgaggcgtgctctatcgcctgcaataaaaacacatgccctggcgaccggtccgccctgagacctagcgggcttagattgggaactcccgctctcacgtctaggggcctccttgagaaggacttccagaaagtggctcacttcatccatcgcggtatcgagttaaccctgcagatacaatccgatacgggcgttagagcgacactcaaggagttcaaggagcgtcttgcaggcgataagtaccaggctgcagtccaggctctaagggaagaggtggagtccttcgcgtcactgttccctctcccgggattgccagacttctag

SEQ ID NO: 240014 - DNA, 1341 bp, synthetic construct
  misc_feature 1..1341: note = Description of Artificial Sequence: Synthetic coding sequence
  source 1..1341: mol_type = other DNA
atgaccatgccggtgaacggagcccacaaggatgccgatctgtggagctcccacgataagatgttggcacaacccctgaaggattctgacgtcgaggtgtataatatcatcaagaaagaaagtaaccggcaacgggtcggcttggagcttatagcatctgagaactttgcctctagggccgttctggaagcattgggatcctgcctcaacaataagtattcggaaggctatcccggtcagcgttattacgggggaacagaatttatcgatgaactggagacactgtgtcagaagcgggctttacaggcctataaactcgaccctcagtgctggggagtaaatgtccagccctattcgggaagtcccgcaaatttcgctgtttatactgcgttggtggaaccccatggaagaatcatgggcttggacctgccagacgggggacatctaacgcatggatttatgaccgataagaagaagatttccgcaacatccattttcttcgaatccatgccctataaagtaaatcctgacactggatatattaattatgatcagctggaagagaacgcaaggctcttccatccaaaacttataatagccggaacttcatgctacagccgaaacttggagtatgccaggctgcgaaaaatcgcggacgagaacggcgcttatctaatggccgacatggctcatatctctggcttggtggccgctggagtggtcccctctccattcgagcattgccacgtggtaaccaccacaacgcacaaaaccctgcgcggttgtagagccggaatgattttttaccgcaaaggtgttaaatcggtggaccccaagactggtaaggaaattctttacaaccttgaaagtttaatcaatagtgccgttttccctggcttgcaggggggaccccataaccatgccatcgctggtgttgccgtagccctgaagcaagctatgacactggagtttaaggtctaccagcatcaggtcgtggccaactgccgggcacttagtgaagcactgaccgagctggggtacaaaatcgtgaccggtggcagtgacaaccacctcatacttgttgatcttcgcagcaaggggactgacggtggccgtgccgagaaagtgctagaggcctgcagcatcgcttgtaacaagaatacttgtcccggaatagagctgaccttgcagattcagagcgataccggggtccgagctacactcaaagagttcaaggagcgcttggccggagataagtatcaggctgctgtccaggcattgcgtgaggaggtcgagtcgtttgcttctctgttcccgctgcccggtctgccagacttctag

SEQ ID NO: 240015 - DNA, 1038 bp, synthetic construct
  misc_feature 1..1038: note = Description of Artificial Sequence: Synthetic coding sequence
  source 1..1038: mol_type = other DNA
atgggccttgacctgcctgacggcggacatctgacccacggttttatgacggataagaagaagatttcagcaacctcaatattctttgaaagcatgccgtataaagtcaaccctgataccggttacataaactatgaccagttggaggagaatgccagactcttccaccccaagttaataattgccggaacttcctgttacagtcgcaacctggaatatgccagattaaggaagattgctgacgagaacggcgcttaccttatggccgatatggctcatatttccgggctggttgccgcaggcgtcgtaccctcaccttttgaacactgccatgtggtcacaaccaccacacacaaaacgctccggggttgcagagccggaatgatcttctaccgaaagggtgtcaaatccgtggaccctaaaaccggcaaggaaatcttgtataatttggagtccttaataaattcagccgtgtttcccggattacaaggaggaccacataatcatgccattgccggagtcgcagtggccttgaaacaagctatgacacttgagttcaaggtttatcagcaccaggtggtggccaactgtagggctctgtccgaggctttgacggaattgggctacaaaatcgttactggcggaagcgacaatcatctcatcttggtggacctgcgaagcaaagggacggacgggggacgggcagagaaggtgctagaggcctgttctattgcctgtaataagaatacttgtcctggggacagatctgccctgcggcctagcggcctgaggctgggcacacccgctttaactagcaggggccttctagagaaagatttccagaaggtcgcacactttatacacagggggatcgagctgacacttcagattcagtccgacacaggggtacgggcaaccctcaaggaatttaaggagagattggccggagacaagtatcaggctgccgtgcaggcactccgagaggaagtggaaagctttgcttctttatttcctttaccaggactgccggatttctag

SEQ ID NO: 240016 - DNA, 1515 bp, synthetic construct
  misc_feature 1..1515: note = Description of Artificial Sequence: Synthetic coding sequence
  source 1..1515: mol_type = other DNA
atgctttattttagtctcttttgggccgcacgtcccctccaacggtgcgggcaactggtgagaatggccattcgggctcagcatagcaatgcggcacagacccagaccggtgaagccaataggggttggaccggccaggagtccctgtctgatagcgacccagagatgtgggagctcctgcagagagaaaaggacagacagtgcagagggctggagctgatcgcctcagaaaacttctgttctagagccgctctagaggcgctcgggtcgtgcttgaataataaatactccgagggctaccctggcaaaaggtattatggcggagctgaggtcgtggacgaaatcgagctgttgtgccagaggagagccctggaggcatttgaccttgacccagcacagtggggagttaacgtgcagccctactcaggtagtcctgccaacctggccgtgtatacggcccttctccaaccccacgacagaattatgggactcgatttgcccgacggtgggcacctgacccatggatacatgtcagatgtgaagaggatttccgctacaagtatctttttcgaatctatgccttataaactgaacccaaagaccggactgatagattataaccagctggcgctgacagcaaggctgtttcgcccacgattgataatcgccggaaccagcgcctacgcccgactgattgactacgcccgaatgagggaagtctgcgacgaagtgaaagctcatctgctggccgacatggcacacatctccggcctcgtggccgcaaaagtgattccatcgcctttcaaacacgccgatattgtgactaccacgacacataaaacgctgaggggcgctaggagcggtctgatcttctacagaaagggggttaaggctgtcgacccaaaaacgggtcgcgaaattccgtatacattcgaggaccgtattaatttcgccgtgtttccaagtctgcaggggggtccccacaaccatgcaatcgccgcagtagccgttgccctcaagcaggcatgcaccccgatgtttagggagtactcgctccaagtactgaagaacgctcgcgcaatggccgacgctctccttgagaggggatacagtctggtgtctgggggaaccgataatcatttggttctggtggaccttcgcccaaaagggctcgatggtgcaagggcagaacgcgtgttggagcttgtgagcattacggctaataagaacacttgtcccggagacagaagtgccatcaccccagggggattacgcttgggagccccagcactgacctcccgccagttcagagaagacgattttagaagagtggtggatttcatcgacgagggtgtgaatataggtctcgaagtcaaatcgaagaccgccaagctgcaggacttcaagtcattcctgctaaaagatagcgaaacctcgcagcggctagcaaacctacggcagcgcgtggaacagttcgcccgagcttttcccatgccaggtttcgacgagcactag

SEQ ID NO: 240017 - DNA, 1227 bp, synthetic construct
  misc_feature 1..1227: note = Description of Artificial Sequence: Synthetic coding sequence
  source 1..1227: mol_type = other DNA
atgggtgagcaaagatggtggatgaagctgtcatgttgtgcaagtgctggtccctggaagccactaacctggattttgcatagcggcgagtctatgtccagcccgacgcccggaccccaacctacctggccttctacgcagcctttttgcaacttgaccactggaagctggggctggacttgccctatgggagcaatctcacctactgccacctgtttgacaagctccgggtaccaacctagaccctcaagttcctcactgtgccctatcagttctacggctctggctgtttgtgtgagtgtgcagcccaagacaggcttgatcgactataatcagctggctttgacagctagactttttcgcccacgcctgataatagctggcacctccgcatatgctcgcttgattgattatgctcgaatgcgtgaggtttgtgacgaggtgaaggctcacctgttagctgacatggcccacatatcaggtctggtcgctgctaaggtgattcccagtcccttcaagcacgctgatattgtgactaccacaacacacaagacactcagaggtgccaggagcggtctgatattctataggaaaggagtgaaagccgtggaccccaaaactggcagagagattccgtatacctttgaggaccggatcaactttgccgtgttccctagtctgcagggtggcccacacaaccacgccatcgctgcggttgccgtcgccctgaagcaggcttgcacccctatgttccgggaatatagtcttcaggtactcaagaacgctagggccatggcagacgccctgctcgaacggggatactccctcgtgtctgggggaaccgacaaccacctggttctggtcgacctcaggcctaaagggttggatggagcgagagccgagcgggtgctggagctcgtcagtataaccgctaacaaaaacacctgtcccggagacaggagcgccatcacccccggaggattgagactgggggcacctgctctaacatcacgccagttccgagaggacgacttcagacgggtagttgactttatagacgagggggttaatatcggtttggaggtcaagtctaaaaccgctaaactgcaggacttcaagtcattcttactgaaggacagtgaaacaagccaacgtcttgccaacttgcgacaaagggtggagcaattcgccagggcgtttcccatgcccggtttcgacgagcactag

SEQ ID NO: 240018 - DNA, 1452 bp, synthetic construct
  misc_feature 1..1452: note = Description of Artificial Sequence: Synthetic coding sequence
  source 1..1452: mol_type = other DNA
atggctatccgggcacagcactcaaacgcagcacagacccagaccggcgaggctaatcgcggatggacaggtcaggagtccttgtcagattctgatccagaaatgtgggaactgctgcaacgggaaaaggacagacaatgtcggggactagaactcattgcttctgagaatttctgcagcagagcagccctcgaggccctgggctcttgtctcaataataagtactcggagggttatcccggaaaaaggtattacggtggagctgaggtagtggacgaaatcgaactgctgtgtcagcgcagggctctggaagcattcgacttggaccccgcacaatggggcgttaacgtgcagccttacagcggatcgcccgcaaaccttgcggtatacactgcgttacttcaaccgcatgatagaatcatgggtctagacctgcccgacggaggccacctgacacatgggtacatgtccgatgtaaagaggataagcgcaacctccattttttttgagtcaatgccctataagctgaatcccaagacaggtttgatagattataatcagctcgctttaaccgcccgtctgtttaggcctcggctgataatcgctggcacatcggcctatgcgaggctgatcgactatgcgaggatgagagaggtttgcgatgaggtcaaagctcacttgctggcagacatggcccacatctcgggactcgtggccgctaaggtgatcccctccccattcaaacacgcagacatcgtgactaccaccacccacaagacgttgcgaggcgcaagatccggtttaatcttttatcgcaagggagttaaagcggtggaccccaaaaccggccgtgaaataccatataccttcgaggaccggatcaatttcgcagtgttcccttcactgcaaggcggtccacacaatcatgcaattgccgcagtggctgtggcgctgaagcaggcctgtacccctatgttcagagagtactctctccaagtcttaaagaacgccagagccatggcagatgcattactggagaggggctactcgctggtgtccgggggtaccgacaaccatctggtcctcgtggatctgcgaccgaagggtctggatggagcgagagccgaaagagtgctcgagctggtgagcattacagccaacaagaatacatgcccaggggaccgctctgcaatcactcccggaggactacggctgggtgcaccagctctgacctcacggcagtttagggaagacgatttcagaagagtggtcgacttcattgacgagggtgtcaacattggactggaggttaaaagtaagaccgccaagctgcaggatttcaagagcttcttgctgaaggattctgaaacatcccagcgcctggcgaaccttaggcagagagtcgaacagtttgccagagctttccccatgcctggctttgatgagcactag

SEQ ID NO: 240019 - DNA, 1452 bp, synthetic construct
  misc_feature 1..1452: note = Description of Artificial Sequence: Synthetic coding sequence
  source 1..1452: mol_type = other DNA
atggccattcgcgctcaacatagcaacgccgctcaaacacagacaggcgaagctaaccgaggctggaccggccaggagtcactgtccgactcggatccagagatgtgggaacttctgcagagagaaaaggaccgccaatgcagagggttagagcttatcgccagcgaaaatttttgcagtagggccgctttggaggcactgggcagctgcctcaacaacaaatatagcgagggatatccagggaaaaggtactatggcggagctgaggtggttgacgagattgagcttctatgtcaacgcagggcccttgaagcattcgacctcgacccagcgcagtggggcgtgaacgtacagccatattccggtagcccagcaaatctggcggtttatactgccctgctccagccacatgaccgtattatggggttagatttgccagatgggggacaccttacccacgggtatatgtcagatgtcaagaggatatccgcaaccagtatattctttgaaagcatgccttataagctcaacccaaagaccggactcatcgactacaaccagcttgcgctgacagccagactttttcgcccaaggctaattattgctggaaccagtgcttatgcaagattgatcgattacgcccgtatgcgggaagtctgcgacgaggtcaaagcccatctcctggccgatatggcacatatctctggactggtggctgcaaaagtcattcctagccccttcaagcacgcggatatcgttacaacgaccacccacaagacactgaggggagccaggagcggccttatcttctacagaaaaggtgtgaaggcggtcgacccgaaaaccggacgcgagattccttacaccttcgaagaccgtatcaattttgcagtgttccctagtcttcagggtggaccacacaatcacgccattgctgctgtagcagtcgccctgaaacaggcttgtacacccatgtttcgggaatactccctgcaggtgctgaagaatgcccgagccatggctgacgcgctgctggagagaggctattccctggtttccgggggaactgataaccaccttgttctggtcgacctgcggccaaagggtttggacggtgctagggccgaaagagtcctagaactggtttcaattaccgctaataagaacacttgccccggtgatagatctgccatcaccccagggggtctgcggcttggcgctcccgcactgacctctagacagttcagagaggatgactttcgtagagtggttgattttatcgacgagggagtgaatattgggctggaagtcaaatccaaaacggccaaactacaagacttcaagagctttctgctcaaagattccgagacttctcaacggctggctaacctgagacagagagtggagcagttcgccagggcgttcccaatgccaggattcgacgagcattag

SEQ ID NO: 240020 - DNA, 1452 bp, synthetic construct
  misc_feature 1..1452: note = Description of Artificial Sequence: Synthetic coding sequence
  source 1..1452: mol_type = other DNA
atggctatccgagcccagcactcaaatgccgctcagactcagactggcgaagcgaacagaggctggaccggacaagaatctctctccgattccgacccggaaatgtgggagcttctacaacgggaaaaggacagacaatgcagaggcctcgagcttattgccagcgagaatttctgctcccgtgctgcccttgaagcccttgggtcttgtttgaacaataaatactctgaggggtatcccggaaaaagatattatggtggtgcagaggtcgtggacgaaatcgagctgctttgccagagaagggcccttgaagcttttgatctggatcctgcacagtggggtgtgaacgtgcagccctatagcggatcgccggcaaacctggcggtgtacacagcccttctgcagccccacgacaggattatggggctggatctccccgacgggggacacctgacacatggctatatgtctgacgtcaagagaatcagcgccacctctatcttctttgagtctatgccatacaagctcaaccccaaaacgggccttatagattacaaccagctggccctgaccgcaagactcttccgcccacgcctaatcatcgccggaacaagcgcatatgccagactgatcgactacgctcggatgcgcgaagtgtgcgatgaagttaaggcccaccttctggccgatatggcccatatctctggacttgtcgccgcaaaggtcattccctctccgtttaagcacgctgacatcgtgacgacgacaactcacaaaacgttacgcggtgcgagaagcggcctaatcttttatcgcaagggcgttaaagccgtggaccctaaaactgggagggaaattccatataccttcgaggaccggattaattttgctgtgtttcccagtctgcaaggtgggcctcacaaccacgccatcgctgccgtcgctgtggccttgaaacaggcctgcaccccaatgtttagagagtactcactgcaagtgctcaagaatgccagagccatggctgatgctctccttgaacggggttactccctggtgtccggtggaaccgacaatcatctggtcctcgtagatttgcgccctaagggcctggatggggcacgcgcagagcgcgtgcttgaattggtgagtatcacagctaacaaaaatacttgtccaggtgatcgcagtgctatcacacccggtggactgaggttaggtgcgcctgctcttactagcagacagtttcgggaagatgacttccgtcgagtggttgactttatagatgagggggttaacatagggctggaagtgaagtccaagacggccaaactgcaggacttcaagtctttcttactgaaagatagcgagaccagtcagcgcctggccaaccttcggcagcgtgtagagcagttcgccagggcctttcctatgccgggttttgacgaacactag

SEQ ID NO: 240021 - DNA, 1485 bp, synthetic construct
  misc_feature 1..1485: note = Description of Artificial Sequence: Synthetic coding sequence
  source 1..1485: mol_type = other DNA
atgctgtatttttcgctgttttgggctgccaggccactgcagcggtgtgggcagctggtgcggatggcaatacgagcgcaacatagcaacgccgcacaaacccagaccggagaggccaaccgcggttggactgggcaagaatcattgagcgatagcgaccctgaaatgtgggagctactgcaacgggaaaaggatcgtcaatgtcggggactggagctgatcgcctcagagaacttttgtagtcgcgctgcgctggaagccctggggtcctgcctgaataataagtatagtgaaggttatcccggaaagcgctattatggtggagccgaagtagtggatgagattgaactactctgccaaagacgggctctggaggccttcgacctcgaccccgcacaatggggtgtcaatgttcagccctactccggttctcctgcaaaccttgccgtgtataccgcactgctgcaacctcacgataggattatggggctggatctgccagacggtgggcacctcacccacgggtacatgagcgatgtgaaaaggattagcgccacatccattttcttcgagtctatgccgtacaagctgaatctggcccttacggcgcgactgtttagacccagacttattatagccggaacgagtgcgtacgcgaggctgatcgattacgccagaatgcgagaggtatgtgatgaggtcaaggctcacctcctggcagatatggcgcacatttctgggttggtggccgctaaggtgatcccctcaccctttaagcacgccgatatcgtgactacgactacccacaaaaccttgcgcggagccagatctggcctgattttctataggaaaggtgtgaaagccgtagatccaaagaccgggcgagagatcccctatacttttgaagatcgtataaacttcgccgttttcccctctctgcaaggagggccacacaatcacgccatcgctgcagtggccgtggcactgaagcaggcctgtacacctatgttcagagagtactccctccaggtgctgaaaaatgcccgagctatggctgatgcgctgctggaacgaggatacagtctcgtatccggcggaaccgataatcacctcgttctcgtggatcttaggcctaaagggttggatggagccagagctgagcgagtcctcgaattggtgagcattacagccaacaagaacacatgtcctggagatcgatcagcgatcacccctgggggtttgaggctcggagccccagcactaacatcacggcagtttcgggaagacgattttcggagagtggtcgatttcatcgacgagggtgttaatattggtctggaggtgaagtctaagacagccaagctccaggacttcaagagcttcctccttaaggactctgaaacaagccaacgcttagccaacttgcgccagcgcgtcgaacagtttgcacgcgcatttcctatgcctggattcgacgaacactag

SEQ ID NO: 240022 - DNA, 1422 bp, synthetic construct
  misc_feature 1..1422: note = Description of Artificial Sequence: Synthetic coding sequence
  source 1..1422: mol_type = other DNA
atgggagccgttctgggggtgttcagtctcgcctcatgggtaccctgtctttgttcgggggcatcatgtctgctgtgctcttgctgccctaactcaaaaaacagcaccgtcacaaggctaatctacgcttttatactgttgttatcgaccgtggtctcttacattatgcagcgcaaagaaatggaaacctatcttaagaagattcctggattctgcgagggcggattcaagattcacgaggccgacattaacgcagataaagactgtgatgtgctggtggggtacaaagcagtgtatcgcatcagcttcgctatggcaatctttttttttgtgttctcactgcttatgttcaaagtgaagacaagtaaggacctccgcgctgccgtgcataacggtttctggtttttcaagatcgctgccctgattggaatcatggttggctcgttttacattccaggcggatatttttcctcagtctggtttgtagttgggatgattggtgccgcactgttcatcctgatccagctcgtgttactggtggatttcgcacatagctggaacgaaagctgggttaacaggatggaagagggcaatcctagattgtggtatgcagccctcctgagcttcacatccgctttttatatcctttcgatcatatgcgtaggtctcctgtacacgtattataccaaaccggatgggtgcactgagaacaaattcttcatcagcatcaacctgatcctttgtgtggttgctagtatcatcagcatccacccgaagattcaggagcaccagccacggtcgggtctcctccaatcctccctgatcacactgtacactatgtacctgacgtggtcagccatgtcgaacgaaccagacagatcctgcaatcctaaccttatgtcctttatcacacgaattaccgctcccaccctggcgcctgggaattccacagcagtggtgccaacaccaacccccccatctaaaagtggttccttacttgattctgacaacttcatcggcctttttgtttttgtcctgtgcctactttactcctccattcgcacgtcaaccaactcccaggtggataaactgactctcagtggcagtgacagcgttatcctgggggataccactacatcaggggctagtgacgaggaggatggccaacctaggcgggctgttgacaacgagaaggaaggcgttcaatattcgtattctctgtttcatctgatgctttgtctcgcctccctctacatcatgatgaccttgactagttggtacagcccggatgccaaattccagtcgatgactagcaagtggcctgccgtatgggtaaaaatatcctcttcctgggtctgtttactgttgtatgtttggactcttgttgcacctctggtgctgacatccagagacttttcatag

SEQ ID NO: 240023 - DNA, 1422 bp, synthetic construct
  misc_feature 1..1422: note = Description of Artificial Sequence: Synthetic coding sequence
  source 1..1422: mol_type = other DNA
atgggcgcagtcctcggtgtgtttagccttgcttcatgggtgccctgtctctgtagcggggcttcgtgtcttctttgtagttgttgtccaaattctaaaaatagcactgtgacgaggctaatctacgcctttatactgctgctctctactgttgtgtcctacatcatgcagcggaaagagatggaaacatacttaaagaagattcctggtttttgcgagggcggattcaaaattcacgaggccgacataaatgcagataaggactgcgacgtactggtcggttacaaggccgtttaccgtatcagttttgcgatggcaatcttcttcttcgtattttcactgctcatgtttaaggtaaaaaccagcaaggacttgcgggcagctgtgcacaacggtttttggttcttcaagattgccgcattaatcggtataatggtggggagcttttatatcccagggggttacttttccagcgtctggtttgtagtgggcatgataggcgctgctctctttattctgatacaactggtgcttttggtggattttgcacattcttggaacgaatcatgggttaaccgtatggaagagggaaaccctagactgtggtatgcggcactcctgtcattcacaagtgcattctatatcctctcgataatttgtgtcgggctgctatacacttattacactaagccggacggctgcactgagaataagttctttattagcattaatctgattctgtgtgtcgtcgcgtccatcatcagcattcatcctaaaatccaggaacaccagccaaggtccggacttctacagtctagtttgataaccttgtacacaatgtatctgacctggagcgctatgagtaatgagcctgatagatcttgcaaccctaatctgatgtcattcattacaaggatcaccgctcctacactggctcccggtaatagcaccgccgtcgtgccgactcccactcccccatccaaatctggtagcctgttggactcagataactttattggtctgttcgttttcgtgctatgcctcctctattcttcaatacgaacatcaactaacagccaggtggataagttgaccttatcagggtccgattcggttattctcggcgacacaacgacgtctggcgcatccgatgaggaggacggacaacctcgtcgggctgtcgataacgaaaaagagggcgtgcaatacagctacagcctgtttcacctgatgctctgccttgcgtcactgtatattatgatgacgctgacctcatggtattcccccgatgctaaattccaatccatgacatcaaaatggccagccgtgtgggttaagatctcatcttcttgggtctgtctgctactctacgtgtggacccttgttgcgccactagtgctcacaagcagagacttctcctag

SEQ ID NO: 240024 - DNA, 639 bp, synthetic construct
  misc_feature 1..639: note = Description of Artificial Sequence: Synthetic coding sequence
  source 1..639: mol_type = other DNA
gaacaccaacctaggagtggcctgctgcagagtagtcttattaccctttacacaatgtatctcacatggagcgccatgtccaatgagcctgatcgcagctgcaaccccaacctaatgagcttcattacccgcatcaccgcaccaacgttggcccctgggaactcgaccgccgtggtccctactcccacgccaccctcaaaatccggcagcctactggatagcgataattttataggactcttcgtgttcgtcctgtgtctgttatatagctctatccggaccagcaccaatagtcaggtcgataaacttacactctcagggtctgatagcgtgatacttggtgatactacaacatcaggtgcgagtgacgaggaagacggtcaaccgcgaagagctgtagacaacgaaaaagagggcgttcaatacagctactctcttttccacctcatgctgtgcttggcgtcactgtacatcatgatgacccttacttcctggtatagtcccgacgccaagtttcagagcatgaccagcaagtggcctgctgtttgggttaagatctccagttcttgggtatgcctccttctgtatgtttggacgctggtggctccccttgtgttaacttccagggacttttcatag

SEQ ID NO: 240025 - DNA, 1323 bp, synthetic construct
  misc_feature 1..1323: note = Description of Artificial Sequence: Synthetic coding sequence
  source 1..1323: mol_type = other DNA
atgccacttcaacgctgcctgatatacgccttcatccttttgttgtctacagttgtatcatacattatgcaacggaaggaaatggagacatacctaaagaaaatacccggtttctgcgagggtggctttaagatccacgaggcagacatcaacgcagacaaggactgtgacgtgcttgtgggctataaggcagtgtatagaatctctttcgctatggccatttttttttttgtcttttcgctccttatgttcaaagtaaagacctccaaggatctgcgtgccgctgttcacaacggattttggtttttcaaaattgccgcactaataggcatcatggttgggagcttctatatccctggtggttatttcagttctgtgtggttcgtagttggcatgattggagcggctctgttcattctgatccagctcgtcttgctggtcgacttcgcgcattcctggaacgagtcttgggtgaacaggatggaagaaggtaacccccgactctggtatgcagcactgcttagctttacgtctgccttttacattctatccatcatctgtgtgggactactgtacacttattacacgaagcctgatggctgcacagaaaacaagttttttataagtattaatctgattttatgtgtggtggccagcatcatcagcatacaccccaaaattcaagaacatcaaccacgctccggacttcttcagagttctctcatcacactatacaccatgtacttgacctggtcagccatgagcaatgagccagatagatcctgcaatcccaatctcatgtctttcatcactcggatcaccgcgcctaccctggcccctggaaattctacagctgttgttcctacaccaactcccccaagcaagtccggatccctgctcgactccgacaatttcatcggcctcttcgtgtttgtgctatgtttgttgtacagttctattcgcaccagcacaaattcacaggtggataagcttaccctctccggatccgactcagtgatcctgggggacactacaactagtggcgcatccgatgaagaagatgggcaacccagaagggctgtggacaatgaaaaagaaggtgtgcagtactcctacagtctttttcatctcatgctgtgtctcgcatcactatacattatgatgacgcttacatcctggtattcacctgacgcaaaattccaatctatgacttccaaatggcccgctgtgtgggtcaagatttccagctcttgggtgtgtctgttactgtatgtgtggaccctggtagcccctctggtcctaacctcgcgtgacttctcatag

SEQ ID NO: 240026 - DNA, 1257 bp, synthetic construct
  misc_feature 1..1257: note = Description of Artificial Sequence: Synthetic coding sequence
  source 1..1257: mol_type = other DNA
atgcaaagaaaggagatggaaacgtacttgaagaaaataccgggattctgcgagggaggcttcaaaattcatgaggcagatattaatgcggacaaagattgcgatgtgctggtgggctataaggccgtgtatcgtattagcttcgctatggctattttctttttcgtgttttccttgctcatgtttaaagtcaagactagtaaggacctacgcgcagctgtgcataatgggttttggttcttcaagatcgccgctctaatcggtattatggtcggtagcttctatatccccggagggtatttcagctcagtttggttcgtggtcggtatgataggcgcagcactgtttattttaattcagctggtactactggttgattttgcgcactcttggaatgaatcttgggtgaaccgaatggaggagggcaacccacggctgtggtatgccgctctccttagtttcacttccgccttttacatcctgtctattatttgcgtgggattgctgtatacttactacacaaaacccgacgggtgcacagagaacaaatttttcatctccatcaacttgatcttgtgcgtcgtggcctcaattatctctatccaccctaaaattcaggagcatcaacctcgatcaggcctgctgcagagctctctcattaccttatacacaatgtacttgacctggtctgcaatgagtaacgaacccgatcggagttgcaatccgaatctgatgtccttcattacacggattacggcccctactctggccccaggcaattccaccgcagtggtccctactcctacgcccccatctaaatccggcagtctgctcgatagcgataatttcatcggattgttcgtgtttgttctgtgcctgctttactcttcaattcgaacaagcactaactcgcaagtcgacaagttgactctttccggttctgactctgtgattctcggagacaccaccacaagcggagcatcggatgaggaggacgggcagcctaggagggccgtggacaacgaaaaagaaggcgtccagtactcatattccttgttccacctcatgctgtgcctggcttcactgtatataatgatgaccctgacatcttggtattcccccgacgcgaagttccagtcgatgacttccaaatggcccgctgtatgggtaaaaatttcatccagctgggtctgtctcctgctgtacgtgtggacactagtcgcaccactcgtgctgacaagccgcgacttttcatag

SEQ ID NO: 240027 - DNA, 1422 bp, synthetic construct
  misc_feature 1..1422: note = Description of Artificial Sequence: Synthetic coding sequence
  source 1..1422: mol_type = other DNA
atggccactgcgaccgaacagtgggtactcgttgaaatggtgcaggctctgtacgaggcgccagcgtaccacctcatcttagaggggatcctgatcttatggatcattcggctacttttctcaaagacctataaacttcaggaacgttccgacttgacggtgaaagagaaggaagaactaattgaagagtggcagcctgaacccctggtcccacccgtcccgaaggaccatcctgcgctaaattataatatcgtctctggaccgccaagccacaaaacagtagtaaatggcaaggagtgtataaattttgcatcattcaacttcttagggcttttggacaatcccagagtcaaggcagctgcccttgcctccctcaagaagtatggcgtcggcacttgtgggcctcgtggcttctacggaacctttgatgtacaccttgacctggaagaccgcttggccaagtttatgaagacagaagaagctatcatctactcatacgggttcgctaccatcgcttcagccattcccgcatattctaaacggggagatatcgttttcgtggatagagcagcatgctttgctatccaaaagggtttgcaggccagtcggtctgacattaagctcttcaagcataatgatatggctgacttggagagattactgaaagagcaggaaatcgaagatcagaagaatcctaggaaggcccgagttacgcgccgttttattgtggtggaaggcctgtacatgaacactggtaccatttgcccgctgcctgagcttgtgaagctaaaatacaaatataaggccagaatctttcttgaagaatcattgagttttggagttcttggggagcacggccgaggcgtgaccgaacattatgggattaatatcgatgatatcgatctcatttccgctaacatggagaacgccctggcgtccatagggggattttgctgtgggagatctttcgtgattgaccatcagagactctccggtcaaggatactgttttagcgcaagcctcccgcctctcctagcagctgcagccattgaggcattgaacatcatggaggaaaatcctggcatcttcgccgtgcttaaagagaaatgcggccaaattcacaaggcccttcaaggaatttccggcctgaaagtggtcggcgagtctctgtctcctgcgttccaccttcagctcgaggagtccacaggatccagggagcaagatgtgaggctgttgcaggaaattgtagaccagtgtatgaacagaagcatcgcccttacacaagccagatatctggagaaagaagagaagtgtctccccccaccttccattagagtcgttgtgacggtggagcagacggaagaagagttggagagagcggcttcaaccatcaaagaagtggcccaagctgttctgttgtag

SEQ ID NO: 240028 - DNA, 432 bp, synthetic construct
  misc_feature 1..432: note = Description of Artificial Sequence: Synthetic coding sequence
  source 1..432: mol_type = other DNA
atggctacagctaccgaacaatgggtcctagttgagatggtgcaggcgctgtacgaagctcccgcttatcaccttatcctcgaaggcatcctgatcctctggattattcgacttcttttcagtaaaacttataaattacaggagcgctcagacctgaccgtcaaggagaaggaggagctcatcgaggagtggcagcctgagcccttggtgccacccgtgccaaaggaccacccagcactgaattataacatcgtcagtgggcctccatcacacaagacagttgtgaatggcaaagagtgcatcaatttcgcgagcttcaattttctaggtcttctggataacccacgggtgaaagccgctgctcttgcaagcctcaagaagtacggtgttggtacgtgcggccctagaggattctatggcacctttgaatag

SEQ ID NO: 240029 - DNA, 1017 bp, synthetic construct
  misc_feature 1..1017: note = Description of Artificial Sequence: Synthetic coding sequence
  source 1..1017: mol_type = other DNA
atggccaagtggggggaaggagatcctagatggatcgtggaggagagggctgatgcgacaaatgttaataactggcactggacagaaagggacgcttccaattggagcacagataaactgaagacgctgtttctggcagtacaggttcagaatgaagagggtaagtgcgaagtcacagaggtgtccaagttggacggggaggcaagcatcaacaaccggaaagggaagctcattttcttctacgaatggtctgtgaaactgaactggactggcacgtccaaatccggtgttcagtataaaggacacgtcgaaattcccaacctcagcgatgagaactccgtggatgaggtcgagatctcagtaagtctggctaaggacgaaccggacacgaatctcgttgcattgatgaaagaggaaggtgtgaagctcttgagggaagccatggggatttacatttcgactcttaagaccgagttcacccagggtatgatcttgcctacgatgaatggcgaatccgtggaccccgtcggccagcctgcactcaagaccgaagagaggaaagcaaaacccgctccttctaaaactcaggccagacctgtgggagtgaagatcccaacttgtaaaatcaccctgaaggaaacgttcctaacctcccctgaggagttatacagggtctttacaacccaggagctggtacaggctttcacccatgccccagcgacactcgaggctgaccgcggaggtaagtttcacatggtcgacgggaatgtaagtggcgaatttaccgatttggtgccagaaaagcacattgttatgaaatggcgatttaagtcctggcctgaaggccactttgccaccatcaccctgaccttcattgacaagaatggcgagacagaactttgcatggagggcagaggcatccccgctccagaagaagagcggacaagacaggggtggcaacgttattacttcgagggcatcaaacaaactttcggctatggtgctcggcttttctag

SEQ ID NO: 240030 - DNA, 990 bp, synthetic construct
  misc_feature 1..990: note = Description of Artificial Sequence: Synthetic coding sequence
  source 1..990: mol_type = other DNA
atggcaaatccaggcggtggcgctgtctgtaatggcaaattacataaccataaaaagcagtcaaatggatcccagtccagaaactgtaccaagaacgggatcgttaaagaggcgcagcagaatgggaagcctcacttttacgataagctgatcgtggagtcctttgaggaggcccctttacatgttatggtgtttacctacatgggatacgggatcgggacgctttttggatacctgcgggacttcctaaggaattggggaatcgagaaatgcaacgcggcagtggagcgcaaagagcagaaagactttgtgcccctgtaccaggacttcgagaacttctacacccgcaacctctatatgcgaattcgcgacaactggaatcggccaatatgtagcgctcccggacctcttttcgacttaatggagagggtgtccgacgattacaattggacgttcagattcacagggagggtaattaaggatgtcatcaatatgggctcctataactttttgggcctggctgcgaagtacgacgagtcaatgcgaaccattaaggacgtgttggaggtgtatggcaccggcgtggccagcacacggcatgagatgggaactctggataagcataaggagttggaggatctcgtcgcgaaattccttaatgtggaggctgcaatggtattcgggatgggctttgccacaaattcaatgaatatccccgctctggtgggcaaaggttgtctgatcttgtctgatgaactcaatcacacaagcctggtcctgggcgcaagactgtccggtgcaaccattcggatatttaagcataacaacacgcagagcctggaaaagcttttgagggacgctgtaatctacgggcagccacgcactcgcagggcctggaagaagatcttgattctggttgagggcgtgtacaggacgtcctggattatatacggcttcacacgcatcgtgctgtttatgctgcacccttag

SEQ ID NO: 240031 - DNA, 1659 bp, synthetic construct
  misc_feature 1..1659: note = Description of Artificial Sequence: Synthetic coding sequence
  source 1..1659: mol_type = other DNA
atggctaacccgggagggggagccgtgtgtaacggaaaattgcacaatcataaaaaacagtctaatggctcccaatcccgaaattgcacaaagaatggaattgtgaaggaggctcagcagaatgggaagccccatttctatgacaaactcatcgttgaatccttcgaggaagcaccccttcatgtcatggtgtttacatacatggggtacggcatcggaaccctgttcggctatcttcgtgacttccttaggaactggggcattgaaaaatgcaacgctgccgttgaacgaaaagagcagaaggattttgtgcctctgtatcaggactttgagaacttttacactaggaatctctatatgcgaatcagggataactggaatcggccaatctgctctgctcctggccctctcttcgatttgatggaacgcgtgagcgacgactacaattggaccttcaggtttactggccgagtgattaaggacgttatcaatatgggatcctacaatttccttggcttggccgctaagtacgacgaatccatgagaacgatcaaggatgtgctggaggtgtacggaacaggggtcgcctcgacccgtcatgagatgggaacattagacaaacacaaagagctcgaagaccttgtggctaaatttctgaatgtggaagctgcaatggtgtttggtatgggcttcgccacaaactccatgaacattcctgcactggtgggcaagggctgcttgatcttatccgacgagctgaatcacacgtcacttgtgctcggggctcgactttctggagccactatacggatcttcaaacacaacaacacccagtccctggagaagctactccgcgatgccgtgatctacggtcaacctcgaaccagaagagcctggaaaaagattctcatcctggttgagggggtatattctatggaaggatccatcgtgcaccttcctcagattatcgccctcaagaaaaaatacaaggcctacctttacatcgatgaggcccactcgatcggggcagtgggtcccactggccgaggcgtgacggagttttttggcctggacccacacgaggttgacgtcctgatgggaaccttcactaagtcattcggcgcttcgggaggttacattgccggacgcaaagaccttgtcgattacctgcgagtacactcccattccgcggtctacgcatcttctatgagtccacctatcgccgaacagataattcggagtctcaagcttattatggggctcgacgggactacacaggggctgcagcgcgtgcagcaactcgcgaagaatacgaggtatttcagacaacggctgcaagagatggggttcattatctatggcaatgaaaatgcaagtgtggttccgctgctcctctacatgcctggtaaagtggcagcatttgctagacacatgcttgagaagaaaataggcgtggtggtggtcgggtttccagcaacacctcttgcagaggccagagccagattttgcgtgtcggcagcccatacacgcgagatgctggacaccgtgctcgaagcgcttgatgagatgggcgatctgctgcagctcaagtacagtaggcataagaagagtgctagacccgagctgtacgacgaaactagcttcgaactagaggattag

SEQ ID NO: 240032 - DNA, 366 bp, synthetic construct
  misc_feature 1..366: note = Description of Artificial Sequence: Synthetic coding sequence
  source 1..366: mol_type = other DNA
tgatcccctccaatcgcagaacagattatacgtagcctcaaactgattatgggcttggacggcactacacaggggctgcagagggtgcaacagcttgccaaaaatacacgctactttcgccagcggttgcaggaaatgggcttcattatctatgggaatgaaaatgcctccgtcgttcctctgctcctctatatgcctgggaaggtggctgcgttcgctcggcacatgctggaaaagaagatcggagtggttgttgtcggctttccagcgacccctctggctgaggctagagcacgcttttgcgtatcagccgctcacacccgagaaatgctagacactgtgatatgttgtgtgatgaagatctag

SEQ ID NO: 240033 - DNA, 420 bp, synthetic construct
  misc_feature 1..420: note = Description of Artificial Sequence: Synthetic coding sequence
  source 1..420: mol_type = other DNA
atggccaaccccggagggggagcggtgtgtaacggcaaactgcacaaccataagaaacagtccaatggatctcaaagcaggaattgcacaaagaatggcattgtgaaagaagcacagcaaaacggaaaaccccatttttacgacaagctgatcgtcgaatcattcgaagaggctcccctccatgttatggtgtttacttacatgggctatggcattggtactctgttcggctatctgcgggatttcctgcggaactggggaattgaaaagtgtaatgcagccgtggaaagaaaagagcaaaaagacttcgttcctttgtatcaagatttcgagaatttttacacgcgcaatttatacatgcgaattcgagacaattggaatcgaccaatctgttccgcccctggcccactctttgattag

SEQ ID NO: 240034 - DNA, 648 bp, synthetic construct
  misc_feature 1..648: note = Description of Artificial Sequence: Synthetic coding sequence
  source 1..648: mol_type = other DNA
aactgtacaaagaacggaatagttaaggaagcacagcagaacggaaaaccacacttttacgacaaattaattgtggagtccttcgaggaagcccctctgcacgtcatggtattcacatatatgggatatggtataggcacactgtttggctatcttagagactttcttcggaattgggggatcgaaaaatgcaatgccgctgttgaaagaaaagaacagaaagatttcgtgccgctctatcaggacttcgaaaatttttacactagaaacttgtacatgaggatcagagacaactggaataggcctatctgcagcgccccaggcccactcttcgacctgatggaacgcgtgtcagacgactacaattggacattccgctttacaggtcgtgtaattaaagatgtgatcaacatgggaagctataattttctgggactcgcagcaaaatatgacgagagtatgcggactatcaaagacgttcttgaagtctacggcacgggagtggccagcactagacacgaaatgggcgaatttaccagttcctggcagaacgctctgtgtgttggcggagtcctgcaggctgacagtgtgccgcaaggcccaccttggtcatggaaaatgggaagacacagtagcctccttgaatag

SEQ ID NO: 240035 - DNA, 360 bp, synthetic construct
  misc_feature 1..360: note = Description of Artificial Sequence: Synthetic coding sequence
  source 1..360: mol_type = other DNA
atggccctgtctgtcttacggctggctctgctcctcctcgccgtgaccttcgcaggctcagccaggtctggcccaggggagcggggaccacctgagaaatctggcttcggttcccagaccggtgggggaccatgccccgcaccgggaggtctcggggatgcttcgctgatacctcagttcggactcttttctaaataccgtacccccaactgttctcagtatcggctgcccggttgtccacgccactttaatcctgtgtgcgggtctgatatgtctacctacgctaatgagtgcacgctctgtatgaaaattagagaaggagggcacaacattaagataattcggaacggcccttgctag

SEQ ID NO: 240036 - DNA, 405 bp, synthetic construct
  misc_feature 1..405: note = Description of Artificial Sequence: Synthetic coding sequence
  source 1..405: mol_type = other DNA
atggccttaagcgtcctaagactggctctgctgctgctagccgtgaccttcgcaggctccgccaggagcggtccaggcgaaagaggcccaccagagaaatccggatttggctcccagacgggaggcggtccctgccccgctcccggtggtcttggcgacgggacacgcgctcccgtcacaggtggcagccccgaggatcttcctgcaagtcttataccccagtttggactgttttcaaagtataggacgcctaattgtagccaatatagactgcctggttgccctcggcacttcaatcctgtgtgcggatccgacatgagcacctacgctaatgagtgcactttgtgtatgaaaattcgtgagggagggcataatataaagatcatacgaaacgggccatgctag

SEQ ID NO: 240037 - DNA, 240 bp, synthetic construct
  misc_feature 1..240: note = Description of Artificial Sequence: Synthetic coding sequence
  source 1..240: mol_type = other DNA
atgaaggtgactggaatttttctgttatccgctctcgccctcctgtccttatctggaaacactggggctgacagtttgggacgggaagccaaatgctacaacgagctgaacggatgtaccaaaatttacgatcccgtgtgtggtacagatggcaatacctaccccaacgaatgtgtactgtgctttgagaatagaaaacgtcagacgtccatattgattcagaagtctggaccttgctag

SEQ ID NO: 240038 - DNA, 255 bp, synthetic construct
  misc_feature 1..255: note = Description of Artificial Sequence: Synthetic coding sequence
  source 1..255: mol_type = other DNA
atggcactgagtgtactgaggttggcgcttttactgctggctgtcacgtttgcagcgtcactcattccgcaattcgggctttttagtaagtatcgcacgcctaattgttcgcagtacagattgcctggatgccctcggcacttcaaccccgtgtgtggaagtgacatgtcaacctatgccaacgaatgcactctttgtatgaagattcgggaaggtggccacaacataaagattatccggaacggtccttgctag

SEQ ID NO: 240039 - DNA, 261 bp, synthetic construct
  misc_feature 1..261: note = Description of Artificial Sequence: Synthetic coding sequence
  source 1..261: mol_type = other DNA
atggccgtccggcaatgggtcattgctctggccctggccgcacttttagtggtggacagagaggtgccagtagccgcaggtaagttaccgttctctagaatgcctatctgtgagcacatggttgagtctccaacgtgtagtcagatgagcaatctggtctgcggcacagatgggctgacatatacaaatgaatgtcagctgtgccttgcaaggatcaagaccaaacaggacattcagatcatgaaagatgggaaatgctag

SEQ ID NO: 240040 - DNA, 330 bp, synthetic construct
  misc_feature 1..330: note = Description of Artificial Sequence: Synthetic coding sequence
  source 1..330: mol_type = other DNA
atgattctgggaataggcagtagtcctcacctgctttggaccctggaaggcacacacatttggtctctgctgggcgacgcttcacatacagatagactacccgaggcaggtgcaggtaagttactgtccgaggttccggtggccgctgggaagttgcctttctcacgaatgcctatttgcgaacacatggtggagtcaccaacttgttctcaaatgtcaaacttggtatgtggcactgacggactgacctataccaacgaatgtcagctgtgtctcgcaaggatcaagacaaagcaggacatacagattatgaaggacggtaaatgttag

SEQ ID NO: 240041 - DNA, 330 bp, synthetic construct
  misc_feature 1..330: note = Description of Artificial Sequence: Synthetic coding sequence
  source 1..330: mol_type = other DNA
atgattcttggtattggctcttctcctcacctcctgtggacattggaggggacccacatttggtcgttactgggcgacgcttcccacactgatcgtctaccggaggccggagctgggaaactcctcagcgaggtgcctgtggcagctgggaaactgcccttcagcagaatgcctatatgcgagcacatggttgagagtccgacatgcagtcagatgagcaacctggtctgcgggacagacggcctgacttacacaaatgaatgtcagttatgcctagccagaatcaagacaaaacaagacatacaaataatgaaggacggaaaatgttag

SEQ ID NO: 240042 - DNA, 3195 bp, synthetic construct
  misc_feature 1..3195: note = Description of Artificial Sequence: Synthetic coding sequence
  source 1..3195: mol_type = other DNA
atgaaaatagctactgttagcgtcttactccccttagctttatgccttattcaggacgccgcttcaaaaaacgaagaccaggaaatgtgtcacgaattccaggcctttatgaaaaatgggaagttgttctgtcctcaagacaaaaaattctttcaaagcttagacggaattatgttcatcaataagtgcgccacctgtaaaatgatcctggagaaggaagctaagagccagaagagagcgaggcacctggctagggcgccaaaagctactgcccctactgaactaaattgcgatgatttcaaaaagggcgagagagacggagattttatctgtcccgattattacgaggcagtctgcgggacagatggaaagacgtacgataatcgttgcgcactctgtgcagagaacgccaaaacagggtcacagatcggggtgaaatccgagggagaatgcaagagcagcaacccagaacaggatgtctgctcagccttcaggcccttcgtgcgcgatgggagacttggatgcactcgagagaacgatcctgttctgggcccagacggtaaaacacacgggaacaaatgcgcaatgtgtgctgaactgttcctgaaggaagctgaaaacgccaaacgggagggcgaaaccaggattcggaggaatgccgaaaaggatttctgcaaggagtatgagaagcaggtgagaaacggacggctcttctgcacaagagagagcgatcccgtgcgtggacctgacgggagaatgcacggaaacaaatgcgctctttgtgctgaaatttttaagcagagatttagcgaggaaaattctaagactgatcagaatttaggaaaagcagaggaaaaaactaaggtgaagcgggagattgtgaaactgtgctcccagtaccagaaccaggcaaaaaacggaattctcttctgtacacgtgagaacgaccctatcaggggccctgatggcaagatgcacgggaacttatgttccatgtgccaggcttactttcaggccgagaatgaggagaagaagaaggctgaggctcgcgcaaggaataagagggaatctgggaaagcaacatcttacgctgagctttgctcagagtataggaaactcgtacgtaacgggaaactagcttgcaccagagaaaatgaccctatccaggggccagatggaaaggtgcatggcaacacgtgctcaatgtgtgaggtgttctttcaagccgaagaggaggagaagaaaaagaaggaaggaaagagtcgaaacaagcggcagtctaagtccactgcctcattcgaggaactgtgctcggagtaccggaaaagccgaaagaatggtaggctattttgtactagggagaatgaccccatccagggccctgacggcaagatgcatggaaacacctgttcgatgtgcgaggcattcttccagcaggaagagcgagcacgcgctaaggccaaaagggaagctgctaaggaaatctgttcagaatttcgggatcaggttcgaaatggtaccctcatttgcacgagagagcacaatcccgtgaggggacctgatgggaagatgcatggaaacaaatgtgcaatgtgcgccagcgtgttcaaattagaggaagaagagaaaaagaacgacaaggaggaaaaggggaaggtcgaagcagagaaagtgaaacgtgaagccgtacaggaactgtgttctgagtacagacattacgtgcgaaacggccgattaccctgtacccgcgaaaatgaccctattgagggcctggacggcaaaatacatggcaatacctgttctatgtgtgaggcgttctttcagcaagaagctaaggaaaaggagcgggctgaacccagggctaaggttaaaagagaggccgagaaggaaacttgcgatgagttccgacggctcctgcagaacggaaagctgttctgcacgcgggaaaatgaccccgtgaggggccctgatggcaaaacacatgggaacaagtgtgccatgtgcaaggctgttttccaaaaggaaaacgaggagcgtaagaggaaagaggaagaggatcagcgcaatgccgctggccacgggtcttcgggcggaggaggcggaaatacccaagatgagtgcgccgagtacagggagcagatgaagaatggaagactgtcctgcacgagagagtctgatccggtgagggatgcggatgggaagagctacaacaaccagtgtaccatgtgcaaagctaagctcgagagggaggcagaacgcaagaacgagtacagtcggtcacgaagcaatggcacagggtcagaaagcggcaaagacacttgcgatgaattccgctcccaaatgaaaaacggcaagttgatctgtacgagagagagcgatcccgtccggggacccgacgggaaaacccacggcaataaatgcaccatgtgtaaggaaaagttagaacgcgaagccgcagagaaaaagaagaaggaggatgaggacagatcaaacaccggggaaaggtccaacaccggcgaaagatccaatgacaaggaagatctctgcagggaatttcgcagtatgcagagaaatgggaaactgatctgtacacgggaaaacaaccctgtacgtggaccttatggcaagatgcatattaacaagtgtgctatgtgccagagcattttcgaccgggaggccaacgagaggaagaagaaggacgaagagaaatcttctagcaagccttcaaataatgccaaggatgagtgtagcgagttccgaaattatatccgcaacaacgagttaatctgccccagagagaatgacccggtccacggggcagacggcaaattctacacaaataaatgttacatgtgtcgcgctgttttcctgaccgaggccttggaaagagctaagctgcaagagaaaccttctcacgtccgcgcatcacaggaagaggactctcccgactcatttagctctctggactcggaaatgtgcaaagactaccgggtcctgccgaggatcgggtacctgtgcccaaaagatttgaagcccgtatgtggagacgatggccagacatacaacaacccctgcatgctgtgccatgaaaatcttatacgacagactaacacacacatcagatcaaccggaaagtgcgaggaaagctcgacccctgggacaacggcagcctctatgccgccatctgacgagtag

SEQ ID NO: 240043 - DNA, 3285 bp, synthetic construct
  misc_feature 1..3285: note = Description of Artificial Sequence: Synthetic coding sequence
  source 1..3285: mol_type = other DNA
atgaaaatcgcaactgtgtccgtcctgctgcccctggctctttgtctgattcaggatgccgcttcaaagaacgaggatcaggagatgtgccacgagttccaggccttcatgaagaatggcaaattgttctgcccgcaggacaagaaattctttcaatccctggatggcatcatgttcatcaataaatgcgcaacttgcaagatgatcctggaaaaggaagccaagagtcagaagagggcacgacaccttgctcgggctcctaaggcaactgccccaacagagcttaattgcgatgatttcaaaaagggggaacgggacggggattttatatgccctgactattacgaggcagtctgcggcactgacggaaaaacatacgataaccgctgtgccttgtgtgcagagaacgcgaaaaccggcagccaaataggagtgaaatcggaaggcgagtgcaagagcagcaaccccgaacaggatgtgtgttctgcttttaggccatttgttcgcgatgggagacttggttgcacaagagagaatgatcccgtcttaggtccagatggcaagacacacggaaacaaatgcgctatgtgcgcagagttattcttgaaagaagcggagaacgcaaagcgcgagggcgagactcggatccgcaggaacgccgaaaaagacttttgtaaagagtatgagaaacaggtgcggaacggacgtttattttgcactagggaaagcgatccagtgagaggcccagacggccgaatgcacggaaacaaatgcgcgctgtgtgccgagattttcaagcagcgattcagcgaggagaacagtaaaactgatcaaaacctgggcaaggcggaggagaagactaaagtgaaacgggaaattgtgaaactgtgctctcagtaccagaatcaggcaaaaaacggcatcctgttttgtacccgggagaacgacccaatccggggacctgacggaaaaatgcacggtaacctctgcagcatgtgtcaggcctatttccaggctgagaatgaggaaaagaagaaagcagaggctagagccagaaataagagagagagcggtaaggcgaccagctacgccgaactttgcagcgagtacagaaagttagtgcgcaacggcaagctggcctgcaccagggaaaacgacccaatccagggccctgatgggaaagttcatgggaacacttgcagcatgtgcgaggttttcttccaggcagaggaggaggaaaaaaaaaagaaagaaggaaagtccaggaataagcgccagtccaaatccactgcgtccttcgaggagctgtgcagcgagtacagaaaatcacggaagaatggtcggcttttctgtacaagggagaacgatccaattcagggaccagacgggaagatgcacggaaacacatgtagcatgtgtgaagccttttttcagcaggaagagagggctcgggctaaggcaaagcgcgaggctgcgaaagagatttgtagtgagtttcgggatcaggtccgaaatggtacactgatctgcacaagagagcataatcccgtgcggggacccgacgggaagatgcacggtaacaagtgtgcgatgtgtgcgagcgtattcaagctcgaggaggaggaaaaaaagaatgacaaagaagaaaagggaaaagtggaagctgaaaaagtgaaacgcgaggccgtacaggaattgtgtagcgaatatcggcattacgtaagaaatggtagactgccttgcactcgggaaaacgaccccatcgaagggctggatgggaagatccatggcaacacctgctcaatgtgtgaagccttcttccagcaggaggcaaaagagaaggagcgcgcagagcctagagccaaggttaagcgggaagccgagaaggaaacctgtgacgagttccggaggctgctgcaaaatggaaagctgttctgcacccgggagaacgatccagtgcgaggaccggatgggaaaactcacggcaacaaatgcgcaatgtgtaaggccgtgttccagaaggagaacgaggagcgcaagcggaaggaagaggaagaccagagaaacgctgccggacacgggagtagcggcggaggagggggtaacactcaggatgagtgcgcagaataccgagagcagatgaaaaatggaagattatcgtgcaccagagagagcgaccccgtcagagacgccgatggaaagtcttataataatcaatgtactatgtgcaaggccaaacttgaacgagaagcagagcgaaaaaacgagtatagccgcagcaggagcaatggcaccggctctgagtccgggaaggacacttgcgacgagtttaggtctcagatgaagaatggtaaattgatttgtaccagggaatccgatccagtccgaggccctgatggtaaaacacacggcaataagtgtaccatgtgtaaggaaaagctcgaaagggaagccgcagagaaaaagaagaaggaagatgaagaccggagcaacaccggcgaacgcagcaacacgggcgaacgatcgaatgacaaggaggatctgtgtagggaatttcggtctatgcagaggaacggaaagctgatttgtacccgagagaacaaccctgtacggggtccatatggaaagatgcatataaacaagtgcgccatgtgtcaatctatctttgatagggaggcaaacgagcggaaaaaaaaggacgaggagaagagctctagcaagcctagcaataatgccaaagatcaatgtcggcaggtgcagaacgaggcggaagatgcgaagttcaggcaacccggacgcagcctggcctccgtcgcgcgtatgagcacagacgagtgtagcgaattccgcaattatattcgaaataacgagctcatttgtccacgcgagaatgatcctgtgcacggcgcagacggcaaattctacacaaacaaatgttacatgtgccgagctgtttttttgaccgaggcccttgagcgagccaaacttcaggaaaaaccttcacatgtgcgggcttctcaggaggaagactcccctgattctttttctagtctggactcagagatgtgtaaagattacagagtgttgccgaggatcggttacctttgccccaaggacttaaaaccagtgtgtggtgatgacgggcagacgtacaacaatccatgtatgctgtgccacgagaatctgattaggcagactaatacccatatccggtcaactgggaagtgtgaggaatcctccacgccaggcacgacagcagcgagcatgcctcctagtgacgaatag

SEQ ID NO: 240044 - DNA, 2751 bp, synthetic construct
  misc_feature 1..2751: note = Description of Artificial Sequence: Synthetic coding sequence
  source 1..2751: mol_type = other DNA
atgaagattgcgaccgtttcggtgctgctgccgttagctctatgtttgattcaggacgccgcttcaaagaacgaggatcaagagatgtgccatgagttccaagcgtttatgaaaaacggaaagttgttttgcccccaagacaagaaattcttccagtcgctcgatggcataatgttcatcaacaagtgcgccacgtgcaagatgattctggaaaaagaggctaaatcccagaagagagctagacatcttgctagagccccaaaggccacagcccctaccgagcttaactgtgatgacttcaagaaaggtgaacgggatggggattttatctgtccggactattatgaggccgtctgcggaacagacggcaagacctatgacaacaggtgcgccctatgcgctgagaacgccaagaccggcagccagataggagtgaagtctgaaggtgaatgcaagtctagcaaccccgagcaggacgtctgcagcgcctttcggccattcgtcagagatgggagattggggtgtaccagagaaaacgatccagttttgggcccagacggcaaaacccacggaaacaaatgtgcaatgtgcgctgaacttttcctgaaggaggccgagaatgctaagagagagggggaaactcggatcagaagaaatgctgagaaggatttttgcaaggagtatgaaaagcaggtacggaatggacgcctgttttgcacccgcgagtcagaccccgtccggggacctgatggcagaatgcacggcaacaaatgcgctttgtgtgcggaaattttcaaacagaggtttagtgaggagaattctaagactgatcaaaatttagggaaggccgaagaaaaaacaaaggttaagcgcgagatcgtcaagctgtgtagtcagtaccagaaccaggcaaagaatggaatccttttctgtacaagggagaacgatcctatacgcggacccgacggtaaaatgcatggcaacctttgcagcatgtgtcaggcctacttccaagcggagaacgaggagaagaaaaaagcagaggcgcgagcccgaaataaacgcgagagcggaaaggcaacctcttacgctgagctctgctccgagtatagaaaacttgtcaggaacgggaagctggcgtgtactagagaaaacgatcctatccagggaccagatggaaaggtgcacggaaacacatgcagtatgtgcgaagtcttttttcaggctgaagaagaagagaaaaaaaaaaaggaggggaaatccaggaataagcgccagtcaaagtcaacagcatcgtttgaggagttgtgctccgagtaccgcaaatcacgcaagaacggacggctgttttgcaccagggaaaatgatcccattcagggtcctgatggaaagatgcatggcaatacctgctctatgtgcgaagcgttcttccagcaagaagagcgagcgagggccaaagctaaacgcgaagcagctaaagaaatatgtagcgagttcagggaccaggtacgaaatggcaccctaatttgtacccgtgagcacaatcccgtgaggggccctgacggcaagatgcacggcaacaagtgtgcaatgtgtgcatccgtgttcaagttagaggaagaggagaagaagaatgataaagaggagaaaggcaaggtcgaagcggaaaaagtcaaaagggaggccgtgcaagaattatgctcagaatatcgacattacgtgcggaatggcagattgccctgcacccgagagaacgacccgatcgaagggctggatggtaagattcatggcaatacgtgctcgatgtgtgaggccttctttcaacaggaagccaaagagaaagagagggctgaaccacgggctaaggtgaagagggaggctgaaaaggagacctgcgacgagtttcgtcggctcttgcagaatggcaaactgttttgtactcgcgagaatgacccagtgcgcggtcccgacggtaagactcatgggaataagtgcgccatgtgcaaggcagtgtttcaaaaagagaacgaggagagaaaacggaaggaagaggaggatcagcggaacgccgctggtcacggaagctcaggcggaggcggagggaatacccaagatgaatgcgctgaatatcgagagcagatgaaaaacggcaggcttagttgtacgcgcgaatctgaccccgttcgagacgccgacggtaaatcctataacaatcagtgtacaatgtgcaaggccaaacttgaaagagaagctgagcgaaaaaatgagtacagccgttcacgctcgaatggtaccggctccgagtccggtaaggacacttgcgatgagtttcgatctcaaatgaagaatggaaagctgatctgtacaagggaatctgatcctgtccgtggcccagatggtaaaacccatgggaataagtgcaccatgtgtaaggaaaagctcgagcgtgaggcagccgagaagaagaagaaggaggacgaagatcgatcaaatacaggcgaacgctcaaataccggcgagagaagcaacgataaagaggacctgtgccgcgagtttcggagcatgcagaggaatggcaagttaatttgcacaagggagaataatccagttcgaggaccatatggcaagatgcatatcaacaagtgcgccatgtgccagtctatttttgacagagaggccaacgaaagaaaaaagaaggacgaggagaaaagctcatcaaagccgagtaacaatgctaaggttatctattag

SEQ ID NO: 240045 - DNA, 261 bp, synthetic construct
  misc_feature 1..261: note = Description of Artificial Sequence: Synthetic coding sequence
  source 1..261: mol_type = other DNA
atgcgcgctacggccatcgtcctgctgcttgccttgactttggctactatgttctctatcgagtgtgctaagcagaccaaacagatggtcgactgttctcactacaaaaaactgccccctggccagcaaagattctgtcaccacatgtacgacccgatctgtggatcagacgggaagacatacaagaacgattgttttttctgctctaaagttaagaagacggatggaacactgaaattcgtccatttcggcaagtgctag

SEQ ID NO: 240046 - DNA, 759 bp, synthetic construct
  misc_feature 1..759: note = Description of Artificial Sequence: Synthetic coding sequence
  source 1..759: mol_type = other DNA
atggcccagctttgtggcttgcgaagatctagagctttcctggcccttcttggtagcctcctgttgtccggagtgctggcggcagaccgggaaaggtccattcatgatttttgtctggtgtctaaagtagtggggcgatgccgagcatccatgccacgttggtggtacaatgtgacagacggctcctgccagctgttcgtctatgggggatgtgatggtaatagtaataactatcttactaaagaagaatgtctaaaaaaatgcgccacggtgacagagaacgccacgggagatctagccacgagtcgaaacgccgcagactcctccgtgcctagcgcaccaaggaggcaggactccgaggatcacagttctgacatgtttaattacgaggagtactgcactgccaacgccgtaacagggccttgcagagctagctttccccgatggtactttgatgtcgaacgcaattcttgtaataactttatctatgggggttgccgcggaaacaagaactcgtacagatctgaagaggcatgtatgctgcgttgcttcagacagcaggaaaacccaccattgccgcttggcagcaaggtggtggtgttggcaggcctcttcgtgatggtgcttatcctgtttctgggcgcatccatggtttatcttatacgggttgcgcgtaggaatcaggaaagagccctgcgcaccgtgtggtcctccggggacgataaggaacaactggtcaagaatacgtacgtgctgtag

SEQ ID NO: 240047 - DNA, 588 bp, synthetic construct
  misc_feature 1..588: note = Description of Artificial Sequence: Synthetic coding sequence
  source 1..588: mol_type = other DNA
atggcccaactgtgcggccttaggcgcagtagagccttcttggcactcctagggtccttgctcttaagcggcgtactggccgcagaccgagagcgctcaattcacgagaacgcgactggtgacctggccacatcacgcaacgcagccgattcctccgtgccatcagcccctcggagacaggactccgaggatcatagctccgacatgttcaactacgaagaatattgcacagccaacgccgtaacgggcccttgtagggcctctttcccgcgatggtacttcgacgtggaaaggaattcgtgcaataacttcatctatgggggttgtaggggtaataagaattcttataggtcggaagaggcctgcatgctgcgctgttttaggcagcaagagaatccccctctgccactcgggtcgaaggtcgtggttttggccggactgtttgttatggtcctaatactcttcctgggagcatccatggtgtatctcatccgggtggccaggaggaaccaagagcgcgcattgaggacggtgtggagttcaggcgatgataaggaacagctcgtgaaaaacacctacgtgctctag

SEQ ID NO: 240048 - DNA, 1299 bp, synthetic construct
  misc_feature 1..1299: note = Description of Artificial Sequence: Synthetic coding sequence
  source 1..1299: mol_type = other DNA
atgagcgataagctgccttataaggtggccgacatcggactcgctgcctgggggagaaaagcccttgatattgccgagaatgagatgcctggcctgatgcggatgcgcgagagatacagcgcctcaaaaccgttgaagggcgcacggattgcgggatgtctgcacatgaccgtcgaaaccgccgtgctgattgaaactctggtgaccctgggagccgaggtgcagtggtccagctgtaatatattctcaactcaggatcacgcagctgccgctattgccaaggctggtatccccgtatacgcatggaaaggtgagactgacgaggaatatctctggtgtatagagcaaaccttgtacttcaaggacgggcctctgaatatgattctagacgatggcggtgatctcaccaatctcatacataccaagtatcctcagctgttgcccggaatccggggaatttccgaggagaccaccacgggtgtacataacctttacaaaatgatggcgaacggtatcctgaaggtgcccgcaattaacgttaacgactctgtgacgaagagtaaatttgacaacctgtatggatgccgggagtctctaatcgacggaataaaaagagccacagacgtcatgatcgccggtaaagtcgctgtggtcgccggttatggagacgttgggaagggttgcgctcaggcgttacggggtttcggggcacgagttatcatcactgaaattgatccaataaacgcccttcaagccgctatggaaggatacgaggttacgactatggacgaagcatgccaggagggtaatatctttgtgaccactacagggtgcattgatatcatcctgggacgtcactttgaacagatgaaagatgatgctatcgtgtgtaatatcggccattttgacgtcgaaatcgacgttaaatggttaaacgagaacgccgtggagaaagtcaatattaagccccaggttgaccgttaccgtctgaaaaatggtcggaggattattctgcttgccgagggcagactggttaacctgggctgtgccatgggccacccttcctttgtcatgtccaactcgtttacaaaccaagtgatggcccagatagaactctggacccacccagacaagtatcccgtgggcgtgcactttctgcctaaaaagttggacgaagcggttgcagaagcccaccttgggaagctcaacgtgaaactcactaaactaacagagaaacaggcccaatatctgggcatgtcatgtgacggcccttttaagccagaccactatcggtattag

SEQ ID NO: 240049 - DNA, 1023 bp, synthetic construct
  misc_feature 1..1023: note = Description of Artificial Sequence: Synthetic coding sequence
  source 1..1023: mol_type = other DNA
atgtgtgcccaatactgcatatcatttgcggatgtggagaaggcccatattaatatcagggatagtatccacttgacacccgtgctgacatcaagcatcctgaaccagttgaccggacgtaatctcttttttaagtgcgaactgtttcagaaaaccgggtcctttaagatcaggggcgctcttaatgcagtgagatccctagtgcccgacgcccttgagcgaaagccaaaggcggtagttacgcattcctccggcaatcacgggcaggcccttacctacgcagctaaactggaaggcatcccggcttacatcgtcgtaccccaaaccgcacctgattgtaagaaactggcgattcaggcatacggcgctagcattgtttattgtgagccatccgacgagtctagagaaaatgttgctaagcgggtgacagaagaaacggaaggtatcatggtgcacccaaaccaggagcccgctgtcatagccggtcaaggtacaattgccctcgaggttctgaaccaagtccccttggtcgatgcccttgtcgtgccagtaggcggagggggaatgctggccggaattgccattactgtgaaggctctgaaaccgagtgtgaaggtgtacgcagccgagccttccaacgcagatgactgctaccagtctaaattgaaggggaaactcatgcccaacctgtacccacctgagacaattgcagatggtgtgaaatccagcatcggcctcaacacgtggcctataatcagggacctggtggacgacatattcaccgttactgaagacgagatcaagtgcgctacacaactggtctgggaaagaatgaaactgttgatagagccaacagccggtgtgggagtggccgcagttctcagccaacattttcaaacagtctcgccagaagttaagaacatttgcatcgttctttccggaggcaatgtcgatctgacaagctctataacctgggtcaaacaagccgaacgcccagcttcttaccagtcagtttcggtgtag

SEQ ID NO: 240050 - DNA, 1638 bp, synthetic construct
  misc_feature 1..1638: note = Description of Artificial Sequence: Synthetic coding sequence
  source 1..1638: mol_type = other DNA
atggccgagccttcagggagtcccgtccatgtgcaattgccccagcaggcagcacctgtgaccgccgctgccgctgctgcacccgcagccgcaacggctgctcccgctcctgcagcacccgcagccccagctcctgcccctgcacccgctgcccaggccgttgggtggccgatctgtagggacgcctacgaactgcaggaagttatagggagtggcgcaactgcagttgtgcaggcagctctctgcaaaccacggcaggaacgagtcgcaataaagcggatcaatctggagaagtgtcagacgagcatggatgagctactgaaagagattcaagctatgtcgcagtgctcacatccaaatgttgtgacctactacacctcttttgtggttaaggacgagctatggttggttatgaaactgcttagcggtgggtccatgctggacatcattaagtatatcgtcaaccgcggagagcataaaaacggagttctggaggaagccattattgctaccatcctgaaggaagtgctggaagggctggattacttgcataggaacggccagatacatcgggacctcaaggcaggtaatatcttgctgggagaggacggctcagtacaaattgctgactttggcgtgagcgcttttctggctactgggggagatgtaactcggaacaaagtgcggaagacttttgtgggcactccgtgctggatggctcccgaggttatggagcaggtgagggggtatgactttaaggccgatatgtggtcctttggaatcaccgctatcgaactggcaacaggagcagcaccctaccataagtacccgcctatgaaagtgctgatgcttacattgcaaaacgatccgccaacccttgagacaggtgttgaggataaggaaatgatgaagaaatacggcaaaagcttccgcaagctcctgtctctgtgcctccagaaggatccttccaaacggcctacagcagctgaattgctcaaatgcaagttttttcaaaaggccaaaaaccgagagtaccttatcgagaagctgttgacccgcacaccagatatcgcccagcgagcaaaaaaggtccggcgagtgcccggaagctctggccatctccacaaaactgaggacggcgactgggaatggtccgacgacgaaatggatgagaaaagcgaggaaggaaaggcagcattttctcaagagaagtcaaggcgggtcaaagaggagaatccagagatcgctgtcagcgctagcacaattcccgagcagattcagtccctgagcgtgcatgattcgcaggggccacccaacgcaaacgaggactatcgtgaagcttcatcttgcgctgtgaacttggtcttgcggctccgtaacagccgtaaggagctgaatgatataagattcgaattcacgcccggacgtgacaccgctgacggcgtctctcaagagctattctctgcgggactggttgatggccacgatgttgtgatcgtagccgcaaacctgcagaaaatcgtggatgatccaaaagccctcaaaacacttacatttaagctcgcttcagggtgcgatggctccgagattccagacgaggtgaagctgattggcttcgctcagctgagtgtttcctag

SEQ ID NO: 240051 - DNA, 2715 bp, synthetic construct
  misc_feature 1..2715: note = Description of Artificial Sequence: Synthetic coding sequence
  source 1..2715: mol_type = other DNA
atggatgcgggattttttcgaggaacgtcagcagaacaggataatagattctcaaacaaacagaagaaacttttgaaacagctcaaattcgccgaatgcctggaaaaaaaggtcgacatgtcaaaagtgaatctagaagtaattaagccctggattacaaaacgcgtcaccgagatcttaggttttgaagatgacgtcgtgatagagttcatttttaaccagttggaagtgaagaatcctgacagcaaaatgatgcagatcaatttgactggtttcctgaacgggaaaaatgccagagaattcatgggggagttatggccacttttgctgagtgcccaggagaacattgctggtataccctccgccttcctagagttgaagaaagaggagattaagcagcggcagatcgaacaggagaagctggctagcatgaagaaacaggacgaggacaaagataaacgggacaaggaggagaaggaatcaagccgtgagaagcgagagaggagtcgcagccctcggagacggaaaagccgtagtccctccccaaggcggagaagctcccccgtacgaagagaaaggaagcgctctcactcacggagccccaggcatcgaactaagtcccggagcccaagcccagctcctgagaagaaggaaaagacgcctgaattacccgaacctagcgtgaaggtgaaagagccttccgtccaggaggcaacctccacctcggatatactcaaggtacctaagccggaaccaattcctgagccaaaggaaccctccccagagaagaacagcaagaaagaaaaggaaaaggagaaaactcggccacggagtaggagtagaagtaaaagccgcagtagaacccggagccgaagccccagccacacgcggcctcgccgacggcataggtccaggagccggtcctacagtcctcgaaggagaccgtccccccgtcgacgaccctctccacgacgccgaacaccacccaggcgcatgccacctccccctagacatcggaggtcgcggtcccccgtgcgcagacgcagacgctccagtgcctctctgagcggttcgtccagttcttcctcatcgtccaggagtaggagtcctccaaagaaacctccaaaacgcacttcatccccccctcggaagacgcgccgtttgtctccttctgcctcccccccacgcaggcggcatcgaccatcgccccctgccacccccccacccaagacgcggcacagtccaacccctcaacaatcgaataggactcgtaagtcccgggtgagtgttagtccaggccgtacatccggtaaggtcaccaaacacaaaggaacagagaagagggaaagcccctctcccgctccaaagcccagaaaggttgagctcagtgaaagcgaggaggataaagggggtaagatggcagctgctgattctgttcaacagcgcaggcagtataggcgccaaaatcaacagtcaagcagcgattctggcagttccagttccagcgaggatgagagacccaaacggtctcacgtgaagaacggcgaagtcggtagacgccgtaggcactctcccagccgaagcgcttctccaagcccgcgtaagagacagaaggaaacgtccccacggggtagaagacgacgctcaccaagccccccacctaccagacgtcggagaagtccttcacccgcacctccccctcgaaggcgccgtacacccacccctccacccaggcgccgaactccctctccacctccccgacgtcggagcccgtcaccaagaagatacagccctcccatccagcgtcgttattccccatccccccctcctaaaagacgaaccgcaagcccccctccacctcccaagcgtagagcgagcccgagtcccccacctaaaaggagggtatcccattctcctccaccaaaacagcggagcagcccggtcaccaagaggcgcagcccaagtctgtcttccaaacacaggaagggcagctcaccaagtcggtcaactagagaggcaaggagcccgcagcctaacaagcgacacagccccagccccagacctcgcgctccccagacctcgtcaagtccccctcctgtgcgtcgtggtgctagctcatccccccagcgcaggcagagcccctctcccagcactcggcctatccgacgcgtgtctagaaccccagaaccgaaaaagattaagaaggctgcctcgccctcacctcagtctgtgagacgggtgtcaagtagcagaagcgtgagcggatcccctgagcccgcagcaaagaaacctcctgccccaccgtctcctgttcaaagccagtctcccagcacaaattggtctccagccgtccctgtcaagaaagccaagagcccaacaccctcgcccagcccacctcgtaactccgaccaagagggcggaggtaagaaaaagaagaagaaaaaagataaaaaacacaaaaaggataagaaacataaaaagcacaaaaaacacaagaaggagaaggccgttgccgctgctgccgctgccgctgtcacaccagccgcaatcgctgccgcaactacgacgctggcgcaggaagagccggtggccgcaccggagccaaagaaagagactgagtctgaagcggaggataacctcgacgatctggaaaagcacctgagagaaaaggccctcagatcaatgagaaaggctcaggtttcacctcagtcatag

SEQ ID NO: 240052 - DNA, 2742 bp, synthetic construct
  misc_feature 1..2742: note = Description of Artificial Sequence: Synthetic coding sequence
  source 1..2742: mol_type = other DNA
atggatgccggattctttcgcggaacgtcagctgagcaagacaacagattcagtaacaagcagaagaaactgcttaaacagcttaaattcgctgaatgcttggagaaaaaggtagatatgagcaaagttaacttggaggttattaagccatggattactaagagggtcacggaaattcttggcttcgaagatgacgtcgtaatcgaatttatttttaatcagctggaggtgaaaaaccctgattccaaaatgatgcagatcaaccttactggttttctgaatggtaagaatgcccgtgaatttatgggcgaactgtggcctctcctgctgtccgctcaggagaacatcgcagggattcccagcgcgttcctggaactaaagaaagaggaaatcaagcagcgacagatagagcaggaaaaattagcctccatgaagaaacaggacgaagataaagacaaacgcgacaaggaggagaaagagtcttctcgtgagaagagagaacgaagcaggagtccacggaggcgaaaaagtcgatctcctagtccacggagaagaagctctccggtgcgcagggagagaaaaagatcccattcacgcagtcccagacaccgaaccaagagtagaagcccgagtcctgctcccgagaagaaggagaaaacacctgagctgccagaaccctctgtcaaggtaaaggagccttcagtgcaagaggctacatcgacgagcgacatactgaaggtgcctaaacccgaaccaatccctgagcctaaggaacccagtcctgagaagaactctaagaaagagaaagagaaggaaaagacaaggcctcgctcccgttctaggtccaagtcacgcagccgaacaaggagcaggtccccatcccataccaggcccagaaggagacacaggagcaggtcacggaggaggccctctcctcgcaggagaccctccccaagaagacgcacacctcccaggaggatgccaccgcctccaaggcaccggcgatccaggtcaccggtccggaggaggagacggagctccgccagcctgtcaggcagctccagctcatcttcttcaagtcgatctaggtcccccccaaagaagccaccgaagcgcacctcttctcctccacgaaagactcggcgattgtcaccatccgcatctccccctaggaggcggcataggccctcacctcccgcaaccccaccacctaaaacccgacatagccctacgccgcagcagagcaatagaacaaggaaaagccgtgtgagcgtgtccccaggccgtaccagtggcaaagttaccaaacacaaaggtaccgagaaaagagaatctcctagcccagcacccaagcctcgaaaggttgaacttagtgagtccgaagaggataaaggtggaaagatggctgccgctgactccgtgcagcagcgtagacagtataggagacagaatcagcagagcagctccgattcaggatccagtagttctagcgaggatgaaaggcctaagagatcacacgtgaagaacggagaggtgggacggaggcgaaggcacagcccctccaggtccgcaagccctagtccacgtaaaagacagaaagagactagtccaagaatgcagatgggcaagcggtggcagtctcctgtcacaaagagtggacggaggagaaggtcccccagtcccccacccacccggagacggagaagccccagcccagccccacctccccgacggaggaggacgcccaccccaccaccaagaagaaggacaccaagtcctccccctaggcgtcgttctccatccccaaggcggtattctccacctattcagagacggtatagccctagtcccccacccaagcggagaactgcttcccctccgcctcccccaaagagacgggctagccccagcccccctccaaagaggagggtttcacacagccctccccctaagcagcgttcatcacccgtcacgaagcgcaggagcccgagcctgtcttcaaaacaccggaaaggcagtagcccttctagatcaaccagggaggccagaagccctcagcctaacaaacgccacagcccttctcccaggccaagggcgcctcaaacctcctcttcccctccacctgttcggaggggcgcttcaagtagtccccagcggaggcagagcccatcgccatcgacgcgccctattagacgggtgtctaggactccggaacctaaaaagatcaagaaagccgctagcccatctccacagtcagtgcggagagtgtcctcatccaggtccgtcagtggctccccggaacccgctgcaaagaagcctcccgctccaccaagccccgtgcagtcccagagcccaagtaccaactggtcgcccgcagtccctgtaaagaaggctaagagcccaaccccttcaccctctcctccccgtaactctgatcaagaggggggaggaaaaaaaaaaaaaaagaagaaagataagaagcacaagaaagacaagaaacacaaaaaacataaaaagcataagaaagaaaaggctgtggctgcagccgctgccgcagccgtgacaccagcagctatcgcggcagccacaaccaccttggctcaagaggaacccgtggcggcacctgagcccaaaaaggagaccgagagtgaggcagaagataacctagatgacctggaaaagcacctgagggaaaaggcactgcgctctatgcgcaaagcacaggtatccccccagtcatag

SEQ ID NO: 240053 - DNA, 2751 bp, synthetic construct
  misc_feature 1..2751: note = Description of Artificial Sequence: Synthetic coding sequence
  source 1..2751: mol_type = other DNA
atggacgccggtttctttcgtggcaccagtgccgagcaggataacagatttagcaacaagcagaagaagctgctaaagcagctgaagtttgccgaatgcttggagaagaaggtggacatgagcaaggtaaatctggaagtgataaaaccatggatcaccaagcgggttaccgagattctggggtttgaagatgacgtggtcatcgagttcatctttaaccagctagaggtcaagaatcctgacagcaaaatgatgcagattaacctgacgggatttctaaacggaaagaacgcccgagagttcatgggtgagctgtggccgctgctgttaagtgcccaagagaacatcgcaggcatcccctctgcatttttagaactgaaaaaggaagaaattaagcaacgtcagatcgagcaggaaaaactggcctctatgaaaaaacaggatgaggataaggataaacgcgacaaggaggagaaagagtcctcgcgggagaagagagaaaggtcccggtcccccaggagaagaaaatctagatccccctcacctcgcagaagatcatctcctgtgcgcagggaacgcaagcggagccacagccggtcacctcgtcacagaacaaaatctaggtctcccagtcctgctcccgaaaaaaaggagaagacacccgagctacccgaacctagcgtgaaagtcaaagaaccatccgttcaagaggccacttccacaagcgatatcctgaaagtgcccaaacccgaacctattccggagcctaaggaaccttcccctgagaaaaacagtaagaaggagaaggagaaagaaaaaacgcggcctagaagcaggagccggtcaaagtcacgcagtaggacacgctctcgtagccctagccatactaggccacgcaggcggcatcgatctcgctccagatcttacagccctcggagacgtccctctccgagaaggaggccctcaccacgcaggcggacgcctccaagaaggatgcccccaccaccacggcatcggaggtctcgttcacccgtaagacggcgtcggcgatccagtgcttcgctaagtggtagctcttcttcgagttctagttcacgaagccgcagcccacccaaaaagccacccaagagaacctcctcccctcctaggaagacccgaaggctgtcccctagcgcaagcccacctcgcagaagacaccgcccatctccacccgctaccccaccccctaaaacaaggcattccccaacaccacagcagtcgaatcggactagaaagtcacgcgtctccgtctctcctgggaggacatcagttaccaaacacaaggggacggagaagagagaaagtccttctccagccccaaagcctaggaaagtggaattgtcagaatcagaggaggacaagggtggaaagatggccgcagccgattctgtccagcaacggaggcaatacaggcgtcagaatcagcaaagctcttctgattccggctctagctcttccagcgaagatgagcgccctaaacggtcccatgtcaaaaacggggaagttggcagacggaggagacacagtccctccagaagcgcaagtccatctcctaggaaacgccagaaggagacctctccacgaatgcagatggggaagcggtggcagagcccggttacaaagagtggaaggagaagacgatctccttctccaccccctacccggaggaggagatcgccctcacccgcaccaccacccaggcgcagacgcacccccactcctccaccgaggaggaggacccccagcccaccaccccgtagacgcagcccctctccgaggcggtatagccccccaattcagagacgctacagccccagtccaccacccaagaggcggactgcctcgccccctccgccacccaaaaggcgcgcttccccttcccccccacctaagcgccgtgtgtcccacagccctccacccaagcaacgatcaagtcccgtgaccaaacgcaggtccccgagtctgtcatccaagcacaggaaaggtagctcccctagtcgctccacacgagaggcccgaagcccgcagcctaataagaggcactcaccgtcccctagacccagggctccacagacgagctcttcccccccacccgtcagacggggagcaagcagtagtcctcagaggagacagtccccatccccaagcacccgcccaataaggcgggtgtcaaggactccagagcccaagaagatcaaaaaggctgcttcaccaagcccacaatcagtgcgcagggttagctcttcccggagcgtatctggaagccccgagcccgcagctaagaaaccaccagctccaccctccccagtccagtcccaatcacccagtactaactggtccccggctgttccagtaaaaaaggccaagagcccaactccaagccccagccccccaagaaacagcgaccaggaaggcggtgggaaaaagaagaagaagaagaaagacaaaaaacataaaaaggacaagaaacacaagaaacacaaaaaacataagaaagaaaaggcagtggcggcagccgcagcagccgcagttacaccagccgctattgccgcagcaaccaccacgcttgcccaggaagagcccgtggctgcccctgagccaaaaaaagaaacagagagtgaggcagaggacaacctagacgacctggagaaacaccttcgggagaaggctctgcgcagtatgcgtaaggcgcaagtgtctccccagtcttag

SEQ ID NO: 240054 - DNA, 957 bp, synthetic construct
  misc_feature 1..957: note = Description of Artificial Sequence: Synthetic coding sequence
  source 1..957: mol_type = other DNA
atgggtgaattatggccactgctgctgagcgcacaggagaatattgcaggtatcccatcggcatttctcgagctcaaaaaggaggaaatcaagcagcgccaaatagagcaggagaagctcgccagcatgaagaagcaggacgaggacaaggacaagagggacaaggaggagaaggagtcctctcgcgaaaagcgggagaggagcagaagtcctcgcaggacgaagtcccgtagcccctcacctgctccagagaaaaaagagaaaacccctgagctgcccgagcctagcgttaaggttaaagaaccatccgttcaggaggccacatcaacttcagacatactgaaagttcctaagcctgagccaattccagaacctaaggagccgtcgccagaaaaaaattcaaagaaggaaaaggagaaggaaaaaactcggcctcgtagcagaagtcggagtaagtctcgtagtagaaccagaagccgcagtccgagtcacacaaggcccagacgacgacatagaagcaggtcacgcagttattctccccgaaggcgcccttcccctaggaggagacccagcccacgacggcgaacccctcctaggcgcatgcctccgccacccagacaccgacgatctcgaagccccgtgcggaggttctcggggattctgccgcctaaggttaactctgctgaagaggacgtgcgccagcacccctgccttggcgttgcccaccatcccctgcatctggtccatgggcatcatcagcgtagtcttccacgaggacaccctgcacctttgggcaaactcgttgggtatttattacaacaggtgctccagggggaaggaacaggacatcatctgctgcagttgcatcatcccaagttaggtattcccctccacccatcttcacagacagtacaggagaaggtcgtgtttttgtgtcttcagggagaacttcagtag

SEQ ID NO: 240055 - DNA, 8258 bp, synthetic construct
  misc_feature 1..8258: note = Description of Artificial Sequence: Synthetic coding sequence
  source 1..8258: mol_type = other DNA
atgtacaacggcatcgggctaccaaccccacgcggttcaggaactaatggctacgtacagaggaacctctctctcgtgcgcggaaggagaggggagcgccctgactataagggagaggaggagctgaggcgcctggaggcagccctggttaaacggcctaatccggacatattggatcatgaaagaaagcgacgtgtcgagctgcgttgtttggagctcgaagagatgatggaggagcaaggttatgaagagcaacagatacaggagaaagttgctactttcagactgatgctgttggaaaaagacgtcaacccaggaggaaaggaggagacccccggacagcgtccagcagtgactgagacacatcagctagcagagctgaacgaaaagaaaaatgagcgattgcgagccgcttttggaattagtgattcctatgtggatggcagttcatttgacccgcagcgcagggccagagaagcaaagcagccggcacccgagccccctaaaccctattctttagtgcgtgaaagcagcagcagcaggagccccactcctaagcagaagaagaaaaagaaaaagaaagaccgcggaaggagaagcgagagtagctcacctagaagagagaggaagaagagctctaagaaaaaaaagcatagatctgagtctgagtccaagaagaggaaacaccgcagccctactcccaagtctaagcgcaagagcaaggataagaaaaggaagagatccaggtctaccactccagcacccaagtcccgccgagcacaccgcagcactagtgcagacagcgcctcttcctcggatacctcacggtcaaggtcccgcagtgctgcggctaagacccacacaacggccctggcaggacgaagccccagccctgctagcggcagacggggagaaggcgatgcaccattctcggagcccggaaccacatctacccagcgtccgtcctccccggaaactgccactaaacaaccgtccagcccatacgaggataaggataaggataagaaagagaagagcgccaccagacctagcccctcccctgagagaagcagtactggccctgaacccccagcaccaacccctctgctggctgagcgccacggcggaagtcctcagcctctggctaccactccactatcgcaggagcccgtgaatcccccttccgaggcttcaccgactagagaccgctctcctccaaagtctccagagaaattgcctcaatcctcgtcctctgagagctcacctccgtctccccagcctactaaagtctccagacatgcttctagcagtccagaatcacccaagccagctcccgcaccaggatcacaccgcgagatttcttcctcgcccacgtcgaaaaaccggtcccatggcagggccaagagagacaagagtcactcccatactccatccagacgcatgggccgatctaggtctcctgcgactgcaaagcgcggacggagccggtccagaacccccactaagagggggcatagtaggtcccggagtccacaatggcgtaggtcaagatcagcacagcggtggggccgatcaagatctccacagcggaggggtagatcacgcagcccacagcgccctggttggtcccgcagcaggaacactcaacggaggggacggtcacggtctgccaggagggggagatcccactcccggagccctgccacccgcggacgcagtagaagtcggacacccgcacggcgtggaagatcaagatcaagaactccagcccgacgccgaagccggtctaggacccccactcgaagaaggtcacgctcacgcactcccgcacgcagagggcgaagcaggagtagaactcctgctcgcagacgcagccgcacaagatctcccgttagaagacgctccaggtctcgaagtcccgctagacggtcaggcaggtccaggtctcgaacacccgcacgcagggggagatcaaggtcccgcactcctgctcggaggggtagatctcgcagtcgcacccccgcacgtaggtctggcagatcccgcagccgcacccccgcaaggcggggaaggagcagaagtcggactccccgacgaggcagaagcaggtcaaggagccttgtgcggagagggagaagccacagccggaccccacaaaggcggggacgtagcggaagctccagcgaaagaaagaacaaaagcagaacgagccagcggcgttcacggtctaacagttctcccgagatgaagaaaagccgcatttccagccggaggagtcgtagcctgtcgagcccgagatctaaggctaaatcgcgcctgtcactgaggcggagtttgtccgggagcagcccatgccccaagcagaagtcgcaaacccctccacgtcgcagcaggagtggctctagccagcccaaagccaagtcccgcactccccctagacggagtcggtcgtcctcctcgccgccacctaagcagaagtctaagaccccctcaaggcagtcacacagctcaagcagcccacaccctaaagtaaaatccgggaccccgccacggcagggcagtattacgtcaccccaggccaatgaacaatctgtaactcctcaacgacggtcctgttttgagtcctcacccgaccctgagctgaaatccaggaccccaagtaggcactcatgctctggttcttcgccccctagagtcaaatcttctaccccacctagacagagtccaagcagatcttcatcccctcaacctaaagtgaaagcaataataagtcccagacagcgaagtcacagtggtagctccagtccgagtccaagcagggttacttcaagaacaacacccaggcggagccgaagtgtcagtccgtgctccaatgttgagagccgactgctgcccaggtactctcactcgggctcatctagcccagacacaaaggttaagcccgagactccacctcgacagtcacacagcggctctatatctccgtaccctaaggtgaaggcccagacaccccctggcccttcacttagcggttctaaaagcccatgtccccaggagaagagcaaagacagcttggtccaatcgtgccccggatctctgtctctatgcgctggagtgaaatccagcactccgccaggagaatcgtactttggagtgagctcgctccaactgaaaggccagtctcagactagcccagaccatcggagcgatacatcgagccctgaagttaggcagtctcacagtgaatcaccgtctctgcaaagtaagtcccagacgagccccaaaggaggccgatctagaagttcttccccagttacagaacttgcgtcacggagcccaattaggcaagaccgcggtgagttcagcgcctcacctatgctgaaatcaggaatgtcacccgagcagtcacgctttcagagcgacagtagttcctaccctaccgtagattctaacagtctcttaggccagagcaggctggagaccgctgagtcaaaagaaaaaatggctctgcctccccaagaggacgccaccgcaagcccccctcggcagaaggacaagtttagtccctttcccgttcaggatcgcccagaatcctctctggtgtttaaagatacactccggaccccacccagggagcggtctggcgctgggtcgtcacccgagaccaaggagcagaacagcgccttacccacttcaagccaggatgaggaattgatggaggtggtggagaaatcggaagaaccagccggacaaatcctgtcccacctatcaagtgaactgaaagagatgagtaccagtaattttgagagctccccggaagtagaagagagacccgctgtgtctctcactttggatcagagccaatcccaggcaagcctggaggccgtcgaggtgcccagcatggccagctcttggggcggaccacatttcagtcccgagcacaaagaactgtccaactctccgcttagggagaactccttcggcagccccctcgaatttcgcaactctggcccattgggaacggagatgaatacagggttctcctccgaagttaaagaggatctcaacggaccctttctgaaccagctggagacagatccatcactggatatgaaggaacagtctaccagatcctctgggcactctagttcggagttgtcccccgatgcggttgaaaaagctggcatgtcttctaaccagtcaattagtagtcctgttctggatgctgttccccgaactccttcgcgagaaagaagttctagcgctagcagtcctgagatgaaagacggcctgcctagaacaccctctagacgttcgcggagcggctcaagcccagggttgcgcgacgggagtggcacaccaagccggcacagccttagcggatccagccctggaatgaaagatattcctagaaccccaagtaggggacggtcagagtgtgattcttctcccgaacctaaggctcttccccagacaccacgcccaaggagccggagcccatcttctccagagttaaacaataagtgtctgactcctcaaagggagcgatctggtagcgagtccagcgtggaccaaaagactgtagcccgaaccccattgggacagagaagtagatcagggtcatctcaggagttggatgtgaaaccgtcggcatccccacaggaacgctctgagtccgactcctccccggactcaaaagccaagacccggacccccctgaggcagcggagccgtagcgggagtagcccagaagtcgatagtaagtcacgtctgagtccgcgaaggtctagaagcgggagctctccagaagttaaagataagcccagagctgcacctagagcacaaagcggaagcgactcttcccccgagcctaaagctccggcaccccgtgccttgcccaggcgttctagaagcggcagtagctctaagggaaggggacccagtccggaggggtcttcctccactgaatcgtcgccggaacaccctcctaagtcacgcacagccagacgcggatcgaggagctccccagagccaaaaaccaagagccggactccaccgaggcggaggagttctagatcttctcccgagttgacgaggaaagcccgattatcgcgtcgctccaggagtgcctcatccagtcccgagacaagaagcaggaccccgccacgtcaccgacgttcgccttcagtgagcagccccgagccagccgaaaaatcaaggagctcacggaggaggaggtctgcatcctccccacgtaccaaaaccacctccagaagggggagaagtccaagccctaagcctagaggcttacaaagatctagaagccgatcaaggagggagaagaccaggacaaccagacggagggataggtcggggagcagccagtctacatctcggagacgtcagcggtccagaagtcgctccagggtcacccgcagaagacgaggcggaagtgggtaccactcaaggtctccagctagacaggagagctcccggacttcaagccggaggcgacggggtcggtctcgaacccccccaaccagtcgtaagcggtccaggtcaagaacatcacccgctccgtggaaacggtcaagatccagggcgtccccagcaacccatcggaggagcagatcccgcacaccattgatctccaggcggaggtcccgcagcaggactagtcccgtcagcaggcggcgtagccgtagcaggaccagtgtgactaggcgcaggagcagatctagagctagtcccgtgtcccgcagacggtctaggagcaggacgcctcccgttacaagaagaaggagccggtctagaacccctaccacccgaaggcgatctaggagcaggaccccccctgtgacgcgcagaaggtccagaagcaggacaccaccggtcaccagaagaaggtcacgatcccggacatctcccattacacgaagaaggtctcgtagtcggactagccctgttacacggagacgatctcgaagtcggaccagccctgtgaccagacgccgtagtcgttccaggacgtcaccggttactaggcgccgatcacgaagtcgcacaccacctgccatcagacggcgatccagaagccggaccccacttctgcctcgaaagcgatctcgcagcagaagcccactggctatcagacgccgatctagaagcaggacaccgcgaacagccaggggaaagaggtccctgactcgctccccccctgcaattagaaggaggagcgcctcaggatccagctccgatagatccagatctgctacacctccagccacgcgtaaccactccggctcgcgtacacctcccgttgccttgaattctagccggatgtcttgtttcagccggccttctatgtcaccaacacctcttgatcgatgtcgcagccccggtatgctagagccactgggatcctccagaacaccaatgtctgtgctgcagcaggccggtggttcaatgatggacggcccaggaccccgaattcctgaccatcaacggacctccgttcccgagaatcacgctcagtccaggattgcgttagccttgacagccatcagtcttggaacagcaaggccccctccttcaatgtctgccgctggccttgcagccaggatgagccaagtaccggctcctgttccactgatgtcactcagaacagcacccgcagccaatttagcaagcagaattcctgcagcctccgccgctgctatgaatttggcttccgccaggacgcctgccatacctactgctgtcaatctggccgatagccgaaccccagccgctgccgctgcaatgaatttggctagtcctcgcacagcagtggcgccttcagccgtgaacctggcagaccctaggactccgacagcacctgcggtcaatctggcaggtgccagaaccccagcagccctcgccgcacttagtcttaccggaagcggcacaccccctacagccgctaattatccttcctcaagccggacaccacaggcccctgctagtgcgaaccttgtgggacctaggtcagcccatgctaccgcccctgtgaacattgctggctctaggaccgccgctgctcttgcccctgcttccctgaccagcgctcgcatggcgccagcacttagcggtgcgaatttgacatcccccagggttcccctgagcgcctacgaacgcgtttcaggccgtacgagccctcctctattggaccgtgccagatcaaggactcctccgtcagccccatctcagagcaggatgacaagcgaacgcgcaccttctccatcatcccgcatgggtcaggctccgtcccagtcactgctgccccctgcacaggatcaacccaggtcccccgtcccctctgcttttagcgaccagtcgcggtgcctgatagcacagactacacccgtggcaggatctcagagcctcagcagcggcgctgtggctactaccacatcgtccgcaggtgaccataacggcatgctgtctgtgccagcacccggtgtcccccacagcgatgtcggggaaccacctgctagcacaggtgcccagcagccctctgcccttgcagccctccagcccgctaaggaacgtaggagttcatcttcttcttcaagctcttcctccagctcctccagctcttcctcctctagcagttcttcttcatccagtgggagtagtagctccgacagcgaaggtagctctttgcccgtgcaacctgaggtagcgctaaaacgtgtcccttctccaactcccgctccaaaggaggcagttcgagaaggtaggccaccagagcccaccccagcgaaaagaaagcgcaggtccagctcaagctcttcgtcatccagctcaagttcttcatcatcctcaagctctagctcgtcaagctcctcaagtagctcttctagttcatcatccagttcctcctctagcagcagctctagctctccctctcccgcaaagcctgggccacaggcactacctaagcccgcttctcccaaaaaacctccgccaggtgaacgccgatcccgaagccctagaaagcctatcgactctctgagggactctagaagcttgtcctatagccccgtggaaagacgacgtcctagtccacagccatctccccgagatcagcagtcctcctcaagcgaacgaggttccaggcgagggcaacgcggagactctcggagtccttcacacaagcggagacgagaaacaccttcccccaggccaatgaggcataggtcttctcggagcccata

SEQ ID NO: 240056 - DNA, 702 bp, synthetic construct
  misc_feature 1..702: note = Description of Artificial Sequence: Synthetic coding sequence
  source 1..702: mol_type = other DNA
atgatcagcttcccctcactccaaagaaccgagctcgaggagatggacctcatactccaacaagagggatggcagctggacctgaaacgcaactccctgggctggaaagacctgcagaggtcctctcacccctctccgtgcctgcaagctggcaggccactgccccagcccacatgtacccaccgcggattacccaagctgaggctgagtgaggaaggagattatcccgcatcagcttcaacgccggaaccacgaggcttaatacccccttcaggaacgtttctgcgattcaacttggatcctttgtgttgcggtccacagcccgtagcatctgtgtcaaggggatgggtgagttctcatcactgctcccccgagaactgctggctaacatggttaggcgaattgcccgcacccttcagcggaacccctcctcccacggctgtccctcccggacaaggttcccggtctaggtcaccccgtaagccaatagacagcctgagggatagcagaagtctctcatattctccagtggagcgaaggagaccatctccccagccttccccccgtgaccagcaatcatcgagctcagagcgcggaagccggagagggcagcgcggagatagccgctctccctcccataagaggcgcagagaaaccccaagtcctaggcccatgcgccacaggtctagtcggtccccttag

SEQ ID NO: 240057 - DNA, 7004 bp, synthetic construct
  misc_feature 1..7004: note = Description of Artificial Sequence: Synthetic coding sequence
  source 1..7004: mol_type = other DNA
atgtataacggcataggcctaccgaccccccgaggtagcggtaccaatggctacgtacaacggaatctttctttggtcagaggtcggaggggggagcgcccagattataaaggggaggaagaacttaggcgattggaagcggcactagtgaagcgacccaaccctgatatactggatcatgaacggaagcggagagtagagctgagatgccttgaattagaggaaatgatggaggagcagggctatgaggagcagcaaatacaagaaaaggtcgcaaccttccgtctgatgctgctggagaaagacgtcaatccaggcggaaaagaggagacacctggccagcgccctgctgtgactgagacacaccaactcgccgaattgaacgagaagaagaacgagcgactacgagctgcttttggcatcagcgactcttacgtggacggctcttcatttgaccctcagcgcagggcccgtgaggccaagcagcccgcaccagagccccctaagccttattcactagtccgcgagtcttcctcttcacgatcacctacgccaaagcaaaagaaaaaaaagaagaaaaaggaccgcggtagaagaagcgagtcttccagcccgagacgggagcgaaaaaagagcagtaaaaaaaagaagcaccggtctgagagtgagtccaaaaagagaaaacaccggagtcctactccgaagtctaaaaggaaaagcaaagacaagaagcgtaaacgatccaggtctactacccccgctcctaagagtcgtagagcgcacagaagtacctctgccgactctgcgtcgtcctcagacacatctcggtcaaggtcaagaagcgctgccgctaagacacacactaccgccctcgccggacgctcacccagtcctgcgtcagggcgacgcggagaaggggacgcgccttttagtgagccgggaactacaagcacacagcgcccttccagtccagagacggctacaaagcagcccagtagcccatatgaagacaaggacaaggacaagaaagaaaaaagtgccaccaggccatcgcctagccccgaacgcagttctaccggacccgaacctcccgcacccacccccctgcttgccgaaaggcatggcggatccccccaacctctagccactacaccgctaagccaggagcctgttaatccaccttccgaagcttcccccacaagagaccggtcccctcctaagagtccagaaaagcttcctcaatcctcttccagtgagagctctcctccttccccccagcccacgaaggtgagcagacacgccagctctagccctgagtctccgaagcccgcacctgccccaggttctcatcgcgaaatttcaagttcgcccacctctaagaaccggagccatggcagagctaaacgcgacaagtcgcacagtcatacccctagcaggcgcatgggtcgcagtagaagcccagctactgctaagcggggtcggagcaggagcaggacacccacaaaacggggtcatagtcgctctcgtagtccgcaatggaggaggagcagaagtgctcagaggtgggggcgatcccgcagcccccagaggagagggaggagccggtctccccagagaccagggtggagccggtccaggaacacacaaagaagggggaggtccaggtcagccagacgcggtaggtcacatagtcgtagcccagccacgaggggcagatctaggagccggacgcccgctcgacggggaagatcaaggtccagaacccccgctcggaggcgttcgaggtctagaacccctactagacgtcgtagtcgcagccggacgccagccagacggggtcgctcaagaagtcggacccccgcacgccgaagatcacggacaagatctcctgttcgaagaagatctcggtctcggtcgcctgcccgtagatctgggaggagccgctcccggaccccggctcggcgtggcaggtcccgtagccgcactccagccaggaggggcaggagtagatccaggactcctgccaggcgttctgggagaagccggagtagaacacctgcccgacgtgggaggtcccgaagcaggacccccaggagaggcagaagccgcagcagatcgcttgtgaggaggggccgtagccactctcggaccccccaaagaagggggaggtctggatctagtagcgagcggaagaataagtcccgcacctcgcaacggagaagccggtcaaactcctctcctgaaatgaagaaaagtcgcatcagcagtaggcgcagccgcagtttgagttcccctcgcagtaaagcgaaatcccgcctctccctgcggaggagtctcagcggatctagcccatgccctaaacagaaaagtcagacgcctccccgacgctcccggagcgggtcatcacagccaaaggctaagtccagaacccctcctcgcagaagccgaagctcgagctcaccaccacctaaacagaagagtaaaactccatcaaggcagtcccattcatcatcatccccacatcctaaagtgaagagcggaacccctccgcgacagggatcaatcacttctccacaggcaaacgagcagagtgtcacgccccagaggaggtcatgctttgagagctcacccgaccctgagcttaaatccagaactcctagcaggcacagctgctcaggctcatctcctcccagggtgaaatcttcaaccccgcctaggcaatctccttccaggagcagttccccgcaaccaaaggtgaaagctatcatctcccccagacagaggtcccacagcggctcatcgtcaccatcgccatccagagtcactagtcggacgactccccgtcgtagccgatcagtctcaccctgcagcaacgtggagagtagactgctgccacggtactcacatagtggcagcagctctccagacacaaaggtgaaaccagagactcctcctagacagagtcactcggggtctataagcccatatcctaaagttaaagcccaaaccccaccgggaccatcactcagcggttctaagagcccgtgcccccaagaaaagagtaaggatagtcttgtccagtcatgtcctggatcactgtccctctgcgccggtgttaagagctctactcccccaggagaaagctattttggtgtgagctcactccagctcaagggtcagtcgcagacctcgcccgaccatcgaagcgatactagtagccccgaggtgaggcagagccacagtgaaagccccagcttacagagcaaatctcaaacttcccctaagggcggacggagtcggagttcaagtcctgtgacagagcttgccagtagaagtccgattaggcaggaccggggagaatttagcgctagccccatgcttaagagcggaatgagcccagagcagtcgaggtttcagtccgactcttcttcctacccgacggtagattccaattctctgttgggacagtcccggctcgagacagcagagagcaaggaaaaaatggctctaccccctcaagaagacgccaccgcctccccccctaggcaaaaagataagttctctccttttcctgtgcaggacagaccagaaagcagtctggtgttcaaagataccttaaggacacccccaagagagagatcaggcgctggaagcagtcctgaaactaaggagcagaatagtgccctccctacctccagccaagatgaggaacttatggaagtcgttgaaaagtccgaagagccggctggacaaattctgagtcacttatcatctgaacttaaggagatgtctacgagcaattttgagagctctccagaggtggaagaaaggccagcagtttccctcaccttagaccagagccagtcgcaagcaagccttgaagccgtcgaagtgcctagtatggcgtcatcatggggcggaccacactttagcccagagcacaaggaactgtcaaattcaccgttacgggagaattcttttggctccccacttgagtttaggaactcgggacccttgggaacagagatgaatacggggttctcaagtgaggtaaaagaggatctcaatggccctttcctgaatcagctcgagaccgatccctctctagacatgaaagaacaatcaactcgctcttcaggacactcttcttcagaactctctcccgatgcggtcgaaaaagcgggtatgtctagtaatcagtccatcagtagtcctgtgcttgatgctgtcccccgaacacccagccgagagcgttcttcgtccgcctcaagtccagaaatgaaggatggacttcctaggaccccttcccgtcggtctaggtcaggctctagtcctggcctgagagacggtagcggaacaccatctaggcatagcctgagtgggtcttcacccggaatgaaggacattcctaggacacccagtagaggaagaagcgagtgcgactcctcccccgaacccaaagctctgccccagactccccgaccgcgatcaaggagtcccagctcccctgagctgaacaacaagtgtttgacccctcaacgcgaacgctccgggagtgagagttccgttgaccaaaagacagtagcccgaactccccttggtcagcgttcacggagcggatcgagccaggagctcgacgtaaagcccagcgcctcgccacaggagaggagcgagtcagactcttctcctgatagcaaggctaagacccggacacctctgagacaacgcagccgcagcggatccagcccggaagttgactccaaatcccggctgtccccgagacgatcgcgctctggtagctcaccagaagttaaagataagccaagagcagctcctagagcgcaatccggctcggacagtagtccagagcctaaggcaccagcacctcgggctctgcctcgcagatcaaggtccggctcttccagcaaaggcaggggaccgtccccggagggttcttcatcaactgagtccagccctgaacatccccctaaaagccgcactgcccgtaggggtagtcggagctcacctgaaccaaaaacaaaatctagaacgcccccaagaagacgttctagccgctcctcccctgagttaactcgcaaagcaaggcttagcagacgatctcgctccgcttcaagctcccccgagacaaggtctcggacccctcctcggcacagacgttcaccgtccgtgtcctctccagaacccgcagagaagtctagaagcagcaggcgtcgtaggagcgccagctcacccagaactaaaacaactagccgcagaggcaggtccccatctccaaagcccagagggttacagcgctctcgatctagaagtcggcgagagaagacgaggaccacaaggaggagagaccgcagcggatcctcacagagtacctcgcgtaggagacagcggtcccgctcaagatctcgtgtgaccagacgaagaaggggtggatctggataccattcaagatcccctgcccgacaggagtcgtcaaggacatccagcagacggagaagaggtagatctcgaacaccccctaccagtcgtaagcggtctcgttcaagaacatcccccgcaccctggaaacggagccgcagtcgggcttcccctgccacacatagaagatcccgatccaggactcccctaatcagccgcaggaggtccagatctaggacaagccctgttagtaggagacgatccaggtctaggacgtcggtaactcgaaggagatcacgcagccgcgcatcaccagtaagcagaaggcgcagcaggtcccgcacaccgcctgtgacgaggcgaagaagccgcagccgaacacctacaacgcgccgacgcagtcgcagtcgcaccccccctgtgacgcgccgacgctctcgctcccgcaccccccctgtgacacggaggaggtctcggagcagaacatcccctattacacgacgccgatctaggagccgcaccagtcccgtcactagaagaagatccaggtcaagaacgagcccggttaccaggcgacggagccgttctagaacaagcccagtcacaagaaggcgatccagatctcgaacccctcccgcacaggatcaacccagatctcccgtgcccagcgccttttccgaccagtcgcggtgtcttatcgcgcagacaactccagttgcgggatcgcaatcattgagttcaggagccgtggctaccaccacctcatctgctggtgaccacaatggtatgctatccgttcccgcaccaggagttccccactccgatgtaggagaacctcctgccagtactggagctcagcagccgagtgccctagctgccctacaaccagcaaaagaaagacggtcttcatcctcgagcagttcttctagctcttcctcatcttcctcttctagttcctcatcgagctccagtagctctggatcaagttcctctgactccgagggatccagtctccctgtgcagcctgaggtcgcattaaaaagagtgcctagccctacgcccgcacctaaggaggcagttagggaaggtagacctcccgagcctacaccggcaaagcgaaagcggaggtccagctcctccagcagcagctcttcgagctcttcaagtagtagcagctcctcatcctcaagttcgtcctcttctagctcctccagttctagctcttcgagttcatccagctcaagtagtagcagtccctcacccgcaaagcccggtccgcaggccttgccaaaacccgcttccccaaaaaaaccccctccaggggaacgtcgcagcaggtcgcctagaaagcctattgactctctgagggatagtcgctcacttagctatagtcccgtggagaggcgacggccatcaccccagcccagcccgcgagatcagcagtcgtctagtagcgaaagaggatccagacgcggacagaggggcgactcgcgcagccccagtcacaaaagaagaagggagactccctctcccagacctatgcgccaccgatccagtcggtcgcccta

SEQ ID NO: 240058 - DNA, 936 bp, synthetic construct
  misc_feature 1..936: note = Description of Artificial Sequence: Synthetic coding sequence
  source 1..936: mol_type = other DNA
atgctgcttgaaaaggatgttaacccaggaggtaaagaagagacccccggacaacgacccgctgttacagaaacacatcagctagcagagttgaacgagaagaagaacgagcgcctgagagctgcgttcggcatctccgattcctatgtggatggtagtagcttcgatcctcagagaagggctcgcgaggccaaacagccagcccctgagccgcctaagccttacagtctagtacgagaaagtagctcgtctagatctcctacacctaagcagaagaagaagaaaaaaaaaaaggaccgcggacgccgaagtgagagttcatcccccagaagagagaggaagaaaagttccaagaaaaagaagcataggtctgaaagtgagtctaagaaacgaaaacacaggtccccaaccccaaaatctaaacggaaatccaaagacaaaaagcggaaaagatctcgctccaccacacctgcaccgaagagtcggagggcccaccgaagcacctccgcggactcagctagtagttcggataccagcagatcccggagccgctcagccgctgccaagacccacaccactgcgcttgcgggacggtctcccagtccggctagcgggaggcggggagaaggcgatgcaccgttttcggagccaggtacgacgagcacacagagacccagttctccagaaacagccaccaagcagccaagctccccatatgaggacaaagacaaggataaaaaggagaaatcggccactcggccttctcctagccccgaaaggtcctccaccggacccgagcccccagcgccaactcccctgctggccgagagacatggaggcagtccccagccgcttgctacaacgcctctttctcaggagcctgttaatccctccccacagttgtttatgtttttaaagggtattctggtgttttag

SEQ ID NO: 240059 - DNA, 2871 bp, synthetic construct
  misc_feature 1..2871: note = Description of Artificial Sequence: Synthetic coding sequence
  source 1..2871: mol_type = other DNA
cgccgaaggcgactgaggagggccgataggagaggcgaggcagccgcaccgggtcccagagactcgggtgctagagcagctgctgccgcacgccctttacctcttgggggaggcggtcgcagacgcagagttcgaggctacgaggaacagcaaatccaggagaaagttgccacttttaggttgatgctgctggagaaggatgttaacccaggaggcaaagaggaaacgccgggtcagagacccgctgtgacagagactcatcagctcgccgagctgaatgaaaagaaaaatgaaagactgcgcgctgctttcggtatttctgactcatacgtggatggatcctcctttgatccacagcgccgagcgagggaggccaaacagccagcccctgagcctcccaaaccctactccctcgtgcgcgagtctagttcaagtcggtccccaaccccgaagcaaaagaagaagaagaagaaaaaagatcgtggcagacgaagcgaaagttcgagtccccgacgcgagcgcaagaaaagcagcaagaagaaaaaacatcgttcggaatccgaaagcaaaaagcggaaacacaggtctccgactccaaagagtaaaagaaagagtaaggacaagaaacgaaaacgttctcgtagcacgacgccggctcctaagagcaggagggcacatcgcagcacctccgccgactccgcttcatcttcggacacaagtaggagtcgatcccgtagcgccgctgcaaagacccatactacagcactcgccggtcgcagcccatctccagctagcggtcggcgaggtgagggcgatgctcccttttccgagcccggtaccaccagcactcagcgaccctctagtccagaaacggcgacgaagcagccaagctccccatatgaggacaaggataaggataaaaaagagaaatctgcaacccggccatcaccgagtcctgagcggtcttcaacgggtcccgaacctccagccccaaccccattgcttgctgagcgacacggaggcagcccccaacccttagcaactacacctctgtctcaggagccagtgaacccacctagcgaagctagccctactagagacaggtcacctcctaagtcgccagagaaactacctcaatcaagctcttctgagagttctcccccatccccacagccaacaaaagtttcccgtcacgcctcctcgagccccgagagccccaagcctgccccagctccagggtcccatagggagatcagttcatcccctacatccaaaaacagaagccacgggagagctaaacgtgataagagccattctcacaccccctctaggcggatgggcagatctaggagcccggctaccgcaaagagaggccgtagccggtctaggacacccactaaacgcggacactcgaggtcccgctcccctcagtggcggaggtccaggtctgcccagcgctggggccgatcacgtagcccgcagcgtagagggcgtagcagaagccctcagcggccaggctggagtaggtccaggaacacacaacgaagagggaggtcgaggagcgcacggagaggccgatcgcactcccggtcacctgccacccgagggagatcccgatcacggactcccgctagaaggggcaggagtcggtctaggactcctgccaggcgtcggagtaggtcccgaacaccaacacgcagaagaagcaggagccgcacccccgctagacgtgggcgaagccgctctaggactccggcacgtcggaggtcaagaacgcggagccctgtccgcaggcgctcccggtctcgaagccccgctaggcgctccggtagatctcgctctcgcactcctgcacgacggggtcggtctcgctccagaacaccagcaaggcgaggacggagccgatccaggactccagcgagacgctcgggaaggagcagatcgagaactcctgcccgtcggggacgtagtcggtcccgaacgccaagacggggtcgcagcagaagcagatcattagttcgcagaggcaggtctcatagtcggacacctcagcgaagaggacgaagtggatcttcctctgagcgaaagaacaagtccaggacatcccaacgcaggtccagaagtaattccagtcccgagatgaagaagtcccgaatatcaagcaggcggtcgagatccctgtcgtcacccagaagcaaagccaagagcaggttgtctctccgacgcagcctcagcgggtcttcgccttgtcccaagcagaaaagtcaaacacccccacggcgaagtcgatctgggtcttctcagccaaaggcaaagtctcggactcctccacggagatcaagaagcagtagttctcctcctcctaagcaaaagtctaaaacaccctcgaggcagtctcattctagctcatctcctcatcccaaagtcaagagcgggaccccacctaggcagggaagtataacgagcccccaggcgaatgaacagtctgtgacaccacaaagaaggtcgtgctttgaatcatccccggatcctgagctgaagagtcggacaccatcaaggcactcatgtagcgggagctctccacccagagtcaagagctccacacctccacgccaatccccgtccagaagtagcagccctcagcccaaggtcaaagcgattatctcccccaggcagcgatcccacagcggatcctcctcccctagcccaagtagagtgactagcagaacaacacctcgccgaagtaggtcagtttccccctgctctaacgtggagagcaggctgctgccccgatactcccacagcggatcctcatccccagatacgaaggtgaagccggagacacctcctcgacagtcccatagtggctag

SEQ ID NO: 240060 - DNA, 6035 bp, synthetic construct
  misc_feature 1..6035: note = Description of Artificial Sequence: Synthetic coding sequence
  source 1..6035: mol_type = other DNA
atgaagaaatcacgcatttcatcccggaggagtcgctcgctgtcaagtcccagaagcaaggccaagagcagactcagtcttcgtaggtctctgagtggatctagcccgtgccctaagcagaagagccagactcccccaaggaggtccagatccggttcatcccagcccaaggcgaaatctagaacaccccctagaagaagccgctcttccagttcgccaccacccaaacaaaaatccaagacacccagccgacagtcacactcctcttccagcccacatccaaaggtgaagtccggcacacctcctcgacagggctccatcacgtctccacaggccaatgagcagtccgttaccccacagaggcgttcttgctttgagtctagcccagatcccgaactaaagtcccgcacccctagccgccattcttgcagcgggtcttcaccacccagggtaaagagcagcaccccaccacgtcaaagtccttcacggtcttctagtccccagccaaaagtgaaggccattatcagccccagacagcgatcacatagcggcagttctagcccgagcccaagtagggtgaccagccggacgactccaaggcggtcccgatccgtttccccctgctcaaatgtggaaagccgccttctgccaaggtattcacattcgggtagtagcagcccagacactaaggtgaagccagagactcctcccagacagagccacagcggtagcatcagcccttaccccaaagtgaaagcccagacgccccctggaccgtctctttcaggcagtaagtctccctgcccccaagaaaagagcaaggacagcctggttcagagctgtccaggctctttatctctttgtgctggtgtaaagagcagtacccccccaggagaaagttatttcggagtttcatctttgcaacttaagggacagtcacagacttcacctgatcaccggagtgacacatccagtcccgaggtcagacaatcccatagcgagagcccttccttgcagtctaaatctcaaacttctcccaagggtggcagatctagaagctcaagtcctgttactgaactggcaagcaggagcccaatcaggcaagatagaggcgaattctctgcctctcccatgttaaagtccgggatgtcaccggagcaatctcgtttccagagcgacagtagcagctacccaactgtagatagcaattcactgttggggcagagcaggctcgagacagctgagtcaaaggaaaagatggcattacccccacaagaggatgccaccgcctccccaccccgacagaaggataaattctccccttttcctgtgcaggaccgccctgagtcatccctggtgtttaaagacacccttcggactcccccacgggagagaagcggggctggctcatcacccgaaacgaaggaacagaactccgccctcccaacctcaagccaagatgaggagttgatggaggtggtggagaagtctgaagagcctgccggacagatcctttctcacttgtctagcgagctaaaggaaatgtctacctccaatttcgagagctcccctgaagtggaggaacgcccagcggtcagtctcactctggaccagagccagtcccaggctagtttagaggccgtagaagtgccatcaatggcctctagttgggggggaccacatttctcccctgagcacaaggaattgtctaacagccctctgagggagaatagtttcgggtctccactggagttcagaaactctgggccattaggcacagaaatgaacaccggttttagctctgaggtgaaagaggacctaaatggacctttcctgaatcagctggaaacagatccctctctagacatgaaggagcaatccacccgaagctccgggcatagttcctcggagctttcccctgacgcagtggagaaagccggaatgagtagcaatcagtctatatcaagtcccgtactcgatgccgtaccaagaacaccttcaagggaacgatcaagctctgccagctcaccagagatgaaggacggtctgccaaggaccccttctcggcgatcccggagcgggagttcacctggactgcgggatgggtcagggacaccgagccgtcattccctgtcaggaagtagcccaggaatgaaagatatcccacggaccccatctcgagggagatccgagtgtgacagctccccagagccgaaagctctgccccaaacaccaagacccaggagtagatccccatcctcaccagagttgaacaacaaatgcttgaccccgcaacgtgaacgttctgggtcagagagttctgtggaccagaaaaccgttgcgcgaacgcctttaggccagcggagtaggagcgggagctcacaagaactggatgttaaaccctctgctagcccccaggaaagatcggagtccgactctagccccgactctaaggccaagacacgaacaccccttcgacagcggtcccgctctggaagctcaccagaagtggactccaagtccaggttaagcccacgacggtcccgctcagggagcagtcccgaggtgaaagacaagcctcgcgctgccccacgagcccaatctggcagtgatagttcaccggaacctaaagcccctgcgcctcgcgctctgccaaggcggagcaggtctgggtcctcctcaaaaggtagggggccttcaccagaggggagtagctccacagaaagttcccccgagcatcctccaaagagtcggaccgcccgtagggggagcagaagctcccccgagcctaagactaaatctagaacgcccccacgaagacgctccagcaggagctcccccgagctcaccaggaaagcgaggctttccaggagaagccgctccgcgtccagttcccccgaaaccaggtctaggactcccccacggcatcgacggtcgcccagcgtctcaagtcccgagcctgccgaaaagtccagatcctccaggcgccgaagatccgcatctagccctcgaaccaagaccacgagtcgtcggggtcgaagcccaagtccaaagccgagaggcctgcagagatctcggtcccggagccggagggagaaaacacggaccacacgacggcgagaccggtccgggtcaagccagtccacgagtaggcggaggcagaggagtaggtcccgttctagagttacaaggaggcgtcgaggaggcagtggctaccactcccgatctcccgctcggcaggagtcgtccaggacctcatcacgtcggagaagggggaggagccggactcctcctacaagtagaaagaggagcaggagccggacatcccccgcaccatggaaaagaagcaggtctagagcctccccagcgacacataggagatctcgatctcgcacgcccctgatttcccggcgacggtcccgcagccgcacatcccccgtttctcgacggaggtcgaggtctcggacaagcgttactcggcgaagaagtcgatctcgggctagcccagtgtccagacggaggtcaaggtccaggactcccccagttacaaggcgcagaagcagaagtcgcacccctaccacaaggagacgcagtcgcagccgaactcctcctgtcacccgcaggcggtcccggagccgcaccccgccagtcacccggaggagatcacggagccgaacgagtcccatcacccgacgcagaagcaggtcacgcacatctccagtcaccaggcggagaagccgatccagaacatctcccgttacacgacgccgttcccgatccagaacatccccagtcacaaggcgcagaagtcgttcccgcacacctcctgctatcagaagaaggtcaaggtcgcgcacgcctctgctgccccgaaaaaggtccagatcaagatcacctctggcgattcggcgtagaagtagatcgaggacacccaggactgcgagaggcaagcgctcactgaccagatcccctcccgcaatccgcagaaggagcgcgagcggctcaagctcagataggtcccgcagcgctactccgccagccacacggaaccactcaggttcccgaactccaccagtagcccttaactcttcgcgaatgtcatgcttctctcgaccatctatgtctccaacccccctggataggtgtcgaagtcctggcatgctggagcctctgggctcaagcaggactccaatgagtgtgctgcagcaggcaggaggttcgatgatggacggacccggaccacgtatccccgaccaccagcgcacatccgttcccgagaaccatgcccagtccaggattgccctcgctctcacagccatctccctgggcactgcaaggccacctccctccatgtccgccgctggcttagccgctagaatgtctcaggtgcccgcaccggttcctctcatgtctttgcgtacagcgccagccgcaaatctggcaagccgaatccccgcagccagcgccgctgcaatgaatctcgcttctgccagaacacccgctatcccaactgctgtcaatctcgcagatagccgtacccccgctgccgctgccgcaatgaacctggcctcacccagaacggcagtagcaccaagcgctgtgaacctagctgacccacggacaccaacggcccctgccgttaacttagccggagccaggactccagctgcactggccgcactctctctgactggatccggtactccacctacagccgctaattaccctagtagtagtagaaccccccaagcccctgcatctgctaatttagtcggtccgagatctgcccatgccacagccccagtcaacatcgctggctctagaacagccgcagccttagcccctgcaagtcttacctccgccaggatggctcccgcactgagcggagcaaaccttacatctccacgtgtacctctgtccgcctatgaaagggtgtcaggtaggacaagcccgccactgctagaccgggctcgctcacggacacccccatccgccccatctcaatcacgcatgacctccgaaagagcaccaagccctagctctagaatgggccaggcaccctcccaaagcctgcttccaccagcccaggatcagccacgttcccctgtgccctctgcttttagtgatcagagtcggtgtctgatcgctcaaactacccccgtggccggatcccagtcactctcttcaggggcagtggcaactaccacctcatctgctggcgaccataatgggatgttgtccgtccccgctcctggtgtcccacatagcgacgtgggggaacccccagccagtaccggcgcacagcaaccatccgccttggccgcactacaacccgctaaagagcgcagaagtagcagctcgagctctagttccagctcgagcagctcatcctcttcctccagttctagctcttctagcagtagcggcagcagcagttccgactcagaggggtcatccctgcctgtccaaccagaagtcgctctgaaacgggtgccatcccctacacccgcaccaaaggaggctgtgcgcgaaggacgacccccagagcctacacctgccaagcgcaaacggagaagtagcagtagctctagctctagttcgagctctagctcatcctcctcatcttcatctagtagttcatcctcctcaagctcatcttcttcctcttctagttcaagctccagctcctcaagcagttcgccgtcaccggctaaacctggaccgcaggccctgccaaaaccagcttcgcctaagaagcccccacctggggaaagaagcttacttcccgtatctcctagccccagacattctttaccccatgttgctcgtggaacatttctcaaacgcacttcaggttatttcccaccgcttcataagtccttcgggactccgtgcggcctacaagacaaggcaccaccactgagggagtggagggtgcggcttttcactaacgggccatgccccccttgtgtgctccttctgccagctccaacacacgccctgtgctcgagccacacccagaggctcgctgtcta

SEQ ID NO: 240061 - DNA, 1836 bp, synthetic construct
  misc_feature 1..1836: note = Description of Artificial Sequence: Synthetic coding sequence
  source 1..1836: mol_type = other DNA
atggcctcggtgcagcagggagaaaagcaactattcgaaaagttttggcggggaaccttcaaagctgtagctacacccagacccgagtccattattgtggccagcattactgccaggaagcctctgccaaggactgagccccagaataatcctgtggttccagcgcaagatggtccttcagagaagctagggcagcatcttgcaacagaaccactgggaaccaacagttgggagagagacaagacatgtagggaacttggagctacacggggacattccgcttctcatgacaaggacctgacacctcctcccagctcccggggtaaaaaaaagaaaaaaaaaagcactaggaagaaaaggcgacggtcctccagttattcgccttctcccgtaaagaagaagaagaaaaagagctctaaaaagcataagaggaggcgctctttttccaagaaaaggcgccattcttcatcctcccccaagtccaaaaggagggacgagaagaggcataagaagcagagccgctcccgccctcgaaaaagccatagacaccgacatcatcggtgtccatcgcgttcacagagctccgagagcagaccttcaagttgcgaaagccggcaccgaggccgatcacccgaggagggtcagaagagccggaggaggcactcacgccgttgtagcaaaactctctgtaaggattcacctgaagcacaatcttcgcgcccaccaagccagcctctccagatgctcgggtaccttagcgcccgaggcgtgatcaccggctccggcagcgcggctgatttgttcactaaaactgcaagcccactgacgacatctcggggtcggtcgcaagaatacgactcaggaaatgacacctcctcacccccaagtacacagacgtcaagtgcaaggagcagaggacaggagaaggggtcaccctctggcggtctttcaaaatcaagggaactgaacagcggcaatacgtcagactctggaaactccttcacaacttcctccccacaaaacaaaggagccatgttggaaaatctgagtccaacgagtaggggtcgcgagtcccggggtttccagagtccatgtctggagtgtgccgaggtgaagaaatcttcactggtaccttccacagcgcgaagcagccctatgaagggttgctcacggtcttcctcgtacgcttctactaggagctcctcccactcttccaggtcacctaacccaagagctagcccaagatatactcaatcacgctcaacgtctagtgaaaagaggagttatagcagatcacccagttacagttctaaaagtggtaaacgctcacctccgtctcggtcgtctcgatctaggaggtctccttcatatagtagatactcccccagtcgggagagggaccctaaatacagcgaaaaagacagtcagcagcgcgagcgcgagcgcgctcgccgtcggaggcggtcatacagcccaatgaggaagcgaaggcgcgattctccttcacaccttgaggcacggaggatcacgtccgcaagaaaacgaccaatcccatactacagaccctctccatcgtcaagcggttctctatcctcaacgtcttcttggtactcttcctcctcttccagaagcgccagccggtcgtacagccgatcacgctcacgttctcgttcgcgtaggcgcagcaggacgaggacaagctcatcctcttctagccgatccccctcccccggaagtcgttctcgctccaggagtcgctctcggtctcgatcgcgttctcggagccagagtaggtcctacagtagtgctgacagctacagcagcacccggaggtag

SEQ ID NO: 240062 - DNA, 747 bp, synthetic construct
  misc_feature 1..747: note = Description of Artificial Sequence: Synthetic coding sequence
  source 1..747: mol_type = other DNA
atgtctggtggtggagtcatccgcggtcctgcaggcaacaacgattgccgtatttatgtcggcaatttgccaccggacatccgcaccaaggatattgaggacgtgttttataaatatggggcaattagagacatcgacctgaagaaccgcagaggcggaccgccattcgcattcgtggagtttgaggatcccagggacgctgaggacgctgtttacggtagagacgggtacgattatgacggctacaggttgcgggtcgagtttcccagatccggaagggggacaggtcgcggaggaggcggagggggaggcggaggggcaccaaggggaaggtatggcccacctagcagacgctccgagaacagagtggtggtaagtgggttaccaccttcgggcagctggcaggacctcaaggatcatatgagggaggcgggagacgtttgttatgctgacgtatatcgagacggtacaggcgtagtggaattcgtgaggaaggaagatatgacatacgccgttagaaagctggacaataccaagttcaggtcgcacgagggcgaaacggcttatatccgggtgaaggtcgatggacccaggagtccgagctacgggagatccagatctcgctctcgctctcggtctagaagccggagtaggtctaactcccgaagccgatcctacagccctcgcagatctcgtggaagccctagatactcacctaggcattccaggagcaggagcaggacctag

SEQ ID NO: 240063 - DNA, 606 bp, synthetic construct
  misc_feature 1..606: note = Description of Artificial Sequence: Synthetic coding sequence
  source 1..606: mol_type = other DNA
atgagtggtgggggtgttattcgtgggcctgcaggcaacaacgattgtcgcatttatgtgggcaacttgccacccgatatccgcactaaggacattgaagacgttttctacaaatatggggcaattcgcgacatagatctgaagaacaggcgtggtggtcccccattcgcatttgtggagtttgaggaccctcgggacgccgaagacgctgtctacgggcgtgatggatacgattacgacgggtacaggctccgagtggagtttccacgctcaggcagaggaaccggcaggggcggtggcggagggggaggtgggggtgctccgcgaggacgttacggccctcccagtaggaggagcgaaaaccgagtggtggtgtccgggctgccgccttctgggtcttggcaggacctgaaagaccacatgcgagaggccggtgacgtgtgctatgccgatgtgtaccgagatggcactggagtcgtggaatttgtgcggaaggaagacatgacatatgcagtaaggaaactcgacaatactaaatttcggagccacgaagtgggatatacacgtatactgttttttgatcagaactggattcagtggtcctag

SEQ ID NO: 240064 - DNA, 786 bp, synthetic construct
  misc_feature 1..786: note = Description of Artificial Sequence: Synthetic coding sequence
  source 1..786: mol_type = other DNA
atgtctcggtacctgcgacccccaaacacgagtctgttcgtcaggaatgttgcagacgatacaaggtcagaggatctgagacgcgaattcggtcggtacggtcctattgtggacgtttatgtccctctggacttctatactaggcgcccacggggttttgcttacgtgcaattcgaagatgtccgagatgccgaagacgctctgcacaacctcgatcgaaagtggatttgcggcagacaaatagagattcaattcgctcagggcgacaggaagaccccaaaccagatgaaggccaaagaaggacgcaatgtgtactctagctcacgctacgacgattacgacaggtaccgcaggtctagaagccgatcctatgaacggagacgtagcagatcgcgctcattcgattataattacagaagatcgtattctccacggaatcgaccaacgggacgcccaaggaggtctcggtcccacagcgacaacgataggtttaagcacaggaaccgcagcttctccaggagcaaaagtaactcccgatcccgatccaaatctcagcccaagaaggaaatgaaggctaagtctcggagtcgaagtgcaagtcacacaaaaaccagggggacaagtaagaccgatagcaagactcactacaagagcggctcccggtacgagaaagaatctaggaaaaaagagccgcctcgttccaaaagccagtctcggagccagagccgctctcgttcaaaatctagaagtagatcatggacctctccaaagagcagtgggcactag

SEQ ID NO: 240065 - DNA, 552 bp, synthetic construct
  misc_feature 1..552: note = Description of Artificial Sequence: Synthetic coding sequence
  source 1..552: mol_type = other DNA
atgtcaagatatcttagacctcccaacacatcattgttcgtaagaaacgtcgccgacgatactcgttcggaggacttacgacgggagttcggcagatacggtccgatcgtggatgtgtatgtgcccctggacttttatacacggagaccacggggtttcgcatacgtgcagtttgaggatgtgcgcgacgcagaggacgcattgcacaatttggatcggaagtggatctgcgggcgtcaaatcgagattcagtttgcccaaggcgacagaaagaccccaaatcaaatgaaggccaaggagggacgcaatgtttattcctcatctcgctacgatgattacgaccgttatcgtcgcagcagaagcagatcttatgagcggagacgcagccggtccaggagtttcgactacaactacaggagatcatacagtccccgtaattcacgacctactggtaggcctcggcgatcacgcagccactctgataatgatcgccctaactgttcatggaacacacagtactcctccgcctactataccagtagaaagatctag

SEQ ID NO: 240066 - DNA, 522 bp, synthetic construct
  misc_feature 1..522: note = Description of Artificial Sequence: Synthetic coding sequence
  source 1..522: mol_type = other DNA
atgtcccgttatctgcggccacctaatacgagtctatttgtgcgcaatgtggcggacgacaccagatcagaagatttgaggagagaattcggacgctatggccctatcgtggatgtatacgtccccctggatttttacacacgccgacctcgcggttttgcttatgtgcagttcgaggacgtgcgcgatgctgaagatgctcttcataacctggatcgcaaatggatatgcggacgccagatagaaattcagttcgcccagggagatagaaaaactcctaatcagatgaaagccaaagagggcaggaacgtctatagttccagccgctacgacgattacgatcgatataggcgctcgaggagccgctcatatgagcgtaggcgtagcaggtctcgaagtttcgactataattatagaagaagctattcgccacgcaacagcagacctaccggtcgcccacgacggtcccggagccattcagacaatgattcccaggtgtctaaaaagaagaatgaacgatag

SEQ ID NO: 240067 - DNA, 519 bp, synthetic construct
  misc_feature 1..519: note = Description of Artificial Sequence: Synthetic coding sequence
  source 1..519: mol_type = other DNA
atgtctcgttaccttcggcctcctaacactagcctttttgtgaggaacgttgctgatgatactcggtcggaggacttacgcagggagttcggccgatatggccctatcgtggacgtgtatgtccctcttgatttttatactcgcaggcccaggggattcgcgtatgtacagttcgaggacgttcgcgatgccgaggatgctctgcacaatttagataggaagtggatttgtggacgccagatcgaaatccagttcgcgcaaggggatagaaaaactcctaaccaaatgaaagcaaaggaaggcagaaatgtttacagttctagtaggtacgacgactacgacagataccgcagatcaagaagtcggagctatgaacgaagacgatctcgctcaaggtccttcgattacaattatcggaggtcttactcccccaggaacaggccaaccgggaggcctagaagaagccgaagccactctgataacgactcacaggtgagcaaaaagaaaaacgagcgttag

SEQ ID NO: 240068 - DNA, 498 bp, synthetic construct
  misc_feature 1..498: note = Description of Artificial Sequence: Synthetic coding sequence
  source 1..498: mol_type = other DNA
atgagtaggtatttgcgcccacccaatactagcctttttgttcgcaatgttgccgacgatacacggagcgaggacctcaggcgcgagtttggcaggtatggcccaattgtcgacgtctatgtgcccctggatttctacacacgcagaccaagggggtttgcttacgtgcagttcgaagatgtgagggacgcggaagacgctttgcacaatcttgataggaagtggatttgcggtcgtcagatcgagatccaattcgcacaaggcgacaggaagaccccaaaccagatgaaggctaaggagggcagaaacgtgtacagcagctcgcgttacgatgactacgatcgataccgacgcagtcgctccaggtcgtacgagagaagaagatctcggagtcgcagcttcgattataattatcgacgctcttatagccctaggaaacccaattgctcctggaacacccagtacagcagtgcctattacacctctcggaaaatctag

SEQ ID NO: 240069 - DNA, 549 bp, synthetic construct
  misc_feature 1..549: note = Description of Artificial Sequence: Synthetic coding sequence
  source 1..549: mol_type = other DNA
atgtcgcggtacttgagaccccctaatacatccttgttcgtgaggaacgtggccgatgacactagatcagaggatctcagaagggagttcggaaggtatggtcccatcgtcgacgtgtacgtgccactggatttctacactcggagacccaggggttttgcctacgttcagttcgaggatgttagagatgctgaggatgcactgcacaatctcgatcgtaagtggatttgcgggaggcagatcgagattcagtttgcccagggggataggaagacaccaaaccagatgaaggccaaggagggtcgaaatgtctacagttcaagccggtacgatgactatgaccgataccgaaggagtagatctagatcctacgaacgacgcaggtccaggtcgcgctcttttgactacaactaccggaggagctattcgcctagaaaccggccaacagggaggcctcggagatccagatcgcattctgataacgaccgcccaaattgctcctggaatacacaatactcttctgcatactacacgtctcgtaagatctag

SEQ ID NO: 240070 - DNA, 789 bp, synthetic construct
  misc_feature 1..789: note = Description of Artificial Sequence: Synthetic coding sequence
  source 1..789: mol_type = other DNA
atgagcaggtatctgcgccctccgaatacatccttgtttgtccgcaacgttgcggacgatactcgaagtgaagatctgaggcgagagttcggccgatatgggcctatcgtggatgtctatgtacccctggacttttatactcggcgtccaagagggttcgcatacgtgcaattcgaagatgtccgggacgccgaggacgctctacataatctggaccggaaatggatctgcggcaggcagattgaaatccagtttgcacagggcgatcgcaaaactcctaaccagatgaaggcgaaggagggcaggaatgtgtacagcagctccaggtacgacgattacgataggtaccgcaggtcgcgctcaagaagctacgaacggagaagatcccgaagccgctcattcgactataactaccggagatcttactccccaaggaattcccgtcccactggaaggccccgtcgctctcgctcccactctgataacgatagattcaaacaccggaataggtccttctcacggtccaagtccaatagtagatcacggtccaagtctcaacctaagaaggagatgaaggcaaagtcaaggagccggagtgcctcgcacacgaagacacggggtaccagcaagacagactctaagacacactacaagagtggatctcgctacgaaaaagagagtcggaaaaaagaaccgcctaggagcaaaagccaatccagatcccaaagccgctcccggtcgaaatcacgctctcgcagctggacgtctcctaaaagttctggacactag

SEQ ID NO: 240071 - DNA, 1275 bp, synthetic construct
  misc_feature 1..1275: note = Description of Artificial Sequence: Synthetic coding sequence
  source 1..1275: mol_type = other DNA
atgatcaacaaccatcgcaatcaggccctgtacttctctgagcacaagtactttcagcaaacgcaggttgtctaccaaggcgacatattctgggtgtttctgtgtgtattctgcctgaggaaagagtgcgttttgatgcagggctgtttttctgcaggtgtcatccctgacgaggctaaggccctgagcctgctggcgccagcgaatgccgtggccggactgttgcctggtggaggcctgttgccaaccccaaacccactgacccaaatcggagctgtgcctctagctgcactcggagcacccacattggaccccgctctggccgctctcggccttcctggcgctaacctgaatagtcagagtcttgctgcagaccagctgcttaaactgatgagtactgtggaccccaagcttaatcatgtggcagccggacttgtaagcccgtctctgaaaagcgatacgtcatctaaggaaatcgaggaagccatgaaaagagtgcgagaggcacaatccctgattagtgccgcaatcgaaccagataaaaaggaggaaaaaagaagacacagccgtagcaggagccgctcccgacgtcggaggacgccttcctcctctcgacaccgccgttcaaggtccagatcacgtcgaaggtcacactccaaatcacgctctagaaggaggtcaaagtcccctcggcgaagaaggtcccacagcagggagaggggtcgaaggtccaggtctacctccaagactcgggataagaaaaaagaggataaagagaagaagcgcagtaaaactccccctaagtcatacagtactgctagaaggtcccgctcagccagtagggagagaaggaggcgcagaagtcggtctggcacgcggagtcccaaaaaaccgaggtcgccaaagagaaagctaagcagatctccttcacctaggaggcacaaaaaggagaaaaagaaggataaagacaaagaacgatcgagggatgagcgagaaagaagtaccagcaagaagaaaaagtccaaggataaggagaaggacagggagcgcaagagcgagtctgataaagatgtaaaacaggtgacccgggattatgacgaggaggagcagggatacgactccgaaaaggaaaagaaagaagaaaaaaaacccattgaaaccggtagtcctaagactaaagaatgctcagtcgagaaggggactggggactccctgcgggagagtaaggtaaatggcgacgaccaccatgaagaggatatggacatgagcgactag

SEQ ID NO: 240072 - DNA, 1455 bp, synthetic construct
  misc_feature 1..1455: note = Description of Artificial Sequence: Synthetic coding sequence
  source 1..1455: mol_type = other DNA
atgagcaacacgactgtcgtacctagcactgcaggacctgggccttccggcggacccggtggcggaggcggtggtggcggtggcggagggggaactgaggtcattcaagtaactaacgttagcccttcagccagttctgagcaaatgcgaacactgttcgggttcttaggcaagatcgacgagctgcgtcttttcccccctgacgatagccctttgcctgtcagtagtagggtttgttttgtgaaatttcatgatcccgacagcgcggttgtggcacaacatctcactaacactgtgttcgtcgacagagcacttatagttgtgccttacgccgagggcgtcatcccagacgaagcaaaagctctctcactcttagcacccgcaaatgcggtggcaggattgctccccggaggcggtctcctgcctacacccaatccactgacacagattggggcagtccccttggccgctctgggagctccaactctagatcctgccctggccgcactcggccttcccggagctaatcttaacagccagagcctagctgctgaccaactcttgaagctgatgagcacagttgacccaaagctgaatcatgtggccgcaggtctagtgtccccttccctgaagagtgacacctccagcaaggagattgaagaggccatgaaacgggtccgcgaagcacagagtctgatcagcgctgctatcgaacctgacaagaaggaagaaaaaaggaggcacagccgttcaaggtcaagaagtcggaggcgaagaactccttcaagctcacgacaccgtagaagtcggtcaaggagcagaaggcggtctcacagcaaatcccggagtcggagaagaagcaagagccctcgacggaggcgctcccacagtagagagcggggacgacgatcgagatcaacatccaaaacaagagacaagaagaaagaagataaagaaaagaagagatctaaaacaccacctaagtcatatagcactgcacgaagaagtcgctctgcctccagagagagaagaaggcgtagatcaagaagcggcacacgatcacctaagaagcctcgatccccaaagagaaaactgagtaggtccccttctccccgaaggcataagaaggaaaagaaaaaagacaaggacaaggaaaggagtcgcgacgagcgagaaagaagcacatccaagaagaagaagagtaaggacaaagaaaaagacagagagaggaagtcggaatcagacaaggacgtcaaacaagtcaccagggattacgacgaggaggagcagggctacgacagtgaaaaggagaagaaggaagaaaagaagccgatcgagacaggctcccccaagaccaaggaatgcagcgtggagaaaggaaccggggatagtcttcgtgaaagcaaggtcaacggcgacgatcaccacgaggaggacatggacatgagtgattag

SEQ ID NO: 240073 - DNA, 1452 bp, synthetic construct
  misc_feature 1..1452: note = Description of Artificial Sequence: Synthetic coding sequence
  source 1..1452: mol_type = other DNA
atgagcaacacgaccgtcgttccgagcaccgcaggccctggcccttcaggaggaccaggcggtggtggtggtgggggaggaggcggaggcggtacggaggtcatccaggtgaccaacgtcagcccctcggcttcttcagagcagatgcgcacactgtttggattccttgggaaaatcgacgagctgcgtctctttccgccagatgattcccctcttccagtttcatcaagggtttgctttgtgaaattccatgatccagactctgctgttgtggcacaacatctgacgaacactgtgtttgtcgacagagccctgatcgtggtgccctatgcggagggtgttatcccagacgaagctaaagcactgtcgctcctcgccccagctaacgccgtcgccggtctgctgcccggtggaggtctgctaccgacccctaacccccttacacagattggtgccgtgccactggcggctttaggggcacctactctcgaccctgcactagccgctcttggtctgccaggcgcaaatctcaattctcagtcgctcgcagcagatcagctgttaaaattgatgtccaccgttgaccctaagctgaatcacgtggcggctgggctggtgtccccaagccttaagagcgatacatcgtcaaaggaaattgaggaggccatgaagcgtgtacgagaggcccagtctcttatctcagccgcaatcgagcccgataagaaagaagagaaaaggcggcactcccgctcgcgttcccgatcccgcagacgtcgcacgccatcatcatcgcgacatcggcgatctagaagtcgctctcgtaggaggagtcattctaagtcgcggtctagaagacgctccaagtcacctaggcgcaggcgaagtcattccagagagaggggaaggaggtccagatccacctccaagactcgagataaaaagaaggaggataaggaaaagaaaaggtccaagacaccacccaagtcctattccaccgcccgaagatccaggtctgcttctcgtgagcgacgcagaagacgttcacggagtggtacccgaagccctaaaaagccccgatcacccaagcgcaagctgagtcggagtccgtccccacgaaggcacaagaaggagaaaaagaaggataaggataaggagagaagcagagatgagagggagaggtcaacctctaagaagaagaaatccaaggacaaagagaaagacagggaacgtaagtccgagagtgataaggacgtgaaggtgacccgggactacgacgaagaggagcagggatatgacagtgaaaaggagaagaaggaggagaaaaaaccaattgagactggatcgccgaagaccaaagaatgttctgtcgagaaaggcacaggcgacagccttcgggagtctaaggttaacggagacgaccatcacgaggaagacatggacatgagcgattag

SEQ ID NO: 240074 - DNA, 1170 bp, synthetic construct
  misc_feature 1..1170: note = Description of Artificial Sequence: Synthetic coding sequence
  source 1..1170: mol_type = other DNA
atgtctaacacaacagtggtgccatcaacagctgggcctgggccatctgggggtcccggtggtgggggtgggggaggtggcggaggagggggaacagaggtgatccaagtcacgaatgtgagtccatctgcaagcagtgagcagatgcgcaccttgttcggcttcctaggaaagatcgatgaactaagactattccctccggacgatagcccactgccagtctcttccagagtgtgctttgtcaagttccacgacccagattccgcagtcgtggctcagcacttgaccaatacggtgttcgtcgatagggccctgattgttgttccttacgccgagggagttatccccgacgaagccaaagcgttgagtctgctcgctcccgcaaacgccgtcgccggactgcttcccggtggcggattgcttccaacccctaatcctctcacccagatcggagcagtgccgctcgctgctctgggagccccaaccctcgacccagcgctagcagctcttggactgcctggcgcaaatctcaactcacagagcctggctgcagaccaactgctgaagctgatgagcaccgtcgatccaaagcttaaccatgtcgcggctggcctggtgtcaccatccttgaagagtgatacctcctccaaggaaattgaggaggccatgaagcgcgtgagagaagcccagagcctgatttctgccgctatagagcccgacaaaaaggaggaaaagcggagacacagtcggtcccgaagtcgtagccgcagacggagaacacctagtagttcacgacaccgacgttctcgctcccgcagccggcgtaggagtcactctaagagtaggtctagaaggaggagtaaatcgccccgaagacgaagatcacattcccgggagagaggccgacgaagcagatctacttcaaagacaagggacaaaaaaaaagaagacaaggagaaaaaacgttccaaaacaccacccaagtcttatagtactgctagacggtcaaggtccgctagcagccttcacatttgcgattccagagagaggcgcaggcggcgatcaaggtcaggtactcgaagccctaagaaacctcggtcccccaaacgtaagttgtcccggagccccagtcctagacgtcacaagaaggagaagaagaaggataaatag

SEQ ID NO: 240075 - DNA, 1455 bp, synthetic construct
  misc_feature 1..1455: note = Description of Artificial Sequence: Synthetic coding sequence
  source 1..1455: mol_type = other DNA
atgagcaacacaaccgtggtcccatccaccgccggacccggtccatccggcggacctggtggagggggtgggggagggggagggggagggggaaccgaggttattcaggtgacaaacgtgagcccctcagccagctccgaacagatgcgcacactcttcgggttcctcggcaagattgacgaattgaggctgttcccccctgacgactcgcctctccctgtcagctcccgggtgtgttttgtgaaatttcatgacccggattccgctgtagtcgctcagcacttaaccaatacagttttcgtggatagggcccttatcgttgtgccatacgcagaaggagtcatccccgacgaagccaaggccctgagcctcctcgcaccagccaatgccgtcgccggtctgcttccagggggtgggctgttgcccacccctaacccgctcactcagatcggtgcagtccccctcgctgctctaggcgcacccactctggaccccgcactggcagccctgggactccctggggcaaacctgaattctcagtctctggccgctgaccaactgcttaaactcatgtctactgttgacccgaagctgaatcacgtcgctgctggattagtatctcccagtcttaaatccgacacttcctccaaggagattgaagaggcaatgaagagagtacgcgaggcccagagcctcatatcagcagccatcgagccagataaaaaagaggaaaagcgtcggcactctcggagcagaagccgctctcggaggcgtcgcaccccatcatcatccagacaccgccgatcacggtcccgttcccggagacggtcccacagcaagtcgaggagccggagaaggtccaagtccccgaggcggagacgttcccactctcgggagagaggccgacgctcacggtcgaccagtaagacgagagataaaaaaaaagaagacaaagaaaagaaacgcagcaagaccccgccaaagagctattcaactgccaggcggtctcggtctgcctcccgggagaggcgacggaggaggagtcgctctggcactcggtctccgaaaaagcccagaagccccaaaaggaagctaagccgcagcccttcccctagaaggcataagaaggaaaaaaagaaagacaaagataaggagcgttcccgtgatgagcgtgaacgaagcacatccaagaagaagaagagcaaggacaaagaaaaagatcgggagcgcaagagcgaatctgataaagatgttaagcaggttacccgggactacgacgaggaggaacaagggtacgactctgaaaaagagaagaaggaagaaaagaaacccattgagacagggagtccgaaaaccaaagagtgtagtgtcgagaagggcaccggggatagtcttcgcgaatccaaggtaaacggtgatgatcatcacgaagaagacatggacatgtctgattag

SEQ ID NO: 240076 - DNA, 387 bp, synthetic construct
  misc_feature 1..387: note = Description of Artificial Sequence: Synthetic coding sequence
  source 1..387: mol_type = other DNA
atgtccaacacaaccgtagtgccatctacagccggtcccggaccatccggaggtccgggaggtgggggagggggaggtggtggcggtggcggaaccgaggtaatccaggtgacaaacgtgagcccctcggcctcctcagagcaaatgagaaccctgttcggcttcctcgggaagatcgacgaactccgcctgttccctcccgatgattctcccctgcccgtgagttctagggtgtgctttgtgaagttccatgatcctgactcggccgttgttgcccagcaccttaccaatactgtgtttgtggaccgcgctctgatcgtcgtgccctacgccgaggtgaagcagccaacacgagtcgtggtgcacaagacagcttttgagtcatag

SEQ ID NO: 240077 - DNA, 396 bp, synthetic construct
  misc_feature 1..396: note = Description of Artificial Sequence: Synthetic coding sequence
  source 1..396: mol_type = other DNA
atgagtaacaccacagtagtccccagtacggctggcccaggaccatctggagggcctggcggagggggaggcggaggcggtgggggaggtggaacagaggtcattcaagtcacaaacgtgtctccctctgcctcttcagagcagatgaggactctgttcggcttcctaggcaagattgatgagctgcggctttttccgcctgacgattccccgttacctgtgagcagcagagtgtgcttcgtcaaattccacgaccctgattccgctgttgtggctcagcacctgaccaatacagtgttcgtggaccgcgctttaatcgtggtgccttatgccgaggtcttccacggttcaatcaaggcggcagtgaagaaaattctcctgacccatgagaattag

SEQ ID NO: 240078 - DNA, 630 bp, synthetic construct
  misc_feature 1..630: note = Description of Artificial Sequence: Synthetic coding sequence
  source 1..630: mol_type = other DNA
atgacatctttgaaggtggataacctgacctacaggacatcacctgacaccctgagacgagtcttcgagaaatacggtcgagtcggcgatgtgtacataccacgggatcgatacactaaagaaagccgcggattcgcattcgttagatttcacgataagcgggacgccgaagacgcgatggatgccatggatggggctgttttggatggtcgagaactgagagtgcagatggcacgctacggcaggccacctgatagccatcactcccggcgaggaccccctccccgtcggtatggtggaggaggttatggtcgcagaagccgatcccctcgtaggagaagaaggtctcggtctcgttccagatcaagatcccggtctagatccaggtcacgatactcccgctcgaagtcccgcagtcgaacaagaagccgttcccgctccacctctaagagcagaagtgccagaaggagcaaatcgaagagttcctcggtgtcacgttctagaagtcggtctcgctcgcgaagcagaagtaggtcaccgccaccagtctcaaaacgagagagtaagtcaaggtcacggagcaagtcacccccaaagtcgcccgaggaggagggcgctgtttctagctag

SEQ ID NO: 240079 - DNA, 606 bp, synthetic construct
  misc_feature 1..606: note = Description of Artificial Sequence: Synthetic coding sequence
  source 1..606: mol_type = other DNA
atgtcctatgggcgacccccaccagacgtggagggtatgacatctctgaaggtagacaatcttacttaccgcacgtcaccagacactttgcgaagggtgtttgagaaatacggcagagtgggagacgtgtacattccacgtgaccggtatactaaagagtcacggggatttgctttcgtcagatttcatgacaagagagatgccgaagatgcaatggatgccatggatggagctgtattggacgggagagaacttcgagtacagatggcccgttgtggaggctacgggagaagaagtcgttctccccgacgcagacgcagaagtaggagccggtcacgcagtcgctctcggtcacgtagcagaagcagatacagcagatcaaagtctaggtcccgtactcgcagcagatcccgatcaacttcgaagtcacgatcagcacggcgtagcaagtcaaaatcctctagtgtaagccgaagcagaagcagatcccggagccgcagccgctctcgatcaccccctcccgtgagtaagagagagtccaaaagtcggtcacgctccaaatctcctcccaaaagcccagaggaggagggcgctgtctcctcatag

SEQ ID NO: 240080 - DNA, 666 bp, synthetic construct
  misc_feature 1..666: note = Description of Artificial Sequence: Synthetic coding sequence
  source 1..666: mol_type = other DNA
atgagttacggtcggccacctcccgatgttgaagggatgaccagcctaaaggtcgacaacctcacataccgcacctcccccgataccctcaggcgcgtgttcgagaagtacggaagggttggggacgtgtatatcccaagagaccggtacacaaaggagagcagagggttcgccttcgtacgcttccatgataagagggatgcagaggacgccatggacgccatggatggcgctgttttggatgggcgtgagctgagggtccagatggcgagatacggacgcccaccagattctcatcacagtagacggggaccccctccccgtcggtatggcggtgggggttacgggcgacgcagccgatccccacggagaaggagaagatcccggtcccgatcgaggtctcgcagccgctctcgaagtcgttcacgctacagtcggtccaagtcaaggagccgtactagaagtagatcacgctccacctcgaaatcgagaagcgcccgacgctcaaagtcaaagagctccagcgtatcacgatcccgcagtaggagtaggagccgttccagatcaagatcaccgccacccgtatctaagcgggagtcaaaatccaggagcagatcaaagtctccccctaagtcacccgaggaggagggggctgtctcctcctag

SEQ ID NO: 240081 - DNA, 540 bp, synthetic construct
  misc_feature 1..540: note = Description of Artificial Sequence: Synthetic coding sequence
  source 1..540: mol_type = other DNA
atgtcatatgggaggccccctcctgatgtggaaggtatgacctccttaaaggtagacaacctgacctatcgaacatctcccgacacccttagaagggtgttcgaaaaatacgggcgagtgggagatgtttatatcccccgagaccgctacacaaaagagtctagggggttcgcattcgtcaggtttcacgataaacgcgatgcagaggatgcaatggacgcaatggacggcgcagacccaggcgtcggagttgtcccagggctcgccgcagacttggcaacagctgctcgatctttaggccctgctctcgttctggacctcggcagaccgccatctcccgatccacatgaagggccttccccttctcctcggaggagtcccgatcttgttcgcggtcccggaccagggctcggcccaggtgtcctgccacagtgtccgagaggcaaccctaatcccggaagagaccgccgagtgcccccaagtctcttgaaacgcaaagagagatgccccctaaagaagatgctgagaagtccagtgtag

SEQ ID NO: 240082 - DNA, 669 bp, synthetic construct
  misc_feature 1..669: note = Description of Artificial Sequence: Synthetic coding sequence
  source 1..669: mol_type = other DNA
ccggagagaagaggagtcgcccctcccagagctgaggaggctggtgcctcatctagaggcagtggtcctccactgcgggctatgtcctatggcagaccccctccagatgtggaaggcatgacctctctcaaggtcgacaacctcacctacagaactagccccgatactctgagaagagtcttcgaaaaatacggccgtgtgggtgacgtgtatatcccccgtgatcggtatacaaaggagagccggggttttgcttttgtgcggtttcacgataagagagacgccgaggacgccatggacgcgatggacggggcagtgctggatggccgtgagctacgcgtccagatggctcggtacggcaggccacccgattctcaccattctaggcgtggcccacctcccaggagatacggcggaggaggttatgggaggcgatctcggagccctcgcaggcggcgtcgttcgcgctcaagaagcaggagcaggagcaggagcaggtctcgctcacggtattctcggagcaaaagtcgttcccggacgcggtcaagaagcagaagcacaagcaaaagccgctctgccaggagaagcaagtcaaaatcatccagtgtcagcaggtctcgctccaggtctcgctctcggtcaaggtcccgctcccctccaccggtgtag

SEQ ID NO: 240083 - DNA, 375 bp, synthetic construct
  misc_feature 1..375: note = Description of Artificial Sequence: Synthetic coding sequence
  source 1..375: mol_type = other DNA
atgcaccgggattcctgcccattggattgcaaggtgtacgtaggcaatcttgggaacaacgggaataaaaccgaattggagagagctttcgggtactacgggccacttcggagtgtgtgggtagcaaggaatcccccaggcttcgcgttcgtggagttcgaagacccacgggacgcagccgatgccgttcgggagctcgacggcagaacactttgtggttgtcgggtcagggtggaactgtctaacggcgaaaagcgtagcaggaatcgcggtcctccccctagttggggcaggcggccacgcgacgattatcgaagaagatcccctccaccacggagaagggtgactataatgagcctgctcactaccttatag

SEQ ID NO: 240084 - DNA, 495 bp, synthetic construct
  misc_feature 1..495: note = Description of Artificial Sequence: Synthetic coding sequence
  source 1..495: mol_type = other DNA
atgcaccgagattcttgccccctggactgtaaggtgtacgtaggcaacttaggcaataacggaaataaaaccgaactcgaacgggcttttggctactacggcccattacggagtgtgtgggtcgctcggaatccgccaggattcgcctttgtggaatttgaagatcctcgcgacgcggctgacgctgtccgagagttggacggccgaaccttgtgcggctgcagggtccgggtggaactttctaatggggaaaaaagatcccgcaatcgcggtcctcccccatcttggggtagaagaccaagggatgactaccgcagacgatccccaccaccacgcaggaggtcacctagacgacggagtttttctcggtcacgtagccggagtctcagccgtgacagacggagggaacgctccctctcgcgggaacggaaccataagccgtctcggtctttctctagatcacgttctcgaagtagaagcaacgagaggaagtag

SEQ ID NO: 240085 - DNA, 1485 bp, synthetic construct
  misc_feature 1..1485: note = Description of Artificial Sequence: Synthetic coding sequence
  source 1..1485: mol_type = other DNA
atgccacgcgtatatatcggtagactgtcgtaccaggcacgggaacgtgatgttgagcgattctttaagggatatgggaagattttagaagttgatctcaagaacggctacggatttgtcgagttcgatgacctcagagacgccgatgatgccgtctatgaactgaacggcaaggatctatgcggcgagcgtgtgattgttgaacacgccagagggcctaggagagatggctcatacgggtcgggccgatctggctatggttacaggagaagcggacgggacaaatatggccctcccacccggaccgagtacaggctcatcgtcgagaatctgagcagtaggtgttcctggcaagacctcaaggattacatgcggcaagcaggcgaggtgacttacgccgatgcccacaagggaagaaagaatgagggcgtaatcgagttcgtgagttacagtgacatgaaaagagctctggaaaaacttgatggtaccgaggtgaatggcaggaagatcagactcgtcgaggacaagcctgggtcacgcagaagacggagctattctcgttcccgttcgcacagcaggtctcgaagccggtccagacatagtagaaagtcccgttctcgtagcggtagctctaaatcttctcacagtaagtcgcgttccagatctcggagcggctcaagatcccgatcaaaatcgaggagtcgctcacagtcgaggtctagatctaagaaagaaaagagtcgcagtccatcaaaggaaaagagccgaagtaggagtcactctgcgggaaaaagcaggtcaaagtctaaggatcaggcagaggagaaaatacagaataacgacaacgtaggaaaaccaaagtccagatcaccttcacggcacaagtccaagagcaagtcccggagtcggtcacaggaacgcagagtagaggaggagaaaaggggttccgtaagcagagggaggtcccaggagaaatccctgaggcagtcacgctcgcgctccagaagcaagggcggatcccggagtcgcagtcgctcaaggtccaagagcaaggacaagcgcaagggccgtaagcgatctagagaggagtcacgctctcgttcccgttctcgcagcaagagtgagcggtcccgaaagagggggagcaagagggattccaaagccggatcctctaaaaaaaaaaaaaaagaagataccgatagaagtcagagcaggtccccttcacgctccgttagtaaggagcgggaacacgccaaatcagagagttctcaacgcgaaggacggggagagagcgagaatgcgggtactaaccaagaaacaaggtcaaggagccgtagcaattcaaagtctaaacccaatctaccatccgagtcccgatccaggtccaaaagtgcaagcaagactcgcagccgaagcaagtcccggagccgaagtgcgtcccgctcccccagtagatctcggtctcggagtcacagcagatcctag

SEQ ID NO: 240086 - DNA, 1221 bp, synthetic construct
  misc_feature 1..1221: note = Description of Artificial Sequence: Synthetic coding sequence
  source 1..1221: mol_type = other DNA
atgccacgcgtgtatattggaaggctttcctatcaagctagggagcgcgatgttgagaggttttttaaaggatacggcaaaattcttgaagtcgacttaaagaacggctacggcttcgtagaatttgatgacctgcgcgacgcggatgacgcagtgtacgaattaaatggcaaagacttatgcggagagagggtgatagttgaacatgccaggggccctcggagggacggctcttacggcagcgggaggagtgggtacggatacagacggagtggccgagataaatacggcccacccacccggacagagtacagactgatcgtagaaaatctgtcctctaggtgcagctggcaggacctgaaggactacatgcggcaggccggtgaggtgacctacgcagacgcccataagggcagaaagaacgagggagtcatcgaatttgtcagttattctgacatgaagcgagcactggaaaaactggatggcactgaggtcaatggcaggaaaattagactcgttgaggataaacctggcagccgtcgtaggagatcttattcccggagtagaagccatagcagaagccgcagccgctcaaggcacagccgcaagagcagaagtcgtagcggttcctcaaaaagctcacattcaaaatctcggtctaggtctcggtctggcagcagatcaagatcaaaatctaggtctaggagccagagccggtcacgaagtaaaaaggagaaaagccggtcaccgagcaaggaaaagagccgctctagatcccactctgccggtaaatctcgcagcaagagcaaagaccaagcagaggaaaaaattcagaataacgacaacgtcggaaagcccaagtcacggagccctagtagacacaaaagcaagtcgaaaagccgaagcagaagccaggaacggagggtggaagaggaaaaaaggggtagcgtatcccgtggcagatcccaggaaaagtccctgcggcagagcaggagcagatctaggagtaagggcggaagtagatctcgatcccgctctcgttcaaagagcaaagataaaaggaaagggaggaaacgttctcgagaagaatctcggtcgcggtcaagatctcgcagcaagtcagagcgctcgagaaagagaggttccctcgcttttaggcccggtctgagctacagggaattatctaatctagatgggtccaaagcagggatgaccacatag

SEQ ID NO: 240087 - DNA, 477 bp, synthetic construct
  misc_feature 1..477: note = Description of Artificial Sequence: Synthetic coding sequence
  source 1..477: mol_type = other DNA
atgcccagagtctatattggcaggctgagctatcaagcaagagagcgcgatgtggagagattctttaagggctatgggaagatccttgaggtggacttgaaaaacggctacggcttcgttgaatttgacgacctgcgggacgcagatgacgctgtatatgaactgaatggtaaggatctgtgcggagagcgcgtgatcgtggagcacgcgaggggaccacgcagggatggatcatatggcagcgggagatcaggctacgggtataggcgctctggacgggataaatacgggcctccaactcggacggagtacaggctgattgtggagaatctaagcagccgctgtagctggcaggacctcaaggtaggactacccctccctgaacaggaaccggagcccgagcctgaaagcgagcctgaacaggaaagagagaagcaagagccacagcagggcaaagagccccagccacagccttag

SEQ ID NO: 240088 - DNA, 819 bp, synthetic construct
  misc_feature 1..819: note = Description of Artificial Sequence: Synthetic coding sequence
  source 1..819: mol_type = other DNA
atgagcgggtgcagggttttcatcggtcgcctgaaccccgcagccagagaaaaggacgttgagaggttttttaaaggatacgggaggattcgcgatatcgatttgaaaaggggctttggcttcgtagagttcgaggacccgagggacgccgacgatgccgtctatgagcttgacggcaaggagctctgtagcgaaagagttactatcgagcacgcgagagccaggtccaggggaggccgaggtcgtggacggtacagtgatcgattctccagccgacgccctcgcaacgacagaagaaacgctccccctgtacggaccgagaacaggttgatcgtcgaaaatctttcttcacgagttagctggcaggatctcaaggacttcatgaggcaggctggagaagtcaccttcgcagatgcccaccgtccaaagctcaatgagggggtcgtggagttcgcttcttacggggatctcaagaatgctatagagaagctaagcggaaaagaaattaatggcaggaagataaaactcatcgagggctcaaagagacattcccgcagtcgctcccggtctcgatcaaggaccaggtcctctagccggtcccggtccagatctcgctccaggagcaggaagtcatacagccgaagccggtctcggagccggtctcggtctaggtctaagtcccgctcggtctcccgatctcccgtgccggaaaagtcccagaaaagagggagcagttctcggtctaagtctcccgcttcagtagaccgccaaagatcccggagccgctcccggagcagaagtgtcgattcaggaaattag

SEQ ID NO: 240089 - DNA, 417 bp, synthetic construct
  misc_feature 1..417: note = Description of Artificial Sequence: Synthetic coding sequence
  source 1..417: mol_type = other DNA
atgagcgggtgccgtgtttttatcggacgcttgaatccggcagcgcgtgagaaagacgttgaaagattctttaaggggtatgggaggattcgcgacatcgacctgaagcggggattcggattcgttgaatttgaggacccacgggatgccgacgacgcagtgtacgagttagacggcaaggagctctgctcagagcgggttactattgagcacgccagagctcggagcaggggcggacgtggcaggggaagatattctgacaggttcagttccaggaggcccagaaacgacaggaggaatgctccaccggtcagaactgaaaatcgactaattgtggaaaatctatcgtcgcgcgtaagctggcagccagtgtgcgtcgttggcctgatgacacgtagtgcttgcggcctgtcttag

SEQ ID NO: 240090 - DNA, 819 bp, synthetic construct
  misc_feature 1..819: note = Description of Artificial Sequence: Synthetic coding sequence
  source 1..819: mol_type = other DNA
atgagtggctgtcgggtgttcatcggtcgtctgaacccagcagcccgtgagaaagacgtcgagagatttttcaagggctatgggaggataagagatattgacctaaaaagaggcttcggtttcgtggagttcgaggaccctagggacgccgacgacgccgtgtacgagctcgacgggaaagagctctgcagcgaacgtgtcacaattgagcacgccagagccagaagccgcggtgggaggggacggggtagatactctgatcggttctcttctagaagacccagaaacgatcgacgcaatgctccaccagtgaggacagaaaatcgcttaatcgtggaaaacctgagctcccgcgtgagttggcaggatctgaaggacttcatgcgacaggctggcgaggtcacctttgcggatgcacaccggcctaaactgaatgaaggcgtggtcgagtttgcttcctatggggatttgaaaaacgcaatcgagaagctgtctgggaaagagataaacggacggaagatcaaactgatcgaaggctccaaaaggcatagcaggtcccggtcccggtctcgctcgagaactcggtcgagcagtcggtccagatcacggtcacgcagccgaagccggaagagctattctcgcagcagaagtcgatctcggagcagatcgagaagtaagagtcggtctgtgtctagatctcccgtgcccgaaaagtcgcagaaaaggggctcctctagccgttccaagtcccctgcatcagttgatcgccagaggtctcggagccgaagccgctctcggtccgtcgatagtggcaattag

SEQ ID NO: 240091 - DNA, 819 bp, synthetic construct
  misc_feature 1..819: note = Description of Artificial Sequence: Synthetic coding sequence
  source 1..819: mol_type = other DNA
atgagtgggtgtagggtctttatcggaaggcttaacccagccgcaagagagaaggatgtggaacggtttttcaagggttacggccgaatccgcgacatagacctgaaaagggggttcggattcgtggagtttgaggaccctcgcgacgcagacgatgcagtgtacgaactggacggcaaggagctgtgttcggagagagtgacaatagaacatgcccgagcaaggtcaagaggagggagaggaagaggacggtattctgatagattttccagccgccgacccaggaatgataggcggaacgccccacctgtgcggacagagaaccgcctgatcgtggaaaatttgtcaagccgcgtgagctggcaggacctgaaagactttatgagacaagccggtgaggttacttttgcagacgctcatcgacccaagctgaacgaaggtgtggtcgagttcgcaagctacggagacctaaagaacgccattgagaaattgtctggcaaggaaataaacggccgtaagatcaagcttatcgagggaagtaaacgccactcacgatccaggtcacggagtcggtcgcggacaagatcaagctcgcggagtcgcagtcgctcccggagcaggtcccggaagagctacagcagatcccgctctagaagccgcagtagaagtcgtagcaaatcccggtcagtatcacggtcccccgtgccagaaaaaagccaaaaaagaggctcctcatccagatctaagtccccggcttccgttgaccggcagcgctcacgtagcagaagccgatccaggtcagtcgacagcgggaactag

SEQ ID NO: 240092 - DNA, 1035 bp, synthetic construct
  misc_feature 1..1035: note = Description of Artificial Sequence: Synthetic coding sequence
  source 1..1035: mol_type = other DNA
atgcctagagtgtacattggcagattgagctacaatgtgcgtgagaaagacatccagcggttcttcagcgggtacggaaggctcttagaagttgatttgaaaaacggctacggatttgtagagtttgaagacagtcgggacgccgacgatgcagtctacgagctcaatgggaaagaattgtgcggagaacgggtgattgttgagcacgctagaggaccccgacgtgatagggacgggtatagctatggtagccgatccggtggcggaggttatagctccagacgcaccagcggtcgtgacaagtacggtcccccagtgaggaccgaataccgcctgatcgtggaaaacctgtcctcccgctgttcgtggcaggatctgaaagacttcatgcgacaggccggtgaagtcacctatgccgacgcacacaaggaaagaaccaacgagggagttatcgagtttaggagttacagtgatatgaaacgcgcattggacaaattagatgggaccgagatcaacggcagaaacatacggctaattgaagacaagcctcgcacatcccatcggaggagttactccggatctagatcccgtagtagaagccgccgacgatctcggagtaggagcagacgcagttccaggagtagatcccggagcatctcaaagtcccggagtagatcaagatctcgaagtaagggaagaagcaggagccggagcaagggccgtaagtctagatccaagagtaaatcaaaacctaagtctgatcgcggaagccattcacactccaggtcccgaagtaaagacgagtacgagaagagcaggtctcgatcaaggtctagatcccccaaagaaaacgggaagggcgacatcaagagcaaatctcggagtcgttctcagtcacgcagtaatagccccttaccggtgcccccttcaaaggctagatctgtgtctcccccacccaaacgggcaacatcccgcagccgctccagaagtaggtccaaatcacgcagtagaagtaggagttctagtcgggactag

SEQ ID NO: 240093 - DNA, 717 bp, synthetic construct
  misc_feature 1..717: note = Description of Artificial Sequence: Synthetic coding sequence
  source 1..717: mol_type = other DNA
atgagccggtacgggagatacggaggcgagacaaaagtatatgtcggcaacttgggaacaggtgccggtaagggcgagctcgagcgagccttctcctattacggacccctgcgtaccgtgtggatcgcaagaaacccaccagggttcgcatttgtagagtttgaggaccccagagacgccgaggacgccgttagaggccttgatggtaaggttatttgcggcagccgcgtgcgcgtggagctgtccacggggatgccgcgaaggagtcggtttgatcgcccacctgcaagaagaccctttgatccaaatgatcgatgttacgagtgcggcgagaaaggccattatgcctacgactgtcacagatactccaggagaagaagaagtcgatcaagaagtcggagtcactcccggtcaaggggcaggaggtatagcaggagccggagccgttcccgaggccgacggagcaggagcgccagcccaaggagaagccgatctatatcccttcggcgttcccggagcgcttctctgcgaagaagtagaagtgggtccatcaaaggcagtagatacttccagagcccaagccggtccagatcgcggagccgctcaattagcagaccacggtcttctcggtcaaaaagtcgttccccttcacctaaaaggtcacggtctccctctgggagtccaagacgatctgcctcccctgaaaggatggactag

SEQ ID NO: 240094 - DNA, 681 bp, synthetic construct
  misc_feature 1..681: note = Description of Artificial Sequence: Synthetic coding sequence
  source 1..681: mol_type = other DNA
atgtctaggtacggacggtacgggggagagacaaaggtatacgtaggcaacctgggcaccggcgcaggcaaaggggagcttgagcgagccttcagctactacggaccgctcagaaccgtgtggatcgcgaggaaccctccagggttcgcctttgtagagttcgaggaccccagagatgcggaagatgcagtacgtgggttggatggcaaggttatctgcgggagcagagtacgcgtggaattaagcaccggtatgccacggagatccaggttcgatagaccccctgcacgacggcctttcgatccgaacgaccgctgctacgaatgcggggaaaaaggtcactacgcttacgattgccataggtattctagacggagacgctctagatcgcgttctcggtcacactcccggagcagaggccgaaggtatagccgaagccgatcccgcagccggggaaggcgcagcagaagcgctagcccccgacgcagcagatctatcagtttacgacgtagtagatcggcttccttgcggcgttctcgctctggatcaatcaaaggctctcgatactttcagagcccatctcgatcacggtcccgatcacgcagcattagccgcccacggtctagccggagcccctctgggagcccacgccgaagtgcatctccagaaagaatggattag

SEQ ID NO: 240095 - DNA, 1926 bp, synthetic construct
  misc_feature 1..1926: note = Description of Artificial Sequence: Synthetic coding sequence
  source 1..1926: mol_type = other DNA
atgaactgggctgccttcggaggctcagagttttttataccagagggcatacagatagactctcgatgccctctgtctcgcaacatcacggaatggtaccattactacgggatagccgtgaaagagtcttctcaatattatgacgttatgtactccaaaaagggcgctgcctgggtgtcagagacaggcaagaaggaagtgagcaagcaaactgtcgcttattccccaagaagcaagttaggaaccctgctgcctgaattccccaatgtgaaagacctcaatttacctgccagtttgccggaggagaaagtcagtaccttcatcatgatgtatcgcacgcattgccagcgtattctagacaccgttattagagccaactttgacgaggtccagagcttcctcctgcacttttggcaggggatgcctccacacatgctgcctgtgctaggctcaagcaccgtggtgaacattgtgggagtctgcgactctattctctataaggcaatctccggcgtgttgatgcccaccgtcctgcaggcccttccagactccctcacccaggtgatccgcaagttcgcaaaacaacttgatgagtggctaaaggtggccctgcacgacctgccagagaatctgcgcaacataaaattcgagcttagtaggcgattctcacagatcctcaggagacagacatcgttgaaccacctctgccaagctagtagaactgtaatacattcggccgacatcacttttcagatgctggaagactggcgcaacgtggatctgaactccattaccaagcagaccttgtacaccatggaagattcccgcgatgaacatcgcaaactgatcacccagctgtatcaagaatttgatcatctgctagaggaacagagcccaatcgaatcatacatcgaatggctggataccatggtggatcgctgcgtagtaaaggtggcggctaagcgccagggttccttgaagaaggtagcccagcagttcctgctgatgtggagttgcttcggcacgcgtgttattcgcgatatgacactccatagcgcgccaagcttcggctccttccatctcattcatttgatgttcgacgattacgtactgtatctgctcgaatccttacattgtcaagagagggccaacgagctaatgcgcgctatgaaaggagagggatccacagccgaggtgcgggaagagataattttaactgaagctgccgctcccactcctagcccggtcccctcctttagccctgctaagagcgctacttcggttgaagtgcccccacctagttcgcccgtttctaatcctagccccgaatatacgggcctctccacaacaggagctatgcagtcttacacatggagcctgacttacacagtgacaaccgctgcgggttctcccgcagaaaatagtcagcaattaccctgcatgagaaatactcacgtcccaagctcttccgttacacataggattcctgtctacccgcatcgagaagagcacgggtacacgggctcttacaattatggcagttatggcaaccagcatcctcatcctatgcagtctcagtacccggcacttccccacgacactgcaatctctgggcctctccattacgccccatatcatagatcgtctgctcagtacccattcaactcccccacttcacgtatggagccttgtctcatgtcatcaacacccagattacatccaaccccagttactcctagatggcctgaggtaccatcagcaaacacatgctacacttccccatcagtgcactccgctaggtatggcaactcctccgatatgtatacaccactgactacccggaggaattcagagtacgagcatatgcagcattttccaggattcgcatatattaatggggaagcttccacagggtgggctaagtag

SEQ ID NO: 240096 - DNA, 2907 bp, synthetic construct
  misc_feature 1..2907: note = Description of Artificial Sequence: Synthetic coding sequence
  source 1..2907: mol_type = other DNA
atggcatttgctaactttagaaggatcttgaggctgtcgacattcgaaaagagaaagtcacgcgagtacgaacatgtccgccgtgacctggatcccaacgaagtttgggagattgtgggtgagctgggcgacggcgcattcggcaaagtctacaaggcaaagaataaggagaccggcgcactggcagccgcaaaggtaatcgagacaaagtctgaagaagagcttgaagattacatagtagaaattgagattctcgccacctgcgatcacccttatatcgtcaaactgctcggggcttattaccacgatggaaagttgtggatcatgatcgagttctgcccaggcggtgctgtggacgcaataatgttggagctggaccgcggactcaccgagcctcagattcaggttgtgtgccgacaaatgctcgaggccctgaacttcctgcactccaaaaggattattcatcgcgatctgaaagctggaaacgtcctgatgacgctcgaaggagacatccgcctcgcagatttcggagtctccgctaagaacctgaagacgttgcagaagagagactctttcatcggcacaccatactggatggcgcctgaggttgtgatgtgtgagacaatgaaggacacgccctacgattacaaggccgacatttggtctctgggaatcacattgatcgagatggcccagatcgagccaccgcatcatgagctgaatcccatgcgcgtacttctgaaaatcgctaagtcagaccctcctacgctcctgaccccatccaaatggagtgtggagttcagagatttcctcaaaatcgctctggacaagaaccccgagacaagacccagtgccgcacagctgcttgaacatcctttcgtctccagcatcacatctaacaaggcattgagggaattggtggccgaagccaaggctgaagttatggaagaaatagaagatgggagagacgaaggggaagaggaagatgcagtggacgcagcttcgacgcttgaaaatcatacacagaattcatcggaagtctcccctccctcactgaacgcagacaagcctctggaggagagtccttctacacccttagctcctagtcagtcacaggactcagtgaacgaaccctgcagtcagccttctggtgatcggagcctccagacaacctcccctccagttgtggccccaggcaatgagaatggcctcgcagtgcctgtgcctttgagaaaatcacggccagtgtctatggatgctaggatccaggtggcacaggagaagcaggtcgccgagcagggcggtgacctgagtcctgctgctaatcggagccagaaagctagccagtccagacctaactcatccgctttggaaaccctaggaggagagaagcttgcaaatggcagcctggaaccccctgcacaagcagcccctggaccgagtaagagggattcagactgctcttcactgtgcaccagtgaatccatggattatggaaccaatctgtccactgatctgtccctgaacaaagaaatgggttccctctcaataaaggatcccaagctgtacaaaaagaccctgaaacgtaccaggaagttcgtagtggacggtgttgaagtgagcataacaacaagtaaaatcatatcagaagatgagaagaaagatgaagagatgcggttcctcagaaggcaagaactgcgagagctccgcctgctgcaaaaagaggaacacaggaatcagacccagctgtccaacaagcacgagctacagctggaacagatgcacaagaggttcgagcaggagattaatgccaaaaaaaagttcttcgatacagaacttgaaaacttggagaggcagcagaagcagcaggtggaaaagatggagcaagaccatgctgtccgccgtcgggaagaagcccgtcggattaggcttgagcaagaccgggattacacgagattccaggagcagctcaagctcatgaaaaaagaagttaaaaacgaagtagaaaaactcccaaggcaacaaaggaaagaaagcatgaagcagaagatggaagagcacactcagaagaaacagctgctagatagggatttcgtggccaagcagaaggaggatcttgaactggcaatgaaaagactgaccacggacaataggcgcgagatctgcgataaggagcgagaatgtcttatgaagaaacaggagctgcttcgggacagggaagccgcattgtgggagatggaggaacatcaattacaggagaggcaccagttggtcaaacagcagctgaaggaccagtactttttacagcgccacgagctgcttcgcaagcatgagaaggaacgcgagcagatgcaacggtacaatcagcggatgatcgagcagctcaaagtacgacagcaacaagaaaaagcgagactgcctaaaattcaaagatctgaaggtaagacccggatggcaatgtataaaaagtcgctgcacatcaatggcggaggctccgctgccgagcagcgggagaagattaagcagttcagccagcaggaggagaaaagacagaagagtgagcgtcttcagcagcaacaaaagcacgagaatcagatgagagacatgctcgcccagtgcgagagtaacatgtctgagctccagcagctccagaatgagaagtgtcacctgctcgtggaacacgaaacccagaagctaaaagcgctcgacgaatcccataaccaaaacctgaaggaatggcgggataaactgcggcctcgaaagaaggccttagaggaggatctgaatcagaaaaaaagagagcaggaaatgtttttcaagttgagcgaggaggcagaatgccctaacccatcaacgccttctaaagctgcaaaattctttccctattcttccgccgatgctagctag

SEQ ID NO: 240097 - DNA, 2907 bp, synthetic construct
  misc_feature 1..2907: note = Description of Artificial Sequence: Synthetic coding sequence
  source 1..2907: mol_type = other DNA
atggccttcgcgaacttccgaagaattctgaggttgtcaacctttgagaagcgcaagtctcgggaatatgaacacgtgaggagggacctcgatccgaacgaagtctgggaaatcgtaggcgaactgggagacggtgcatttggcaaggtatataaagccaagaataaggaaacaggcgctttagctgctgccaaggtcatcgaaaccaaaagcgaggaagaactcgaggattacatcgtggagatagagatactcgccacttgcgaccatccctatattgtgaagctcctcggcgcttactatcatgacgggaagctgtggatcatgatagagttctgtcccggtggagctgtggacgctatcatgctggagctagaccggggactcaccgagccgcagattcaggtggtttgtcgacagatgctagaggccctgaatttccttcacagcaaaagaattattcatcgcgacctgaaggctgggaacgtattgatgactctcgagggtgacatccggcttgctgactttggcgtgtcggccaaaaatctcaagacactccagaagagagacagtttcatagggacgccttactggatggcacccgaagtagtcatgtgtgagaccatgaaggatacgccctacgattacaaggccgacatttggtcacttggtataaccctcatcgaaatggcgcagatcgaaccaccgcaccacgaactaaatccaatgcgcgttctgctaaagattgccaagagcgatccgccaaccctgctgacccctagcaaatggtccgtggagttcagggatttcctcaagatcgcactggacaagaaccctgagacgcgcccaagcgccgcacagttattagaacacccatttgtttcttcaattacttctaacaaggctctgcgcgagcttgttgctgaggcaaaggccgaggtaatggaggaaatcgaggatggcagggacgagggtgaagaagaagacgcggtagacgctgcgagcacactggaaaatcatacacagaactctagtgaggtctcccccccatctctgaacgcagacaagcctctagaggagtcaccttcaacgcctctcgccccttcacagtcccaagattcagtgaatgaaccctgcagtcagccgtccggcgatcggagcctgcagaccacatctcctcctgtcgtagctccagggaacgagaatgggttggccgtcccagtaccactgagaaagtcccgtccagtctctatggacgcgaggattcaggtagcccaggagaaacaggtcgccgagcagggcggagatcttagtccggctgctaataggtcccagaaggcctcccagtctcgccctaattctagcgcactcgaaaccttgggaggagagaagctcgccaacggtagcctcgaacctcccgctcaggccgcacccggtcctagcaagcgggattccgattgcagctccctctgtactagtgagagtatggactatggtaccaatcttagcaccgacctgagcctcaataaagagatgggttccctcagcatcaaggacccaaagctgtacaagaagacgctgaagaggactcgcaaattcgttgtggatggggtggaggtgtccatcacaacctctaagatcatctccgaagatgaaaaaaaggatgaagaaatgcggttcctccgaaggcaggaactcagggaactgcgactgctgcagaaggaggagcaccgaaaccagacccagctgtctaataagcacgagctccaactcgagcagatgcataagcgttttgaacaggagattaacgccaagaaaaaatttttcgatacagaacttgagaacttggaaagacaacagaagcaacaggtggagaaaatggaacaggatcacgctgtcaggcgtcgagaagaggccagacgaattcggctggaacaggatcgggattacacaagattccaggaacagttgaagcttatgaagaaagaagtgaaaaacgaagtggagaaattgccacggcagcagaggaaggagtccatgaagcaaaagatggaggagcacacacagaagaagcagttgctcgatcgtgatttcgtcgctaagcaaaaagaggacttagagctggcaatgaagagactgactaccgacaacagacgggagatctgtgataaggagagagagtgcctgatgaaaaagcaggagttgctgagggacagggaagctgccctgtgggagatggaagagcaccagcttcaggagagacaccagctggtcaagcagcagctcaaagaccaatactttctgcagcgtcatgagctccttaggaagcatgaaaaagagagggaacagatgcagcgctataaccagcgcatgattgaacagctgaaagtccggcagcagcaggagaaggctagactgcctaagatacagagatcggaggggaaaacacgaatggccatgtataaaaagtccctgcatattaatggcggagggagtgctgccgaacaaagagaaaaaatcaaacaatttagtcagcaagaagagaaacgacagaagagcgagaggttgcagcagcagcaaaagcatgaaaaccagatgagagacatgcttgcccagtgtgaatcaaatatgagcgaactgcagcagttgcaaaatgaaaagtgccacttgctcgtggaacacgagactcaaaagctgaaagcactagatgagagccacaatcagaacctgaaggagtggagagacaaactgcgccctcgcaaaaaagccttagaagaggacctaaatcagaaaaagcgggaacaggagatgttcttcaaattaagtgaagaggctgagtgtcccaacccctcgactccaagcaaagcggcaaagttttttccttacagttccgccgatgcgtcttag

SEQ ID NO: 240098 - DNA, 3300 bp, synthetic construct
  misc_feature 1..3300: note = Description of Artificial Sequence: Synthetic coding sequence
  source 1..3300: mol_type = other DNA
cgcttcggtagcgctccacagagacccgtggccatgacaaccgcacaacgcgactctcttctgtggaagttagccggactcctgcgagagagtggagacgtggttttgtcaggctgctccaccctgtccctactgacacccacactccaacagttgaaccacgtattcgaattacacctcggcccatggggcccagggcaaacgggcttcgtggcactaccctcccatcctgcagatagcccagttattctccagctacagttcctgttcgacgtcctccaaaaaacactaagcctgaagttggttcacgtggctggcccaggcccaaccggaccaattaagatatttccttttaagagcctcaggcatctcgaactgcggggtgtgccacttcattgtctgcacggcctgcggggtatctacagccagctggaaaccctgatctgcagccgtagcttgcaggcactggaagaattgctctccgcctgcgggggagacttctgttccgctcttccatggctcgctctgttgagtgccaacttctcttacaatgcgctaactgcgctcgactcttcactgcggctactttctgccctgcggtttctgaacctttctcacaatcaagttcaggactgtcagggttttctgatggacctgtgcgagctgcaccacctggacatcagttataatagactgcatctagtgcccaggatgggacctagtggggcagccttgggggtgctgatcttgaggggcaacgagcttcgcagcttacatgggctggagcagctgagaaatttgaggcatttggacctagcttacaatctgttagagggtcaccgggagctctcccctttgtggctgttggccgagctgaggaagctatatttggaagggaacccactgtggttccatcccgaacaccgcgctgcaacagcccagtaccttagcccacgggcacgtgatgccgctacaggcttcttgttggacggcaaagttctctctttaaccgatttccagacgcacacaagcctggggctatctccaatggggccaccactgccttggcctgtaggatctacccctgagacatcaggaggtcccgatctgagtgattctctgtcttccggcggagtagttactcagccgttgcttcataaggtcaagagccgcgtgcgcgttcgcagggcaagtatcagcgagcccagcgacacggacccagaaccccgtactctcaatccgtcccccgctggctggtttgtgcagcagcaccctgaactggagctcatgagcagttttcgcgagagatttgggaggaactggctgcagtaccgaagtcacctcgaaccaagcggcaatcctcttccagctacacccacaacctctgccccatcagccccacccgcttcctcacaggggcctgataccgccccaagacctagtccccctcaggaagaggctagggggccacaggagagccctcagaaaatgtcagaagaagtgagggctgagccccaggaagaggaagaggaaaaagaggggaaagaagaaaaagaggaaggcgaaatggtcgaacaaggagaagaagaagccggtgaagaggaggaggaagagcaggaccagaaagaggtggaggccgagctgtgccgacccctcctcgtatgtccactcgaagggccagaaggagtgcgcggaagggaatgtttcctgagagtgacttcggcacacctgttcgaggtcgaactccaagcagccagaaccttggagcggttagaactccagagcctggaggcggctgaaattgagcctgaggcccaggcccagcgaagtccacggccaaccggttcagatctgttgcctggggctccgatactatctctacgcttctcgtatatctgtcctgatagacagctgcgcagatatctggtgttggagccagatgcacacgctgccgtgcaggaattattggctgtactgacaccagtaactaacgtcgctcgggaacagctgggagaggccagagatctgttacttggcagattccagtgtctgcgctgcgggcacgagttcaagccggaggaacctaggatgggactggacagtgaagaggggtggagaccacttttccaaaagaccgaaagtccggcagtttgccctaattgtgggtctgaccacgtggtgctgctagccgtttctcgaggaactcctaacagggaaagaaagcagggtgagcagtccctcgccccttcaccgtcagcttcccctgtttgccatcctccaggccacggcgaccacctggatcgggcaaagaattctccccctcaagcgcctagtacaagagatcatggcagttggtcactgtcccctcctcccgagcgctgcggactacggagcgtggatcacagactgcgcctgttcttagacgtagaggtcttctctgacgctcaagaagagttccagtgttgcctgaaggtgccagtcgcattagccggacataccggggagttcatgtgcctggttgtggtctctgacagacgcctgtacctactcaaagtcaccggcgaaatgcgcgaaccaccagcttcatggctgcaactaacactcgctgtaccgctgcaggacctgagcgggatcgaattgggccttgctgggcagagcctgcgcttggaatgggctgctggagccggtcgctgtgtcctgctgcccagagacgcccgtcactgcagagccttcctagaagagctgctcgacgtgctccagtctctgccccctgcttggcgtaattgcgtaagcgccaccgaggaggaagttacgccgcagcacagactttggcccctccttgaaaaggatagctcgttagaggccagacagtttttctatttgagggcattcctggtggagggccctagtacctgcctggtgagcctgttgttaacccccagcaccttattcctgttggatgaggatgccgctggaagtccagctgagcccagcccacccgctgcctctggtgaggccagtgaaaaagtgcccccttctggcccagggccagcagtgcgggtaagggagcagcagccactctctagcctaagctctgttctcttgtatcggtctgcgccagaagatctgcgtcttttgttctacgacgaagtgtccagactcgaatctttctgggcactcagagtcgtgtgccaggaacaactcacagcactgctggcctggatcagggagccatgggaagagctcttttctatagggcttcgcaccgtgatccaggaggcactcgccctggacagatag

SEQ ID NO: 240099 - DNA, 1938 bp, synthetic construct
  misc_feature 1..1938: note = Description of Artificial Sequence: Synthetic coding sequence
  source 1..1938: mol_type = other DNA
aggtttggctctgcccctcaacggcctgtggccatgactaccgctcagagagattccctgctctggaagttagccggacttctccgggagagcggtgacgttgtcctctctgggtgttctaccctcagcctcctgacaccaacactacagcaactgaatcacgtgtttgagctgcatctggggccatggggccctggccagactggctttgtggcattgccttctcacccagctgactcccctgtaattttgcagttgcagtttctctttgatgtgctccaaaagactctctccctcaaactcgtacacgtcgctggcccaggtccaacgggaccaatcaagatctttccattcaagtcactcagacatttagagttgagaggtgtcccattacactgtctgcacggactaaggggcatctactctcaactcgagacattaatctgcagtcgctcccttcaggctctagaggagctcttgagtgcctgcggcggagatttctgtagcgcactgccttggttggcactgttatctgctaatttctcttacaatgcgctgaccgcgttggactcatcactgaggcttctttctgcgctcagatttctgaatctgagccacaatcaggtgcaagactgtcagggatttttgatggacctctgtgaacttcatcacttagatattagttataaccggctgcacctggtgcccagaatggggcctagcggtgcagcactcggagttttgattctgcgtggtaacgaacttcgcagcctgcacggccttgagcaactaagaaatttaagacacctggacctcgcctataacctgcttgagggtcacagggagttgagtccactatggctactggcggagttgaggaagttcttgttggatggcaaggtcctttctctgacagatttccagacccacaccagtctgggtctgtctcctatggggcctccactaccttggcccgtcggtagcactcccgaaacatccggcggtccggatctgtccgacagcctttcaagtggtggagttgttacacagccactgttgcacaaggtgaagtcacgtgtgcgcgtgcgacgcgctagcatttccgaaccctctgacacagaccctgagccacgaacactgaatcctagtcctgctggctggtttgtgcagcagcatcccgagctggaattaatgagctccttcagagagagattcgggagaaattggttgcaataccggagccatcttgaaccatctggcaatccgctgccggctactcctactacttccgcgcctagtgcacctccagccagcagtcagggcccagataccgcccctagacccagccctccgcaggaggaggccagaggccctcaggaatctcctcagaaaatgtctgaggaggtcagggcggaaccgcaggaggaagaagaggagaaggaagggaaagaagaaaaggaggagggtgaaatggtggaacagggtgaagaggaggctggcgaggaagaagaagaggagcaggaccagaaggaagttgaggccgaactctgcaggcccctcttagtgtgtccactggaggggcctgaaggagtaaggggtcgagagtgttttcttcgcgtgacatccgcacacttatttgaggtggagctccaggctgctaggacattggagagactggagctacagtctctggaagctgccgaaattgaaccagaagctcaagcgcaaaggagcccccgaccaaccggttccgatttactgccgggtgcacccattctgagtctgagatttagttacatttgccccgataggcagctgcgcaggtatctggttttagaacctgacgcacacgcagccgtgcaggttatggctcccagggttggcgctcaagaagctgtgggcatcaaacgcgcaagggggaagtggcaacaggcatag

SEQ ID NO: 240100 - DNA, 1095 bp, synthetic construct
  misc_feature 1..1095: note = Description of Artificial Sequence: Synthetic coding sequence
  source 1..1095: mol_type = other DNA
atgcagaagtggttctccgcattcgacgatgctatcatccagcgacagtggagggctaacccttctcgtggagggggtggcgtatccttcacaaaggaggtcgatactaacgtcgccactggtgcccctccacggagacaaagggtcccgggacgggcatgcccatggagggaacccatccgcggacggaggggcgctcgccctggcggtggcgacgccggagggacgccgggtgaaactgtacgacattgttctgcaccagaagatcctatttttaggttcagctcacttcactcctatccttttcctggaactattaagtctagagatatgtcatggaaacggcatcacctcatcccagaaaccttcggggtcaaaaggcgacgcaagcgagggcctgttgaaagtgaccccctaaggggggagcctggatctgcccgagctgcagtctctgaacttatgcagctgtttcctcggggtttgttcgaagacgcactgccaccaatcgtcctcagatctcaggtctactctctcgttccagaccgcacagtggcagacaggcaactcaaggagctgcaggagcaaggggagatcagaatcgtgcaactgggcttcgacctcgatgcgcacggaatcatttttacagaggattatcggactcgcgtgctcaaggcctgcgacgggagaccctatgcgggagcagtgcagaagttcctggccagcgtgttgccagcgtgtggcgatctgtcctttcaacaagaccagatgacgcagacattcgggttccgggactctgagatcacgcacttggttaatgcaggggtcctcacggtgcgagatgctggcagctggtggctagccgtccccggtgcgggtcggttcatcaagtactttgtaaagggtcgccaggccgttctgagcatggtcagaaaggccaagtacagagaactcctgctgtcggaactgctggggcgaagagcacctgtcgtggttaggctgggcctgacataccatgtacatgatctgattggcgcacagctagtggactgcatctcaactacaagcggaaccctgctccgtcttccggaaacatag

SEQ ID NO: 240101 - DNA, 1107 bp, synthetic construct
  misc_feature 1..1107: note = Description of Artificial Sequence: Synthetic coding sequence
  source 1..1107: mol_type = other DNA
atgcagaagtggttcagcgctttcgacgatgcaataatacagcggcaatggagggctaatccttcaagaggcggaggaggggtgtcatttactaaagaagtggacacaaacgtagccacgggtgcgccaccacgcaggcaaagagtgcctggccgagcctgtccctggcgggaaccaatacggggacggagaggcgctagacccggagggggtgacgcaggagggaccccaggcgagacagtccgccactgtagtgcaccagaggaccctatttttcgcttcagctcactgcacagctatccctttcccggaacgattaagagtcgagatatgtcctggaaacgacatcaccttatccctgaaacatttggagtcaagcgccgaagaaagcgcggtcccgttgagtcagatcctttacgcggagagcctggcagtgctcgcgcagcggtgtccgaactgatgcagctgttcccacgcggtctctttgaagatgcactcccaccgattgtgcttcggtctcaggtgtatagcctcgtcccagaccgcactgtggccgataggcagctcaaggagctccaggagcaaggggagattcgtatcgtacagcttgggtttgacttggacgcacacgggattattttcacagaagattacaggacaagagtgtgcgattgtgtgctcaaagcttgcgatgggaggccttatgccggagccgttcaaaagtttcttgcgagtgtgcttcctgcctgcggtgatctttcatttcagcaggaccagatgacgcagacgtttggcttccgggactctgagataactcaccttgttaacgccggagtgctgactgtgcgggacgccggtagctggtggctggccgtgccaggtgccggtagatttataaaatactttgtaaaaggaagacaggctgtgctgtcgatggtgcgaaaggcgaaatacagagagttgttgctcagcgagctgctaggcagaagggcccctgtcgtggttcggctggggctgacctatcacgtgcacgatctgattggagctcagcttgtggattgcatctcaactacgagcggcacactgttgcggctccccgaaacctag

SEQ ID NO: 240102 - DNA, 1107 bp, synthetic construct
  misc_feature 1..1107: note = Description of Artificial Sequence: Synthetic coding sequence
  source 1..1107: mol_type = other DNA
atgcagaagtggttttccgccttcgatgacgctattatccaacgacagtggcgcgctaacccctcacggggagggggaggagtcagttttaccaaagaggtagacaccaacgttgcaactggagccccacccaggcggcagcgagtgcccggaagggcctgtccatggagggagcccatcaggggacggaggggggctaggcctgggggaggagatgcaggcggaacccccggagagacagtaagacactgctcagcccctgaggacccaatctttcgattctcatctttacattcttacccctttccaggcactatcaagagcagagatatgtcctggaaaagacaccacttgatacctgagacctttggcgtgaagaggcggagaaagaggggccctgttgagtctgatcctctgcggggagaaccaggcagcgctagagcagctgtatctgagctgatgcagttatttcccaggggacttttcgaagacgctctcccaccaatcgttctgcgaagtcaggtgtatagtctggtcccagaccgcacagtcgcagacaggcagctgaaagagttgcaagagcaaggggagataagaattgttcagttaggattcgatctagacgctcacgggattatttttacagaagattacaggacccgcgtgtgtgattgtgtgctgaaggcttgtgacggtcggccttatgccggagcggtccaaaagtttctcgcaagcgtcctgcctgcatgcggggatctgtctttccagcaggaccagatgacgcagaccttcggattccgtgattcagagatcacacatctggttaacgccggtgtcctgaccgtcagggatgccggaagttggtggttggcagtcccaggagcaggtcggtttattaaatattttgtgaagggtcgccaggcggtcttgggaatggttaggaaggccaaatatagagagctcctgcttagtgagctcctcggacggcgagcaccagtagtggtgaggctgggtctgacataccacgtccacgacctcattggcgctcagttagttgattgtattagtaccacatcaggcacacttctgagactgcctgagacttag

SEQ ID NO: 240103 - DNA, 1095 bp, synthetic construct
  misc_feature 1..1095: note = Description of Artificial Sequence: Synthetic coding sequence
  source 1..1095: mol_type = other DNA
atgcagaagtggttcagcgccttcgacgatgccataatccagcgccaatggcgtgccaatcccagtagagggggaggaggagtgtcattcacaaaggaggtggacacaaatgttgcgactggcgctccccctaggagacaaagggtgccagggagagcctgcccgtggagggaaccaatccggggaagaagaggcgctaggcccggtggtggggacgccggagggactcctggagaaacagtgagacattgcagcgctcctgaagatcccatctttaggttcagctcactgcactcgtaccctttcccagggactattaagagtcgagatatgtcctggaaacgccaccatttgatccccgaaacctttggtgttaaacggcgtcgcaagaggggccctgttgagagcgaccctcttagaggcgagccaggatccgccagagctgcagtgtccgagctgatgcagttgttcccacggggactgtttgaagatgcgctaccgcctatagtgttacgctcccaggtgtacagccttgtgcctgatcgcacggtggcagaccgtcaattaaaggagctgcaagagcagggcgagataaggattgtccagctgggcttcgatttggacgcccacggaattatcttcactgaggactatcgtacccgcgtgctaaaggcctgcgatggtagaccttatgccggagcagtgcagaaatttctggccagcgtcctgccggcttgtggtgacctgtcattccagcaggaccaaatgacgcaaacgttcggcttcagagatagtgaaatcactcatctcgttaacgcgggagtgctcactgtaagagacgccggtagttggtggctggctgtgcccggagccggtcgcttcatcaaatattttgttaagggacgccaggccgtgttaggcatggtgagaaaagcaaagtaccgcgagcttctgctgagcgagctgttgggaagaagagcaccagtggtggtgcgcctcggactgacctaccatgtgcacgaccttatcggagcccagctcgtggattgcattagtacaactagcgggacactactgagactgcctgaaacatag

SEQ ID NO: 240104 - DNA, 1095 bp, synthetic construct
  misc_feature 1..1095: note = Description of Artificial Sequence: Synthetic coding sequence
  source 1..1095: mol_type = other DNA
atgcagaaatggttctcggctttcgatgacgcaataattcaacgtcagtggagggctaatccttcaaggggcggaggaggcgtgtcgtttacgaaggaggtcgatacaaatgtcgcgacaggcgcacccccaaggcgccagcgagttcccggtagggcctgtccctggcgtgaaccgattcgcggacgtcgaggggcacggccaggcggaggagacgctgggggaacacccggagagactgtaaggcattgctctgcccctgaggacccgatctttaggttttccagtcttcatagttacccatttccaggtaccatcaaaagtcgagatatgagctggaagcgccaccacctcatcccagaaacctttggtgtaaaacgtagacgcaagaggggccctgtggaatcggacccattgcgcggtgagcctggatccgcgagagccgctgtgtctgaactgatgcagctgtttccaaggggcctgttcgaagatgccctgccccctattgttctgcgcagccaggtctatagcctcgtacctgatcgcacagttgcggacagacagttgaaggagctccaggaacagggcgaaatacgcattgtgcaactcggattcgacctagacgcgcacgggatcatcttcaccgaggactacaggactcgcgttctcaaagcttgcgatggacgcccttacgctggagctgtgcagaaatttctggccagcgtacttcctgcatgcggggacttgagttttcagcaggatcagatgactcaaacctttgggttccgcgactcagagataactcacctggttaatgccggagtactgactgtccgcgacgccggttcctggtggttggccgtgccaggagccggaaggtttattaagtattttgtgaaaggccgacaggctgtgctgtctatggtcagaaaagccaaatacagagaacttctcctgagcgaactgcttggcagacgtgctccagtcgtagtccggctgggcctgacctatcatgtgcacgatctgatcggcgctcagttggtggattgtattagcacaacatcaggcaccctcctccggctccccgagacctag

SEQ ID NO: 240105 - DNA, 1095 bp, synthetic construct
  misc_feature 1..1095: note = Description of Artificial Sequence: Synthetic coding sequence
  source 1..1095: mol_type = other DNA
atgcagaagtggtttagcgcattcgatgatgcaattattcaacgacagtggcgggcaaaccctagtcggggtgggggtggtgtgtcttttaccaaggaggtggacaccaatgtagcgaccggcgcaccacccaggagacaaagagtgcccggacgggcttgtccatggcgggagcctataagaggaagaaggggcgcacggcctggcggaggcgatgccggagggacccccggtgaaaccgtgcgacactgcagtgcccctgaagaccccatctttcgctttagctccctgcactcataccctttccctgggacgatcaaatcccgggatatgagctggaaaagacaccatctcattccagagacattcggcgtcaagcggcgaagaaagagaggtcctgtcgagagcgacccactcaggggcgagcctggtagtgccagggctgccgtatctgagcttatgcagctcttccccagagggctattcgaggatgcgctgcccccaatcgtgctacgctcccaggtttactctctggttccagatcgcaccgtggctgacaggcagctgaaggagttgcaggagcaaggggagatccggatcgttcaacttggctttgatctcgacgcccacgggatcatcttcaccgaagactatcgaactcgagtactgaaggcatgtgacggcagaccctatgcgggagcagttcagaagtttctagcatcggttttgcctgcttgtggggatttgagttttcaacaggaccagatgactcagacctttgggttcagagactcagaaatcactcatcttgtgaacgcaggggtgcttacggtgcgcgacgccggttcatggtggcttgcggtgcccggagcgggacgctttatcaagtatttcgttaaagggagacaggccgttctcagtatggtacggaaggctaagtatagagaattgcttttgtcggaattgttaggaagaagagcaccggtcgtcgtccgcttaggcctcacttaccatgtgcatgatcttatcggtgcccagctcgtagactgcatctcgactactagcggaaccttgctgcgtttacctgagacatag

SEQ ID NO: 240106 - DNA, 1095 bp, synthetic construct
  misc_feature 1..1095: note = Description of Artificial Sequence: Synthetic coding sequence
  source 1..1095: mol_type = other DNA
atgcaaaaatggttcagtgcgttcgatgatgcgataatccagaggcagtggagagccaatccctccagaggtgggggaggcgtttcctttaccaaggaggtcgacactaacgtagccacgggagcgccaccgcgtcgccaacgtgttccagggcgagcctgtccttggcgcgagccgattcgagggagacgaggggcaagaccaggcggaggcgacgcagggggaacaccaggtgagaccgttaggcattgctcggctcctgaagaccctatcttcaggttcagctccctccattcctaccccttcccgggaactattaagagtcgggacatgagttggaaaagacatcatctgattcccgagactttcggtgtcaagcgcagacggaagagaggccctgtcgagtcggaccccctgcgaggagagcccggatccgccagagctgcagtgagcgaattaatgcagcttttcccacggggacttttcgaggatgcccttcctccaatagtgttgaggagtcaggtctattcgctagttccggatagaacagtggctgatcggcaattgaaagaacttcaagagcagggagagattcgaatcgtccagcttggtttcgacctggacgctcatgggatcatcttcactgaggactataggacgcgcgtacttaaggcctgcgacggccgaccttatgctggggctgtgcagaaattcctcgcatccgtgttgcccgcttgtggggacctctctttccagcaggaccagatgacgcaaacttttggattccgggactcagagattacccacttagtgaacgccggagttctgaccgtgagagacgccggatcatggtggctggctgtccctggcgctgggagatttatcaagtatttcgtgaaaggcagacaggcagtgcttagtatggttcgaaaggcgaaatatcgagagttgctgctctcagaactgctgggtcggagagcccctgtcgtcgtccgcctcggcctgacttaccatgtccacgacctgataggagcccagttggtggattgcataagcacaaccagtggaactctcctgcgactccccgagacctag

SEQ ID NO: 240107 - DNA, 1107 bp, synthetic construct
  misc_feature 1..1107: note = Description of Artificial Sequence: Synthetic coding sequence
  source 1..1107: mol_type = other DNA
atgcagaagtggttctctgcatttgatgatgccattatccagcggcagtggcgggctaacccatctcggggaggtggtggcgtatcttttaccaaggaggtggacaccaacgtcgcgaccggcgctcctccaagaaggcagcgcgtcccagggagggcatgcccctggcgagagccaataaggggacgcagaggtgctagacctggaggcggtgatgcaggaggtactcccggtgagacagtgcgtcactgttcagccccagaagaccctatctttcgcttctctagtctacattcgtacccatttccgggtaccataaagagccgtgacatgtcctggaagaggcaccatcttatccctgaaaccttcggggtaaagcgaaggcggaaacgtggccctgtggaaagtgatcctcttcgaggcgagccgggtagcgcaagggcagccgtgtcggagctgatgcaactgttccccagaggactgttcgaggacgctttaccacctatcgtattgcgcagtcaggtttattccctggtgcccgatcgtacggtggcggatcgtcagctcaaggagcttcaagagcagggtgagatcaggatcgtgcaactcgggtttgatctcgacgcccacgggatcatatttactgaagactacagaactcgcgtgtgcgattgtgtcctgaaagcatgtgatgggaggccatatgctggtgccgtgcagaaattcctggcgagcgtgttacctgcttgcggagatctaagctttcagcaggatcagatgactcagacattcggctttcgcgatagcgagataacacatctggtgaacgctggagtgctcacagtacgtgacgccggttcttggtggttggccgttcctggagccggaagatttataaaatacttcgtaaaaggccgacaggccgtcctctcaatggttagaaaggcaaagtaccgagaattactgctgtctgaactgctcggacgcagggcacccgtcgtcgtacgactggggttgacgtaccacgtacacgatctcatcggcgctcaattagtcgattgcatttccacaacaagtggtactctgctgcgactgcccgagacatag

SEQ ID NO: 240108 - DNA, 1107 bp, synthetic construct
  misc_feature 1..1107: note = Description of Artificial Sequence: Synthetic coding sequence
  source 1..1107: mol_type = other DNA
atgcaaaagtggttttcagctttcgacgatgctattatacagcgacaatggagggctaatccaagcagaggtggaggcggagtgagcttcacaaaagaagttgatactaacgtggctacaggcgcaccccctcgtcgtcagcgggtccctgggagggcttgtccctggcgggagcctataagaggacgacgtggcgcacgccctggaggcggagatgccggaggcactcccggagagaccgtcagacactgcagcgcccctgaagaccccatttttcgttttagttccttacactcatatccttttcccggaacgattaaatcccgagatatgtcttggaaaaggcatcatctgatccccgagacctttggtgtaaaacgaagacgcaagcgtgggcctgttgagagtgatcccctaaggggcgaaccaggtagcgcccgagccgctgtttctgagctgatgcagctattccccagggggctattcgaggacgctttgccacccatagttctccgcagtcaggtctactccctcgtcccggatcggacagtggccgatcggcagcttaaagagcttcaggaacagggagagatccgcattgtgcagctgggatttgatttggacgcacacgggatcatatttacagaggactacagaacacgcgtgtgcgattgcgtcttgaaggcctgcgatggtcggccatatgccggagccgtgcaaaaatttctggcctcagtgctgccagcttgtggtgacctgtcatttcaacaggaccagatgacccaaacgttcggctttagggacagcgagatcactcatttggtaaacgccggagtcctaactgtcagagacgcaggttcatggtggctggcggtgcctggcgcagggagatttataaaatatttcgtaaagggtcgtcaggcagtcctgtcaatggtgcggaaggccaagtatagagagctcctgttgagcgagcttctcgggaggcgggcacctgtggttgttcggctgggcctgacctatcacgtccatgacctgattggggcacaactggtagattgtatcagcaccacctccggcacgttgctccgattaccagagacctag

SEQ ID NO: 240109 - DNA, 1107 bp, synthetic construct
  misc_feature 1..1107: note = Description of Artificial Sequence: Synthetic coding sequence
  source 1..1107: mol_type = other DNA
atgcagaagtggttctcagcctttgacgacgccattatacagcgacagtggcgtgcaaacccttcgaggggtggagggggagtgtcttttaccaaggaggtcgacaccaatgttgcaacgggagcgccaccacggaggcaacgcgtgcccggaagagcttgtccatggagagagccaatcagagggaggaggggcgctcgccctggcggaggtgatgccggtggtacccccggagaaaccgttcgtcattgttccgcccctgaggatcctatcttcagattttcatccctgcatagctaccctttccccggaactatcaagagtcgggatatgagctggaagcgccatcatcttatccctgagactttcggggtgaagcgccgacggaagcggggacccgttgagagcgacccactgcgcggtgagcccggaagtgcccgagccgctgtgtctgaactcatgcagctgtttccgagaggactgttcgaggatgcactgccgccaatcgtgctcagaagccaggtttactctctcgtgccagatagaacagtagcagatcggcagttaaaggaactgcaggaacagggggagattaggatagttcagttgggatttgatctggatgcacatggtataatcttcaccgaggactatcggacccgggtgtgtgactgtgtgcttaaagcctgtgacggaagaccttacgctggagccgtgcagaagttcctcgcctccgtgcttcccgcatgtggcgatctgtcttttcaacaggaccagatgactcaaaccttcgggtttcgtgacagtgagattacccatctggttaatgcaggtgtgctcactgtgcgggatgccggatcgtggtggctcgctgtaccaggcgctggcagattcataaagtactttgttaagggaagacaggctgtcctgtccatggtccgcaaggctaagtatcgtgagttgttgttgtccgaactgctgggccgacgggcacctgtcgtggttcgtctgggcctcacctaccacgtgcacgatctgatcggcgctcagttagtcgactgcatcagtaccaccagcggaacattactgagactgccggagacatag

SEQ ID NO: 240110 - DNA, 1095 bp, synthetic construct
  misc_feature 1..1095: note = Description of Artificial Sequence: Synthetic coding sequence
  source 1..1095: mol_type = other DNA
atgcaaaagtggttctcggctttcgatgacgctatcatccaacggcagtggagagcaaatccaagtagggggggaggaggcgtaagtttcaccaaagaggtggatactaacgtagccaccggcgctcctcctagacggcaacgggtcccaggcagggcctgcccatggcgcgagcctattcgcggaagaagaggcgctcggcctgggggaggagatgctgggggaacccccggagagacagtccgacattgttccgccccagaggatcccatctttagattcagttccttgcacagctacccatttccaggtaccattaaaagccgagacatgtcatggaagaggcatcacctgattcccgaaaccttcggtgtgaaacgcagacgtaaacgcggacctgtggagagcgaccctctcagaggggaaccagggtctgcaagggctgccgtgagcgagctgatgcagctatttcccaggggcctcttcgaagacgcgttgccaccgatcgtgctgcgctcacaggtgtattctctggtcccagatagaacagtggcagataggcagctgaaggaactccaggagcaaggcgagattagaattgtacaattgggctttgacttggacgcccatggcattatattcacagaggattaccgcacgagagtgttaaaagcttgtgatggtcgcccatatgcaggcgctgttcaaaagtttctggctagtgtgctccctgcctgtggcgacctgagcttccagcaagaccagatgacacagaccttcggcttccgcgactcagagatcacacacctggtcaatgctggggtcctgactgtgcgtgacgcaggtagctggtggctcgccgtgcctggcgcagggagatttattaagtacttcgttaaaggtaggcaagccgtactttctatggtgagaaaggccaagtaccgagagctcttgctttctgagcttctgggacggagagccccagtggtcgtgcggctgggactgacataccacgtgcacgatttgattggtgcccagctggtggactgcatcagcactacgtcaggcacccttctgcgactgccggagacttag

SEQ ID NO: 240111 - DNA, 1107 bp, synthetic construct
  misc_feature 1..1107: note = Description of Artificial Sequence: Synthetic coding sequence
  source 1..1107: mol_type = other DNA
atgcaaaaatggttttccgccttcgacgatgctattattcagagacagtggagagccaacccttctagaggcggtggtggcgtaagttttaccaaggaagtggacaccaacgtcgcaactggcgctcctccccgacgacagcgagtaccgggacgagcttgtccctggcgtgagcctattcgaggtaggcgtggcgctaggcccggaggcggtgacgccggagggacacccggagagacggtgcgccactgcagcgcgccagaggatcccatctttcggtttagctccctacattcatacccgttcccgggaaccatcaaatctcgcgacatgagttggaagaggcaccatctcattccagagacattcggcgtgaagcgtcgccgaaaaagggggccagtggagtcggaccctttgcggggtgagcccggatcagccagagcggcagtgagtgaactcatgcagctcttccccaggggattatttgaggatgccttgcccccaattgttcttcggtctcaagtgtatagtttggtgccagacaggactgtggctgatagacagctcaaagagctccaagagcagggtgaaattaggatcgtgcagctagggttcgacctcgatgcccacggtattatttttactgaggattaccgtacgcgggtctgtgattgtgtgttgaaagcttgcgatggacgcccttacgcaggagccgtgcagaagttcctcgcgagcgtgctccccgcatgtggggacctgtcatttcagcaggatcagatgactcaaacctttgggtttcgcgactccgagattactcatcttgtgaacgccggtgttctgaccgtgagggacgccggatcgtggtggctggccgtgccaggcgctggtagattcataaaatactttgtgaagggaaggcaggcggttctgagcatggtcaggaaggccaaatatcgtgaactgctactttcagagctgctggggagacgtgcccctgttgtcgtgaggcttgggctcacctatcatgtgcacgatttgataggtgcacagctcgtggactgcatatcaacgacatccggaacactgctgagactgcctgagacttag

SEQ ID NO: 240112 - DNA, 339 bp, synthetic construct
  misc_feature 1..339: note = Description of Artificial Sequence: Synthetic coding sequence
  source 1..339: mol_type = other DNA
atgcagaaatggttttcagcattcgacgatgccatcatccagcgtcagtggcgggcaaatccctctcgtggtggagggggagtgagttttacgaaggaagtggatacaaatgtcgccactggcgcacctcccaggaggcagagagtccccggtcgcgcttgcccttggcgggaacccatcaggggtcgtaggggagcgaggcccggagggggagatgcaggaggcacgccaggcgaaacagtgaggcattgcagcgctcccgaagatcctatcttcaggttctcttccttacatagttacccctttccgggaactattaaatctcgcgatatgtcctag

SEQ ID NO: 240113 - DNA, 966 bp, synthetic construct
  misc_feature 1..966: note = Description of Artificial Sequence: Synthetic coding sequence
  source 1..966: mol_type = other DNA
atgcttgtttgtgcctcacctcctccccttcctgccttaaccggcctacgcgacgacaagctgactcttctcagcagctcacctggactgggtgggacacccggtgagaccgtccgacactgttcagccccagaagaccccatattcagattttcctctctgcacagctatcccttccctggaacgattaaaagcagagacatgagctggaagcgacaccatcttatcccggaaacattcggtgtgaagcggcgacgcaaaagaggccctgttgagagcgatccccttaggggagaacctggtagcgccagggcagctgtgagcgaacttatgcagctatttccacggggtttgtttgaggacgccttgcccccaattgtccttagaagccaggtctattccttggtacctgataggactgtcgccgacaggcagttaaaggagctacaggagcaaggcgaaatcaggattgtgcagcttggttttgacctggacgctcatggtattatcttcacggaagattatcggacccgcgtcctcaaagcatgcgacggcagaccttacgcaggagctgttcagaagtttttggcaagtgtgctgccagcctgcggcgacctaagcttccagcaagaccagatgacccaaactttcggcttccgggattcggagatcactcaccttgttaacgcaggcgttctgaccgtaagggatgctggttcatggtggctcgccgtcccaggggctggccgattcattaagtatttcgtcaagggcaggcaggccgtgctaggcatggtgaggaaggcgaaatatcgtgagttgctcctcagcgagctgctgggacggagggctcctgtcgtagtgagactgggactgacttatcacgtccacgacttaattggggctcagctggtagattgtattagtactacatcaggaaccctgctaagactccctgaaacatag

SEQ ID NO: 240114 - DNA, 966 bp, synthetic construct
  misc_feature 1..966: note = Description of Artificial Sequence: Synthetic coding sequence
  source 1..966: mol_type = other DNA
atgctggtctgtgcctcccctcccccactgcctgcccttactggccttcgggatgataaactgaccctcctgtctagtagccctgggctgggcggaacccccggagaaactgtgcgacactgcagcgctccagaggaccccatttttcgcttcagctccttacattcctatccattccccggaactatcaaatccagggacatgtcttggaaacgccatcatcttatacctgagacatttggagtcaaacggaggaggaaaagaggacccgtcgagtcagatcccctgcggggtgagcccggttccgctagagctgctgtgtcagaactgatgcagctgtttccgaggggactatttgaggatgcactgcctccaattgtcctacgatcccaggtctacagtttagttcctgaccgtaccgttgccgaccgccagttaaaggagttgcaagagcagggcgagatacggatcgtgcagctgggctttgatctagatgctcatggcatcatcttcacggaagattaccgaaccagggtgctcaaggcttgtgatggcagaccttacgccggtgcagtgcagaagttcctcgcaagcgttctccccgcatgtggtgacttaagctttcagcaagaccagatgacccagacctttgggttcagagattccgagattacccatctggtgaacgcgggagtactgacggtgcgagacgctggctcctggtggcttgctgtgccaggagccggtcgctttataaaatactttgtaaagggacgacaggcggtccttagcatggttagaaaggctaaatacagagaacttctgttgtctgagcttttaggcagacgcgcacctgtggtcgtcagactaggcctcacttatcatgtgcatgacttgattggcgctcagctggtcgattgcattagcaccacttctggaacgctactccgcctgcccgagacctag

SEQ ID NO: 240115 - DNA, 966 bp, synthetic construct
  misc_feature 1..966: note = Description of Artificial Sequence: Synthetic coding sequence
  source 1..966: mol_type = other DNA
atgctagtgtgtgcgtccccccctccccttccagccctcacaggcctaagggacgacaaactaacgctgctcagttcctcgcccggtctcggagggactcccggagagaccgttaggcactgctccgcccctgaggacccaatctttaggttctcttcactgcactcctatccattccctggaactatcaaatctagagacatgtcttggaagagacaccacttaattcctgagactttcggagtcaagcgcagacgcaagagggggccagttgaatccgatccactaaggggcgagccaggcagcgccagagcagctgtcagcgagctgatgcaattgttccctaggggactgtttgaagatgctctgccgccaatcgtcctacgaagtcaggtgtactcgctcgtgcctgatagaacggtggccgatcgccaattaaaggagctacaagaacagggagagatcaggatcgttcagctgggtttcgacctggatgcccacggcattatatttactgaggactatcgcaccagggtgctgaaggcttgtgacggcagaccttacgcaggagctgtgcagaagtttcttgccagtgttctgcccgcttgcggagatctctcttttcaacaggatcagatgactcagacctttggatttcgggacagtgagattacccacctggttaatgctggtgtgctgacagtgagagatgctgggagctggtggctggctgtgcctggcgctgggagatttatcaagtacttcgtgaaggggcgtcaggctgttcttagcatggtgcggaaagctaagtaccgggaactattgttgagcgagcttcttggtcgcagagctcccgtggtcgtgcggctgggcctaacctaccatgttcatgatttaatcggtgctcagctcgtcgactgcataagcaccacttcagggacattgctgcggctgccagagacctag

SEQ ID NO: 240116 - DNA, 966 bp, synthetic construct
  misc_feature 1..966: note = Description of Artificial Sequence: Synthetic coding sequence
  source 1..966: mol_type = other DNA
atgcttgtctgtgcctcccctccacctctcccagctctgactggcttgcgtgatgacaaactgaccctactgagctcatcccccggtcttgggggtacacctggggagactgtacgacactgttcggcccctgaagacccaattttccgttttagcagccttcactcttacccctttcctggaaccattaagtcccgcgatatgagctggaagagacaccatttgatccccgagacgtttggagtcaaacgccgacgtaagcgtgggccagtggagtctgaccctttgaggggtgagcccggttctgccagggccgctgtgagcgagcttatgcaattatttcctcgtggcctgttcgaggacgccctccccccaatagttctgcgcagccaagtgtattccctggttccggatagaacagtggccgatcgccagttgaaggagctgcaggaacaaggggagatccggatcgttcagttggggttcgatctggatgcgcacgggatcatcttcaccgaggattatcgcaccagagtcttgaaagcctgtgacggacgcccatacgctggggcagtgcagaagtttttggcctccgtgctgcctgcctgcggtgatttaagtttccaacaggaccagatgacacaaactttcggcttccgggattccgagattacccacttggtgaatgcgggtgtcctgaccgtgcgcgacgcgggttcctggtggctggctgtcccaggggcagggcgttttatcaagtatttcgtgaaggggaggcaagccgttctgtccatggtgcgaaaggctaaatacagggagctactcctgagcgagctgctgggacggagagcccctgtggtggtgaggctagggcttacctatcacgtgcatgatctgattggagcccagcttgtcgattgtatatcaactacatcaggcacactcctccggctaccagagacctag

SEQ ID NO: 240117 - DNA, 966 bp, synthetic construct
  misc_feature 1..966: note = Description of Artificial Sequence: Synthetic coding sequence
  source 1..966: mol_type = other DNA
atgctcgtttgtgcctcccctccacctctccctgccttgacaggattacgcgacgacaagctgaccctgctcagtagctcccccggtcttggagggactcctggagagacggtgaggcattgcagcgcacccgaagaccctatctttcgattctctagcctgcactcatatcccttccctggaaccattaagtcaagggacatgtcatggaaacgccatcacctgattcccgagacattcggagtcaagcggagaagaaagaggggcccagttgaatctgacccattaaggggggaacctggatcagccagagccgctgtctcagaactgatgcagctgtttccacgaggcctgttcgaggatgccctgccgcctattgtgttgcgctcccaggtttattctttagttccggacaggacagttgccgaccggcagctgaaggagcttcaagaacagggagagatccggattgtgcagttaggcttcgatctggacgcccatggcatcatcttcacggaggattacagaactcgggtcctgaaagcctgcgatggcagaccttatgcaggcgctgtccagaagtttctggcgtccgtgcttcctgcctgcggtgatctgtcctttcagcaggaccagatgacacagaccttcggtttcagagatagcgaaattacacaccttgtcaatgccggagtattaacagtgagggacgccggaagttggtggttggctgtccctggggcagggagattcataaagtacttcgttaaaggtcggcaagctgtgttgtcaatggtcaggaaagctaagtatagggaacttctgttatcagagctgctggggaggagagctcccgtggtagtaaggctaggcttaacatatcacgtgcatgatctgattggagcgcagctagtggattgtatatccacaacttccgggacgttgcttaggcttcctgagacttag

SEQ ID NO: 240118 - DNA, 1320 bp, synthetic construct
  misc_feature 1..1320: note = Description of Artificial Sequence: Synthetic coding sequence
  source 1..1320: mol_type = other DNA
atgcagaacttgaaagcagacccagaagaattgttcacaaagttagagaagataggcaaagggtccttcggagaggtgtttaagggaattgataaccggactcagaaggtagtagcaattaagatcatcgatttggaggaggccgaagatgagatagaagacatccagcaagagatcacagtactcagtcaatgcgactccccctatgttactaaatactatgggtcgtacctgaaagataccaagttgtggattatcatggaatacctcgggggagggtccgccctcgacctgcttgaaccgggacctctcgacgagactcaaatcgccactatcctgcgggagatcctaaaaggcttggattacctgcacagtgaaaaaaaaatccatcgcgacattaaggccgctaatgtgttgctgtcagagcacggcgaagtcaagctagctgatttcggggtggctggccagctaaccgacacacagatcaaacgaaatactttcgtgggaacgccgttctggatggcccctgaagtgatcaagcagagcgcttacgactctaaggccgatatctggtcactgggcatcactgctattgagctggcccgtggcgagcctccccattctgagttacaccccatgaaggttctgtttttgatccccaaaaataatccgcctaccctcgaaggcaattactcaaagccactaaaagagttcgtggaggcctgtctcaataaggaacctagcttccgacctaccgcgaaggagttacttaagcataagtttattttacgaaacgccaagaaaacttcctatctgaccgaacttatcgacagatacaaaaggtggaaagccgagcagtctcatgatgactccagcagtgaagattcagacgccgagactgacggtcaggctagtggcggttctgactcgggggattggatctttacaatacgcgagaaagaccccaagaacttggaaaacggagccctccagccatctgatctcgacagaaataaaatgaaggatataccgaaaaggcccttttcgcagtgcctgtccactataatcagccccttgtttgcagaattaaaggaaaaatctcaggcctgtggcggtaacctcggttccatcgaggaattgagaggagctatctacctagcagaagaagcttgccctgggatatcagacacaatggtggcgcaacttgtccagcgtctccagcgttccatacacggaaaccaagcaccaccggattgtcacctcgctcaggtgcaggctttcggagggtctgggtgcgtgttagggagtagatcagtctag

SEQ ID NO: 240119 - DNA, 672 bp, synthetic construct
  misc_feature 1..672: note = Description of Artificial Sequence: Synthetic coding sequence
  source 1..672: mol_type = other DNA
atggccccagaagtgatcaagcagtcagcgtacgatagtaaagccgacatctggtcgctcggaataaccgcgatcgagcttgctcgcggagagcccccacatagcgaactgcacccgatgaaggtcctgttcctgattcccaaaaataaccctcctaccctagaagggaactactctaagcccttgaaggaattcgttgaagcctgcctaaataaagagccttcctttcggccaacggccaaagagctgctgaagcataaattcattttgagaaacgcgaaaaagactagttatctcaccgagttaattgaccgctataagcggtggaaggccgagcagtctcatgatgattcctcgtccgaggacagcgatgccgaaaccgacggccaagccagtgggggaagtgatagtggggactggatcttcacgatcagagaaaaggaccccaagaatctagagaatggggctctgcagccctccgaccttgatcgtaacaaattgaaggagaagagccaagcatgtggcggaaatctaggctcaatcgaggaactcaggggcgcaatatatctggccgaggaagcatgccctggaatttccgacactatggtggcccaactggtgcaacgactgcagcgctactcgctgtcaggcggaggcactagcagtcattag

SEQ ID NO: 240120 - DNA, 1332 bp, synthetic construct
  misc_feature 1..1332: note = Description of Artificial Sequence: Synthetic coding sequence
  source 1..1332: mol_type = other DNA
atggacagcagagctcagctctggggcctcgcgcttaataagagacgcgctactctgccacacccagggggttcaaccaatctaaaggcggatccagaggaattgtttacgaagcttgaaaagatcgggaaaggatcgttcggcgaagtattcaaaggcattgataacagaacccagaaagtcgtagctataaagattatagacctggaggaggctgaagacgagatcgaagacatccagcaagaaattactgtgttaagccagtgtgatagcccgtatgtaacgaagtactacggctcttatctgaaagacacaaaactgtggataataatggagtacttgggaggcggtagtgccttagacctgctggagcccggtccactggacgaaacacagatagctactattctgagagagatactcaaaggtctggactacctccatagtgaaaagaaaatccaccgggatatcaaggctgcaaacgtgctgctgagcgaacacggagaggtgaagcttgctgatttcggcgttgcagggcagctcacagatacccagatcaagcggaacacctttgtcggcaccccattctggatggcccctgaagtgattaagcagtctgcatacgattctaaggccgacatttggagcctggggattacagctatcgaactggcacggggagaaccaccccactctgagttgcacccgatgaaggtgctcttcctgatcccaaagaacaatccacccaccctcgagggaaactacagcaagcctctcaaagaattcgttgaggcttgcctcaacaaggaaccttccttcagaccgacagccaaagagctgttgaagcacaagttcattctgcggaatgctaaaaaaacctcttacctgactgagcttatagaccgttataagcggtggaaagccgagcagtcacacgacgactctagtagcgaagactccgacgccgaaactgacggtcaggcctctggcggatccgacagtggtgactggattttcactatacgcgaaaaggatccaaagaacctggagaacggggctctgcagcctagtgacttggaccggaacaagatgaaggatatccctaagcgaccgttctcacaatgcttatccactattataagtccgctctttgccgagttgaaagagaagtctcaagcgtgcggcggtaatttgggttccatcgaggagctgcgaggggcaatctacctggcagaagaggcttgcccagggataagtgacacaatggtcgctcagctggtgcagcggcttcagcgatactctctgagcggcggtggtactagcagccactag

SEQ ID NO: 240121 - DNA, 1296 bp, synthetic construct
  misc_feature 1..1296: note = Description of Artificial Sequence: Synthetic coding sequence
  source 1..1296: mol_type = other DNA
atggcgcatagcccagtgcagtccggcctaccagggatgcagaaccttaaggccgatcccgaagagctgtttactaaactggaaaagatcggtaaaggctctttcggagaggtctttaaaggtattgataaccggactcaaaaggtcgtggctatcaaaattatagacctagaagaagcggaggacgagatcgaagatatacaacaggaaataaccgtcctgagtcaatgcgactccccctacgtcaccaaatactatgggtcttacctaaaagacactaagttatggataattatggagtatctaggcggagggagcgccctggatctgcttgagccaggccctcttgacgagacacagatagccacaatcctccgggagatcctaaaaggactcgactacctgcatagcgaaaaaaaaattcaccgggacattaaggcggcaaatgtcctgctaagcgagcatggtgaagtgaaactggcggatttcggtgtagccggacaactgaccgacacccaaattaagcgtaacacgttcgtaggcacccccttctggatggccccagaagtcattaagcagtctgcttacgatagtaaggcggacatttggtcacttgggatcacagccatcgaactagccagaggcgagcccccacactctgagctgcaccctatgaaggttctgtttctgatcccaaagaataaccctccaacactggaaggtaattacagtaaacccttaaaagaatttgtggaagcctgtttaaacaaagagccgtcattcaggcccactgccaaggaactgcttaaacacaagtttatcctccgcaacgccaagaagactagctaccttactgagctgatcgacagatataagcgatggaaagctgagcagtctcacgacgacagctcctcggaggactccgatgctgagaccgacggacaggccagtggcggaagcgatagtggagactggatattcaccattcgagaaaaagaccctaagaacctggaaaatggcgctctgcaaccatctgacttggaccgtaacaagatgaaggatatacctaaaagacctttctcccagtgtctctccaccatcatctccccattatttgccgagttaaaggaaaaatctcaggcctgcggcggaaatctcggcagcattgaggagttgaggggagccatttaccttgctgaagaggcatgcccaggcatcagcgacaccatggtggcccagctcgttcagcgtctgcagcgctattcactgtccggcggaggtacctcttcgcactag

SEQ ID NO: 240122 - DNA, 1239 bp, synthetic construct
  misc_feature 1..1239: note = Description of Artificial Sequence: Synthetic coding sequence
  source 1..1239: mol_type = other DNA
atggcccactcacctgtacagtccggattgccaggcatgcagaatttgaaggccgacccagaagaactgtttacaaagctagagaagattggaaaaggctcgttcggcgaagtgttcaaggggatcgacaataggacccagaaagtcgttgccattaaaatcattgatcttgaagaggccgaggacgagatagaggacatacagcaggagatcacagttctgagccaatgtgatagcccttacgtcactaaatactacggctcatatttaaagctcgaacccggtccgctcgatgaaacacagatcgcaactatcctacgagagatactaaaaggcttggattatctccattcagaaaaaaaaattcaccgcgacatcaaggccgcaaatgtgttattgtccgaacacggtgaggttaaacttgccgactttggagtggctggccaactgactgatacacagataaaaaggaacacattcgttgggacccccttctggatggcccctgaggtcataaaacagtccgcctatgactcaaaggctgacatttggtcactcgggatcacagccatagaactggcaaggggcgagccccctcattctgaactgcaccccatgaaggtcctgtttttgatccctaaaaacaaccccccaacgctggagggtaattactctaagcccctgaaggagtttgtggaagcctgccttaataaagaaccatcctttagaccaaccgcaaaggagcttctaaagcataaattcatcctcaggaatgccaagaaaacctcctacctgaccgaactcattgaccgatataaacggtggaaggccgaacagtctcacgacgatagctcttccgaagactcggacgctgagacagacgggcaagcatctggaggctccgatagcggagactggatcttcacaatccgggaaaaggaccctaaaaacttggaaaacggcgcactgcaacccagtgacctggaccgcaacaaaatgaaggacataccaaaaagacctttctctcagtgcctctctaccatcatttccccattgttcgcggaacttaaggagaagtcgcaagcatgcgggggaaatttgggcagtatagaagagctccgcggagcaatatatctggctgaggaggcctgccctggtatttccgatacaatggttgctcagcttgttcagcgcctgcagaggtacagtttgtcaggagggggtaccagtagccactag

SEQ ID NO: 240123 - DNA, 1029 bp, synthetic construct
  misc_feature 1..1029: note = Description of Artificial Sequence: Synthetic coding sequence
  source 1..1029: mol_type = other DNA
atggctcatagccctgtgcagtccggtctccctggcatgcagaaccttaaggcagatccggaagagctgttcacgaaactggaaaaaatcggaaaagggtcttttggcgaggttttcaaaggcattgacaaccgtactcaaaaagtcgtagccattaaaatcatcgacttagaagaagcagaggacgagattgaggacatccaacaagaaattacggtcctgagccagtgtgactcaccctacgtgaccaagtactacggcagttatttaaaagacaccaagctgtggatcataatggaatacctaggagggggatctgccctggaccttctcgaaccagggcctctcgatgagacccagatcgctaccatcctgagggaaatcctcaaagggctcgattacctgcactctgaaaaaaagattcaccgagatattaaagccgctaacgtgctgctgtcagaacacggtgaggtcaaattggccgactttggtgtagccggacagctgacggacacgcagatcaagaggaatacattcgtggggacgcctttctggatggccccagaagtcattaaacagagtgcctacgactcaaaagcggacatctggagcctgggaatcacagccattgaactggcgagaggtgagcccccacactctgagctgcaccctatgaaagtgctgttccttatacccaaaaacaatccccctaccctggaaggaaactacagcaagcccctcaaggagttcgtggaggcgtgcctgaataaggaacctagctttcgacctacggccaaggagctcctcaagcacaagtttatcctccggaatgccaagaaaacttcataccttaccgagttgatcgaccgatataagaggtggaaagcagagcaatctcacgatgactcttcgtccgaggattccgatgccgaaaccgacggccaagcaagcggtgggtccgattctggggactggatattcaccatcagggagtggtcgagctctgcgattggcttgggccaaaagtag

SEQ ID NO: 240124 - DNA, 2991 bp, synthetic construct
  misc_feature 1..2991: note = Description of Artificial Sequence: Synthetic coding sequence
  source 1..2991: mol_type = other DNA
atggacgaggacactcactatgacaaggtggaagatgtcgtggggtctcacattgaagatgctgttaccttctgggcccagagtattaacaggaataaggatatcatgaagattgggtgctcactctctgaggtgtgcccccaagccagttccgtcctcggaaatctagacccaaacaagatctatggtggcttgttctccgaggaccagtgttggtaccgctgtaaagtcctgaagattatttctgtggaaaagtgtttagtcagatacatcgattacggaaatactgagatacttaaccgcagtgacattgtggaaattccactagagctgcagttttcttccgtcgctaaaaaatacaaactctggggcctccacattccatctgatcaagaggtgacgcagttcgaccagggcacaactttcctgggcagtctgatattcgagaaagaaatcaaaatgcgcattaaggcaacatctgaagacggcacagtgatagctcaggctgagtacgggagtgtggacatcggtgaggaggtacttaaaaaggggttcgcagagaaatgccgtctggcatctcgaacagatatctgcgaggaaaagaagttggatccaggccaacttgtccttcgaaacctgaaatctcccatccctctttggggacatcgatctaaccagtcaactttcagccggccaaagggacacctgtctgaaaagatgaccctcgatctcaaagatgagaatgacgctggaaacctcattacatttcctaaggagtccctcgccgtaggcgactttaatctgggtagcaacgttagcctggaaaagatcaaacaggatcagaaactgattgaggagaacgaaaaacttaaaacggaaaaggatgcacttctagaaagttacaaggccctggagctgaaggtggagcagatcgcccaagagctgcagcaggagaaggcggcagccgttgacctaaccaaccacttggaatacactctaaaaacttacatcgacacccggatgaagaaccttgccgcaaaaatggagatacttaaggagatgaggcatgttgatataagcgtcaggttcggcaaggacctttcggacgctattcaggttctggacgaaggatgctttacaacacctgcctcgcttaatggccttgagatcatttgggcggagtactctctcgcacaagaaaacattaagacctgcgagtacgtatccgagggcaacattctgattgctcaacggaatgaaatgcaacagaagctgtatatgagtgtggaggacttcatcttagaagtcgacgaatctagtctgaataaacgtctaaaaacactgcaagacttgagcgtctctcttgaagctgtgtacggccaggcaaaagagggtgccaactcagatgaaatcctaaagaagttttacgattggaagtgcgacaagagggaagaatttacgtctgtccgctcagaaactgatgcaagtttgcaccggcttgtcgcatggttccagagaaccctgaaggttttcgatttgtccgtggaaggatccctgatctctgaagacgcgatggataacatcgacgaaatcctggagaagacagaatctagtgtttgcaaggaattagaaattgccctcgttgatcagggggacgctgacaaagagatcatttcaaacacttactctcaagttctgcagaagatacacagcgaggagcgtctcatcgcaactgtgcaggcgaaatataaggattccatcgaatttaagaagcagcttattgaatatttgaataagagcccttcagttgaccaccttctctccattaaaaagactctcaagagtcttaaggctctgttacggtggaagctggttgaaaagagtaacctcgaggagtctgacgaccctgacggatcccagatcgaaaagattaaggaggaaattacacagctgaggaataacgtgttccaggagatttaccatgagcgcgaggaatacgaaatgctgacctcactggcacagaagtggttccctgagctccctcttctgcatcccgagatcggactactcaagtacatgaactcagggggattgcttaccatgtctctggaacgcgacctgctcgacgctgagccaatgaaggagctgtcatcgaagcgacccctggtgaggtcggaagtaaatgggcagatcattctgctgaaggggtacagcgtcgacgttgataccgaagcaaaggttatagagagagctgccacttatcatagggcctggcgtgaggcagaaggtgactccggactcctccctctcattttcctgttcctttgcaaatcagatcctatggcctacctgatggtgccctattacccccgtgcaaatctgaacgccgtacaggcgaacatgccactgaattctgaggaaacgctgaaggtgatgaaaggagtggcgcaaggcctccacaccctacataaagcagatattatccatggttctctgcaccagaataatgtgtttgcgctgaaccgtgagcagggcatcgtgggcgattttgatttcaccaagtccgtgagccaaagagccagcgtgaatatgatggttggcgatttaagtctgatgagtccggaactgaagatgggcaaacctgcatcacctggttctgatctgtatgcttacggatgtttgctgctgtggcttagcgtacaaaaccaagaatttgagatcaacaaggacggtattccaaaagtggatcagttccacctggacgataaggttaagagcctattgtgctcccttatctgttaccgctcctcaatgacagccgagcaagttctgaatgcagaatgctttctgatgccaaaggagcaaagcgttcccaatccagagaaggatacggagtacaccctttataaaaaggaagaagagataaagaccgaaaacctagacaaatgcatggagaaaacaagaaatggtgaggccaatttcgactgctag

SEQ ID NO: 240125 - DNA, 3060 bp, synthetic construct
  misc_feature 1..3060: note = Description of Artificial Sequence: Synthetic coding sequence
  source 1..3060: mol_type = other DNA
atgtgggtacaggggcacagttctagggctagcgctaccgaatccgtaagcttttccgggatcgtgcagatggatgaggacacccattatgataaggtagaggacgttgtgggatctcatatcgaggatgctgttactttttgggcccagagtattaaccggaataaggacattatgaaaatagggtgctctctatcggaagtgtgcccgcaggcttcctcggtcctcgggaacctcgatcctaacaaaatctacgggggactgttctccgaagatcagtgttggtatcggtgcaaagtgctcaagatcatttctgtcgaaaagtgtctggtgaggtatatcgactatggtaacaccgagatcttgaatcgctcagacattgttgagatcccattagagctgcaatttagttctgtcgctaagaaatataagttgtggggccttcacattccatcagatcaggaggtcactcagttcgatcagggaacaaccttcctcggatctctgatctttgagaaagagatcaaaatgcggattaaggccacctctgaggacggtacagtgatcgcccaagccgagtacggctctgtagacatcggagaagaggtcctgaagaaaggatttgctgagaaatgtcgcctggcttcaagaactgatatctgtgaggagaaaaagctggatcccggacagttagtcctgcgtaatctcaaatcccctataccactgtggggtcatcgcagtaatcagtccacattttcaagaccaaaggggcatctgtctgaaaagatgacactcgacctcaaagacgagaacgacgctgggaatttaatcactttcccaaaggagtcactggccgtcggtgattttaatctaggctctaacgtgtccctggaaaaaattaagcaggatcagaagcttatcgaagagaatgaaaagcttaagacagaaaaggacgctctgctggaatcctataaggccctcgagctaaaggtggagcagatcgcacaggaactgcagcaggagaaggccgcagccgtggatcttaccaaccatctcgaatataccctgaaaacctatatcgatactcggatgaagaatctagccgcaaagatggagatcctgaaggagatgcgccacgttgatatctctgtgaggtttggcaaggacttaagtgacgctatccaggtgttggatgaaggatgttttacgacacctgcatccctaaatggattggaaatcatctgggcggaatactcgttagctcaggaaaatatcaaaacctgtgagtatgtctccgaggggaatatactaatcgcccaacggaatgaaatgcagcagaaactctatatgtccgtggaggactttatcctcgaagtggatgagagcagcctgaataagagactgaagactctgcaagatttgtcagtaagtttggaagccgtgtacggacaggctaaagaaggcgcaaatagtgacgagatactgaaaaaattctatgactggaaatgtgataaaagagaggagtttactagcgttcggagtgagaccgatgcaagcttgcatcgtctcgtagcatggtttcaacggacactgaaggtcttcgacctgagtgtggaaggaagtctcattagtgaagacgccatggataatattgacgaaatactggagaagacagaaagcagcgtatgtaaggagctcgagattgccttggttgatcagggtgacgcggataaagagattatttccaacacctactctcaggtgttgcaaaagatacacagcgaggaacggctaatcgccacagttcaggcgaagtacaaggattcgattgaatttaagaaacagctcatcgagtatctcaataaatctccatccgtagaccatctgctgtctatcaaaaagaccctgaagagcctgaaagccctactgagatggaagctggtggaaaaatccaatcttgaagagtcagacgaccctgacggaagtcaaattgagaagatcaaggaggaaattacccagcttaggaacaatgtgtttcaagaaatctaccatgaacgggaagaatacgagatgctcacctccctagcgcagaaatggtttcctgaactccctctgttgcaccctgagatcggcctgttaaaatatatgaactccggcggactcctgaccatgtcattggaacgggacttgctagacgctgagcctatgaaagaactgtcttcaaaaaggcccctggtgcggtctgaagttaatgggcagatcattctcctgaaaggctacagtgtagacgtggacacagaagccaaagtcattgaaagagccgctacctaccatcgagcctggagagaggccgagggggattccgggctgctaccattgatttttctattcttatgcaagtctgatcccatggcatacctgatggtcccctactaccctagagccaacttgaacgcagtgcaggccaatatgcccctgaactcagaggaaaccctgaaggtaatgaaaggggttgctcaagggcttcacactttacacaaggctgacattattcacggtagtctacaccagaataacgtttttgccctaaatagagaacaaggcattgttggcgatttcgattttactaagagtgtttctcagcgcgcatccgtaaacatgatggtgggcgatctcagtctgatgagccctgagctcaagatgggcaagccggcaagcccaggctctgatctgtatgcatacggctgtttactcttgtggctgtccgtccagaatcaggagtttgaaatcaataaagatgggattccgaaggttgaccaattccacttggatgataaagtaaaaagcctgctctgttccctgatttgttatcgatcttctatgacggcagagcaggtgttgaacgccgagtgcttcctaatgcctaaggaacagagtgtgcctaacccagaaaaggacaccgagtatactctttacaagaaggaagaggagatcaaaaccgagaatcttgacaaatgtatggaaaaaactcggaacggagaggcgaatttcgactgttag

SEQ ID NO: 240126 - DNA, 2991 bp, synthetic construct
  misc_feature 1..2991: note = Description of Artificial Sequence: Synthetic coding sequence
  source 1..2991: mol_type = other DNA
atggacgaagacacccattacgacaaagtggaagatgtcgtgggcagccatatagaagacgcagtgaccttttgggctcagtccataaacagaaacaaagacatcatgaaaataggatgcagcctgagcgaagtctgcccacaggcttcgtctgtgctcggcaatttggatccaaacaagatctatgggggtctcttttctgaagatcagtgttggtaccgctgtaaggttttgaagatcatatccgtggaaaaatgtctcgtgcggtacatcgactacgggaacaccgaaatcctgaaccggtcagatatcgtggagattcccttggagctgcagttcagctctgtggctaaaaagtacaagctctggggactccatattccttccgatcaagaagttacacagttcgaccagggaactaccttccttggctctctcatattcgaaaaggagatcaagatgaggataaaagcgactagcgaagacggaactgttattgctcaggccgagtatgggagtgtcgacataggcgaggaggtgctgaagaaggggtttgccgaaaagtgtcgcttggcatctcggacagatatctgcgaggagaagaagctggatcccggacagctggtgctgaggaatctcaaatctccaatccccctgtgggggcatagatcaaatcagtctaccttttccaggcctaaaggtcacttgtcagagaagatgaccttggacctaaaggatgagaatgacgcgggaaatctgattacgtttccaaaggaaagtctggcggtaggggattttaacctggggtccaacgtgagcctcgaaaagattaagcaggatcagaaactcattgaagagaatgagaagctcaagacagaaaaggacgcgctgctcgaatcctataaggcactcgaactgaaggtggagcagatcgcccaggaactccagcaagagaaggccgctgctgtcgaccttacaaaccacctggaatacacactgaaaacctatatcgatacaaggatgaagaatttagctgcaaaaatggaaatcttgaaagagatgaggcacgtggacattagtgtccgctttggaaaggatctctccgacgccattcaggtgctggacgaggggtgctttaccacacccgcatcactgaacggactggagattatttgggccgaatactccctggcgcaggagaacattaaaacttgtgagtatgtgtctgagggcaacattttgatagcccagcggaacgagatgcaacaaaagttgtatatgtctgtggaagattttattctggaggtggacgaaagtagtctgaacaagagactgaaaaccctgcaggatctctctgtaagtctggaggccgtgtacgggcaagcaaaagagggggcaaattccgacgagatcctgaagaaattctacgattggaaatgtgataaaagagaggagttcacatcagttaggagcgagacagatgcgtctctgcatagactggtcgcttggtttcagcgcaccctcaaggtcttcgacctgagcgtagagggctcgctgatttctgaggatgctatggacaatatagatgaaatactagagaagacggagtcctctgtgtgcaaggagttggagattgccctcgtcgatcaaggggacgccgataaggaaataatatcaaacacttacagccaggtgctgcagaaaatccactccgaggaacgacttatcgctaccgtccaggcaaaatacaaggattccatcgagttcaagaagcaactcattgagtatctgaacaagtccccatcagtcgaccatctgctgtctattaagaagaccctgaaatccctgaaggccctgctgcgctggaagctggtggagaaatccaacctggaggaatcagatgatcccgacggctctcagatcgagaagattaaggaggaaatcactcagctgaggaacaacgtgttccaggagatttaccatgaaagggaggagtatgagatgctcacgtctctggcccagaagtggtttcctgagctacctttattgcaccctgagatcggcctgctgaagtacatgaatagcgggggtcttctgacaatgtcactggaacgagatctactggacgccgagcccatgaaggagctctcctccaagcggcctctggtccggtctgaggtcaacggacaaatcatccttctcaagggatatagcgtggacgtcgatactgaggctaaagtcatcgaacgagctgccacttaccaccgagcttggcgcgaagcagaaggggacagcggcctgttgcccttgatcttcctctttctgtgcaaatccgacccaatggcataccttatggtcccttattaccctcgagcaaacctgaatgcagtgcaagccaacatgccactaaattcggaagagacactcaaagtcatgaaaggagtggcacaagggctacacactctgcacaaagcagatatcatacatggttccctgcaccagaacaatgtgtttgcactcaatcgcgagcagggaattgtcggcgacttcgacttcactaaaagcgtcagtcagcgggcatctgtcaacatgatggttggagatctgagcctgatgagcccagagcttaagatgggaaaacctgcttctcccggttccgacctctatgcctacggttgcctccttctgtggctgtctgtacagaatcaagaattcgaaatcaacaaggacggaatacctaaagtcgaccagtttcatttggatgacaaagtgaaatctcttctgtgttcattaatctgttatcgatcttcaatgacagcagagcaggtgctgaatgccgagtgctttttgatgcccaaagagcagagtgtccccaatccggaaaaggacaccgagtatacactgtataagaaggaagaggagatcaaaaccgagaatctcgataagtgcatggaaaaaactagaaacggagaggccaacttcgactgttag

SEQ ID NO: 240127 - DNA, 285 bp, synthetic construct
  misc_feature 1..285: note = Description of Artificial Sequence: Synthetic coding sequence
  source 1..285: mol_type = other DNA
atggacgaagacacacattatgataaagtggaagatgtagtcggctcacatatcgaggatgccgtgacattttgggcccaaagcatcaacaggaacaaggatattatgaagattggctgtagcctgagtgaggtatgcccacaagccagtagcgtgctgggaaatctcgatcctaacaaaatttacggagggctcttcagtgaggaccagtgttggtaccgctgcaaggtgctcaagatcatcagtgtagagaagtgtcttgtgcgttacatcgactacggttag

SEQ ID NO: 240128 - DNA, 132 bp, synthetic construct
  misc_feature 1..132: note = Description of Artificial Sequence: Synthetic coding sequence
  source 1..132: mol_type = other DNA
atggacgaagacacccactatgataaagttgaggatgtagtgggttcacacattgaagacgcggtgacgttttgggcccagtctattaaccggaacaaggacatcatgaagatcggatgcagcctgtcctag

SEQ ID NO: 240129 - DNA, 2991 bp, synthetic construct
  misc_feature 1..2991: note = Description of Artificial Sequence: Synthetic coding sequence
  source 1..2991: mol_type = other DNA
atgtgggttcaaggacactcctcccgggcttctgccaccgagagcgttagcttctcaggcatcgttcagatggatgaggacactcactatgataaagtcgaggacgttgtcgggagccacattgaggatgccgtgacgttttgggcccaatccataaaccggaacaaggatatcatgaagatcggatgctccctgagtgaagtttgcccccaggcatcctccgtgctcggaaacctggatccaaacaagatttatgggggactgttttcagaggatcagtgttggtatcgctgtaaagttctgaaaattatctctgttgagaagtgtttggtgcgatacatcgattatggcaatacagagatactcaaccggagcgatattgtcgagataccgttggaattacaattctcatcagtggccaaaaaatacaaactgtggggcttacacatcccttctgaccaggaagtgacgcagtttgaccaggggacaacatttctgggctcgctgatatttgagaaggagattaaaatgcggataaaggccaccagcgaggatggcacggtaattgcacaggccgaatacggctctgtcgacattggcgaggaagtgttgaagaagggtttcgccgagaaatgccgcctcgccagccggaccgatatctgcgaggagaagaaactggaccccggtcagctggtgctccgtaacctgaagagcccaatacctctgtggggccacaggagtaaccagtcaaccttctcccggcctaaagggcatctgtccgagaaaatgacattagacctaaaggatgagaacgacgccggaaatttaataacttttcctaaggagtctttggcagttggggactttaacttgggcagtaatgtgtctctcgagaagatcaaacaggaccagaagcttatcgaagagaatgaaaaactgaagactgagaaagacgcgctgctcgaaagctacaaagctttggaactcaaagtggagcaaatcgcacaggaactgcagcaagaaaaggccgctgcagtcgaccttacaaaccacctagagtacacgttgaagacatacatagataccaggatgaaaaatctcgccgctaagatggagatcctaaaagagatgaggcacgtcgatatttccgttcgcttcggcaaagacctgtccgatgctattcaggtgctagatgaggggtgttttacaacccccgcaagcctgaatgggttggagatcatttgggctgagtacagccttgcccaggaaaatatcaagacttgcgagtacgtttccgagggaaatatcctcatcgcacagcggaatgagatgcaacagaaactgtacatgagtgttgaagacttcatccttgaagtggacgagtcttctctgaataagcggctgaagaccctgcaggatcttagtgtgagtttggaggcagtttatggccaggctaaggaaggcgcaaattcggacgagatcctgaaaaaattctatgactggaaatgcgataaacgggaggagttcacctctgtgaggtcagagacagacgcgagtctgcaccgccttgtagcctggttccagcggacactcaaagtgtttgacctgtctgtagaaggctctctcatcagcgaggacgccatggacaacatcgacgagatactcgaaaaaacagaaagcagcgtgtgtaaagaacttgaaattgccttagttgatcagggagacgccgacaaggagattatatccaatacatattctcaggtcctccagaaaatccacagtgaggagcggcttattgccaccgtgcaggctaagtataaggactcaatcgaattcaaaaaacagctgattgagtacctgaacaagagcccttcagtggaccacctgcttagtattaagaagaccctgaagagcttgaaagcccttctcaggtggaagctggtggaaaagtcaaacctggaggagtccgacgaccccgacggatcccagattgagaagatcaaagaagaaatcacccaattgcggaataacgtattccaagagatatatcacgagagggaagagtatgagatgctgacctccctagcacagaagtggtttccggagctccccctgctgcatcccgagatcggcctgctgaagtatatgaactcaggcggactgctgacgatgtcgctcgagcgagacttactggatgccgagccgatgaaagagctgagttccaagcgaccactagtccgaagcgaagtcaatggccagataatactgctgaaaggctactcagtggacgtggacaccgaggctaaggtgattgaacgggctgctacctaccaccgcgcatggcgcgaggcagaaggtgactccggcctgctgcctctgatattcctgtttctgtgcaagtcggatcccatggcatatctcatggtcccctactacccaagagccaatctcaatgccgtgcaggctaacatgcccctgaactctgaagagacactcaaagtaatgaagggcgttgctcagggcctccatacattgcacaaggcagacatcatccatggctctctacatcaaaataatgtgtttgccttgaatagggaacagggcatagtgggtgattttgattttaccaagagcgtgagccagagagccagcgtgaacatgatggtgggagacttatctttaatgtccccggagctgaagatggggaagccagcgagcccaggctccgatctgtatgcctacggttgcctcttgctttgggatgataaagtgaaatctctgctgtgcagcttgatctgctacagaagctctatgaccgcagaacaagttttgaacgccgaatgttttctgatgcccaaagaacagagcgtcccaaatccggagaaagacacagagtacaccctgtacaaaaaggaggaagagattaagacagaaaatctggataaatgcatggagaagaccagaaacggagaggcaaattttgattgttag

SEQ ID NO: 240130 - DNA, 1545 bp, synthetic construct
  misc_feature 1..1545: note = Description of Artificial Sequence: Synthetic coding sequence
  source 1..1545: mol_type = other DNA
atggccgattcagggctggataagaagtcaacaaagtgccccgattgtagtagtgcgtcccagaaggacgtactgtgtgtgtgtagtagcaagacccgagtgcccccagtcctagtcgtcgaaatgagccaaacaagctctatcgggagcgccgagagcctcatttccctggagcgcaagaaagaaaaaaacataaacagagatatcacttcccgtaaggatttgccctctaggacgagcaacgttgaacgcaaggcttcacagcagcagtggggcagaggcaatttcacagagggaaaggtgccacacatccggatcgagaacggcgctgccattgaggaaatctacacctttggccgaattctggggaaggggagctttggcattgtcatagaggctaccgacaaagaaacggaaactaagtgggcaattaagaaggttaataaggagaaggccggttccagcgccgtgaaacttcttgagcgggaggtgaacattctcaaatctgttaaacatgaacacataattcacttggagcaggtgtttgagacacccaaaaagatgtatttggtcatggagttgtgcgaggacggggagctcaaagaaattctcgaccggaagggccacttcagcgagaatgagacccggtggattatccagagcctggcctccgctattgcctacctccataacaacgatatcgtgcaccgggatcttaagctggagaatattatggtgaaaagctccctcattgatgacaacaacgaaattaacctcaatatcaaggtaaccgatttcgggctcgcagttaagaaacaatctcggagcgaggcaatgctccaagccacatgcggaacgcctatctatatggctcccgaggttatctccgcccatgactactcacaacagtgcgatatatggtctataggcgtagttatgtatatgctcctccgcggagaacccccattcttggcctcgagcgaggagaagctgtttgagcttatacgtaagggcgagcttcatttcgagaacgctgtttggaattcaatctcagattgcgccaaatccgtgctaaaacaattaatgaaggtcgaccctgcccacaggataactgccaaggagcttctggacaaccagtggctgaccggtaataagttatcctccgttagaccgacaaacgtgttggagatgatgaaagagtggaagaacaatccagagtccgtggaagagaatacgacggaggaaaaaaataagccttcaaccgaggaaaagcttaagagctatcagccatgggggaatgtacccgatgccaattacacctcggacgaggaagaagagaagcagagcacagcctatgaaaaacagtttccggcaacttctaaggataactttgatatgtgctcttctagcttcacgtcaagcaagctcctgccagcggagattaagggggaaatggaaaagacccctgtcacaccttctcagggtacggccaccaagtaccccgcaaaatcaggcgctctttcgcgcactaagaagaagctatag

SEQ ID NO: 240131 - DNA, 1545 bp, synthetic construct
  misc_feature 1..1545: note = Description of Artificial Sequence: Synthetic coding sequence
  source 1..1545: mol_type = other DNA
atggccgacagcggccttgacaaaaagtcgacaaaatgcccagactgcagcagtgcgtcacagaaggacgtgctttgcgtctgcagttccaagacacgtgttccccctgtgctagtcgttgagatgagccagactagctccatcgggtccgcagagagtctcatctctctggagagaaaaaaggaaaaaaatatcaacagggacattacctctcggaaagatcttcccagcaggaccagtaatgtggaaagaaaggcttcacaacaacagtggggtaggggcaatttcacagagggcaaggtgccccatattcggatagaaaatggggctgccattgaagaaatctacacattcggtcgcatactgggaaaaggaagtttcggcatagtaatcgaggcgacagacaaggaaacagaaacgaagtgggccataaagaaagttaataaggagaaggccggatccagtgccgttaaattgctggaaagagaggttaacatcttgaagtccgtcaagcatgagcacattattcatctggaacaagtcttcgagacgccaaaaaaaatgtatttggttatggaattgtgcgaagatggtgaattgaaagagatcctggaccgcaaagggcactttagcgagaatgaaacacgatggataatccagagcctggctagtgccatagcctaccttcataacaacgatattgtgcatcgggacctcaagttagagaatatcatggtgaaaagctccttaatcgacgataacaacgagattaacctgaatatcaaggttaccgattttggcctcgctgttaagaagcaatctaggtctgaagccatgctccaggccacgtgcggaacgcctatttacatggcccctgaggtcattagtgcacacgattattcccagcaatgtgatatttggtccattggagtggtcatgtacatgttactgcgcggtgagcccccatttcttgccagctcggaagagaaactgttcgaactgatccgcaaaggagaacttcacttcgagaatgcagtgtggaatagcatctcagattgcgcaaaatccgtgctgaagcagttgatgaaggtcgatcccgctcatcgaataacggccaaggaactgcttgacaatcaatggttaactggcaacaagctcagttctgtacgaccaaccaatgtgttggagatgatgaaagagtggaaaaacaaccccgaatctgtggaggagaacaccacagaggagaaaaacaagccgtccaccgaagagaaactcaagtcttatcagccttggggaaatgtccctgatgccaattatacatcagatgaggaagaggaaaagcaaagtaccgcgtacgaaaaacagttccccgctacaagtaaagacaacttcgatatgtgcagttcatccttcacctcttctaagctgctgccggcagagatcaaaggcgagatggagaaaactcctgttacaccttctcagggaacagccacgaagtacccagcgaagtccggcgctctgtctcgaacaaagaaaaagttatag

SEQ ID NO: 240132 - DNA, 1347 bp, synthetic construct
  misc_feature 1..1347: note = Description of Artificial Sequence: Synthetic coding sequence
  source 1..1347: mol_type = other DNA
atggctgatagtggtctagataagaaatccactaaatgccccgattgctccagtgcttcccaaaaggacgtgttgtgtgtctgttccagtaaaacaagagtgcccccagtactcgtggtagaaatgagccaaacctcctctattggtagtgccgagagtcttatatccttggaaaggaagaaagagaagaatatcaatagagatataacttctcgtaaggacctcccatctcgcacctcgaatgtcgagagaaaagcaagccagcaacagtggggtagaggtaatttcactgagggaaaggtcccacatattcggatagagaatggggcagccattgaggagatctacacatttggtaggatactcgggaaaggctctttcgggatcgttattgaggcaaccgacaaagagacggagactaagtgggctatcaaaaaggtgaataaggagaaggctggctcgagcgcagttaagttgctcgaaagagaggtcaatatcctcaagtctgtaaaacacgagcacattatacatctcgaacaggtttttgagactcctaaaaagatgtacctggtgatggaactgtgtgaggatggagagctgaaggaaattttagacagaaagggacactttagcgagaatgagactcgatggatcatccaatcccttgcctctgccatagcataccttcacaacaatgacatcgtacaccgagaccttaaactggagaatatcatggttaagagttcccttatcgatgataataacgaaatcaacttgaatattaaggtgacagattttgggctggccgtcaagaaacagtcccgctctgaagcaatgctccaggcgacatgcggcactcccatttacatggcacctgaggtcatctccgcacatgactactcacagcaatgtgacatctggtccattggggttgtcatgtacatgctgctcaggggcgaacctcccttcctcgcctcctctgaggaaaaactcttcgagcttataagaaagggtgagctccacttcgagaacgctgtttggaactctatctccgactgtgctaagagcgtgttgaagcagctgatgaaggttgacccggctcataggataactgcgaaggaacttttagataaccagtggcttacaagtacggcctacgagaaacagtttccagccactagtaaggataacttcgatatgtgttcttctagttttacctcaagtaagctgctgccggcagaaattaaaggagaaatggagaagacaccggtcaccccaagccaaggcacagctactaaataccccgcaaagtcgggagcactgagtcggaccaagaagaaattgtag

SEQ ID NO: 240133 - DNA, 192 bp, synthetic construct
  misc_feature 1..192: note = Description of Artificial Sequence: Synthetic coding sequence
  source 1..192: mol_type = other DNA
atggccgactctggactggataagaagtcaaccaagtgtcccgattgcagttcagcttctcagaaggacgtactctgtgtatgctctagtaagactcgtgtccctcccgttctggtagtggaaatgtcacagacatcctcgataggttccgccgagagcctcatctctctagagagaaagaaagagaagtag

SEQ ID NO: 240134 - DNA, 1545 bp, synthetic construct
  misc_feature 1..1545: note = Description of Artificial Sequence: Synthetic coding sequence
  source 1..1545: mol_type = other DNA
atggccgactctggtctcgacaagaaaagcactaaatgtcccgactgtagttctgcaagtcagaaagatgtgctctgcgtttgctcgtccaaaactagggtgccaccagtgctagtagtggaaatgagtcagacctctagtattgggagtgcagaatcgctaatcagtcttgaacggaagaaggagaagaacattaatcgtgacataacctcaagaaaagacctgccctcacgaacttccaatgtcgagcggaaggcttcacagcagcaatggggcaggggcaattttacagaggggaaagtgccccacataaggattgagaacggtgctgcgatagaagagatctacacatttggaagaatcttggggaagggaagctttggaatcgtcatcgaggcaaccgataaggagacagagactaaatgggcaatcaagaaggtcaacaaggaaaaggcaggaagcagcgctgtgaagctgctggagcgggaagtgaacatcctgaagtcagtaaagcacgaacatatcatccatctggagcaagtgtttgaaacaccaaagaaaatgtatttagtgatggaactttgtgaggatggggagcttaaggagatactggaccgcaaaggacatttctcagagaacgaaacccgttggatcattcagtccttagcctctgctatcgcatatctccacaataacgatatcgtccatcgagacttaaagttagaaaacatcatggtgaagagttcactgatcgacgacaataacgaaatcaaccttaacatcaaggtcactgatttcggcttagcggtgaaaaagcagtctagaagcgaagcaatgttgcaggccacctgtggaactcctatttacatggcgccagaagttattagcgcccacgattactcacagcagtgcgacatctggagcatcggcgtcgtgatgtatatgctgctgcggggagagccacctttcctggcaagctctgaagagaagctctttgaactgatccgcaaaggcgaactgcactttgaaaatgccgtgtggaactcaattagtgactgcgcaaagtccgtgctgaagcaactcatgaaagtggaccccgcacatcggattacagctaaagagctattagataatcagtggcttactggaaacaagctgtcaagtgttcggccaaccaacgtcttagagatgatgaaggaatggaagaacaaccccgaatccgttgaggagaacaccactgaggagaagaataagccctccactgaggaaaaactcaaaagttatcagccctggggaaacgtgcccgatgcaaattatacatccgatgaagaagaagagaaacagtccaccgcatacgaaaaacaattcccagccacctccaaagataatttcgacatgtgcagttcatcctttacctcgagcaagctgctaccggcagagataaaaggcgagatggaaaaaacccctgtgacccctagtcaagggactgctacaaaatatccagcgaagtctggagccctaagtaggactaagaagaagttgtag

SEQ ID NO: 240135 - DNA, 114 bp, synthetic construct
  misc_feature 1..114: note = Description of Artificial Sequence: Synthetic coding sequence
  source 1..114: mol_type = other DNA
atggccgattccggcttagataagaagtcaactaagtgcccagactgtagcagcgcttctcagaaggacgtgttgtgtgtctgctctagcaaaacaagggttccaccagtgtag

SEQ ID NO: 240136 - DNA, 516 bp, synthetic construct
  misc_feature 1..516: note = Description of Artificial Sequence: Synthetic coding sequence
  source 1..516: mol_type = other DNA
atggcagatagcggcttggataagaagtctaccaagtgtcctgattgtagttctgcatcacagaaggacgtcctgtgcgtttgcagcagcaagaccagggtccccccagtacttgtcgttgaaatgtcacagacatcttcaataggatccgctgagagcctcatctcactggagcgcaaaaaagagaagaacatcaacagagacatcaccagcagaaaagacctgcctagtcgaaccagcaatgttgagcgtaaggcctcacaacagcagtggggtcgtggcaattttactgaaggaaaagtgccccacatacggatagagaacggcgcagccatagaggaaatttatacattcggtcgcatactggggaagggttcgttcggaatagtaatagaggctacagacaaggagacagaaactaagtgggccatcaaaaaagtaaataaagagaaagccggttcgtccgctgttaaactgctggaacgggaagttaacatcctgaaaagtgtaaagtag

SEQ ID NO: 240137 - DNA, 90 bp, synthetic construct
  misc_feature 1..90: note = Description of Artificial Sequence: Synthetic coding sequence
  source 1..90: mol_type = other DNA
atggccgattcaggattggataagaaaagcactaagtgtccagactgctcgagtgctagtcagaaagatgtgttatgtgtttgcagctag

SEQ ID NO: 240138 - DNA, 1206 bp, synthetic construct
  misc_feature 1..1206: note = Description of Artificial Sequence: Synthetic coding sequence
  source 1..1206: mol_type = other DNA
atggagaccggcaaggacggtgcgagacgcggaacccagtcccctgaacggaagcggcgttcccccgtgcctcgggcacccagtacaaaacttagaccagcagccgctgctagggctatggatcccgtggctgccgaggcaccgggagaagcatttctggccagacggagaccggagggtgggggaggctctgcaagacctaggtacagcctgttggctgaaataggacgcggatcctacggggtggtttacgaggccgtggccggaagaagtggggcaagggtggccgtgaaaaagatccgctgtgacgcaccagaaaatgttgagttagctctggcggaattttgggcccttactagtttgaagagacggcatcagaatgtcgtgcagtttgaggagtgcgtgctgcaacgaaatggactggcccagcgcatgtcccacggcaacaaatcttctcagttatatctgaggctcgtggaaacatcattgaaaggcgagagaattctcggatacgctgaagagccttgctacctctggttcgtgatggaattctgcgagggaggagatttgaatcagtacgtcttgtctcgaaggccagatccagcaacaaacaaaagctttatgctgcaactcacctcagccatcgcattcctgcataagaaccatatcgtccaccgagatttaaaaccggacaatatcctgattacagagcgcagcggcaccccaatcctgaaggtagcagacttcgggctctctaaggtgtgcgccggactggcccctagaggtaaagagggcaaccaggacaataaaaacgtaaacgttaacaaatattggctgtcatcagcttgtggcagcgatttttacatggccccagaggtatgggaagggcactatactgccaaagctgacatcttcgcactggggatcattatctgggccatgatagagcgaatcacattcatcgactccgaaactaaaaaggagttgctcggaacttacataaaacaaggtacagagatcgtgcctgtgggcgaagctctgttagaaaatccaaagatggagcttcacattccacagaaacgcagaactagcatgtcagaaggcatcaaacaattactcaaggacatgctggcagcaaacccccaggacaggccggatgctttcgaattggagactcgaatggaccaggtgacgtgcgccgcttag

SEQ ID NO: 240139 - DNA, 1605 bp, synthetic construct
  misc_feature 1..1605: note = Description of Artificial Sequence: Synthetic coding sequence
  source 1..1605: mol_type = other DNA
atggggcaccaggagtcaccactggcaagagccccagctggcggagctgcgtatgtcaagcgcctctgtaagggcctgtcttggcgcgagcatgtggagtctcacggatccttaggtgcgcaggcctctcctgcatccgccgcagccgctgaaggaagcgccaccagacgtgctcgcgcagccactagtagggcagccaggtctcgcagacagcctgggcctggggctgaccaccctcaggccggagcacccggtggcaaacgggctgcacggaagtggaggtgcgccggtcaggtgacaattcagggacccgcacctccgcgacccagggcaggccgacgggatgaagctggtggtgctcgggctgccccattgttgctccctccaccacctgctgcgatggagactggcaaagacggagccaggcggggaacccagtcccctgagaggaaaaggaggtccccagttcctagagcaccaagcaccaaattacgcccagccgctgccgcacgcgctatggatccagtggccgcagaggctccaggtgaagccttcctagcaagacggagacctgagggcggtggcggaagtgcacgaccacggtatagtttactggctgaaattgggagagggtcttatggcgtggtgtatgaagccgtggctggccgaagtggcgctcgcgtggcagttaaaaagatccgctgcgatgcccctgaaaacgtcgagttagctttggccgagttttgggccttaaccagccttaagcggaggcaccagaatgttgtacagttcgaggagtgcgtgctccaaagaaatgggcttgctcagagaatgtcccacggcaataagtcgtcacagttgtacctgagactcgtcgaaaccagcctgaagggggagcggatactcgggtatgctgaagaaccgtgctatctttggttcgtgatggagttttgtgaaggaggcgatctcaatcagtatgtgctgtcacgcagacccgatccagccactaataaatcattcatgctccagctgactagtgccatcgccttccttcacaagaatcacattgtacatagagatctgaaaccagataatatactgattaccgagagatctgggacccctatcttaaaggtggcagattttggtctgtcaaaggtgtgtgcaggactcgcacccagaggaaaagagggaaaccaggacaacaaaaacgttaacgttaataaatactggttgagctctgcctgtggtagtgacttctatatggccccagaggtttgggaggggcattataccgccaaggctgacatttttgcactcggcatcataatctgggccatgatcgagaggatcacttttatcgactctgagaccaaaaaagagctgttaggcacctacattaaacaggggacagaaattgtcccggtgggggaggcactgttagagaacccaaaaatggagctacacattcctcagaaaaggagaacctccatgagcgaagggatcaagcagctgttaaaggacatgctcgcagcaaacccacaggaccgtccagatgcctttgaactggaaactcggatggaccaggttacatgtgcagcttag

SEQ ID NO: 240140 - DNA, 489 bp, synthetic construct
  misc_feature 1..489: note = Description of Artificial Sequence: Synthetic coding sequence
  source 1..489: mol_type = other DNA
atggaccctgtggcagcagaggctcctggagaagcctttcttgctagacggaggcctgaagggggaggaggctccgcgaggccacgttattctcttttggccgaaatcgggcgagggagctatggagtcgtgtacgaggcggtggctggcagatctggtgcgagagtagcagtgaaaaaaatccgctgtgacgccccagagaacgtagaactggccctcgctgagttttgggcacttactagcctcaagaggcggcatcagaatgtggtacagttcgaggaatgcgtcttgcagcggaatggtttggcccagcgaatgtcacatggcaacaagagctcacaattgtacctaagactcgttgaaacatccttgaaaggacgcttcctgggaacccacagcctgaccacatcccctcccgaggacggccgtggttacagatggtggccgggtcgcttggctatctctcggcagttagacccggcaatgtag

SEQ ID NO: 240141 - DNA, 3948 bp, synthetic construct
  misc_feature 1..3948: note = Description of Artificial Sequence: Synthetic coding sequence
  source 1..3948: mol_type = other DNA
atggagaaataccatgtgctcgaaatgatcggagaagggagcttcggcagggtctataaaggaaggaggaagtatagcgcccaggtcgtcgctctcaaatttatccctaagttgggtcgctccgagaaagagctaaggaacttgcaacgtgaaatagaaataatgcggggactgaggcatccaaacatcgtccacatgctcgatagttttgaaacagacaaggaagtcgtcgtggtgactgactatgccgagggggaactatttcaaattctggaggacgatggcaagttgcctgaagaccaggtgcaggccatagcagcccagctggtgtctgccctctactacctccacagccatcgcatattgcatcgggatatgaaacctcagaacattctgcttgccaagggcggaggtataaaactctgtgatttcggatttgcccgtgccatgtccaccaacacgatggtcctcacaagtatcaagggaacacctctatatatgtccccggagctagtggaggagaggccatatgaccacaccgccgacctttggagcgtcgggtgtatactttatgaactggccgtgggaacccctcctttctacgccacgtcgattttccaattagtgtccttgatcctgaaggatccagtaaggtggccgtcaactatctccccatgtttcaagaactttcttcagggcctgctgacaaaagatccccgtcagcgactgtcttggccagatctgctgtaccacccattcatagccggtcacgtcactatcattactgagcccgctggccctgacctgggcacaccctttacttccagactgccaccagagcttcaggtcctaaaggacgagcaggctcatagactggcccctaagggtaatcagagtcggattctcacacaggcctacaaacgaatggcagaagaggcaatgcaaaaaaagcaccagaacaccgggcctgctcttgagcaagaggataaaacaagcaaggtggcccctggaactgcccctctgcccagactcggtgctacccctcaggagtcttccttactcgccggaatactggcctccgagctaaagagttcctgggccaaaagcgggactggggaggtcccaagcgcaccacgagagaatagaacgaccccagattgtgagcgcgcttttccagaagagagacctgaggtgttagggcaaagaagcacagacgttgtggatctagagaacgaggagcctgatagcgacaacgaatggcagcaccttctggagaccacagaacctgtgcctattcaattaaaggcaccactgaccctgctgtgtaatccagacttctgccagcggatccagtctcagcttcatgaggctggagggcagatcctgaaagggatattggagggcgcatctcacatactgcccgcttttcgggtgctctcaagcctgctctccagttgctcggatagcgtcgctctctatagcttctgccgtgaagccggtctgccaggcctcctcctatcccttctgaggcactctcaggagtcaaacagtctccagcagcagagttggtacggtacttttctgcaggatctgatggccgtgatccaggcatattttgcttgcaccttcaacttggagcgctctcagacctccgattccttacaggtttttcaggaagcagccaacctgttcctggacctgctaggaaagctgttggcccagcctgacgattccgaacagacccttcgcagggactccctgatgtgtttcaccgttttgtgcgaggctatggatggaaactctcgtgctatatccaaagcattctacagctctctgttgaccacacagcaggttgtgctagacgggttactgcacggcttgaccgtgccccagctccccgtccacacgccacaaggagctccacaggtgagtcagcctctaagggagcagtcagaggatattcctggggcaattagttcggccctggcggcaatctgcacggcgcctgtagggttgccagattgttgggacgccaaggaacaggtctgctggcacttggcaaaccaacttaccgaagattccagccaactcagaccctctctgatctccggactgcagcacccaattttgtgtctccacctgctcaaagtcttgtattcatgctgcttggtgagcgagggactttgccgcttgcttgggcaggaaccacttgccctggagtcactcttcatgctgatccagggcaaggtaaaggtggtggattgggaagagtcaaccgaggtgacgctgtatttcctctcactactggtgttccgactccaaaatttaccgtgtggaatggagaagctcggttccgacgttgcaaccctgtttactcacagccatgttgtcagtctcgtgtctgccgctgcatgcctgctcggccagctggggcagcagggcgttacgtttgacctgcagccaatggaatggatggctgccgcaacacacgcactgagcgctcccgctgaggttcgcctgacccctccaggctcctgtggtttctatgacggcttacttatcttgttattgcagttgctcactgaacagggaaaggcttcactcatcagggatatgtcaagctcagaaatgtggaccgtcctatggcaccgtttctccatggtcttgcgccttcctgaagaggcttcagcacaagaaggtgagctgtccctcagtagccctccttctcccgagccagactggacattgatctcaccacaggggatggccgcactcctgtctttagcaatggctaccttcactcaggaaccgcagctttgcctgtcatgcctgagccaacacggctccatactgatgtcaatacttaaacatttgctttgtccatcatttctcaatcaactccgtcaggctccccacgggtccgagttcttgccggtggtcgttctcagtgtctgccaacttctgtgttttcctttcgcgctcgatatggatgccgacttgctgattggggtcctggcagacctacgggatagcgaagttgcagcccacctgcttcaagtgtgttgttatcacctgcctctcatgcaggttgagcttcccatttcgctcttgacacgtttggcactgatggatcctacctccctgaatcaattcgtgaataccgttagtgcctccccaagaacaatcgtgtctttcctgtcagtcgcccttctgtcagaccaacccctgctgacatccgaccttctgtccctgttggctcacaccgccagggtcctgagtccctcccatctcagcttcatccaagaattgctggcaggtagcgacgaatcctataggcctctgaggtccctgctgggacaccccgagaacagcgtacgggctcacacttatcgcttgctcgggcatctgctgcagcactcaatggctttacgaggcgctttacagagccagagcgggcttctcagccttctgctgctagggctcggcgataaagatccagtagttagatgttccgcctcatttgccgtgggaaacgccgcttatcaggctgggcctctcggacccgcattagctgcagccgttccctcgatgactcagctgctgggtgatcctcaggctggcatcaggaggaacgtggcttccgcgctgggaaatctcggccctgaaggcctgggagaggaactcctccagtgtgaagtaccacagagattgttagaaatggcctgcggtgacccgcagcccaatgtaaaggaggctgctctgatcgctcttcgatctctccagcaagaaccgggaatccatcaggtactggtatcactcggtgcttctgagaaactcagtcttctgtcattgggcaatcagtcactgccccactctagccctcgccctgcctcagctaaacactgcaggaaactgatccacctactgaggccagcacatagcatgtag

SEQ ID NO: 240142 - DNA, 3885 bp, synthetic construct
  misc_feature 1..3885: note = Description of Artificial Sequence: Synthetic coding sequence
  source 1..3885: mol_type = other DNA
atggaaaaataccacgtactcgagatgattggagagggatcgtttggtcgggtgtacaagggcagacgcaaatactctgcccaggtggttgcactcaaatttatacctaaattgggaaggagcgagaaagaattaaggaacctgcagagggagatcgagattatgcgaggcctgcggcaccccaacatcgttcatatgctggactccttcgagacagataaggaggtggtcgtcgttacagactatgccgaaggtgaattgttccagattctggaggacgatgggaagttgcctgaagaccaggtgcaggccattgccgcacaactcgtttccgccctctactatttgcacagtcaccggatccttcacagagatatgaagccccaaaacatcttattagccaaggggggagggatcaagttatgcgactttggctttgcgcgtgcaatgagcacgaacaccatggtcttaacaagcatcaaaggtaccccattgtatatgtctcccgagctggttgaggaaaggccctacgatcatactgccgacctgtggagtgtgggctgcattctgtatgagctagcagtgggaactccaccattctatgccacttctatttttcagctggtgtccctgatactgaaggacccagtgcgttggccatctacaatttctccatgtttcaagaacttcttacaagggctcttgactaaagacccccgtcaacggctgtcatggcccgatcttttgtaccatccatttattgctggacatgttacaatcatcacagagcccgcaggacccgacctggggactccgttcacttccagactccctcctgaactccaggttttgaaggatgaacaggctcaccgactggctccaaagggcaatcagagtcgcatactcactcaggcatataagcggatggcagaggaggccatgcaaaaaaagcatcaaaatactggcccagcacttgagcaggaggataagacctctaaggtggctcctggcactgccccactgccccgacttggagcaacccctcaggagagttcgcttttagcaggaattttggcctcagaactcaagtctagctgggctaagagcggcacaggggaagtcccttctgcccctagagaaaatagaaccacccctgactgcgaacgcgcatttccagaagaacggccagaggtcctgggccaacgctctaccgatgtagtggatctggaaaatgaggagcccgacagcgataatgagtggcagcacttgctggaaactactgaacccgtgccaattcaactgaaggcacccctgacactgttatgcaaccccgacttttgtcagagaattcagtctcaactccacgaggctggcggacagattttaaaagggatcttggagggggcaagccacattctacccgcatttcgcgttctctcgtcgctcctgtcttcctgctcagacagcgttgcactttattccttctgtagagaagcaggattgccaggtctgttgttgtctttactcagacactctcaggaatcaaacagtctgcagcagcagtcctggtacgggacatttctgcaggacttaatggctgtgatccaggcttacttcgcctgcacttttaacctcgagaggagtcagaccagcgacagtttgcaggtctttcaggaagcggcaaacctatttcttgacctgctgggaaaattgctagcccagccagacgactccgaacagacgctgcgtcgagactctctcatgtgctttaccgtgttatgtgaggcaatggatggtaactcgcgcgcaatttctaaagctttttattccagcctgctcaccacccaacaggtagttctcgacggcttgctccacggcttaacagttccccaattgcccgtccacacaccgcagggcgctccccaggtaagccagccattaagagagcagtctgaagatatcccaggggcaatatccagcgccctcgctgccatctgcaccgctcctgtcggacttcccgattgctgggatgcaaaagagcaggtctgttggcatctggccaatcagctaaccgaggacagttcccagttgcggccttcactgatttcaggcctccaacaccccatcctttgcctccatctcctgaaggttctctactcttgctgcctggtctccgagggcctttgtcgcctgttgggtcaggaaccactggcgcttgaaagcctgtttatgctgatccagggaaaagtgaaggttgtggattgggaggaaagtaccgaggtgacactctactttttgtctctgttagtatttagactgcaaaatctgccttgcggtatggaaaagctgggctctgacgtggcaactttgttcactcactcgcatgtggtgtctctggtctctgctgctgcttgtctgctcggtcagctcggccagcagggcgtgacgtttgacctccagcctatggagtggatggcggcagcaacacacgccctctccgcccctgccgaactgctaactgagcaggggaaagcctctcttataagggacatgtccagcagcgaaatgtggacggtcctttggcatagattctcgatggtgttgcgcttgcctgaagaagccagcgcacaggaaggcgaattatcgttgagttctcctccgtcaccggagcctgattggaccctgatcagcccccagggtatggccgcacttctgtcactggctatggcgacctttacacaggaacctcaactttgtctctcctgcctctcacagcatgggtccattttgatgagcattctcaagcatctgttatgcccgagcttccttaatcaactgcggcaggcccctcacgggtctgagttcctgcctgtggtggtcctaagtgtatgtcagctgttgtgtttccccttcgcccttgatatggacgccgatctgctcattggcgtcctagccgatctgagggattctgaagtggccgcacatttgcttcaagtctgctgttaccatctgcctttgatgcaggtggaactgcctatttcccttctgacaagactggccctaatggaccccacttctctaaatcagttcgtaaacactgtctccgctagccctcgcaccattgtctcctttcttagcgtggccctgttgagcgatcagccgctattaaccagcgacctattgtccctgctggctcataccgctagggtgctctcaccaagccatctgagctttatccaagagctactcgctggatctgatgagtcataccgcccattacgtagcctgctggggcaccccgagaatagcgtgagagcccacacatacaggctgctcggccatctattacagcattctatggccctgaggggcgctctgcagtctcagagtggtctattgtccctgctccttcttggccttggagacaaggatccagtggtgagatgcagtgcgagttttgccgtgggaaacgccgcatatcaggccggacccctcggacccgctttggcggctgctgtcccctctatgacccagcttcttggggaccctcaagctggcatccgtaggaatgtcgccagcgctctaggcaatctggggcctgagggcctaggagaggagctgctacaatgcgaagttccccagagactgttagagatggcttgcggtgatccccaacctaacgtgaaggaggcagccctcatagcacttagaagcctacagcaggagcctgggattcaccaggtgctcgttagcctgggcgcatcggaaaaactaagcttattgtctctaggaaaccagtctctgccccacagttcacctagacccgcttctgcaaagcactgtcgtaaactgatccacctgcttcggcctgctcattccatgtag

SEQ ID NO: 240143 - DNA, 3885 bp, synthetic construct
  misc_feature 1..3885: note = Description of Artificial Sequence: Synthetic coding sequence
  source 1..3885: mol_type = other DNA
atggagaaatatcatgtacttgaaatgatcggagagggttcattcggtagagtatacaaggggcgaaggaagtactctgcgcaggtcgtagccctgaagtttatcccgaaattggggcgatcagagaaagaactgcgtaacctccagcgtgagattgagattatgagaggtttgaggcacccaaacattgtgcatatgctcgattccttcgagactgacaaagaggtggtggtggttacagactacgcagagggcgagctcttccagatactggaagatgacggaaagctgccagaggatcaggtgcaggccattgcagcacaactggtctccgcattgtactatctgcattcccaccgcattctccatcgagacatgaagcctcaaaatattctgttagcgaaagggggtgggatcaaactatgtgattttggctttgcgagagcgatgtctaccaacaccatggtcttaacgtctatcaaggggacacccctgtacatgagtccagagctggttgaagaacgcccatacgatcacacagccgatttgtggagcgtgggctgcatactatacgagctcgctgtcggaaccccgccattctatgcaacgtcgatttttcaactggtgtctctgatcctcaaggatccagtgcgctggccttcaacgatctccccatgtttcaagaactttcttcagggtcttcttaccaaggatccacgccagcggctgtcctggcccgacctgctctatcatccttttatcgcgggacacgtgacgatcattacagagccggcaggtccagacctgggcactcctttcactagtcgcttgccaccggagttacaagttctgaaggacgaacaggcacatcggctagccccaaagggcaaccagagccggattttaacacaggcctataagaggatggccgaagaagcaatgcagaaaaagcatcagaatactggaccagccctggagcaagaggacaaaaccagtaaagtggcgcctgggacagcaccactgcctcgcctcggcgcaacccctcaagaaagtagcttactggccggaatcttggccagcgaattaaagtcttcgtgggccaagtcaggcacaggggaggtgcctagtgctccacgtgaaaatcggactacccccgactgtgagcgagccttcccagaagaacggccagaggtgctcggacagcggtcaacggatgtggtggacctcgagaacgaggaaccagacagcgataacgagtggcagcacctcctggaaactacagaaccggtaccaattcaactaaaggcgcctctaaccctactgtgtaacccagatttctgccagcgtatccagtcacagctccatgaggcaggcggtcagattcttaagggaattctggagggtgcaagccatatcttaccagcttttcgtgttttgtcatccctcttatcgagctgctctgacagtgtggcgctatactccttttgccgcgaggcgggactgcctggactattgctgagtctgcttagacactcacaggagagtaacagccttcagcagcagtcctggtacggaacatttctacaagacctgatggcagtgatccaagcctacttcgcttgcacctttaacctggaacgttcacaaacttccgactcacttcaggtgttccaggaggccgcaaatttgttcctggacttacttggcaaattactcgctcaaccagacgactccgaacagactttaagacgggatagcctcatgtgtttcactgtgctttgcgaggcaatggacggtaattcccgagcgatttccaaggccttctactcatcactattaaccactcagcaggtggtccttgatgggctcttgcatggattaaccgtacctcagctgcctgtgcacacaccacagggcgcaccacaggtgtcccagccactgcgggagcaaagcgaagacatacccggtgcgatttctagtgccctggctgctatttgcactgcacccgtgggcctaccggattgctgggacgccaaggaacaggtgtgctggcacttagccaaccagttgactgaagattcatcccaactgcgcccatcactgattagcggactccaacaccccatcctatgtttgcatctgcttaaggttctttactcttgttgcctcgtgtctgaggggttgtgcagactccttggacaggaacctctggcccttgagtcattgttcatgctgatacagggcaaggtgaaagtggtggactgggaagaatcgaccgaggtgacactgtacttcctctccttgctcgtttttaggctgcagaacctgccttgcggtatggagaaactcgggagcgacgtggcaactttattcactcattcgcatgtggtatcattggtcagcgctgcggcttgcttgctggggcagctcggccagcagggggtaacattcgatctgcaacctatggagtggatggccgcagcgacccacgccctgagtgcaccggctgaaatgtcgtgcgagcagggtaaagccagtctgattagggatatgagctcaagcgagatgtggaccgtgctctggcaccgcttttcgatggtactgaggctgccggaggaggccagtgctcaagagggcgagctgtctctctctagtccaccaagccccgaacctgattggacacttatttctccacagggcatggccgctttactgtcattggccatggcaacatttacccaggagcctcagctctgtctttcttgtcttagtcagcatggctccattttgatgagtatcctaaaacacctgctttgccccagtttcttaaaccagcttaggcaagctccgcatgggtcagagtttctgccagtggtggtgttaagcgtttgccagctcctatgttttccgttcgcccttgatatggatgctgacttattaatcggcgtgctagccgacttgagagacagcgaggttgccgcacatctgctccaggtgtgctgttatcatctgcccttgatgcaggtggagctgcccatctcacttctcacacggctagccttgatggaccccactagcctgaaccaattcgttaacactgtttccgcatccccgagaactatcgtttcatttttatcggtcgccttactctctgatcagcccttactaactagtgatttactgagcctgctggctcacacagcccgagtgctgagtcccagccacctcagctttattcaggagctgctagctggaagcgatgagagctacaggcccctacgctcgctacttgggcacccagagaacagcgtgagggcccacacttatcgactcctgggtcatcttcttcaacacagtatggctttacgcggagctttgcagagccagtcaggcctgctgagcctgctcctgcttgggttaggtgacaaagatcccgtggtaaggtgtagcgcgtcatttgccgtgggcaatgcagcttatcaggccggtcccttaggccctgctctagccgcagctgtgccttctatgactcagttactcggggaccctcaggctggaataaggagaaacgtggcttccgccctgggtaatctcggacccgaaggattaggcgaagagttgctacaatgcgaagtgccacagcggcttctggagatggcctgtggggatcctcagcctaacgtcaaagaggccgcactgattgccctccgctcccttcagcaggagcccggaatccatcaggtcttagtctcgctcggagctagcgagaagctgtccctgctctcactagggaaccagtccttaccccactcaagtccacgtcccgcttctgctaaacactgcaggaagctcatccacctcctgagacctgcgcattccatgtag

SEQ ID NO: 240144 - DNA, 840 bp, synthetic construct
  misc_feature 1..840: note = Description of Artificial Sequence: Synthetic coding sequence
  source 1..840: mol_type = other DNA
atggaaaagtatcacgtactggaaatgattggggagggctcctttggcagagtgtacaaaggccgacggaagtacagcgcacaggtggtggcactgaagtttatccctaaactcgggagaagtgagaaagagctgcgtaatctgcaacgtgaaatcgaaatcatgaggggcctgcgacacccaaatattgtccatatgctagattccttcgaaaccgataaggaggtcgtagtggtcaccgactatgccgaaggggaattattccagattctcgaagacgatggcaagctcccggaggatcaggtgcaggccattgcggctcagctagtgagtgccctgtattacttacactctcatcgaattctgcatagagacatgaagccccagaatatccttctcgcaaagggcggtggcattaaactgtgtgattttggttttgcacgggcaatgtctaccaataccatggtgctaactagcattaaagggactccgctgtacatgtcccccgaacttgtagaggaacgcccatacgatcatacagcagatctctggagtgttggctgcatcctctatgagttggcagtgggtacgcccccattttacgccaccagtatattccagctggtgagccttatcctgaaagaccccgttagatggccatctaccatcagcccatgcttcaagaattttcttcaaggattgctcacaaaagatcctcggcaacgtctctcatggccagatctcctttatcatccattcatcgcaggccacgtcaccatcatcactgagccggctggccctgatttgggtactcctttcaccagccgcctccccccttag

SEQ ID NO: 240145 - DNA, 3948 bp, synthetic construct
  misc_feature 1..3948: note = Description of Artificial Sequence: Synthetic coding sequence
  source 1..3948: mol_type = other DNA
atggaaaagtatcatgtactcgagatgattggcgagggcagttttggaagagtgtacaaggggagacgaaaatacagcgctcaagtcgttgctctgaagttcatccctaaattgggaaggtccgagaaggagctgagaaacctccagcgggagatagaaatcatgaggggcctgagacaccccaacattgttcacatgttggatagtttcgagacagataaggaagttgtggtggtgacagattatgcggaaggcgaactgttccagatcctcgaagacgatgggaaactccccgaagaccaggtgcaagccatcgctgcccagctggtgtccgccctttactatctgcattcccatagaatcctacacagagacatgaagccacaaaacatcctacttgccaaaggcggaggaataaagttgtgcgatttcgggtttgcacgcgcaatgtcaaccaatactatggtcctcacctccattaaaggcacaccgctatacatgtctcctgaacttgttgaagagagaccctatgaccatactgccgatctgtggagtgtagggtgcatattatacgaactcgccgtagggaccccgccattctatgccacttcaatttttcaactggtgtccctgatacttaaagaccccgttagatggccctcaaccatttcaccttgctttaaaaatttcctgcagggcctgctgactaaggaccctaggcaacggctatcatggccagacctgttgtaccaccctttcatcgctggccacgttacaattatcacagaacctgctgggccagatctgggaaccccgttcacttcgagattaccccctgagcttcaggtattaaaggatgagcaggcccacaggcttgctcccaagggaaaccagagtcgtatcctgacacaggcttataagaggatggcagaggaagcaatgcagaagaaacaccagaataccggcccagcattggagcaggaggacaaaactagcaaagtcgccccaggaacagctcccctgcctcggttgggggctacaccgcaggagagttccttacttgccggaattctggcaagtgaattgaagagcagttgggcaaagagcgggaccggtgaagttccctccgcaccgagggaaaaccgaacaacaccagattgcgaacgagccttccctgaggagagaccggaggttttgggccaaagatcgactgatgtagtcgatctcgaaaatgaagaacctgactctgacaacgagtggcagcacctattagagaccacagagccagtaccgatccagcttaaagcgcctctgacgcttctgtgcaatcctgacttttgccagcgaattcagagccagttgcacgaggctggcggacagatactcaagggaatactggagggtgcgagccacattctgcctgcattccgggtcctgtcttctcttctttccagttgcagcgactctgtcgccctgtattccttttgccgagaagccggtctacctggcttgctcctgtccctcctacgccatagtcaagagtcaaattctctccagcagcagagctggtacggaacatttctgcaggatttaatggctgttatccaggcatacttcgcatgtactttcaacctggaacgttctcaaacctcagatagcttgcaggtgtttcaagaggcagccaatctgtttctggacctgttgggcaagctgttggcccaacccgatgactctgagcagacactgcgccgtgactcgctgatgtgctttaccgtgttgtgcgaagccatggatggtaatagcagagctatcagtaaggccttttacagctcattgcttacgactcagcaggttgttctggatggactgctccatggcctcaccgtgcctcagttgccggtacacaccccccagggggcacctcaggtgtcgcagccactccgagagcaatctgaggacatccccggagcaatctcaagcgcactcgcggctatctgtaccgccccagtaggcctaccagactgctgggatgctaaggagcaggtatgctggcatttagctaatcagctcaccgaagacagcagtcaactgcggccaagcctgatctctggactccaacatcctattctttgtctccatttgttgaaggtactgtatagctgctgtctggttagtgagggactgtgtaggctgctcgggcaggaacctctagctctcgagagcctttttatgctgatccagggcaaggtcaaggtcgtcgattgggaggagtctacagaagtaaccctctactttctgtcactcctcgtgttcagacttcagaacttgccctgcggtatggagaaacttggttccgacgtggccacactcttcactcattctcacgtggtttcgctggttagcgcggcagcctgcctgctagggcagctcggccagcaaggagttactttcgatctccaacctatggagtggatggcagcggcaacgcacgctctgtcagccccagctgaggtgcggctgactccacccggttcctgcggtttctacgacgggctgttaatcctcctcctccagcttcttacggagcagggaaaagcatctttaatacgagacatgtcttcttctgagatgtggactgtgctgtggcatcgtttctccatggtgctaagacttcctgaggaagcaagcgctcaagagggggagctcagcttgagtagcccaccttcccctgaacccgattggactttgatctcaccacaggggatggctgcccttttaagtttggccatggccacatttacgcaagaaccgcagctgtgtctatcttgcctgagccagcatggctcaatattgatgtctatattgaaacatctgttgtgtcctagtttcctgaaccagctgcggcaggctcctcatggctccgagttcctgccggtggtggttctgagcgtgtgtcagctcctgtgtttcccgttcgctctagacatggacgccgacctgctcataggtgtgctggctgacttacgggacagcgaagtggctgcgcatctgctgcaagtgtgctgttatcaccttccgttaatgcaagtggagttgccgattagcctgttgacccggttggccctcatggaccctacctccctcaatcagtttgtcaacactgtcagtgcatcaccacggacgattgtgtctttcctgtccgttgccctgctttccgatcagcctcttctgacctccgatctcctaagcctcctagcgcataccgcgagagtcctgtccccatctcatctaagctttatacaggagctgctcgcagggtcggatgagagttacaggccacttagatcccttctgggccatccggagaattcagtccgagctcacacctataggttactgggccacctcttgcagcactccatggcgctccgtggggcacttcagagtcagtctggcctgttgtcccttctgttgttaggtctgggtgataaggatcctgtggttcgatgcagcgcatcttttgctgtgggcaacgccgcttaccaggccggacctcttggccctgctcttgctgccgcagtgccctctatgacccagctgctcggcgatccccaggccggaatacgtcgtaatgtcgcaagcgcattaggtaacctcgggccagagggacttggagaagagctgcttcagtgcgaggtccctcagcggctgctcgaaatggcttgcggggatcctcaacccaatgtgaaagaagccgctctcattgctttgagatcgttacagcaggagcctggcatacatcaggtcctggtgagcttaggcgctagcgagaagctcagtctgctctccctgggcaatcagtctctgccacactcttccccacgcccagcttcggccaaacactgcaggaagctcatccatttattgcgcccagcccattccatgtag

SEQ ID NO: 240146 - DNA, 1056 bp, synthetic construct
  misc_feature 1..1056: note = Description of Artificial Sequence: Synthetic coding sequence
  source 1..1056: mol_type = other DNA
atgaggtttaccttccctttgatggcaatagtgctggaaatcgctatgatcgttctgtttggcctgtttgtagagtatgagacagatcagactgtgcttgagcagctgaacattaccaagccaacggatatggggatctttttcgaactgtaccctcttttccaagacgtacacgtgatgatcttcgtgggcttcggttttctcatgacgttcctcaagaaatatggcttttcttcggtgggtatcaatctgctcgttgctgccctcggcctgcagtgggggacgatcgtccagggtattctccagagtcaagggcagaagtttaatatcggcattaagaacatgataaatgctgattttagtgccgcaactgtgctgataagctttggagccgtgcttggcaaaacttctccaacccagatgctcattatgaccatcctggagatagtgttctttgcgcacaacgaatatctcgtgagcgagatttttaaagcttctgatataggcgctagcatgacaatacacgccttcggtgcctacttcgggcttgccgttgccggaatcttgtatcgttcaggactccggaagggccacgagaatgaggagagcgcgtactattccgatcttttcgccatgattgggaccttattcctatggatgttctggcctagttttaatagcgctattgccgaacccggagacaagcagtgtcgggctatagtcaacacttatttctcactcgcagcgtgtgtcctaaccgctttcgccttcagttcattggtcgagcacagaggtaagttgaacatggttcacattcaaaatgccacactggcagggggagttgcagttggcacctgtgccgatatggctatccatccgtttggcagtatgattatcggctccattgctggaatggtgagcgttctgggatacaaatttctcaccgtgtatggccacgcgggatcctgcaccggatttttgtatcggaatagcagttgttggaggtcagacgacaggtttaattccaaagtcgcctccctggggacagccatctag

SEQ ID NO: 240147 - DNA, 1389 bp, synthetic construct
  misc_feature 1..1389: note = Description of Artificial Sequence: Synthetic coding sequence
  source 1..1389: mol_type = other DNA
atggagactgtccagctgcgcaatccaccaagacgccaactgaaaaagctggatgaagatagccttacaaaacagcctgaggaggtgttcgatgtgcttgagaagctcggcgaaggtagttacgggtctgtgtataaggctattcataaggaaactggacagatcgttgccatcaagcaggtccctgtagagagcgatctccaagagatcataaaagagatctccatcatgcaacagtgtgacagcccccacgtggtaaagtattatgggtcctattttaagaataccgatctctggattgtgatggagtattgtggtgcaggaagtgtatctgacattattaggctgagaaacaagactctgactgaggacgagattgccactatcctgcagagcacactgaagggccttgagtatctgcacttcatgcggaagatccatagggatataaaagcaggtaacattctcctcaacaccgaaggccatgccaaattagctgacttcggcgtcgcgggacaactgactgatacaatggctaaacggaataccgttatcggtacccccttctggatggcacccgaggtgattcaggaaattggctacaattgcgtcgctgacatctggtctctaggcattaccgcaattgagatggctgagggaaagcccccatatgccgacattcatcctatgagggccatatttatgatcccaaccaatccccctcccaccttccgcaaacctgagctgtggtccgataacttcactgatttcgtcaagcagtgccttgtaaaatctcctgagcagagggccacagctactcagcttcttcagcaccctttcgttcgcagcgccaagggcgtgtcaattcttcgtgacctgattaatgaagcaatggacgtgaaacttaaacgtcaagagtcccagcaacgggaagtggaccaagatgatgaggagaactcagaggaagacgagatggactctgggaccatggttcgagccgtgggagacgagatgggaaccgtgcgggtcgcttccacgatgacagatggggctaacacaatgattgaacacgacgatacactgccgtctcaactaggaacaatggtcataaatgcagaggacgaagaagaagaaggaacaatgaagagacgagacgagaccatgcaacccgctaaaccttcgttcttggaatattttgagcagaaagaaaaggagaaccaaatcaattcgtttggcaaatccgtaccaggccctctgaaaaacagttccgactggaagatcccccaggatggggactatgaattcaaaacctcccaggagcagcagagcggcaaagatatttgtatccagaactgtcagggcaaccttctttgcagatatgcattttag

SEQ ID NO: 240148 - DNA, 1464 bp, synthetic construct
  misc_feature 1..1464: note = Description of Artificial Sequence: Synthetic coding sequence
  source 1..1464: mol_type = other DNA
atggaaacggtgcagttgcgaaatcctcctagacgccagctgaagaaactggatgaggatagcctaaccaagcaacccgaggaagtattcgatgttctggagaaactgggcgaaggtagttatgggtccgtctacaaagccatccataaagagacggggcagatagttgcaattaaacaggtgcccgtggagtccgatctgcaagagataatcaaggagatttccattatgcagcagtgtgatagtccgcatgtcgtcaagtactatgggtcatattttaaaaatactgatctgtggatcgtgatggagtactgcggggctgggagcgtctcagatattatcagattgaggaataaaacgctaactgaagacgagattgcaactattcttcaatcaactctgaagggattagagtaccttcactttatgcgaaagattcaccgtgatataaaggctggcaatattctgctcaatacagaagggcatgctaaactggcagactttggcgtggccggtcagttgaccgataccatggccaagcgaaacacagtcatcggcactcctttctggatggctccagaagttatccaggagattggctataattgcgtggctgatatatggtctttaggcatcaccgctattgaaatggcggagggaaaacccccttacgcagatatacatcccatgagagccatctttatgattccgacaaatcccccaccaaccttcaggaaaccggagctctggtctgacaatttcaccgattttgtgaagcaatgcctcgttaagagccctgaacagagagccaccgctactcagcttctccagcacccttttgttcggagtgcaaagggcgtaagcattctgcgggatctgatcaatgaagctatggacgtaaagctgaagcgtcaggagagccagcaacgggaagtggatcaagatgatgaagaaaactcagaggaggacgagatggacagtgggactatggtccgagccgtgggtgacgagatggggactgtcagagtcgcctccacaatgactgacggagccaatacaatgatagagcatgacgataccctgcctagccaactgggaacgatggttatcaatgcagaggatgaggaggaggagggtaccatgaagcgacgtgacgagacaatgcagcccgcaaagcccagtttcctcgaatactttgagcagaaggagaaggagaaccaaattaactcctttggcaaatccgttcccggtcctctcaagaactcgagtgattggaaaatccctcaggacggcgactatgaatttctgaaatcctggacagtcgaagacctgcagaagcgattgctggccctcgaccccatgatggagcaggagattgaagaaatcaggcagaagtaccagagcaaacggcaaccaattctcgatgctattgaggctaagaaacgaagacagcagaacttctag

SEQ ID NO: 240149 - DNA, 1389 bp, synthetic construct
  misc_feature 1..1389: note = Description of Artificial Sequence: Synthetic coding sequence
  source 1..1389: mol_type = other DNA
atggagactgtccagctacggaaccctccgcgaaggcagctgaagaagctggatgaggactccctcactaaacaaccagaggaggtatttgacgttttagagaaactgggcgagggctcatacggctccgtatacaaggccattcataaagaaactggccagatcgtagccatcaagcaggtacccgtggagtctgatcttcaggaaattatcaaggagatcagtatcatgcaacagtgtgacagtccccacgttgtcaaatactacggaagttactttaagaacacagatctgtggattgtaatggagtactgcggagctggctccgtgtccgatataatcaggttgcgaaataaaactctgactgaggatgagattgccaccatactgcagagcactctgaaaggcctggagtacttgcacttcatgaggaaaatccatcgcgatatcaaggcaggcaacattttactcaataccgagggacacgccaagttggccgacttcggagtagcagggcagctgacagatacaatggctaaaagaaacacggtgattggcaccccattctggatggcgcctgaggtaatccaagagatcgggtataattgtgtagcagatatctggtccctgggaatcacagccattgaaatggctgagggcaagcctccatacgctgacatccatcctatgagagccatatttatgattccaaccaatcctccgccaacttttaggaaacccgagctgtggtccgataacttcactgatttcgtgaagcagtgcctcgtcaagagtcccgaacagagggccacggcaacccagcttctgcaacacccattcgtgagatctgccaaaggagtgagcatcctgcgcgacctgatcaacgaagccatggacgttaagctgaaaaggcaagaatcacagcagagggaggtggatcaggatgatgaggagaatagcgaggaggacgagatggacagcggaactatggtgcgcgctgtgggggatgagatgggaaccgttcgggtggcaagcactatgacagacggcgctaacaccatgattgagcacgacgacactttgccctcccagttaggaacgatggtgattaatgcagaggatgaggaggaggaaggcacaatgaagcgtagagatgagacaatgcagcctgcaaagccttccttcctggaatacttcgaacagaaggagaaggagaatcaaatcaacagctttggcaaaagtgtccccggacctttgaaaaatagctcagactggaaaataccgcaagacggggactatgagttcaagacgtcccaggaacagcagagcgggaaagatatttgcatccaaaattgccaggggaatctgctttgtcgatacgcattttag

SEQ ID NO: 240150 - DNA, 1299 bp, synthetic construct
  misc_feature 1..1299: note = Description of Artificial Sequence: Synthetic coding sequence
  source 1..1299: mol_type = other DNA
atggaaaccgtgcagttgcgcaatccaccaaggcggcagttaaaaaagctggacgaggattccctaaccaagcagcccgaagaagtgttcgatgtcttggaaaagttgggcgagggctcatacggttccgtatacaaggccatccataaggaaaccggccagatcgttgcgatcaagcaagtcccagtggaatctgacctgcaagaaattatcaaagaaatcagtatcatgcagcagtgtgattcccctcacgtggtgaagtactatggctcctacttcaagaacacagacctatggatcgtcatggagtattgcggtgccggaagcgtcagcgacattattcgcctccgaaataaaaccgatacaatggcgaaacgaaacactgttatcggcacccctttctggatggcacccgaggtgattcaggagatcggatataactgtgtggcagatatctggagcttaggaatcactgcaattgaaatggcagagggcaaacccccttacgctgacatccatcccatgcgggctatcttcatgatcccaactaatcctcctcctacattccggaagcccgagctgtggtcagacaactttaccgattttgtgaaacagtgtctagttaaatcacctgaacagagagccacagctactcagctgctgcagcacccattcgttcgcagcgcaaagggcgtatccattctgcgggacctaataaatgaggccatggatgtgaagctcaagcggcaggagagccagcagcgcgaggttgatcaagacgacgaagagaattctgaggaagatgaaatggattcaggcaccatggtgagagctgtgggagacgaaatgggtacagtcagggttgccagcacgatgacggacggagctaatacaatgatcgaacatgacgatacgctgccttcacagttaggaaccatggtcatcaacgcggaagacgaggaggaggaagggacgatgaaacgcagggacgaaacgatgcagcccgctaaaccttcattcctggagtattttgaacagaaggagaaagaaaaccagatcaactctttcggaaagagcgttccgggacccctgaaaaactccagcgactggaaaattccccaagatggcgattatgaatttctaaagtcctggaccgtcgaagatctccagaagcgtctactcgccttggaccccatgatggagcaggaaatcgaagagatccgccagaagtaccagagtaagagacagcctatcctcgacgcaatcgaggccaaaaagcggaggcagcagaacttttag

SEQ ID NO: 240151 - DNA, 1254 bp, synthetic construct
  misc_feature 1..1254: note = Description of Artificial Sequence: Synthetic coding sequence
  source 1..1254: mol_type = other DNA
atgaagcgacgagccagtgatcggggagcgggagaaaccagcgccagagccaaggctctcggctctggaatctctggaaacaatgccaagagagcaggccctttcatccttgggccacggctgggcaattctcccgttccttccatcgtccagtgtcttgctaggaaagatggtacggatgatttctatcagctcaaaatcctcaccttggaagagagaggggatcagggtatcgaaagccaggaggagaggcaagggaagatgctgctccacaccgaatactcccttttatctctgttacacactcaagacggtgtggtccatcaccacggactgtttcaggacaggacatgtgagattgtagaggatactgagagcagccggatggtcaaaaaaatgaagaaaaggatttgcctggtgcttgactgtctgtgcgcccacgactttagcgataaaacggcggatttgataaatttgcagcactatgtaataaaggagaagcggctctccgaaagagaaaccgtcgtgatattctatgacgtagtgcgggtcgttgaggcgctgcaccaaaaaaacatagttcaccgcgatctcaagctgggtaacatggtccttaacaaacgtacacaccgtatcaccattactaacttctgtcttggcaagcacttggtcagcgagggagacctcctgaaagaccagcgcggatcccccgcttacataagcccggacgtgctctctggacgcccataccggggtaagccatcagatatgtgggctctcggggtggtgctctttacgatgttatacggccaattccccttctatgacagcattcctcaggagttgtttcggaagatcaaagccgctgagtatactatcccagaggacggtagggtaagcgagaacacagtgtgcctgattcggaaactgcttgtcttggacccccagcagcgcctggccgctgctgacgttctggaagccctgtccgcaattatagcatcttggcagtccctgtctagcctctctggacctctgcaggtggttccagatattgacgaccagatgtccaatgccgacagcagccaggaagtgtcttggggcggacaaatgggacactaccccgctccaagggacaggctcctgggggctggccgagctcgtgctgaggtagctgccacaagaaggccccagtccttcctgggcctactcccgcagccttggggaggcaaaggtagactgcagagctctgcctag

SEQ ID NO: 240152 - DNA, 1308 bp, synthetic construct
  misc_feature 1..1308: note = Description of Artificial Sequence: Synthetic coding sequence
  source 1..1308: mol_type = other DNA
atgaaacgtcgagcttctgacagaggggctggggagacctccgcccgtgccaaagccctgggctcagggataagcggaaacaacgccaaacgcgctgggcctttcattctgggcccaagacttggcaattctcccgtgccaagcatcgtacagtgcctagctcgcaaggacggaactgatgatttttaccaattgaaaattctcaccctggaggaacggggagaccagggaatcgagagccaggaggaacgccagggtaaaatgctgcttcatacagaatacagtttgctttccctgttgcacacacaagacggagtagtgcaccaccatgggctgttccaggatagaacttgtgaaatagtcgaggacactgagtcgagccggatggtcaagaaaatgaaaaagagaatctgcctggtgctagattgcctgtgcgcacatgacttctccgataagactgccgatctgattaaccttcagcactatgttattaaagaaaaacggctttcagagcgggaaacggtggtgattttctacgacgtcgttagagttgtcgaagccttgcaccagaaaaatatagtccatagggatttaaagcttgggaatatggttttaaataaacggacgcatcgcatcacaataactaacttttgtctgggcaaacatttggtaagcgaaggggatctgctgaaggaccaaagaggtagtcccgcatacatttcccctgacgtgttgagtggccgaccctatcgtggaaaacctagtgacatgtgggccctgggtgtagttctctttaccatgctatacgggcaatttcctttctacgattccattccccaggaactcttcaggaagataaaggccgctgaatacacgattccggaggacggtagggtcagcgaaaacacggtatgtctgataaggaaactactcgtgctggatcctcaacaaagacttgccgctgctgatgttctggaagctctgagcgccatcatagcgagctggcagagcctgagctccctgagcgggcctctgcaggtcgtgcccgatatcgatgaccagatgtccaacgccgacagctcacaggaagctaaggttactgaagaatgctctcagtacgagtttgaaaattatatgagacaacagctgctgctggccgaggaaaagtcttccattcacgatgcacggagttgggtgcccaagcggcagttcggcagtgcccctcctgtaagaaggttggggcacgatgcgcaacccatgacaagtctggacaccgctatcctggctcaacgttacctccgcaagtag

SEQ ID NO: 240153 - DNA, 1323 bp, synthetic construct
  misc_feature 1..1323: note = Description of Artificial Sequence: Synthetic coding sequence
  source 1..1323: mol_type = other DNA
atgaaacgcagggctagcgacaggggagctggggaaacttcggcacgcgcaaaggctttaggaagcggcatcagcgggaacaacgcgaaacgtgccggaccgtttatcctggcactttgtgccgtgggaccacggctgggtaacagccccgtcccatccattgtccagtgcttggccaggaaggatgggaccgacgatttctaccagctgaagatcctaacccttgaggagcgcggagatcagggaatcgagagtcaggaggagaggcagggaaaaatgctactacacacagaatactctctgttatctcttctgcacactcaggacggagtggtccaccaccacggactttttcaggatcgcacatgcgaaatcgttgaggatacagaatcttcacgcatggtgaagaaaatgaagaagcgtatatgcctggtcttggattgcctgtgtgctcacgacttttctgataagacagcagacctgataaacttacagcactatgtaatcaaggaaaagagactgagtgagagagagacagtcgtgatcttttatgacgtggttagagttgtagaggctctccatcagaaaaatatcgtgcaccgggatttaaagcttgggaacatggttttaaacaaaaggacacaccggattaccatcacaaatttctgtctggggaagcatcttgtgtccgaaggggacctacttaaggaccagaggggctctcctgcctacataagtcccgatgtgctgtccggaagaccctacaggggaaagccctcagatatgtgggctttgggagtcgtgctatttacgatgctgtacggacagtttccattctatgatagtataccccaggaactattccgcaagattaaagcagctgagtacacaattcccgaggacggacgcgtgagtgagaataccgtctgcctgattcggaagttgctggtgctggatcctcagcagagacttgccgcagcggacgtattggaggctctgtccgcgatcatcgcttcctggcaatccctcagctcactgtccggacctctgcaagttgtcccagacatcgacgaccaaatgtccaacgcggacagttctcaagaggccaaggtcactgaggaatgctcacagtacgaatttgagaattatatgcgacaacaactactcttggccgaggagaaatcaagcattcatgatgcacgcagctgggttcccaaacgtcaattcggcagcgccccacccgtacgtagacttggtcacgacgcgcaacccatgaccagcctggacacggcaattctggctcagcgctacctgcggaagtag

SEQ ID NO: 240154 - DNA, 1308 bp, synthetic construct
  misc_feature 1..1308: note = Description of Artificial Sequence: Synthetic coding sequence
  source 1..1308: mol_type = other DNA
atgaaacgcagagcatctgacagaggggcaggcgaaacatccgccagagccaaagccctgggttcgggaatctcaggcaacaatgcaaagagagcgggtccgtttatcttgggacctaggctaggaaactcaccagtccccagcatagtccagtgccttgcaagaaaagacggcaccgacgacttttaccaacttaagattctcaccttagaagagcgaggcgatcagggcattgaatctcaggaagagcgacaagggaaaatgttgctgcacactgagtattcactgctctcccttcttcatactcaggatggggtggtgcatcatcatggtctctttcaggatagaacatgtgaaatcgtagaggacactgaatcttcgcggatggtgaagaagatgaaaaagcgcatatgcttggttcttgattgcctgtgtgctcatgacttttctgacaaaacagcagacctgattaatttgcaacactacgtgatcaaggagaaaagattgtccgaaagagaaacggtggtgattttctacgacgtcgttagagttgtggaggcactgcatcagaaaaacatcgtgcacagagacttgaagttggggaacatggttcttaacaaacggactcatcgcataaccattaccaacttttgtctgggcaagcacctggtttcagagggggacctcctgaaggatcagcgcggatctcctgcgtacatttcccccgacgtgctcagtggacggccttaccgcggtaagccatccgatatgtgggcactgggcgtggtgctgtttacgatgctgtatggtcagtttcccttttatgatagcattccacaggagctgtttcgaaagataaaggctgctgagtataccattcccgaagacggcagagtgtccgagaataccgtctgtctcataaggaaactcctggtcttggatccccagcagaggcttgcggcagcggacgtcttggaggccctgtcggccatcatcgccagttggcagagtctcagcagcctgtctggacctcttcaagtggtgcccgacattgatgaccagatgtccaacgctgattcatcccaggaagcgaaagtgactgaggagtgctcccagtatgagtttgaaaactacatgagacaacagctgctgctggcagaagagaaatcctcaatacatgacgctcggtcctgggttcccaagaggcagttcggcagtgctccacctgttcggaggctggggcatgacgcgcaacctatgacttccttagacactgccattctcgcccaacgctacctgcgcaaatag

SEQ ID NO: 240155 - DNA, 1092 bp, synthetic construct
  misc_feature 1..1092: note = Description of Artificial Sequence: Synthetic coding sequence
  source 1..1092: mol_type = other DNA
atggctatgcgccagactccgcttacatgttctggccatactagaccggtcgtggatctggccttctcaggtattacaccctatggctatttcttaatctctgcatgcaagggtgctgggcagcatcttccccgactcagcgggcaacacgacggcaaacccatgctgcggcagggtgatactggcgactggataggaacctttctcggccataaaggcgctgtatggggcgctacactgaacaaggacgccaccaaagccgcaacagccgctgccgactttaccgcgaaagtgtgggacgctgtctcaggagatgagctgatgacattggcacacaaacatatagtgaagaccgtggacttcacacaggattcgaattatctccttacgggtgggcaagacaagctgctacggatatatgacctgaataagcccgaggccgagccaaaagagatttccggacataccagtggcattaagaaggccttatggtgttccgaggataaacaaatcctaagcgcggacgacaaaaccgtcaggctctgggaccatgcaacgatgaccgaggtgaaatccttaaattttaatatgtccgtttcaagcatggaatatatacctgagggcgaaatcctggtgattacatatggaagatctatcgcatttcactccgctgtgagtctggatcccattaaaagtttcgaggctcccgctacaataaacagcgctagtttacaccctgaaaaagaatttctagtggctgggggagaggattttaagctgtataaatacgactacaatagcggcgaagaattggagagctacaagggccatttcggccctattcactgcgtgcggtttagccccgacggagaattgtatgcttctggtagcgaagatggaaccctgcgcctgtggcagaccgttgtgggaaaaacttacggcttatggaaatgtgtgctgccagaagaggacagcggcgaactcgccaaacccaaaatcggattccccgaaacgaccgaggaggagctggaggagatagcctcggagaactccgactgtatcttcccgtcagctcctgatgtgaaggcctag

SEQ ID NO: 240156 - DNA, 1053 bp, synthetic construct
  misc_feature 1..1053: note = Description of Artificial Sequence: Synthetic coding sequence
  source 1..1053: mol_type = other DNA
atggccatgcggcagacacctctgacttgctcaggacacacgaggcctgtcgtagacctggccttcagtgggattactccatacggctatttcctgatctctgcgtgcaaagatggaaaacctatgctgcgccaaggcgatacaggagattggatcggtacgtttttaggacacaagggcgctgtatggggggctacccttaataaggatgccacaaaggctgctaccgctgccgctgattttactgctaaggtgtgggatgcggtcagtggtgatgaattgatgaccctggcccacaagcacatcgtgaagaccgtggactttactcaggactccaattacctgttaacaggcggacaggataaattactgcgaatatacgacctcaataaaccagaggccgagcccaaagaaatttccgggcacacatctggcattaagaaggctctgtggtgttctgaagacaagcagatattatctgccgatgataaaaccgtgcgcttatgggatcatgcgactatgacagaggtgaaaagtctgaacttcaacatgagcgtgtcctcaatggaatacatccccgagggtgagattttggttattacatatggcaggtcaattgcctttcactcagctgtgagcctggatcccattaagagcttcgaggcccctgcaacaattaactcagcttccctccaccccgaaaaggagtttcttgttgccggaggagaggacttcaagctgtacaaatacgactacaactctggggaggagctggaatcctacaagggtcacttcggccctatccattgtgtgagattttcacctgacggggaactgtacgcctccggcagcgaggatggcacactccgactctggcaaactgttgttggtaagacttatggcctgtggaagtgtgttttgccagaagaggacagtggggaactggctaaacccaaaatcgggttcccagaaaccactgaggaggagttagaagaaatcgcatcagaaaacagcgattgcatattcccatccgctcccgacgttaaggcctag

SEQ ID NO: 240157 - DNA, 771 bp, synthetic construct
  misc_feature 1..771: note = Description of Artificial Sequence: Synthetic coding sequence
  source 1..771: mol_type = other DNA
atgacactggcccataaacacattgtcaaaacagtagacttcactcaggattcaaactacctgttgacaggcggtcaagataaattgttacggatatacgatctgaacaagcccgaagccgaaccaaaagaaatatcaggccatacttctggcatcaagaaggctttgtggtgctcagaggataagcagatcctgtcagcagacgataagaccgtacgactatgggaccatgccaccatgactgaggttaaatctctgaacttcaatatgtctgttagctctatggaatatataccggagggtgagatacttgtcattacctacggaagaagcattgcttttcactcggccgtgtccctcgatcccattaagtcatttgaggccccagctaccatcaacagcgcgtccctgcacccggaaaaagagttcctggtcgcaggcggtgaagactttaagttatacaagtacgactacaactcaggtgaggaacttgaatcctacaagggacatttcggaccgattcattgcgtgaggttctctcctgatggagagctgtacgcctcgggatcggaagacgggaccctccgcctttggcagactgtggtggggaaaacatacggactgtggaaatgcgtgctcccagaggaggattctggcgagctggctaaaccaaaaatcggctttccagaaactactgaggaagagttggaggagattgccagcgagaatagtgattgcatttttccctctgccccagacgtgaaggcctag

SEQ ID NO: 240158 - DNA, 1707 bp, synthetic construct
  misc_feature 1..1707: note = Description of Artificial Sequence: Synthetic coding sequence
  source 1..1707: mol_type = other DNA
atgaaaaataaaatccaggtagtggtgctcgaaaacgagggtttgcagcagcagctgaagagccagagacaggaagaaacacttagggagcaaactcttctggatgcctccggtaacatgcataacagctggattactaccggtgaagacagcggcgtaggtgaaacaagcaagcgtcctttcagccatgataacgcggactttgggaaggccgcttccgcaggtgagcagctggaattagagaaactaaagttaacgtatgaggagaaatgtgaaatcgaggagtcccagcttaagttcctaaggaacgatttggccgaataccagcggacatgcgaagatctgaaagagcaactcaagcacaaggagttcctcttagctgccaatacatgcaatcgcgtcggcggactgtgtctaaagtgcgcccaacacgaggctgtgctgtcacaaacccacactaatgtccacatgcaaactatcgagcggttggtgaaggaacgtgatgacctgatgagcgcccttgtatctgtccgctcttctctggctgatacacaacagcgtgaggcttccgcttacgaacaggtcaaacaggtgctgcaaattagcgaagaggccaattttgagaaaacaaaggcgctgatccagtgtgatcagttacgcaaagagctagagcgacaagcggaacggctggaaaaggagcttgcgagtcagcaggaaaagagagccattgagaaggatatgatgaaaaaggagataacgaaagagcgcgaatacatgggctcgaagatgctgattttaagtcagaatatcgcacaactcgaggcccaagtcgagaaagttaccaaagagaagattagtgcaatcaatcagctcgaggaaatacagagtcagctagcatcacgcgagatggatgtgacaaaagtgtgtggggagatgcgatatcagctcaataaaaccaacatggaaaaggacgaagctgaaaaggagcatcgggaattccgggctaagaccaaccgggacctcgagatcaaggaccaggaaattgagaagctccgcatagagttagatgagagcaaacagcacttagagcaagagcagcagaaagccgcactggccagagaggagtgtctccggctgacggagctgcttggagaatctgaacatcaactgcacctgacacgccaggaaaaagattctatccagcagagtttcagcaaggaggctaaagcacaggccttgcaggcgcaacagcgggagcaggagctgacacagaagattcaacagatggaagctcaacacgacaagactgagaacgagcagtacctcctgctgacatcccagaacacattcctcacgaagttaaaagaagaatgctgcactctcgccaagaagctggaacagatctcgcagaagactcggtccgagatagcacagctgagtcaggagaaaagatatacctatgataagttgggcaaactgcagcgcagaaacgaggaactggaggaacagtgcgtgcagcatggaagggtacacgagactatgaagcagagactcagacaactggacaagcactcccaggccaccgcccagcagctcgttcaacttttgagcaaacagaatcagctgctcctagagcgccagagtctcagcgaagaggtagaccgcctgagaactcaattgccctctatgccccagagtgattgttag

SEQ ID NO: 240159 - DNA, 2013 bp, synthetic construct
  misc_feature 1..2013: note = Description of Artificial Sequence: Synthetic coding sequence
  source 1..2013: mol_type = other DNA
atggcaaagtcccctgagaactccacactggaggagatcctcgggcagtatcagaggtcacttcgcgagcacgcgagccgcagcatccatcaattgacctgtgctctgaaggagggggacgttacaatcggggaagacgcaccaaacctgtctttttcaacatcggtgggtaacgaagacgccaggacagcgtggccagaattgcagcagtcccacgctgttaaccagctaaaggatctgcttagacagcaggctgataaggagtcagaagtgagtcctagtcgcaggagaaaaatgagtcccctccgcagcctggagcacgaggaaaccaacatgcctactatgcatgacctggtgcacacaattaacgaccaatctcagtacatacatcacctagaggcagaggtgaagttctgtaaagaggaactgtcaggcatgaaaaacaagatccaggtggttgtcctggaaaacgagggacttcagcaacagctgaaatcacagaggcaggaggagacactcagagagcagaccctgttggacgccagcgaaaaactaaagctgacgtatgaggaaaagtgcgagattgaggaatcccagctgaagttcttgagaaacgatctagcagaataccaacggacgtgcgaagaccttaaggagcagctgaaacacaaagagttcttgcttgccgctaatacctgtaatcgcgtgggaggactatgtctgaaatgtgcacagcacgaagcagtgttgagtcagacacacacaaacgttcacatgcagacaattgagaggctcgtcaaagagcgggatgacctgatgtccgccctggtctcagtgcggtccagtctagccgatacccagcagagggaggcatccgcctacgagcaagtaaagcaagttcttcaaatttccgaagaggcgaactttgaaaaaactaaggctctcattcagtgtgaccaactaagaaaagaactcgagagacaagccgaacggctcgagaaggaactggcctctcagcaggaaaaacgggcaatagaaaaagatatgatgaagaaggagataacaaaggaaagagaatatatggggagcaagatgctgatactgtctcaaaacattgcacaactagaagcccaggttgagaaggtgacaaaggagaagatctcagctattaatcagctagaggaaatacaaagccagttggcctcacgtgaaatggatgtgaccaaggtctgcggcgaaatgagataccaactgaacaaaacgaatatggagaaagacgaagctgagaaggagcatagagaatttcgggctaagacgaatcgggacctggagattaaggatcaagagatcgaaaaactccggatcgagctggatgaaagtaagcaacatcttgagcaagaacagcaaaaagctgctctcgcacgcgaggaatgcctcagactgacagagctgctcggcgagagcgagcaccaacttcatctgacccggcaggagaaggactctattcagcaatccttctccaaagaggccaaggcgcaggctttgcaagcccaacagagggagcaagaactcactcaaaaaatccagcagatggaggcacagcatgacaaaactgagaatgaacagtacctgctgttgacttcccagaacaccttcctgactaaactgaaagaggagtgctgcaccctggccaagaagttggagcagatctcccaaaagacgaggtccgaaatcgcccagttatctcaggaaaaacgatatacatacgataaacttggaaagctccagcgacgaaacgaagagcttgaagagcaatgcgttcagcatggaagggttcacgaaaccatgaagcagcggcttcggcaactcgataaacattctcaggcgacggcccaacagctagtgcagcttctcagtaagcagaaccagctcctgctcgagcgccaatctctcagcgaggaagtcgatagactgagaacacagctcccatctatgccacagtctgactgctag

SEQ ID NO: 240160 - DNA, 2142 bp, synthetic construct
  misc_feature 1..2142: note = Description of Artificial Sequence: Synthetic coding sequence
  source 1..2142: mol_type = other DNA
atggccaagtccccagaaaattctacgctggaagagatcttaggccagtatcaacggtctttaagggagcatgcatctcgctcaatccaccagctgacctgcgcactcaaggagggtgacgttactattggcgaagacgctccaaacctttcctttagcacatccgtgggaaacgaggatgccaggacagcctggcctgaactgcagcaaagtcacgccgttaaccagctcaaagacctcctcagacagcaagccgacaaggagtcagaggtgtctccctcgcggagacgaaagatgagcccgctaaggtctctggagcacgaggagactaacatgccgacaatgcacgatttagtgcacacaatcaatgatcagagccagtacatccaccacctggaagccgaggtgaagttctgtaaggaagaactatctggaatgaagaacaagattcaggtggtcgtgcttgagaacgaaggcctccagcagcagctgaaatcacagcgacaggaagagacactgagagagcagaccttgcttgacgcctctggaaatatgcacaattcgtggataacaacaggggaagattctggggtgggagagacaagcaaacgtccctttagtcacgataatgctgatttcggcaaagctgcctcagctggcgagcaattggagctggaaaaattgaagcttacttatgaagagaaatgcgaaatcgaagagtcccagcttaagtttctccgaaatgacctggcagaatatcagcggacatgcgaagacctaaaagaacagctgaagcacaaggagtttttactggctgcgaatacatgtaatagagttggcggtctctgcctcaaatgcgcccagcacgaagcggtgttatcacaaacacacacaaacgttcacatgcagactatcgagcggctcgtcaaagaaagggacgatttgatgtccgctcttgtatccgtcaggtcatccctggctgatacccagcagcgggaagcctcagcatacgaacaagtgaagcaggtccttcaaattagcgaggaggctaatttcgagaagacaaaagccctgattcagtgtgatcagttgagaaaagagttggaaagacaagctgaaagactggaaaaggagctagcaagccaacaagagaaaagagcgatcgagaaggatatgatgaaaaaggaaattaccaaagagcgggaatatatggggagtaagatgctgattctatcccagaatattgctcagctggaggcgcaggtggagaaagtaactaaggagaaaatcagcgccatcaaccagctcgaagagatacagagtcagctggcaagcagagaaatggacgtgaccaaggtctgtggagaaatgcggtaccagctcaacaaaaccaatatggagaaggacgaagccgagaaggagcaccgcgagttccgggcaaagacgaaccgggacttggagatcaaggaccaggaaatcgaaaagcttcgaatcgagttggatgaatcaaagcaacatctggagcaagaacaacaaaaggctgccctagcccgagaagagtgcttgcgactgaccgagctgctgggagaaagcgaacaccagttacacctgacaagacaggagaaagattcgatccagcagtcgttctccaaggaggcgaaggcccaggctctccaagctcaacagcgcgagcaggagctgacacagaagattcagcagatggaagctcaacacgacaaaacagaaaacgagcagtatctattgctgacttcccagaatacatttctgacaaagctcaaggaggaatgttgcactctagcgaagaagctagagcagatctcccagaaaaccaggtctgaaattgcacaactgagtcaggagaaaagatatacttacgataaactcggtaagcttcagaggcgtaacgaggagcttgaagaacaatgcgtgcaacatggacgggtgcatgaaactatgaagcaacgactccgtcaactggataagcactcacaggccactgcccaacagctagtgcagctgttgagtaaacagaatcagcttctgctcgaacggcaatctctgtccgaggaggtggaccggctcagaacacagctcccgagtatgccgcaaagcgattgttag

SEQ ID NO: 240161 - DNA, 1083 bp, synthetic construct
  misc_feature 1..1083: note = Description of Artificial Sequence: Synthetic coding sequence
  source 1..1083: mol_type = other DNA
atggccaaatcacctgagaatagcactctggaggagatactcgggcagtaccaacggagtctgagggaacatgcatcccgatctatacaccagctgacttgtgccctcaaggagggcgacgtgactataggcgaggatgccccaaatctatcattcagcacctccgtgggaaatgaagatgccagaacagcgtggcctgagctccagcaaagccacgcagtaaaccaactgaaagacctcctccggcagcaggccgacaaagaatccgaggtgagtcccagcagacgacggaaaatgtcaccgctgaggtccctggagcacgaagagaccaatatgccaacgatgcacgacctagtccacaccattaatgaccagagccagtacattcaccatttggaagctgaggtgaagttctgcaaggaagaacttagtggaatgaagaacaagatacaggtagtggttcttgaaaatgaagggctgcaacagcagttgaagtcccagagacaagaagaaacactcagggagcaaacgctgctggatgcttcaggcaacatgcacaacagctggattactacaggtgaagactccggggtcggtgaaaccagcaaaaggccatttagccatgacaacgccgatttcggcaaggccgctagcgccggagagcagctggagttggagaagctgaagctaacctatgaggaaaaatgcgaaattgaagagtcccaactgaagttcttgcggaatgaccttgcggaataccagcgcacttgcgaggatctgaaagagcagctcaagcacaaagagttccttctggctgctaatacatgcaatcgcgttggtggcctgtgcctgaaatgcgcccaacacgaggccgtcttgagtcagacacataccaatgtgcatatgcagacaattgagcgccttgtcaaagaaagagatgatctgatgagcgccctcgtatctgtgcgatcctcattggccgatactcaacagcgagaagcctctgcatacgaacaggtgaagcaggtcctgcaaatcagcgaggaggctaacttcgagaagaccaaacaccctagccagtag

SEQ ID NO: 240162 - DNA, 1245 bp, synthetic construct
  misc_feature 1..1245: note = Description of Artificial Sequence: Synthetic coding sequence
  source 1..1245: mol_type = other DNA
cttctcgatgcttctgagaagttgaagctgacctatgaagagaagtgtgagatcgaggaaagccaactgaagtttctgcggaacgacctggccgagtaccagagaacgtgcgaggacctgaaggaacagttgaagcataaggaatttctgctggccgctaacacttgcaatcgcgtaggcggactctgcctcaagtgcgctcagcacgaggccgtgctgagtcagacacacactaacgtccatatgcaaacaatagagagacttgtgaaggagcgggacgacctgatgtctgctctcgtgagcgtcagaagctctctagctgacacccagcagagggaggcaagcgcctacgaacaagtgaagcaggtgctgcaaatttccgaggaggcgaattttgagaagacgaaggcactgatccaatgtgatcagttgcggaaagaactggaaagacaggcggagaggctggaaaaggagttggcatctcagcaggaaaagagggcaattgaaaaggacatgatgaaaaaggagatcactaaagagcgtgagtatatgggctctaaaatgctaattctgagccagaatatcgcccagctcgaagcgcaagtggagaaggttaccaaagagaagataagcgctatcaatcagctggaagagatccaaagccagctggcttcccgggaaatggacgttacaaaggtgtgtggcgagatgcgctaccagctcaacaaaaccaacatggagaaggacgaggcagaaaaggagcaccgcgaatttagagctaaaaccaaccgcgatctggaaatcaaggatcaagagatagaaaagcttagaattgaactggacgaatccaagcagcatcttgaacaggaacagcagaaagcagcactggcgcgagaggagtgtctccgcctgacagaactgttgggcgagtctgagcaccagttgcacctgacccgctctgaaatagcacagttgtctcaggaaaaacgctacacttacgataaactaggaaagcttcagaggcggaacgaggaactggaggaacagtgtgtccaacacggtagggttcacgagactatgaagcaacgtctgaggcagcttgacaaacactcgcaggccaccgctcaacaacttgtgcagctgctttctaagcagaaccagttactgctcgagaggcagtccttgtccgaggaagtggaccggctgcggacccagctgccctcgatgcctcagagtgattgttag

SEQ ID NO: 240163 - DNA, 729 bp, synthetic construct
  misc_feature 1..729: note = Description of Artificial Sequence: Synthetic coding sequence
  source 1..729: mol_type = other DNA
atggatgacctatgcgaagcaaacggcacgttcgccataagcctctttaaaatactgggggaagaggacaactcccgtaatgtgttcttcagtcccatgtctattagctctgcccttgcgatggtgttcatgggcgctaaggggagcacagccgcacagatgagtcaggccctgtgcttatacaaggatggggacatccaccggggtttccagtcactcctgtccgaggtgaatcggaccgggacccaatacctcctcagaactgcaaaccggttgttcggagagaagacatgcgactttctgccagacttcaaagagtactgccaaaaattttaccaagccgagctggaggaactctccttcgcagaggatacagaagagtgcagaaagcacattaatgactgggtggccgaaaaaacagaaggcaaaatttcagaagtgctggacgccggaaccgtggatcccctgaccaagttggtcctggtcaatgctatatacttcaagggtaaatggaacgagcagtttgatcggaaatacaccaggggcatgctcttcaaaactaacgaagagaagaaaactgtacaaatgatgtttaaggaggcgaagttcaaaatgggttacgccgacgaagtccatactcaggtgcttgagctgccctacgtcgaagaagaactctctatggttatcctgctgcctgacgacaacactgatttggccgttaaggaatag

SEQ ID NO: 240164 - DNA, 1335 bp, synthetic construct
  misc_feature 1..1335: note = Description of Artificial Sequence: Synthetic coding sequence
  source 1..1335: mol_type = other DNA
atgaaagttgtacccagcttgctgctcagtgtgctgctggcccaggtgtggctggtgcccggattagctccatcacctcagtctcctgagacgccggcacctcagaatcagaccagcagagtcgttcaggctcctaaggaagaagaggaggatgaacaggaggcttccgaggagaaggcctctgaggaggagaaagcgtggcttatggcctctcggcagcagctcgccaaagagacatccaacttcggattctccctgttgcgtaaaatctccatgcggcacgatggcaatatggtgttcagtcccttcggcatgagcttggccatgacaggactgatgctgggggctactggaccgacagagactcagatcaaacgaggcctccaccttcaggcgcttaaacccacaaagcctgggcttctgccgtcactcttcaaaggcctgcgggaaactctgtcacgaaacttggagctgggcctcacccaaggctcctttgcgttcattcacaaagacttcgatgtaaaggagacatttttcaacctttctaaacggtacttcgacactgaatgcgtcccgatgaacttccggaatgcttcgcaggctaagcggctgatgaaccactacattaacaaggagacgcgcggtaagattcccaagctgtttgacgaaattaaccctgagactaagctaattttggtcgactacatactcttcaaaggtaagtggctgactcctttcgatccggtgttcacagaggtggacaccttccacctcgataaatataaaacaattaaagtccctatgatgtacggcgcagggaagtttgccagcacattcgataaaaacttcagatgccacgttctcaagttgccctaccagggtaatgccaccatgctggtggtgcttatggaaaagatgggtgatcacctcgcgttggaggactacctgacaacagacttagttgagacatggctgcgcaacatgaagacgcgcaatatggaggtcttttttcctaaattcaaattggatcaaaaatacgagatgcacgagctcctaaggcagatgggtatacggagaattttctccccattcgctgatctgtcagagttaagtgcaacaggccgaaatctccaagtttccagggtcctgcagcgcactgtgatcgaagtggacgaaagagggacggaggcggtggcgggaattctgtccgaaattacagcctactctatgcccccagtgatcaaagtggaccggcctttccatttcatgatctacgaagagacgagtggcatgttgctgtttctgggtagggttgtgaacccaactctgttgtag

SEQ ID NO: 240165 - DNA, 1335 bp, synthetic construct
  misc_feature 1..1335: note = Description of Artificial Sequence: Synthetic coding sequence
  source 1..1335: mol_type = other DNA
atgaaggtggtaccttcccttcttctgagtgttctccttgcgcaggtgtggctggtgccaggcttggccccaagcccccagagcccagagactcctgcaccccagaatcaaacaagccgggtggtccaggctccaaaagaggaggaggaggacgaacaggaggcatccgaggagaaagccagcgaggaggagaaagcctggcttatggcttcaaggcagcaactggcaaaggaaacttcgaactttggcttcagcctgctgcgtaaaataagtatgagacatgacggtaatatggtcttctcaccgttcggaatgtctctcgcaatgaccgggctgatgttgggcgctactgggcctacggagacgcagatcaagaggggcctgcacctgcaggccctgaagcctacgaagcccggtttgcttccatctcttttcaaggggttacgggaaactttatcacggaacctagagttggggttgactcaggggtcatttgccttcatccataaggatttcgatgtcaaggagacgttttttaacctcagtaaacggtattttgacacagagtgcgtcccaatgaattttcggaatgcaagtcaggccaaacgcttgatgaatcattatatcaacaaagaaacgcgcggtaagatccctaaactattcgatgagataaaccctgagacgaaactcatcctggtggattacatccttttcaaagggaaatggctcactccgtttgatcccgtttttactgaggtcgacactttccatcttgacaaatataaaacgatcaaagtaccaatgatgtacggcgctggtaaattcgcttcaacatttgacaaaaattttcgctgccacgtgctgaaactcccttaccaggggaacgccacaatgctcgtagtgctgatggagaaaatgggtgatcaccttgcattagaggattatctgacaaccgacctcgtggaaacttggctgcgtaatatgaagacccggaatatggaggtcttttttccaaagttcaaactagatcaaaagtatgagatgcatgagctgctccgacagatgggcatccgcagaattttctccccattcgccgatctttcggagttgtccgccacaggccgtaacctgcaggtttctcgtgttctgcagcgcacagtgatcgaagtggatgagaggggaaccgaagccgtggccggtattctgtctgagatcacggcatattccatgccaccagttatcaaggtggaccgtccattccacttcatgatctatgaagagacctccgggatgcttctattccttggaagagtggtcaatcccactcttctctag

SEQ ID NO: 240166 - DNA, 1335 bp, synthetic construct
  misc_feature 1..1335: note = Description of Artificial Sequence: Synthetic coding sequence
  source 1..1335: mol_type = other DNA
atgaaagttgtcccaagcctgctactctcagtgctgctggcccaagtttggctcgtccctggcctcgctccatcaccacaatctccggaaactccggctccacagaatcagacctctcgcgtagtgcaagccccaaaagaggaggaagaggacgaacaagaggctagtgaggagaaggccagcgaagaggaaaaggcctggcttatggccagccgtcagcaactggccaaggagacttcaaacttcggattttcactactgcgaaaaatcagcatgaggcatgatgggaatatggtttttagtccttttggcatgtcgctggcaatgaccggcctcatgctcggcgctaccgggcctaccgagacacaaataaagcgaggacttcacctacaggcactcaaaccaaccaagcccggtctcctcccatccttattcaaaggacttagagaaaccctatcccgaaatctggagttaggattgacacaggggtcgttcgcatttatacataaggactttgacgtcaaagaaacctttttcaacctgtcaaagcgctattttgatacggagtgcgttcccatgaatttccgtaatgccagtcaggcaaagcgactgatgaaccattatatcaataaggagaccagagggaagatcccaaagctgttcgacgaaataaaccccgagaccaagctcatacttgtagactatattttgttcaaggggaagtggctgacccccttcgaccctgtctttacagaggtcgacaccttccatttggataagtataagacaatcaaggtgccaatgatgtacggcgcaggaaagtttgcatctacctttgataaaaacttcagatgtcacgtcctgaaactcccttaccagggaaacgccactatgctggtggtgctcatggagaaaatgggcgaccatcttgcattggaggattatttgaccacagatctggttgagacttggctcagaaacatgaaaactagaaacatggaagtcttctttcctaaatttaaactagatcagaaatacgagatgcatgaactgctacgtcagatgggcatccgaaggatcttctctccatttgccgacctctcagaactttcggccactggaagaaacctgcaggtctccagggttctgcagcggactgtcatcgaggtggacgaacgcggaaccgaggcagtggcaggaattctgtcagagattacagcttatagcatgcccccagtgatcaaagtggacaggccctttcattttatgatctatgaggagacctctggaatgctgctctttctcggaagagtggtgaaccccactctgttgtag

SEQ ID NO: 240167 - DNA, 1455 bp, synthetic construct
  misc_feature 1..1455: note = Description of Artificial Sequence: Synthetic coding sequence
  source 1..1455: mol_type = other DNA
atgtccaggtcaacacaggagctgctgggatatcactgtagactccaagacaagctccaagagcaggagggatccctcgctgcggagggtcgacacagtctggcaagcgcagccgaccacatgaaggtggtgcctagtctgcttctctctgtattattagcacaggtatggttggtgcccggtctggcgccttcgcctcagtcacctgagacaccagcaccccaaaatcagacttctagagtggttcaggctcccaaagaggaggaggaggatgagcaagaagcctcagaagagaaggctagcgaggaggaaaaggcgtggcttatggcctctaggcagcagctggcaaaagaaaccagcaatttcggattttcattactaagaaaaatttccatgcgccacgatggcaacatggtattttcgccttttggcatgtccctcgcgatgacagggctaatgctcggggcaacaggccctacagagacacagataaaaaggggcctgcacctgcaggctcttaagccgactaaacctgggttactgcccagcctgtttaaaggcctgcgcgagacgctcagtcgaaatctggagctgggacttacccagggctcttttgcttttatacacaaagatttcgatgtaaaggagaccttcttcaacctctcaaaaagatatttcgatactgagtgtgtcccgatgaactttcgcaacgctagccaggccaagaggctgatgaaccactatatcaacaaagagacgcggggtaagattccaaaactgttcgacgaaatcaacccagaaaccaaactgatactagtggactatatcttatttaaaggtaagtggctaaccccctttgatcccgtgttcaccgaggtggacacgtttcacctggataagtataaaactatcaaagtgcccatgatgtatggagccggtaagttcgccagcacctttgacaagaattttagatgtcacgtactcaagctaccctaccaggggaatgcaacaatgcttgtggtgctgatggagaagatgggcgatcatcttgcattggaagattatctgactactgacttagtcgaaacgtggcttcgcaacatgaagacccggaatatggaggtcttcttccccaaatttaaacttgaccaaaaatacgaaatgcatgaactgctgaggcagatgggcattaggaggattttttccccgtttgccgatttgagtgagctgtccgcgactggacgcaacctgcaagtgtctagggtacttcaaaggaccgttatcgaagtggacgaacggggaactgaagctgttgccggaattctaagtgagatcacagcttactcaatgccaccagtgatcaaagtggaccgccctttccacttcatgatttacgaggagacctccgggatgttgctcttcctagggagagtggtaaaccctacactcctgtag

SEQ ID NO: 240168 - DNA, 288 bp, synthetic construct
  misc_feature 1..288: note = Description of Artificial Sequence: Synthetic coding sequence
  source 1..288: mol_type = other DNA
atggaacggatgctgcccctgcttgcattaggactgctcgctgccggtttttgtcccgctgtcctatgtcatcccaattctccgctggatgaagagaatctgactcaggaaaatcaggatcggggaacacatgtggatctgggactggccagcgcaaatgttgatttcgctttttccctctacaagcatccccacagatggtctattcgcctatgtctgatgtacttaagacgggctcagaagcacctgcttcctcagcagtccaagtccccgagctttcttcattag

SEQ ID NO: 240169 - DNA, 1272 bp, synthetic construct
  misc_feature 1..1272: note = Description of Artificial Sequence: Synthetic coding sequence
  source 1..1272: mol_type = other DNA
atggagcgcatgctccctcttctggccttaggactgctggcagccggtttttgcccagcggtgctgtgtcaccctaacagtcccctcgatgaagaaaacctgacccaggaaaatcaggacagaggaacacatgtggatctcggattagcttcggcaaatgtggacttcgctttcagtctgtataaacaactggtcctcaaagcacctgacaagaacgtcatattctcccctctgtcaattagcaccgcactggcttttctgagcctgggtgcccacaacacaaccctcaccgagatccttaagggactcaagtttaatctgaccgagacatccgaagctgaaattcaccagtcatttcaacatctgttaaggacactaaaccagtccagtgacgagcttcaactgagtatgggcaacgccatgttcgtgaaggagcagctgtctctgctagaccgctttacagaagacgcaaagcgcctctatggcagcgaagcattcgccaccgacttccaagacagcgccgctgccaaaaaactcattaacgactatgtcaagaacgggacaagagggaaaataacagacctgattaaagacttggactcacagactatgatggtgctggttaattacatcttctttaaggccaagtgggaaatgccatttgacccccaggatactcaccagagccgcttttaccttagcaaaaagaagtgggtgatggtgccaatgatgagcttgcaccaccttacaatcccctacttcagagacgaggagttgtcctgtaccgtagtggagttaaaatatacaggcaatgcctcagcactgtttattctccccgaccaggataagatggaagaggtcgaagctatgctgcttcccgagacactgaaacggtggcgcgatagtttggagtttcgggagatcggcgagttgtacttacccaagttttccatctctagagattacaaccttaatgacattcttctccagctgggcatagaggaagcctttacttcaaaagccgacctgtctgggatcactggggcacgtaatctggccgtgagtcaagttgtgcataaggccgttttggatgtgttcgaggaagggacagaggccagcgcagcgacggctgtgaagattacattattatccgccctggttgagacgcggactatagtgcggttcaataggccatttctcatgatcatcgtgcccaccgatacccaaaacatcttctttatgtctaaagtgaccaatcccaagcaagcctag

SEQ ID NO: 240170 - DNA, 1272 bp, synthetic construct
  misc_feature 1..1272: note = Description of Artificial Sequence: Synthetic coding sequence
  source 1..1272: mol_type = other DNA
atggagcggatgctgcctctgctggcccttggacttctagcagctgggttctgtccggcagtcctatgccaccctaattcccccctggatgaagagaacctcactcaagaaaatcaggaccggggaacacacgtggatcttggtctagcgagtgctaatgttgacttcgcattctctctatacaagcagctcgtcttgaaggcacctgacaagaatgtgatcttttcacctctcagcatctcgaccgcactggctttccttagcttgggggctcacaatactactcttactgaaatactgaagggactgaaattcaatcttaccgagacctccgaggcggaaatccaccaatccttccagcatttactgcgcacccttaaccagagttctgatgagctgcagctgtctatgggcaatgcaatgttcgtcaaggaacaattatctcttctggatcgctttactgaggatgcaaagcggctgtacggcagcgaagcctttgctactgactttcaggactcagcggctgccaaaaagctcataaatgactatgttaaaaatggaacacgcggaaagatcactgatcttatcaaggatctcgactcccagacaatgatggtcttggtgaattacatttttttcaaggccaagtgggaaatgccttttgatccccaggacactcatcagtcccgattctatttgtccaaaaagaagtgggtcatggtgccaatgatgtccttgcatcatctcacaatcccctactttcgagacgaagagctgagttgtaccgtcgtggaacttaaatatacaggtaacgcgagcgcacttttcattctgcccgaccaagataaaatggaggaggtcgaggccatgttgctgcccgagactctaaagcggtggagggatagtttggaattccgggagataggcgagctgtacctcccgaaattctcaatctctagagactataatctcaacgacatcctgctgcaactgggtatcgaggaagcatttactagcaaagcagatctttccgggataaccggagccagaaatctggccgtctcccaagtcgtgcacaaagctgtcctggatgtgttcgaggagggaaccgaagcctcagctgccaccgccgtgaagatcactctcctgagtgcattggtggaaacaagaaccattgtaagattcaaccgtcccttcttgatgatcattgtgccgaccgacacccagaacatcttttttatgtctaaagtaacaaatccaaaacaggcctag

SEQ ID NO: 240171 - DNA, 1272 bp, synthetic construct
  misc_feature 1..1272: note = Description of Artificial Sequence: Synthetic coding sequence
  source 1..1272: mol_type = other DNA
atggagcgcatgcttccactgctggctcttggtctactagctgccggtttttgtcccgctgtcttatgccatcccaattctccactggacgaggaaaaccttacgcaggagaaccaggatcgcggtacgcatgtcgacctgggactggcttccgcaaacgtcgacttcgcattctcgttgtataagcagctggtgctgaaggccccagacaaaaatgtcatttttagccccctttcaatctctacagctctggcttttctgtctctgggggctcacaacacaacactgactgagatcctcaagggactgaaatttaatctaacggagacatcagaagcggagatccaccagtcatttcagcatctcctcagaactctcaaccaatccagcgatgaattacagctgagcatgggcaatgctatgtttgtcaaggaacagctgtctctgctcgatcgctttaccgaagacgcaaaaaggctgtacgggtcggaggccttcgcaaccgattttcaggattctgccgctgccaaaaaactcattaatgattacgttaagaatggcacccgcggaaaaattaccgatcttatcaaggacttggactcacagactatgatggtcctcgtgaattacatctttttcaaggctaaatgggagatgccgttcgatccccaggatacccaccagagtagattttacttgagtaagaaaaaatgggtcatggtgcctatgatgtctctgcaccatctaacgatcccctactttagggatgaggagttgtcatgcaccgtcgtggaactcaagtacactggaaacgcgtctgcgctattcatcctccccgaccaggataagatggaggaagtggaggctatgctcctacccgaaactcttaaacgatggcgagatagcctggagtttcgggagatcggagaattatacctacctaagttttccatcagccgggactacaatttgaacgacatactgctccaattggggatcgaggaggcattcacttccaaagcagacctttcaggcatcacaggcgcacgcaacctggcagtgtctcaggtggtgcataaggccgtcttagatgtctttgaggagggtactgaagcctccgctgccaccgcagttaagatcactttactctccgccctagtggagacccgaaccattgtgaggtttaatcgaccctttctgatgatcatagtgcctactgatacccaaaacatttttttcatgtccaaggtcacgaatcccaagcaggcatag

SEQ ID NO: 240172 - DNA, 1347 bp, synthetic construct
  misc_feature 1..1347: note = Description of Artificial Sequence: Synthetic coding sequence
  source 1..1347: mol_type = other DNA
atgaaaatccattatagtaggcaaactgcactcgaatcaacttcttatatccagctccccgaggcggagcttaggatggaacggatgttgcctctcctggcgctaggtctcctggcagctggcttttgtccagccgtgctctgccaccctaattcacccttggatgaggaaaacctgacccaggaaaaccaggaccggggtacacatgtggacctgggcctcgcatcagctaatgtggacttcgcatttagtctttataagcagctggtgcttaaagccccagataagaacgtcatcttttctccactcagtatatccacagctctggcatttctgtcactgggggctcacaacacgacactgaccgaaattctgaagggactgaaatttaacctcaccgaaactagtgaggccgaaatacatcagtctttccagcacctgcttaggactctgaaccagtccagcgacgaactgcagctgtcaatgggtaacgccatgtttgtcaaggagcagctgtcactactggataggtttacagaggatgccaaacgtttgtacggatccgaggcctttgctactgacttccaggacagcgccgcagctaaaaagctgatcaacgactacgtgaagaacgggaccaggggaaagattaccgatctcatcaaagacttagatagccagaccatgatggtactagtgaattatattttttttaaagcgaagtgggaaatgccattcgatccgcaggatactcaccagagtagattttacctgagtaaaaagaagtgggtaatggtgccaatgatgtcgctccaccatctgactatcccgtattttcgtgacgaggagcttagctgcacggtcgtagagctgaaatacaccgggaacgcctcagccctgttcatcctgcctgatcaggataaaatggaagaggtggaggctatgcttctcccagaaacactcaaaagatggagggacagtctggagttcagagaaatcggggaactgtacttgccaaagtttagcatctcacgagactataatctgaacgacatactcctccagcttggaatcgaggaagctttcaccagtaaagcagatctctctggtataacgggcgcaagaaatctggccgtttctcaggtggttcacaaggctgtcctggacgtgttcgaggaagggacagaagctagcgccgctaccgctgtcaaaattacactgctgagcgcgctggtggagacacgcactatcgtccgcttcaatcggccttttctcatgatcattgtcccaactgatacgcagaatatcttctttatgtctaaggtcacaaatcccaaacaagcatag

SEQ ID NO: 240173 - DNA, 918 bp, synthetic construct
  misc_feature 1..918: note = Description of Artificial Sequence: Synthetic coding sequence
  source 1..918: mol_type = other DNA
atggagcgtatgctgcccctgctcgctctggggcttcttgccgctgggttctgccctgccgttctgtgccaccccaactcccctttggatgaggagaatctgacccaagaaaatcaggataggggcactcacgttgatttaggcctcgcaagtgccaacgttgacttcgccttcagcctctataaacagctagtcctgaaggctccagataaaaatgttatcttttctccccttagtatttccaccgcgctggcttttctgtctctaggtgcacataataccactctaaccgagatactgaaagggctcaaattcaacttaactgaaacaagcgaagcggagatacaccaaagttttcagcatttactgaggactctgaaccagtcatctgacgaactgcagttgtccatgggtaacgcaatgttcgttaaggaacagctttctcttctggacaggtttactgaggacgcaaagagactctatggctctgaagcttttgctaccgatttccaggattcagctgctgctaaaaaacttattaacgactacgtcaaaaacggaacccggggaaagatcaccgatctgattaaggacctggattcacagaccatgatggtactggtcaattatatatttttcaaagcaaagtgggaaatgccttttgacccgcaggacacccaccagagtcgcttttatttgtctaagaagaagtgggtgatggttccgatgatgtcgctacaccacctcaccatcccatacttcagagacgaggaacttagttgtacagtcgtggaactgaaatataccggtaacgcatcggctctttttatcctgcccgaccaggataagatggaggaggtggaagccatgctgttgcctgaaactctgaagcgatggcgggactcactcgaattctag

SEQ ID NO: 240174 - DNA, 1284 bp, synthetic construct
  misc_feature 1..1284: note = Description of Artificial Sequence: Synthetic coding sequence
  source 1..1284: mol_type = other DNA
atgcacctcatcgattatctcttgctgctgcttgtgggtcttctggccctttctcacggacagctccacgtcgagcacgatggggagagttgtagtaacagtagccaccagcaaatcctggaaaccggtgagggttcaccttcattgaagattgcccctgcaaacgccgatttcgctttccggttctattacttaatcgcttcagaaactccgggaaagaacatttttttttccccattgtcaatcagtgcagcctacgcgatgctgagtctgggggcatgcagccattctcggtcacagattcttgaggggttaggattcaacctcaccgagctgagtgaatccgatgttcacaggggatttcagcatctgcttcacaccctgaatttacctgggcacggcctggaaacgagagtcggatccgcacttttcctgagccacaacctcaagtttttagccaagttcctgaacgacaccatggccgtgtatgaggcgaagctgttccacacaaatttttacgatacggtggggaccatacaactgatcaatgaccacgtgaagaaagagaccagaggtaaaatcgtcgacctggtcagtgagctcaaaaaggacgtgttaatggtgctggttaattacatttatttcaaagcgctttgggagaagcctttcatcagctcgcggaccacacccaaggacttttacgtggatgaaaacacaaccgtgagagttcccatgatgcttcaagaccaggagcatcattggtatctgcacgaccggtacttgccctgtagcgtacttcgaatggactacaaaggggacgccacagtgttctttatactgcctaatcagggtaaaatgcgagagatcgaagaagtactaactcccgagatgctcatgagatggaataaccttttgagaaagaggaatttctacaagaaattggagcttcacctcccaaaattcagcatctcaggtagctacgtgctggaccagatccttccaaggctggggtttactgatctgttctcaaaatgggcagatctcagcggtattacgaaacagcagaagctcgaagcttctaagtcatttcacaaagccactcttgacgtggatgaggccggaaccgaggcggctgcggctacttcctttgctatcaagtttttttccgcccagaccaataggcatattctgcgcttcaatagaccgttcctagtggtaattttctctactagtacccaatccgtcttattcttggggaaggttgtggatcccaccaagccatag

SEQ ID NO: 240175 - DNA, 1284 bp, synthetic construct
  misc_feature 1..1284: note = Description of Artificial Sequence: Synthetic coding sequence
  source 1..1284: mol_type = other DNA
atgcacctcatcgactatcttctactgctgctggtggggctgctcgccctgtctcatggccaactgcacgtggagcacgatggcgagagttgtagtaatagctcccatcagcaaattcttgagactggcgaaggaagcccaagtctcaaaatagctcctgccaatgctgacttcgctttccggttttactatttaatcgcctccgagaccccgggtaagaatattttcttctcccctctgtctattagtgcagcctacgctatgctttccctgggtgcatgcagtcactctaggtcgcaaatcttagaaggcctaggatttaacctgacagagctcagcgagtcagatgttcacagaggctttcagcacctcttacacaccctgaacttgccaggccatgggcttgaaacccgtgtaggcagcgccctgtttctgagccacaatctcaagtttctggcaaagtttctgaatgatactatggcagtgtacgaagcaaagctgttccacaccaacttctatgacactgtgggaactatccaactgatcaacgaccacgtgaagaaagagacacggggaaaaattgtggacctggtgtccgaactcaaaaaagacgtattaatggtactcgtgaattatatctactttaaggcgttgtgggaaaagccattcatctcctctagaacgacccccaaggatttctatgtggacgaaaatacgacggtgagggtgcccatgatgctgcaggatcaggaacaccactggtacttacacgataggtacctcccatgttccgtcctccgaatggattataagggtgatgctaccgtcttctttatcctccctaatcagggcaaaatgcgggaaatagaggaggttctaacaccagaaatgctaatgcgatggaacaacttgctacgcaaaaggaacttttacaaaaaactagagctccacctgcctaagttctctatctccggatcgtacgtgcttgatcaaatcctgccacgcctgggcttcacagatttgttcagcaagtgggctgatctgtccggtataacaaagcagcagaaattggaggcaagcaagtcattccacaaggccaccctagacgtcgacgaggcaggaacagaggctgccgctgccacgtctttcgccataaagtttttctctgcccagaccaatcgacatatcttgcgcttcaaccggccatttttggtggtgatcttctccacttccactcagagtgtcttgttcctggggaaggtggtggacccaacaaaaccgtag

SEQ ID NO: 240176 - DNA, 1284 bp, synthetic construct
  misc_feature 1..1284: note = Description of Artificial Sequence: Synthetic coding sequence
  source 1..1284: mol_type = other DNA
atgcatctgattgattacctgctcctgttgttggtgggcctgctagctttgagccatggacagttacacgttgagcacgacggagaaagctgcagcaatagttcccaccagcagatactagagaccggcgaaggctctcccagcctcaagatcgctcctgcaaacgctgatttcgctttccgcttctactacttgatcgcaagtgagacaccgggaaaaaacatcttcttttccccattaagtatttccgctgcctatgcaatgctttctttaggcgcatgctctcactcccgctctcaaatcctggaggggctaggcttcaacctgacagagctgagcgaaagcgacgttcatcgtggctttcagcatctgctgcacacccttaacttacccggacatggcctagagactagggtcggatctgcactctttctcagtcacaatctgaagtttcttgccaaatttttgaacgacactatggccgtgtacgaggcgaaactcttccacactaatttttatgacacagttggcaccattcaactgattaatgaccatgtgaagaaagaaacccgtggaaagattgttgatttggtctcagaactgaaaaaggacgtcctaatggtattggtgaattatatttactttaaagcactatgggaaaagccttttatttccagcaggacaactccaaaagatttttatgttgatgaaaatactacagttagagtaccaatgatgttgcaggaccaggagcatcattggtacctgcatgatcgttacctgccatgttctgtcttacgtatggactataagggagatgcgacagtgttctttatattgccaaatcagggtaagatgcgcgaaatcgaggaggtgctgactcccgaaatgctcatgcgttggaacaacctgcttaggaaaagaaacttttacaaaaagcttgaacttcacttgcccaagtttagcatatctggcagttacgtcctggaccagattctgcctaggttaggcttcactgatctgttttctaaatgggccgacctctccggcattacaaaacagcaaaaattggaggccagcaaatcgttccataaagccacgttggatgttgatgaagcaggaaccgaagctgccgcagccacttctttcgctattaagtttttcagtgcacagaccaataggcatatccttagatttaacaggccgttcttagttgtaatcttcagcacttctacacaaagtgtgctctttctgggtaaggtggtcgaccctacaaagccatag

SEQ ID NO: 240177 - DNA, 1218 bp, synthetic construct
  misc_feature 1..1218: note = Description of Artificial Sequence: Synthetic coding sequence
  source 1..1218: mol_type = other DNA
atgcccctcctgctttacacgtgtttattatggttgccaacctctggcctttggaccgtgcaggcaatggacccaaacgctgcgtatgtgaacatgtccaatcaccatcgcggactcgcatctgccaacgttgacttcgccttctcattatacaaacacttggtcgcgctcagtcctaaaaagaacatctttatctctcctgtaagcattagtatggcactggcgatgctgagtctcggaacctgcgggcatacaagagcccagctcctacaagggctgggttttaatctgacagaacgctcagagactgaaattcaccaaggttttcaacaccttcatcaattgtttgctaagtccgataccagccttgagatgacaatggggaatgccctgtttctggatggttctttggaacttcttgaatctttctcagccgacatcaaacactactatgagtccgaggtgctggctatgaacttccaggattgggctacagcttcacgacagatcaatagttacgtcaaaaataagacacagggcaaaattgtggacctattctccggcctggacagtccagctattttagttctagtcaactatatcttctttaaggggacctggacccaaccctttgacctagctagcactcgcgaggagaatttctatgtggatgagaccactgtggtgaaggtgcccatgatgctccaatcatccacgatttcctacctccacgactctgaactgccctgccagctggtgcagatgaattatgtcgggaacggaacggtgttttttatcctgccggacaaggggaagatgaacacggtgattgccgctctgtccagggacaccatcaatagatggagcgccggattaacttcttcccaggtggacctgtatatacctaaggttacaattagcggggtgtacgacctgggggatgtcctggaagagatgggaatcgccgatctgtttaccaaccaagcaaatttcagtcgcatcacacaagacgcccagcttaagagcagtaaagtagttcataaagccgtgctccagctgaacgaagaaggtgtggacaccgccggatctacaggcgtcaccttaaatctgacaagtaagcctattatccttagattcaaccagcccttcatcattatgatttttgatcatttcacatggtcctccctgtttctggccagagtaatgaaccccgtgtag

SEQ ID NO: 240178 - DNA, 411 bp, synthetic construct
  misc_feature 1..411: note = Description of Artificial Sequence: Synthetic coding sequence
  source 1..411: mol_type = other DNA
atgcccctgcttctgtatacctgtctgctgtggctgcctacatctgggctttggacagttcaagcaatggatccaaacgccgcatacgtcaatatgtccaaccaccatagaggcctggctagtgctaacgtggatttcgccttttccttgtacaagcatttggtggcactatcccctaaaaagaatatttttatctcaccggtgtctattagcatggcccttgcaatgctgagcctcggcacctgcgggcacaccagagctcaactactccaagggctggggttcaacctcacagagaggtctgagacagagatacatcagggcttccagcacctccatcaattgttcgcaaaaagcgacacttcactagaaatgacaatgggcaacgcactttttctagacggttcttag

SEQ ID NO: 240179 - DNA, 1194 bp, synthetic construct
  misc_feature 1..1194: note = Description of Artificial Sequence: Synthetic coding sequence
  source 1..1194: mol_type = other DNA
atggattctctggccactagcatcaatcagtttgccctggaactcagcaagaaattggccgagtctgcacaagggaagaacatttttttctcaagttggtcgatctcaacttccttaaccatagtgtatctgggggctaaaggaacaactgctgcccaaatggcacaggtgctccagtttaaccgtgaccagggcgtaaaatgtgacccagagtccgagaagaaacgcaagatggaattcaacctttcaaacagcgaggaaattcattccgattttcaaaccctgatatctgaaatccttaaaccaaacgatgactacctcctgaaaacagcgaatgccatatatggggaaaagacctacgccttccacaataaatatctcgaggacatgaaaacgtattttggcgctgaacctcagcctgttaatttcgtggaagcatcagatcagattagaaaggatatcaactcctgggtggagcgtcagacggagggcaagattcagaatttgctccctgatgacagcgtggattccactacacgcatgatcttagttaatgcactctactttaaaggtatatgggagcatcagtttcttgtacagaatacaacggagaagccttttagaatcaatgaaactacctcaaagcctgtgcagatgatgttcatgaagaaaaagctgcatattttccacatagagaagcctaaggccgttgggttgcagttgtactataaatcccgggatctctccctactgatcctgctgccagaagacatcaacggcctggaacagctcgaaaaggctatcacctacgaaaagttgaatgagtggacaagtgctgatatgatggagctgtatgaggttcagttacatctgcctaaattcaaactcgaggactcatatgacctgaagagcaccctgagttctatgggtatgtctgacgcctttagtcagtccaaggccgacttctctgggatgtccagcgcccgaaacctattcttgtctaatgtctttcacaaggccttcgtggaaatcaacgagcagggcacagaggcagccgctggttccgggtctgagatagacatcaggatccgtgttcccagtatcgaattcaatgctaatcatcctttcctcttcttcatcaggcacaacaagacaaacacaatccttttctatgggcgactctgtagtccctag

SEQ ID NO: 240180 - DNA, 1020 bp, synthetic construct
  misc_feature 1..1020: note = Description of Artificial Sequence: Synthetic coding sequence
  source 1..1020: mol_type = other DNA
atggactccctcggagctgtatctacacgcctgggattcgatctgttcaaggaacttaagaagactaacgacggcaatatctttttttcacccgttggcatcctgacggctatcggcatggtgctcctgggcacacggggagcaacggcatctcagctggaggaggtgttccattcggaaaaggagacaaagtcaagccgtattaaggctgaggagaaagaggtgatcgagaacactgaggccgtgcatcagcagttccagaaattcctgacggaaatcagcaaacttacgaatgactacgagctgaacattactaataggttgttcggcgaaaaaacatacctgttcttacagaagtatttggattacgtggaaaagtactatcacgcctccttggagcccgtggactttgtcaacgccgcagatgaatcccgaaagaagataaattcctgggttgaaagcaaaactaatgaaaaaattaaagatctgttccccgacggatctatctccagctctacgaagttagtgctggtgaacatggtgtacttcaaaggacaatgggatcgggagttcaaaaaagaaaacaccaaggaggaaaagttctggatgaacaaaattattgataaaatctctcccgagaagctggtcgagtggacttcaccagggcatatggaagaaaggaaagtgaacctgcatctgccgcgattcgaagtggaggatggctacgatctggaggccgttctggccgctatgggaatgggcgacgccttctccgaacataaggccgattacagcggtatgtcttctggatccgggctgtacgcacagaagtttctccactcttctttcgttgcagttacagaagagggaacagaggccgctgcagctaccggaatcggatttacagtgacctctgcgcctggtcatgagaatgtgcattgtaatcacccgtttctctttttcatccgacataacgagtcaaattctatcctgttctttgggaggttctcctccccctag

SEQ ID NO: 240181 - DNA, 1176 bp, synthetic construct
  misc_feature 1..1176: note = Description of Artificial Sequence: Synthetic coding sequence
  source 1..1176: mol_type = other DNA
atggattcactgggtgccgtgtccacccgcctcgggttcgatctgtttaaagagctcaagaagacgaatgatggaaacatcttcttctctccagttggaatcttgaccgcaatcggcatggtactcctcggaacgcgcggagctactgctagccagttggaggaggtttttcacagcgaaaaagagacaaagagcagtaggattaaagccgaggaaaaagaggtcattgaaaacacggaggcggtgcaccaacagtttcagaagtttctgacagagatctccaagctgacgaacgactacgaactaaacataactaataggctcttcggcgaaaaaacctatctgtttttgcagaaataccttgattatgtggagaaatattaccacgcaagcctggaacctgtggatttcgtgaacgcagcggatgaatcacgtaaaaagattaacagttgggtggagtcaaagacaaacgaaaagataaaggatctcttccccgacggttctatctccagcagcactaagctagtgctggttaacatggtatatttcaaagggcagtgggatagagaatttaagaaggaaaacacaaaggaagagaagttttggatgaataagtcaaccagcaagagtgtgcaaatgatgacccagtcccactccttctcatttacattcctggaggatctacaggctaaaatattaggaatcccctacaaaaacaatgatctctccatgttcgttctcttacctaacgatatcgatggccttgagaaaatcatcgataagatctccccagaaaaactagttgagtggaccagcccagggcacatggaagagcggaaagtgaacttgcacctgccccgatttgaagtagaagatggatacgatctcgaggccgtcctagcagccatgggtatgggcgatgcctttagcgaacacaaggccgactactcaggaatgagtagtggatccggactgtacgcccaaaaatttttacactcctcatttgtagccgtgactgaagaaggcacagaggcagcggctgccacaggtattggattcaccgtgacttccgcaccgggacacgagaacgtgcactgcaatcatccgttcctgttcttcattaggcataacgaaagcaattccatactcttttttggaagattcagttctccatag

SEQ ID NO: 240182 - DNA, 930 bp, synthetic construct
  misc_feature 1..930: note = Description of Artificial Sequence: Synthetic coding sequence
  source 1..930: mol_type = other DNA
atggactccctcggggcagtgtccacccgcctcgggttcgatcttttcaaggagcttaagaaaaccaatgacgggaacatcttcttctctccagtggggatcctgaccgcaatcggtatggtcctcctgggaacaagaggagcaaccgccagccaactggaagaggtttttcattctgaaaaagaaaccaagagctcccgcataaaggctgaggagaaggaggttgaaaaaataaaagatctcttccctgacgggtccatcagttcttctactaagctggttctcgttaatatggtttatttcaagggccagtgggatcgcgagttcaagaaagaaaataccaaggaggagaaattttggatgaataagtctacctctaaatctgtgcagatgatgactcagagtcactcattttcctttaccttcctcgaggacctccaagctaagatcctgggtattccttataaaaataatgatcttagcatgtttgttctgctgcctaacgatattgacgggctggagaagataattgacaaaataagccctgaaaaactggtcgaatggacctcacccggtcatatggaagaacgcaaagtgaacttacatctcccgaggtttgaggtagaagacggttatgatctcgaagctgttcttgccgctatgggcatgggtgacgccttttctgaacacaaagctgattactctggcatgtctagcggaagcggactgtacgcccagaagttcctgcacagctcctttgtcgctgtaacagaggaaggaacggaggcagctgcggctactggtattggatttaccgtgacctccgccccaggtcacgaaaacgtgcactgcaatcatccattcttatttttcataaggcacaatgaatcaaactccattctgttctttgggcgattcagttccccatag

SEQ ID NO: 240183 - DNA, 1173 bp, synthetic construct
  misc_feature 1..1173: note = Description of Artificial Sequence: Synthetic coding sequence
  source 1..1173: mol_type = other DNA
atgaattccctctccgaagccaacaccaagttcatgttcgacttgtttcagcagtttcgtaagtcaaaggagaacaacatcttctacagcccaataagtatcacatccgccctgggaatggtgctgctgggcgcaaaggacaacacagctcagcagatcaaaaaagtcctgcattttgatcaggtgactgagaataccacagggaaggcagcaacctatcacgtcgacaggagcggtaatgtgcaccaccagtttcagaaactgcttactgaattcaataaaagcactgatgcctacgaactcaagatcgctaacaagctgttcggcgagaagacctatctgtttctccaggaatatctcgatgcgatcaaaaaattctatcagacttctgtggagagcgttgactttgcgaatgccccagaggagagtcgtaagaagatcaactcgtgggtggaatcacagacgaatgagaaaattaagaatctaatccctgaggggaacatcgggagtaatacaactctggtgcttgttaatgccatttactttaaaggtcagtgggagaaaaagtttaataaagaagacactaaggaggagaaattctggcccaacaagaacacctataaaagtatccagatgatgagacaatatacttcatttcatttcgcctccctggaggacgtccaggccaaggtgctggagatcccatataaaggcaaggacctgtcaatgatcgtccttctgcccaacgagatagatggattacaaaagctcgaggagaaactgacagcggagaagctcatggagtggacatcattacagaatatgagagagacaagggtggatctgcatttgcccaggttcaaagtggaggagtcctatgacctgaaagacacactgagaaccatgggcatggtggacatcttcaatggagacgccgacttatccgggatgacagggtcccggggattagtcttgagcggcgtcctgcacaaagccttcgttgaggtgacagaggagggcgcagaagctgctgcagctacggcggtggtagggtttggtagtagccccacatccaccaacgaagaatttcactgtaatcatccctttctatttttcatcaggcagaataaaaccaattccatcctgttttacggccgattcagttcgccgtag

SEQ ID NO: 240184 - DNA, 1173 bp, synthetic construct
  misc_feature 1..1173: note = Description of Artificial Sequence: Synthetic coding sequence
  source 1..1173: mol_type = other DNA
atgaatagtctgagtgaagccaatactaagttcatgttcgatttgttccagcaattccgaaaatcaaaagagaataatatattttattcacccattagtattactagcgcattaggtatggtactgctaggcgcaaaggacaatacggctcagcagatctctaaggtactgcacttcgaccaagtgactgagaacactactgaaaaagccgctacataccatgtggacaggtcggggaatgtacatcaccagtttcaaaagctacttaccgagtttaacaagagtacagacgcatacgaactcaaaatcgccaataagttatttggggagaagacgtatcagttcctccaagagtacctggacgccataaaaaagttctaccagaccagcgtagaaagtaccgacttcgccaatgctcctgaggagtccaggaagaaaatcaatagctgggtggagtcacagacgaacgagaaaatcaaaaacctcttcccagacggcacaattgggaatgataccactctggtcctggttaatgctatttactttaagggacagtgggagaataagttcaagaaggaaaataccaaggaagaaaagttctggccgaacaaaaacacatacaagagcgtccaaatgatgcgacagtataattcctttaattttgccctcctggaggacgtccaggcgaaggtgcttgaaattccctataagggtaaggatctttccatgattgtgctgctccccaacgagatcgacggattgcagaagctggaggaaaaactgacggctgaaaaactgatggaatggaccagcctgcagaatatgagagagacttgtgtagacctccacctgccacgctttaagatggaggaaagctacgatctgaaggacactttacgcacaatgggtatggtcaacatttttaacggggatgcagatcttagtggcatgacttggtctcacggcctcagcgtctctaaagtgctccacaaagcatttgttgaggtgacggaggagggcgtggaggccgctgctgccacggcagtggtggtcgttgagctgagctctccttctacaaacgaggagttttgttgcaatcacccctttctgttttttataagacagaataagactaacagtatcctgttttatggacgatttagttctccctag

SEQ ID NO: 240185 - DNA, 1017 bp, synthetic construct
  misc_feature 1..1017: note = Description of Artificial Sequence: Synthetic coding sequence
  source 1..1017: mol_type = other DNA
atgaattccctgtctgaagccaacacaaagttcatgtttgacctctttcagcaattccgcaaatctaaggaaaataacatcttttacagtcccatctcaatcacatcagctctgggaatggtcttattgggtgcgaaggataacacggctcagcagataagtaaggtcctgcatttcgatcaggtgacagaaaatactacagaaaaagccgcaacttaccatgtggaccggagcggcaacgtgcaccaccaatttcagaagctgcttacagagtttaataagtcaacggatgcatatgaactcaagattgccaataagcttttcggcgaaaagacgtaccagtttcttcaggagtatctggacgcgataaaaaagttctaccagacctctgtcgagtccaccgatttcgcaaacgccccagaagagtcccggaaaaaaatcaactcctgggtcgaatctcagaccaacgaaaagatcaagaatctcttcccggacggcactatcgggaacgacactaccttagtgctggtcaacgccatctacttcaagggccagtgggagaacaagtttaaaaaggagaatacaaaagaggagaagttttggccaaacaaactggaggagaagttgaccgcggaaaaattaatggaatggacctcgttacagaatatgagggagacctgcgtggatctacacctacccaggtttaagatggaagaatcctacgacctcaaggatacgcttcggacgatggggatggtcaacatttttaatggcgacgccgatctgtcgggcatgacgtggagccacggcttgtccgtttccaaggttcttcacaaagcattcgttgaggtgactgaagaaggggtggaggccgctgcagcgaccgctgtggtggtggtggaactatcttctccaagcacaaatgaggagttctgctgcaatcacccctttttattctttatcagacagaacaagacaaatagcattctgttttatggtagatttagcagcccctag

SEQ ID NO: 240186 - DNA, 1128 bp, synthetic construct
  misc_feature 1..1128: note = Description of Artificial Sequence: Synthetic coding sequence
  source 1..1128: mol_type = other DNA
atggatgccctgcaattagccaattctgccttcgccgtggacctgttcaaacagctctgcgaaaaggaaccattggggaacgtgttgtttagccctatttgtttgagtacctctttatcactagcacaggtgggggctaagggcgacaccgctaacgaaatcggacaggttctgcacttcgaaaacgttaaggatgtaccatttggatttcagactgtgacctcagacgtgaataagctctcttctttctatagcctgaaactgataaagaggctatatgtggacaaaagtctgaatctttctactgaatttatctctagtactaagaggccatacgccaaagagctggaaactgtcgactttaaggataaactagaggaaaccaaggggcaaatcaataatagcattaaagatctgacggacggacacttcgaaaacatactagccgacaattcggtgaacgatcagactaagattttggtggtgaatgccgcatattttgtgggtaagtggatgaagaagttctcagagtccgagaccaaagaatgtcctttcagggtgaacaagacagacaccaaacctgttcagatgatgaacatggaggccacattttgtatggggaacatcgatagtattaactgtaaaataatcgagctgccgtttcaaaataagcatcttagtatgtttatactgttacccaaggatgtcgaagatgagagtactgggttggagaaaattgagaagcagctcaactctgagtctctctctcaatggactaacccgtctacaatggctaatgctaaggtcaagctgtctataccgaaattcaaagtggaaaaaatgattgatccgaaagcgtgcttggagaatctgggtctgaaacatatcttcagcgaagatactagcgactttagtggcatgtctgaaaccaaaggggttgccctttcaaatgtgattcacaaagtgtgtctggagatcaccgaggacggcggagacagcattgaagtgcctggcgcacgtatactgcagcacaaagacgaactcaacgcagaccacccattcatctatatcattcgccataataaaaccaggaatatcatcttctttggcaagttttgttccccatag

SEQ ID NO: 240187 - DNA, 390 bp, synthetic construct
  misc_feature 1..390: note = Description of Artificial Sequence: Synthetic coding sequence
  source 1..390: mol_type = other DNA
atggacgctctccagctcgctaacagcgcttttgccgtagacctttttaagcagctgtgcgaaaaagagccactggggaatgttttgttctcccctatctgcttatctacaagcttatccctggcccaggtgggtgccaaaggggatactgcgaacgagatcggccaggtgcttcatttcgagaatgtaaaggatgtcccatttggattccaaaccgtcactagcgacgtgaataagctctcttccttttactcactcaagttgattaagcggctgtatgtggacaagtccctcaacctatccaccgagtttatctcatcaaccaagaggccctacgcgaaagaactggagacagttgattttaaagacaagcttgaggaaactaagtag

SEQ ID NO: 240188 - DNA, 1131 bp, synthetic construct
  misc_feature 1..1131: note = Description of Artificial Sequence: Synthetic coding sequence
  source 1..1131: mol_type = other DNA
atggacgttttggcggaggcgaacgggacctttgctctgaatttgctgaaaaccctggggaaagacaattctaagaatgtgtttttttcccccatgtctatgtcctgcgcattagcgatggtgtatatgggtgcgaaggggaacaccgctgcccaaatggcgcagatcctgtctttcaacaagtccggtgggggaggcgatattcaccaggggttccagtccctgctgactgaggtcaacaagaccggaacccagtatctgttaaggatggccaaccggttgttcggagagaaatcctgcgatttcctgagtagtttcagagatagctgccaaaagttttaccaagccgagatggaggagctggatttcatcagtgctgtggagaagtcccgcaagcatattaatacctgggtggccgaaaagactgaagggaaaatcgccgagcttctctctccagggtcggttgaccctctaacccgtctcgtgttggttaacgccgtctacttccgcggtaactgggacgagcagttcgacaaggaaaacactgaggagcggctgttcaaggtaagcaaaaatgaggagaaaccagtgcagatgatgttcaaacaatctactttcaagaaaacatatattggggagatattcactcagatactcgtgctgccctacgtgggcaaggaactgaatatgatcattatgcttcccgacgagaccacggatttaagaacagtcgaaaaggagctgacctacgaaaagtttgtggagtggacacgcttagatatgatggacgaggaagaagtagaggtctccctgcctcggttcaagctcgaggagtcatacgacatggagtccgtgctcagaaacttgggcatgacggacgccttcgagctcggtaaagctgacttttccggcatgagtcagaccgacctaagtttgtctaaggtagtgcataagtcatttgtggaggtgaatgaagagggtactgaggcggcagctgcaaccgctgcgattatgatgatgagatgtgctagatttgtcccccgtttctgcgcagaccacccgtttctgtttttcatccagcattccaagacaaacggtatcctcttctgcggacggttcagttctccctag

SEQ ID NO: 240189 - DNA, 546 bp, synthetic construct
  misc_feature 1..546: note = Description of Artificial Sequence: Synthetic coding sequence
  source 1..546: mol_type = other DNA
tgactgaatctcttgaaaactctgggcaaggataattccaagaacgtctttttttcgccaatgtcgatgagctgtgctctcgctatggtgtacatgggcgctaaaggcaacacagccgctcagatggctcagattctgtcttttaataaatccggtggagggggagacatccaccaagggttccagagcttgctgaccgaggtcaataagactggaacccaatacttactccgcatggcgaaccgcgaaagttatgatatggagtctgtactgagaaatctggggatgaccgacgcttttgaactgggcaaggcagatttctcggggatgagccaaaccgatttatctctgagcaaagtggttcacaaatcattcgtagaggtgaatgaagaggggacagaagccgctgccgctaccgccgcaatcatgatgatgcgctgtgctagatttgtgccacggttttgtgccgatcatcctttcctctttttcatacagcactccaagactaatggtatacttttttgtggtcgtttttcaagcccgtag

SEQ ID NO: 240190 - DNA, 1131 bp, synthetic construct
  misc_feature 1..1131: note = Description of Artificial Sequence: Synthetic coding sequence
  source 1..1131: mol_type = other DNA
atggacgttcttgcagaggcaaacggtacattcgctctgaatctgctgaagactctgggaaaagacaatagcaagaacgtgttcttttcgcccatgagcatgtcttgcgcactcgccatggtgtacatgggagcaaaaggaaataccgctgcgcagatggcccagatcctcagcttcaataagtctggaggagggggtgacattcatcaaggtttccagagcttactgacagaagtaaacaaaaccggcacacagtatcttcttagaatggccaatcggctgttcggggagaaaagctgtgattttctgtcttccttccgcgactcttgtcagaagttttatcaggctgagatggaagaactggattttatttctgcagtcgagaaaagtagaaagcacattaacacgtgggtcgctgagaagaccgaagggaagatcgccgaacttctgtctccagggagtgtcgacccccttactcggctggtcctcgtgaacgccgtttacttcaggggcaattgggatgaacagttcgataaggaaaacacagaagaaagactgttcaaggtgtccaagaatgaggaaaagcctgtgcaaatgatgttcaaacagtctacttttaagaaaacgtacattggtgaaatctttacacagattcttgtactcccctatgtcgggaaagagctcaacatgatcataatgctgccagacgagacaaccgatctccggactgtagaaaaggagcttacatacgaaaaatttgtggagtggaccagattggatatgatggatgaggaggaggtggaggtgtcccttccgagattcaaactcgaggagtcctatgacatggaaagtgtactccgaaacttgggtatgacggatgcctttgagctcggaaaagctgacttttctggcatgtctcagactgatctctcgctgtccaaagtcgtacacaagagctttgtggaagtgaatgaggagggcactgaggcagctgccgctacagctgctataatgatgatgcgatgcgccaggttcgtgcccaggttttgtgcagatcatccctttctcttctttattcagcacagcaaaaccaatggtatactattctgcggccgattcagcagcccctag

SEQ ID NO: 240191 - DNA, 1131 bp, synthetic construct
  misc_feature 1..1131: note = Description of Artificial Sequence: Synthetic coding sequence
  source 1..1131: mol_type = other DNA
atggacgtgttagcggaggcgaatggaactttcgccttaaaccttcttaaaactttgggcaaggataactcgaaaaatgtgttcttcagcccaatgagtatgagctgtgccttggccatggtctacatgggcgctaagggaaacaccgcagcccagatggctcagatcctcagttttaataagtcaggcggagggggagacatccaccaaggttttcaatcactgctgacggaggtgaataaaaccggcactcagtatctcttgcgcatggcaaaccgcctgttcggtgagaaatcttgcgattttctgtcttcctttcgcgactcttgccagaaattttatcaggcagagatggaggagctcgactttattagtgcggtggagaagtcaaggaaacatatcaatacatgggtagccgaaaagactgaggggaaaatcgctgagttgctttcaccaggcagtgttgatccccttactagactggttttagtgaacgctgtgtatttccgcggaaactgggacgaacagtttgacaaagaaaacaccgaagaaagactttttaaagtttcaaagaatgaggaaaagcctgtgcagatgatgttcaaacagtccaccttcaaaaaaacttacatcggtgagatttttacccagattctggtccttccctacgtggggaaggagctgaatatgataatcatgctgcctgatgaaactaccgacctgcgcacagttgaaaaggagctcacctacgagaagtttgtagagtggactagacttgatatgatggatgaagaggaagtcgaagtgtctctgcctagattcaagcttgaagagtcctacgacatggagtctgtcctccgcaatctggggatgacagatgcattcgagttgggtaaggccgatttctccggaatgagccaaaccgatctctccctctcaaaagtggttcacaaatcctttgtagaagtgaacgaggagggtacggaggccgctgccgctaccgctgccataatgatgatgcgttgcgccaggtttgtgcctaggttttgcgctgaccacccttttctgtttttcatccagcattccaaaaccaacggcatcctcttttgcgggagattcagttccccatag

SEQ ID NO: 240192 - DNA, 1131 bp, synthetic construct
  misc_feature 1..1131: note = Description of Artificial Sequence: Synthetic coding sequence
  source 1..1131: mol_type = other DNA
atggacgttttggcggaagcaaacggaacttttgcccttaacctcttgaagactttagggaaagataatagtaagaacgttttctttagtcctatgtcgatgagttgcgcacttgcaatggtgtacatgggagccaaaggcaacacagctgctcagatggctcagatcctgtcctttaacaagtctggaggcggaggagacatccatcagggtttccagtcactccttaccgaggtgaataagactgggactcagtacctgctacggatggccaatagactcttcggcgaaaagagttgcgatttcctttcttctttccgcgacagctgtcaaaaattttaccaggcggagatggaagaactggactttatctcggcggtggagaaaagccggaagcacattaacacatgggtggctgaaaaaacggaaggcaagatcgcagaactgctaagcccaggcagtgtggacccgctcacacgcctagtgctcgtgaatgctgtttactttcgaggcaactgggatgagcaattcgataaggagaataccgaagagcgcttattcaaagtgtcaaagaatgaagaaaaaccagtgcagatgatgtttaagcagtccacattcaaaaagacctacattggggaaatttttacccagatcttggtgttgccatacgtgggtaaggagttgaacatgattattatgctccctgacgaaacgactgatctgcgcaccgtggagaaagagctgacgtacgaaaagttcgtcgagtggacaaggcttgatatgatggacgaggaggaggtcgaagtgtcactccctagatttaaactggaagagtcatatgacatggaatccgtgctgagaaacctcggcatgacagacgccttcgagctgggaaaggccgacttcagcggcatgagtcagaccgacctgtctctcagcaaggtcgtacataagagtttcgtagaggtcaacgaagagggcacggaggctgccgcagcgaccgcagcaattatgatgatgcggtgcgctagattcgttccaaggttctgtgctgatcaccctttcctttttttcattcagcacagcaaaactaacggcattctgttttgcggacgtttctcttccccatag

SEQ ID NO: 240193 - DNA, 1131 bp, synthetic construct
  misc_feature 1..1131: note = Description of Artificial Sequence: Synthetic coding sequence
  source 1..1131: mol_type = other DNA
atggacgtactggctgaggccaacggcactttcgccctcaatctgttgaagactttaggaaaagataatagtaaaaatgtttttttttctccaatgtctatgagctgtgctctggcaatggtgtatatgggtgcaaagggcaataccgctgcccagatggcacaaattctgtcgttcaataagagcgggggagggggagatatccaccaggggtttcagtcgctgctgactgaagtcaacaagactggcacccagtatctgctccgcatggcaaacaggttgtttggggagaaaagctgcgactttctctcatcctttagggactcttgccagaaattctaccaggctgagatggaggagttagattttatctccgcagtagagaagagccgtaagcacatcaacacttgggtggccgagaaaactgaagggaagattgccgagttgttgtcccctggctccgtagaccctttgacccgtttggtgctcgttaacgccgtgtacttccggggtaactgggacgaacagttcgacaaggaaaatactgaagagcgactgtttaaggtgtctaagaatgaggagaagcctgtgcagatgatgtttaagcagagcacctttaagaagacctatattggagaaatttttacccagatcctggtgttgccctatgtgggaaaggagctgaatatgatcatcatgctgccggacgagacgaccgatctgcggaccgtggagaaggaattgacctacgagaagttcgttgaatggacccgtcttgacatgatggacgaggaagaggttgaagtgtcactcccgaggtttaaattggaggaatcctatgacatggaaagcgttttgcggaatctgggcatgactgacgcctttgaactgggcaaagccgacttttcagggatgagccagactgacctttccctaagcaaagtagtgcataagtcctttgtagaggttaatgaggagggcactgaagcagccgcagccacggcagccataatgatgatgagatgtgcgaggttcgttcccaggttctgtgccgatcatccgttcctctttttcatccagcatagtaaaaccaatggcattctgttctgcggtcgcttttcttctccctag

SEQ ID NO: 240194 - DNA, 1131 bp, synthetic construct
  misc_feature 1..1131: note = Description of Artificial Sequence: Synthetic coding sequence
  source 1..1131: mol_type = other DNA
atggacgtgttggctgaggccaatggcaccttcgctctgaatctgctgaaaacgctggggaaggataactccaaaaatgtgttcttcagccccatgtcgatgtcatgtgcattggccatggtctacatgggagctaaaggcaacaccgccgctcaaatggcccagatcctctcattcaacaagtccggaggcggaggcgacatccaccaaggcttccagagcctgttgaccgaagtgaacaaaactggtacccagtacctactccgcatggccaaccgcctgttcggcgaaaaaagctgcgattttttgtctagttttagagattcctgtcagaaattctatcaggcagaaatggaagagctggattttatatccgcagtggaaaagagtcgcaaacacataaacacctgggtcgcggagaagacagagggcaaaattgctgagctcttatctcctggctctgttgaccctcttaccagacttgtcctggtgaatgcagtgtactttcgcggaaactgggatgagcagttcgacaaggaaaatactgaggagaggctatttaaagtgtctaaaaatgaagagaaaccagtgcagatgatgttcaagcagagtacattcaaaaagacctatataggggagattttcacccagattcttgttctgccgtatgtcgggaaagagctgaacatgattatcatgctgcccgacgaaaccacggaccttagaactgtggaaaaagagctgacttatgaaaaattcgtcgagtggacaaggttagatatgatggacgaggaagaggtagaagtgtcccttccaaggtttaagctggaggagagttacgacatggagtctgtgctgaggaatctcgggatgacagacgcctttgaactggggaaagctgatttttcggggatgagtcagacagatttatccctgagtaaggttgtccataaatcttttgtcgaagtcaacgaggagggaacggaggcagctgccgcaaccgccgctattatgatgatgcggtgcgcgcgtttcgtgcctaggttttgcgcagaccaccccttcttgtttttcatccagcacagcaagaccaatggaatcctattctgcgggagatttagttctccatag

SEQ ID NO: 240195 - DNA, 579 bp, synthetic construct
  misc_feature 1..579: note = Description of Artificial Sequence: Synthetic coding sequence
  source 1..579: mol_type = other DNA
atggacgtcttggcagaggccaacggcacatttgctctgaaccttctgaaaacgctgggtaaggataacagtaagaacgtgtttttttctccaatgtccatgagttgtgccctggccatggtttacatgggtgcgaagggcaacaccgccgctcaaatggcccaaatcctgtccttcaataagagtggcggaggtggcgatattcaccagggtttccagagcttgttgaccgaggttaataagaccgggacccagtacctactgcggatggcaaatcgagagagctatgatatggaaagcgtgcttcgcaacttgggaatgaccgacgcatttgagttgggaaaggctgacttttccggcatgtcgcagaccgatttgtctctgagtaaagtcgtacataagtccttcgtggaagtcaatgaggagggcacagaggcggcagcagccacagccgctataatgatgatgcggtgtgcacgttttgtcccgcgattctgtgctgatcaccccttcttattttttatccaacactccaagacaaatggaattctgttctgtggcaggttttcttctccctag

SEQ ID NO: 240196 - DNA, 1143 bp, synthetic construct
  misc_feature 1..1143: note = Description of Artificial Sequence: Synthetic coding sequence
  source 1..1143: mol_type = other DNA
atggcgtctctggcagcggctaatgcagaattttgtttcaacttattcagggagatggacgacaaccagggaaatggaaacgtgttcttctcctctctcagtctcttcgccgcactagctttggtgcggctgggcgctcaggacgactccctgtcacagatcgacaaactcctgcacgtgaacaccgcatctggttacggtaacagctctaactctcagtccggcctgcagtctcagctcaaacgcgtgttctccgatatcaacgccagtcacaaagattacgatttgagcatcgtgaacggactatttgccgagaaagtgtatggcttccataaagattacatagaatgcgcagaaaagctctacgacgccaaagtggagcgtgtggacttcacaaaccacctagaggatacacgaagaaacatcaacaaatgggtggagaatgagacccacggcaagatcaaaaatgtgattggggaaggcggaatctctagctctgctgtaatggtccttgtgaacgcagtgtacttcaaaggcaagtggcagagtgcattcactaaaagtgagacgataaattgccattttaagagccccaagtgcagcgggaaggccgtcgccatgatgcaccaggaacgaaagtttaatcttagcgttattgaggaccccagcatgaaaatcctggagctaaggtacaatgggggtattaatatgtacgtcctacttcccgaaaatgatttatctgagattgaaaataagctgacatttcagaatctcatggagtggacgaatccaaggcgaatgacctcaaaatacgtcgaggtgttcttcccacagttcaaaatcgaaaaaaactacgagatgaagcagtatctgagggcactgggcctgaaggacatttttgacgaaagcaaggccgacctgtccggaatcgcctctggtgggcgtctgtatatctccaggatgatgcacaagtcctatattgaagtgaccgaagaggggacagaagctacggccgctactggctctaatatcgtggaaaagcaactgccccagtccaccctgttcagagccgaccacccttttctttttgtgattcgcaaggatgacatcattcttttctcagggaaagtcagttgtccctag

SEQ ID NO: 240197 - DNA, 1143 bp, synthetic construct
  misc_feature 1..1143: note = Description of Artificial Sequence: Synthetic coding sequence
  source 1..1143: mol_type = other DNA
atggccagcttggcggcagcgaacgcggagttttgctttaacctgtttagggaaatggatgataatcagggtaacggcaatgtcttttttagttctctcagcctgtttgctgctctggcgttggtgcgcctgggagctcaggacgacagcttatcccagatcgacaaactgcttcatgtaaacaccgccagtggctatggaaactcgtctaacagccagtccgggctgcagagtcagctcaagcgagtattctccgacattaatgcgtcccacaaagactacgatctgtctatcgtaaacggcctgttcgcagagaaggtgtacggattccataaagactatatcgaatgcgcggagaaattatacgacgctaaagtggagagggtagacttcactaatcatcttgaggacacccgaaggaacatcaacaagtgggtcgagaacgagacccatggtaagataaagaacgttatcggtgaggggggaatttcttcatcggccgtaatggttctggtgaatgccgtgtattttaagggtaaatggcagagtgccttcaccaagagcgaaacaatcaactgtcacttcaaatcccctaaatgctctggaaaagcagtggcgatgatgcaccaggaacgaaaatttaacctcagtgtgatagaggatcccagcatgaaaattctcgagctgcgatacaatggagggattaatatgtacgtgctcctgcccgagaatgatctgtcagagatagagaacaaactgacctttcagaacctgatggagtggactaacccccgacggatgactagtaagtacgtcgaagtcttttttccgcagtttaagatcgaaaaaaactacgaaatgaaacagtacctgagagctttaggtttgaaagacatatttgatgaaagcaaagccgacctgagcggcattgctagcggagggaggctgtacattagccggatgatgcacaaatcatacatcgaggtgacagaggagggaacagaagccacagcagctactgggtctaatattgtcgaaaaacaattgccacagtctacgctgtttcgagccgaccatccctttctgtttgtgattcgcaaagacgatatcatcctgtttagtggaaaggtcagctgtccttag

SEQ ID NO: 240198 - DNA, 387 bp, synthetic construct
  misc_feature 1..387: note = Description of Artificial Sequence: Synthetic coding sequence
  source 1..387: mol_type = other DNA
atggcctccctcgcggctgccaacgctgagttttgtttcaacctgttcagggagatggacgataaccaaggaaacggaaacgttttttttagctcattgtccctttttgccgctctggcgttggttcggcttggggcacaggatgactctctgtcccagattgacaagctgttacatgtgaacactgcaagtggttacgggaattctagtaacagccagtccggcctgcagtcacagttaaagcgcgtgtttagcgacatcaacgctagtcacaaagattacgatctcagtatcgttaatgggttattcgcggaaaaggtgtatggcttccataaagactacatcgaatgtgccgagaagctgtacgatgccaaggtggagcgctag

SEQ ID NO: 240199 - DNA, 387 bp, synthetic construct
  misc_feature 1..387: note = Description of Artificial Sequence: Synthetic coding sequence
  source 1..387: mol_type = other DNA
atggcctctctggccgctgcaaatgccgagttctgttttaatttattcagggaaatggatgacaaccagggaaatgggaacgtctttttttctagtttaagtctgttcgctgctctggctttggttcgtcttggcgctcaggatgactcgctctcccagattgataagctgcttcatgtgaatacggcatcaggctacgggaatagtagcaactcgcagtcaggccttcagagtcagctaaagagagtgttctcagatatcaatgccagccataaggattacgacctgtcaatcgtgaatggtttgttcgcggagaaagtgtacggttttcataaggactacatcgaatgcgccgaaaaactctacgatgctaaggtggaacgctag

SEQ ID NO: 240200 - DNA, 498 bp, synthetic construct
  misc_feature 1..498: note = Description of Artificial Sequence: Synthetic coding sequence
  source 1..498: mol_type = other DNA
atggctagtttggctgccgcaaatgctgaattctgcttcaacctctttagggaaatggatgataaccaaggaaacggcaacgtgttcttctcttctctttcacttttcgctgctctggccctggtgcgccttggagcgcaggacgacagcctctctcaaattgataaattgctgcatgtcaataccgcctcaggttacgggaactcatccaactcacagagcggactgcagagccagttgaaacgcgttttctccgacatcaacgccagtcacaaggactacgacttaagcatcgtcaatgggctgttcgctgagaaggtttacggttttcataaagactatatcgaatgcgcagaaaaattgtacgatgccaaggtggagcgcgtggattttactaaccacctggaggacacaaggcgcaatattaacaagtgggtggaaaacgagacccacgggaaaatcaagaacgtcatcggagaaggaggcattagtagttag

SEQ ID NO: 240201 - DNA, 1092 bp, synthetic construct
  misc_feature 1..1092: note = Description of Artificial Sequence: Synthetic coding sequence
  source 1..1092: mol_type = other DNA
atggcgtcactggcagcagcaaacgctgagttttgttttaatcttttccgcgagatggacgacaatcagggtaacggaaacgtcttcttttctagtctatcactgtttgcagcgctggctttggtgagattgggagcgcaggatgacagcctaagtcagattgacaagagtggcctacagagccaattaaagcgcgtgttttcagacataaacgcctcccataaggattacgacttgtctatcgtcaatggcctgttcgcagaaaaggtgtatgggtttcacaaagactacatcgaatgcgcagagaagctctacgacgcgaaggtggaacgcgtcgacttcacaaaccatctggaggacactagacggaacatcaataaatgggttgaaaatgagacacacggtaagattaaaaatgttattggcgaggggggaatcagttcaagcgccgtgatggtgctagtgaacgctgtgtatttcaaaggcaagtggcagtcagcatttacaaaatcagagacaattaactgtcattttaagagccctaagtgctcggggaaggcggtggctatgatgcatcaggaaaggaaattcaacctgagcgtaatcgaagatccctctatgaaaattctcgaacttaggtataacgggggtatcaacatgtacgtcctcctcccagagaacgatctaagcgagatcgaaaacaaactaaccttccaaaacctaatggaatggacaaatccccgacgcatgacttctaaatacgtcgaggtttttttccctcaatttaaaattgagaagaattatgaaatgaagcagtaccttagagctctgggactcaaggatattttcgatgagtccaaggcagacctcagcggaatagcatcgggagggcgtctgtatatttcacgtatgatgcacaagtcatatatcgaagtgactgaagagggcaccgaagccactgctgccacagggtccaacatcgtggaaaaacagctcccacagagcacactgttccgtgctgatcacccctttctcttcgttatccgcaaggatgacatcatcttgtttagcgggaaggtgtcatgtccgtag

SEQ ID NO: 240202 - DNA, 1143 bp, synthetic construct
  misc_feature 1..1143: note = Description of Artificial Sequence: Synthetic coding sequence
  source 1..1143: mol_type = other DNA
atggctagtttggctgcggcaaatgcagaattctgttttaaccttttccgagaaatggacgacaatcagggtaacggtaatgtctttttttcatcgctgtccttgttcgccgctctcgcattagtgcgcctgggtgcccaggatgattctttgtcacagattgacaagctgctgcacgtgaatacggccagcgggtacggaaactcttctaattctcagagcggactgcagtcgcagctcaagcgcgtgttcagtgacattaatgctagtcataaggactacgacctgagcatcgtgaatggtctgttcgccgagaaggtttatggatttcacaaggactacattgaatgcgccgaaaaactttatgatgcaaaagtcgagagggtagatttcaccaatcacctcgaagatacacggagaaacattaataagtgggttgaaaacgagacgcacggcaagattaaaaatgtgattggggagggtgggatcagttcttcggcagtgatggttctggttaatgccgtgtatttcaaagggaagtggcaatctgcattcactaagtccgagacaatcaactgccatttcaaatctccgaagtgtagtggaaaagctgtggcaatgatgcaccaggagcggaagttcaatctgtccgtgatcgaggaccctagcatgaagatcctagagctgcggtataatggcggaatcaacatgtacgtcctcctccctgagaacgacctctctgaaatcgaaaacaagctcactttccagaacctgatggaatggacgaaccccaggcggatgacaagcaagtacgttgaggttttcttcccccagtttaagatcgagaagaactatgaaatgaaacagtatctgagagctctggggctgaaagatattttcgatgagtccaaggcagacttgtctgggatcgcatccgggggtaggctctacattagccggatgatgcacaagtcgtatattgaggtgactgaagaagggactgaggctactgctgccaccggatccaatattgtggaaaaacagctgcctcagagtactctgttccgagctgaccaccccttcctcttcgttatacgcaaagatgatatcatacttttttccgggaaggtgagctgcccttag

SEQ ID NO: 240203 - DNA, 1125 bp, synthetic construct
  misc_feature 1..1125: note = Description of Artificial Sequence: Synthetic coding sequence
  source 1..1125: mol_type = other DNA
atggatgacctttgtgaggcaaacgggaccttcgccattagcctattcaagattctcggggaggaggataatagtcggaacgtgttcttttctcccatgtctatctcaagcgcgctcgctatggttttcatgggggctaaggggagcaccgccgctcagatgagtcaggccctttgtctctataaagacggggacatccatcggggttttcagtcgctgttatccgaggtgaatagaacaggcacccagtacctcttgcgtactgcaaaccgactattcggcgagaaaacctgtgatttcttgccagatttcaaagagtattgccagaaattttaccaagccgagttggaagagctttctttcgccgaggataccgaagaatgccgcaagcacatcaacgattgggtcgccgagaaaacggagggcaagatttcagaggtgctcgacgctggtacagtcgatccactcacgaaattggtcctggtcaacgccatatacttcaagggaaaatggaatgagcagttcgacagaaaatatacaaggggaatgttgtttaagacaaatgaagagaaaaagaccgtacagatgatgtttaaagaagccaaattcaaaatgggctacgcagacgaagtgcatacccaggtgctcgagttaccatatgtggaggaagaactgagtatggtgatcttactgccagacgacaatacagaccttgccgtagtagaaaaagctctgacgtacgaaaagttcaaggcctggacgaacagcgagaaactgaccaaaagcaaagttcaagttttcctgccacgcctcaaacttgaagagtcctacgacctggaacctttccttcgaagacttggtatgattgatgcatttgatgaagccaaagcagactttagcggcatgtcaaccgaaaagaatgtgcctctatctaaggtagctcacaagtgttttgttgaggttaatgaagaaggcactgaagctgcagctgcaactgcggtcgtgcgtaactcccggtgttctaggatggagccaagattctgtgcggatcatccttttctgtttttcattcgccatcataagaccaactgcatattattctgtgggcgttttagtagtccttag

SEQ ID NO: 240204 - DNA, 1125 bp, synthetic construct
  misc_feature 1..1125: note = Description of Artificial Sequence: Synthetic coding sequence
  source 1..1125: mol_type = other DNA
atggacgacctatgtgaagccaacgggacattcgccatttccctgttcaagattttgggggaggaggacaattcccgaaacgtctttttttcaccgatgtcaatatcctctgcactggcaatggtgtttatgggtgctaaggggagcacagccgctcaaatgagtcaggccctttgtctgtataaggacggggatattcatcgcggtttccaatccctgttgtccgaagttaatcgaacaggcacacagtacctgctgaggaccgctaataggctgttcggcgagaagacttgcgatttcttacccgattttaaggagtattgtcagaagttctaccaggctgaactagaggaactttcatttgccgaagatactgaagaatgccggaaacacatcaacgactgggtcgcagagaagacagagggtaaaatcagtgaagtccttgacgccggtacggtggacccattaaccaagttagttttggttaatgctatttactttaagggaaaatggaatgaacaattcgatcgaaaatacacccgcggaatgttattcaagacaaatgaagaaaagaagaccgtccagatgatgtttaaagaagctaagtttaaaatgggctacgccgacgaagtgcacacgcaagttctcgaactcccttacgtcgaggaggaacttagcatggtgatactgctgccggatgataatactgatctcgcagttgtcgaaaaggcccttacctatgagaaattcaaggcctggactaactctgaaaagttgacgaagtcaaaagttcaggtctttctgcctcggttgaaactggaagagtcatacgatctggagccatttctacgtcgcctcggtatgatcgatgctttcgacgaagcaaaggccgatttctcaggaatgagcaccgaaaagaacgtgccactatctaaagtggcccataagtgcttcgtcgaagtgaacgaggagggtacggaagcagctgcagcgaccgctgttgttcggaactccagatgcagccgcatggagcctaggttctgtgcagatcatcccttcctatttttcatccgccaccataagactaactgcattcttttctgtggtcgcttttcctccccatag

SEQ ID NO: 240205 - DNA, 495 bp, synthetic construct
  misc_feature 1..495: note = Description of Artificial Sequence: Synthetic coding sequence
  source 1..495: mol_type = other DNA
atggatgacttgtgcgaggcaaacggaacctttgcaattagcctgttcaagatcctgggagaggaagacaattctcgcaatgtgtttttctcccctatgtctatttcctcggcactagccatggtgttcatgggtgctaaggggtcgactgcggctcagatgagtcaggcattatgtctatataaggacggtgacatccatcggggattccagtctcttctcagcgaagtaaatcgaacgggcacccagtacctgttgcggaccgccaacaggttatttggtgaaaaaacctgcgacttcctccctgacttcaaggagtactgtcagaaattttaccaagcagaactggaggagttgagtttcgccgaagatacggaagaatgccgtaaacacatcaatgattgggtggccgaaaaaactgaggggaaaataagcgaagtgctcgatgctggcacggtcgaccctctcacaaagttggtcttagtgaacgcctag

SEQ ID NO: 240206 - DNA, 375 bp, synthetic construct
  misc_feature 1..375: note = Description of Artificial Sequence: Synthetic coding sequence
  source 1..375: mol_type = other DNA
atggatgacctttgtgaggccaatggtaccttcgctatctcgctttttaagattctgggtgaagaggataactccaggaacgtgtttttctctcccatgtctataagcagtgccctggccatggtatttatgggcgcaaaagggagtacagcagcccaaatgagccaggctttgtgtctgtataaagacggcgacatccaccgcggatttcagtccctactgtcagaagtgaatcggaccggtacgcagtatctgctgagaactgccaaccgtttattcggtgaaaagacctgtgatttcctcccagatttcaaggagtactgtcaaaagttctaccaggccgagctggaagagctgtcatttgcagaggactag

SEQ ID NO: 240207 - DNA, 579 bp, synthetic construct
  misc_feature 1..579: note = Description of Artificial Sequence: Synthetic coding sequence
  source 1..579: mol_type = other DNA
atgctattcaagaccaacgaggagaaaaagaccgtgcagatgatgtttaaggaggccaaattcaagatgggctatgccgacgaggtgcatacgcaagtccttgagctgccttacgtagaagaggagctgtctatggtgattctgcttcccgacgataacaccgacctagcagtcgtggagaaggctttgacttacgaaaaatttaaagcctggactaatagcgaaaagcttactaagtcaaaagtgcaagtgttccttccaagacttaaacttgaagagtcttacgatttggagccgtttctgaggcggctggggatgatcgacgctttcgatgaagctaaagccgacttttctggtatgtctaccgagaagaacgtgccgttatcaaaagtggctcataagtgcttcgtggaggttaatgaagaagggacagaagccgctgccgcaactgccgtggtgcgaaactccagatgttcaagaatggagccgagattttgtgcggaccaccccttcctcttttttatcagacatcataagactaattgtattctgttttgcggaaggttcagttccccctag

SEQ ID NO: 240208 - DNA, 1131 bp, synthetic construct
  misc_feature 1..1131: note = Description of Artificial Sequence: Synthetic coding sequence
  source 1..1131: mol_type = other DNA
atggaaacactcagcaatgcttccggcacgttcgccataaggctcctgaaaatcctgtgtcaggataatccctcccacaacgtcttctgcagcccagtctccattagtagcgccctcgccatggttttgctgggcgcaaaaggaaatacggccacccaaatggcccaggccctttcccttaacaccgaggaggacattcacagagctttccaatcgctcttgacagaggtgaataaagcagggacacaatacctcctgaggacagcgaatcggctgttcggagaaaagacctgccaatttttaagcacatttaaggaaagctgcttgcagttttaccatgccgaactgaaagaattgagttttatccgcgctgccgaggaatcacggaagcacatcaacacatgggttagcaagaaaactgaggggaagattgaggaattacttcctggctctagtatagacgccgaaacacgcttagtgctggttaacgctatttatttcaagggtaaatggaacgagccgttcgatgagacatacacgcgcgagatgccctttaagataaatcaagaggagcagcgacctgtacagatgatgtaccaagaggccaccttcaaattagcgcatgttggtgaggtccgcgcacagctactggaactcccttacgcgcgtaaggaactgagcctacttgtgctgctccctgatgatggcgttgagctgtccacggtcgagaagtcactgacattcgaaaagctgaccgcctggactaaacctgactgcatgaagtccactgaggtggaagtgctgctacccaagttcaaactccaagaggactacgacatggagtcagtgctaaggcatcttggcattgtggacgcatttcagcaaggaaaagctgatctgagcgcaatgtctgccgaacgggacctttgcctgtccaaattcgtccacaagagctttgtggaggttaacgaagaaggtacagaagcagccgctgcctccagctgttttgtggttgcagagtgctgcatggagtccggccctagattctgtgcagatcatccttttttgttctttattaggcacaacagagccaacagtatcctgttttgtggccgtttctcctccccgtag

SEQ ID NO: 240209 - DNA, 1104 bp, synthetic construct
  misc_feature 1..1104: note = Description of Artificial Sequence: Synthetic coding sequence
  source 1..1104: mol_type = other DNA
atgtcctccccccctcccgcacgaagtggcttttaccggcaggaggtgacgaagaccgcatgggaagtgcgggctgtctatagggaccttcaacctgtcggtagcggcgcttacggcgctgtatgttccgccgttgacggcaggacaggggcaaaagtcgctatcaagaaactctacaggccctttcagagcgagcttttcgctaaacgggcataccgggaactccggctgcttaagcatatgcgccatgagaacgttatcggccttttagatgtgtttactccagatgagacactggacgatttcacagacttttacctagttatgccattcatgggtaccgacttagggaagttaatgaagcacgagaaactaggggaggatcgcatccaattcttagtgtatcagatgcttaagggcctgcgctatatccacgccgcaggcatcattcaccgggacttaaagccagggaacctcgccgtgaacgaggactgtgagttaaagattttggacttcggactagcaaggcaagccgattctgagatgacaggctacgtggtcacacgctggtacagagccccagaggtgattctaaattggatgcggtatacgcagaccgtggacatatggtccgtgggctgtatcatggccgagatgatcaccggtaaaaccctatttaagggttcggaccacctggaccagctgaaagagattatgaaggtgaccggtactcctcctgcggaattcgtccagcgcctgcaatcggacgaggccaagaactatatgaagggtcttcccgaattagagaaaaaagatttcgctagtattctgaccaacgcctctccgctggccgtgaacttgcttgagaaaatgttggtgctggacgctgagcagcgggtgactgccggagaggcactggcccacccttatttcgaatccctgcacgatactgaagatgagccacaagtgcagaagtatgatgattccttcgacgacgttgacaggactctggatgaatggaagcgggtcacatacaaggaggtgctgtcctttaagcctcctagacaactgggagctcgtgtatctaaggagacacccctgtag

SEQ ID NO: 240210 - DNA, 1500 bp, synthetic construct
  misc_feature 1..1500: note = Description of Artificial Sequence: Synthetic coding sequence
  source 1..1500: mol_type = other DNA
atgaagcattcccttaacgcgctcctaatcttcctcattataacaagcgcttggggcggttccaaaggaccactcgatcagctcgaaaagggcggagagacagcacaatctgcagatccccagtgggaacaactgaataataagaatttgtccatgccactgcttcctgcagactttcataaggagaacactgttacaaacgattggatccctgaaggtgaagaagacgatgactatcttgatttagagaagatctttagtgaggatgatgattacatagatatagtggacagcctgagcgtaagccctactgactctgatgtttctgctggaaacatacttcagttgttccacgggaaaagtaggatccagaggctcaacattctgaacgctaaattcgcgttcaatctgtaccgcgtactaaaggaccaagtgaacactttcgataacattttcatcgccccagttgggatcagtacagcgatggggatgatctctttgggattgaagggggaaacacacgaacaagtccatagcattctgcattttaaagatttcgtgaacgcttcctcaaaatacgagattaccacaatccacaatctgttccgtaagctcacccacaggctgttccgcagaaacttcgggtataccctaagatctgttaacgacctgtacattcagaaacagttccccattctgttggatttcaaaaccaaagtgagggagtactatttcgcagaagctcagatcgccgatttctctgacccagcatttatcagcaaaaccaataaccacattatgaagttaactaagggcctcataaaagatgctttggagaatattgaccccgcaacacagatgatgattctgaactgcatttacttcaagggatcctgggtgaacaaatttcctgtcgaaatgacgcacaaccacaactttcggttaaatgaaagagaggtcgtgaaggtttctatgatgcagactaagggaaacttcctcgctgccaatgaccaggaacttgactgtgatatcctgcagttagaatatgtggggggaataagcatgctgattgtagtgccacacaagatgtccgggatgaagacgctggaagcccaactcaccccaagggttgtcgagagatggcagaagagcatgacaaaccggactcgagaggtcctgctccccaagttcaagctcgaaaaaaattacaacttagtcgaatccttgaaactcatgggcataagaatgctgtttgataagaatgggaatatggcgggtatctcggatcaaaggattgcaatagacctcttcaagcaccaggggaccatcacggtgaacgaagaaggaacgcaggccactacagtaacaaccgtgggtttcatgccactgtcaacacaagtgagattcactgtggaccgccctttcctgttcctgatctatgagcataggacaagctgtcttctcttcatggggagagtggcgaacccctctcggagctag

SEQ ID NO: 240211 - DNA, 1197 bp, synthetic construct
  misc_feature 1..1197: note = Description of Artificial Sequence: Synthetic coding sequence
  source 1..1197: mol_type = other DNA
atgaactggcacctccctctgttcttactggcttctgtgacactgccttccatttgtagccactttaacccactgagcctcgaagaactgggttctaatacaggaattcaagtgtttaaccagatcgtgaaatcacgacctcacgacaacatcgtcatttcacctcacggcattgccagcgtactcgggatgctgcaactgggcgctgatggacgcacgaagaagcagctcgcgatggtgatgcggtatggggtcaatggcgtaggcaagatactcaagaaaatcaacaaggcaattgtcagcaagaagaataaagatatagttaccgtggctaacgctgtttttgttaagaacgctagtgagatcgaggtccctttcgtcacccgtaacaaagatgtgtttcagtgcgaagtgcgcaacgtgaattttgaggaccctgcctccgcatgcgactctatcaatgcctgggtaaaaaatgaaacgcgagacatgatcgataacttattgtctccggacctaatcgacggagtcttaactaggctagtattagtgaatgctgtgtattttaaaggcctgtggaagagtcgttttcagcccgagaatacaaagaaaagaacctttgtggccgctgacggcaagagctatcaggtgcccatgcttgcccaactgagcgtgtttcgctgcgggtccaccagtgcccctaacgatctctggtacaacttcatcgagcttccttaccacggtgagtcaattagtatgctaatcgccctgcccacagagtctagtactccattgtccgcaatcatacctcatatctcaactaaaacaatagattcctggatgtcaatcatggtccccaagcgcgtgcaagttatactgccaaaattcaccgctgttgcgcagacagacctgaaggagccccttaaggtcctaggaataaccgatatgttcgatagtagcaaggccaatttcgcgaagatcactacgggctccgaaaacttacacgtatctcacatcctgcagaaggccaagattgaagtgagcgaagacggaaccaaagctagcgcagctaccactgcgattctcatcgcgcgaagttccccaccctggttcattgtcgatcgtccattcctcttcttcattcgacataaccctactggcgctgtgttgtttatgggccaaataaataagccctag

SEQ ID NO: 240212 - DNA, 1194 bp, synthetic construct
  misc_feature 1..1194: note = Description of Artificial Sequence: Synthetic coding sequence
  source 1..1194: mol_type = other DNA
atgaactggcacctgcctttattcctcctggccagcgtgacccttccctctatttgttcacactttaatcccctcagcctcgaagagctggggtctaacactggcatccaggtctttaaccagatcgttaagtcccggcctcacgataacatagttatctctccacacggtatagcctccgttttgggaatgttacagttgggcgcagatggacgcaccaagaaacagctggcaatggttatgcgatacggcgttaatggcgtcggtaaaatactgaaaaagataaacaaagcaatcgtttcaaagaagaataaagatatcgtgacagtcgcaaatgccgtattcgtaaagaatgcctctgagattgaggtcccatttgtaacccggaataaggatgtgtttcagtgcgaggtgcgcaacgttaactttgaagaccccgcaagcgcctgcgactccattaatgcctgggtcaagaatgaaacccgggacatgatcgacaatctgctgtcccctgacttgattgacggagttcttaccagactggttctggtcaacgctgtgtactttaagggcctttggaaatcccggtttcagccagagaatactaagaagaggacatttgtagccgctgatggcaagagctaccaggttcctatgctggctcagctcagtgtttttaggtgcggatccaccagtgctcctaatgacctgtggtacaattttatcgaactcccttatcatggagaatcgatctcaatgttgattgccctccccacagagagctcgacccctctttcagctatcattcctcacatttccactaagacaatcgacagttggatgtcaatcatggttcccaagcgtgtgcaggtgatcctgccaaagtttacagctgtggctcagaccgatttgaaagagcctctgaaggttcttgggattaccgatatgttcgatagcagcaaagcgaacttcgcaaagattacacggagtgagaatctgcatgtgagccacatactgcagaaggctaaaattgaggtgtccgaggacggcaccaaagccagcgctgctaccacagctatcctaatagcgaggtccagcccaccctggtttatagtagatcgaccctttctgttcttcatccgtcacaacccaacgggcgctgtgttgtttatgggccagatcaataaaccctag

SEQ ID NO: 240213 - DNA, 1194 bp, synthetic construct
  misc_feature 1..1194: note = Description of Artificial Sequence: Synthetic coding sequence
  source 1..1194: mol_type = other DNA
atgaattggcacctgcctctgtttctgctcgcgagcgtaaccttacctagtatttgttctcactttaacccactttcacttgaagaattgggctccaatacggggatccaagtgtttaaccaaatagtaaaatctcgccctcacgacaacattgttatcagtcctcacggcatcgcgtccgtcctgggaatgttacagctgggagcagacgggcgaactaaaaaacagttagctatggttatgaggtacggggtcaatggggtgggcaaaatactgaaaaaaattaataaggccatcgtgagtaaaaagaacaaggacatcgtgactgtggctaacgccgtttttgtgaaaaacgcctcagagatcgaggtgcccttcgtcactcgcaacaaagatgtttttcagtgtgaagtaagaaacgtcaacttcgaggatccagcgagcgcctgcgactctatcaacgcttgggtaaagaatgaaactcgggacatgatagacaacctgcttagcccagaccttattgatggagtgttgacccgcctggtgttagtaaatgcagtttacttcaagggcctatggaagtcacgctttcaaccagaaaataccaagaaaagaacgtttgtagccgcagacggtaaatcataccaagtaccgatgctggctcagctgagtgtttttaggtgtggttcaacgagcgcccctaatgatctatggtacaactttatcgaactgccttatcacggagagtcaattagcatgctgatcgcactgcctacagaatccagtacacccctatctgccatcataccacacatttctacaaagaccatcgattcttggatgtcaattatggtgcccaagagagtgcaggttattctgccaaaatttacagctgtggcccagacagatctgaaagagcccctgaaagtgctgggcattaccgacatgtttgacagcagcaaggcgaatttcgccaagattacaaggtccgaaaatctgcacgtcagtcacatacttcagaaagccaaaattgaggtatcagaggacggcaccaaagcctctgctgcaaccactgcaattctgatagccagaagcagtcctccgtggttcatcgtggaccgccctttcctcttctttatccgtcacaaccccaccggtgccgtactgttcatggggcagattaacaagccttag

SEQ ID NO: 240214 - DNA, 129 bp, synthetic construct
  misc_feature 1..129: note = Description of Artificial Sequence: Synthetic coding sequence
  source 1..129: mol_type = other DNA
atgaactggcacctaccacttttcttactggcaagtgtgacccttccgagtatctgctcccacttcaaccccttaagcctggaagagttgggcagtaacacagggattcaagtgttcaatcaaatctag

SEQ ID NO: 240215 - DNA, 831 bp, synthetic construct
  misc_feature 1..831: note = Description of Artificial Sequence: Synthetic coding sequence
  source 1..831: mol_type = other DNA
atgaactggcatctgcctctgtttttgcttgcctccgtgacactgccaagtatctgttcacattttaaccctctaagtctggaggagctcggctctaacaccgggatccaggtatttaaccaaatcgtcaagagtcggcctcatgataacatcgttatctctccccatgggattgcgagtgtcttaggaatgttgcagctcggagccgacggaaggaccaagaaacagctcgcaatggttatgcggtacggagtcaatggggtgggcaagattctcaagaagataaacaaggctatcgtgagcaagaagaacaaagacattgttacagtcgcgaatgcagtctttgtgaagaacgcatccgagattgaggtcccctttgtcacaagaaacaaagacgtcttccagtgcgaagtacggaatgttaactttgaggatcctgcaagtgcatgtgacagtattaatgcatgggttaaaaatgagacccgagatatgatcgacaacctattgagccctgatctcattgacggcgtgctgactcgcctcgtgctggtaaacgccgtgtactttaagggtctgtggaagtcaaggtttcagcctgagaacacaaagaagcggaccttcgtagcagccgacggcaagagctatcaggttccgatgctggctcagctctccgtgtttaggtgcggatccactagtgctcctaacgatctgtggtacaattttatcgaactgccctaccacggtgagtcgatatctatgttgattgctttaccgaccgaatcaagcacccccctgtccgcaatcatcccccatatctctaccaaaacctag

SEQ ID NO: 240216 - DNA, 1230 bp, synthetic construct
  misc_feature 1..1230: note = Description of Artificial Sequence: Synthetic coding sequence
  source 1..1230: mol_type = other DNA
atgtccgactgccgatccagcttagtggaaggcactatgaactggcacctaccactgttcctcttagcttccgtgacactccccagcatctgctctcacttcaacccgctgtcgttggaggagcttggctcaaacaccggtattcaggtttttaatcagatagttaaatcccgaccacacgataatatcgtgatctccccccacggtatcgccagcgtcttgggaatgctccaattaggcgcagacggcaggaccaaaaagcagctggctatggtgatgagatacggcgtaaacggcgtggggaaaattctaaaaaaaattaacaaggccattgtatccaagaaaaacaaagatattgtaacagtggccaacgccgtgtttgtaaaaaatgcatctgaaattgaggttccattcgtcacgcgcaacaaggacgtgtttcagtgtgaggtccgcaacgtgaatttcgaagaccccgcttctgcatgcgactccatcaacgcttgggttaagaatgaaaccagggacatgatcgataatctccttagcccagaccttatcgacggagtccttacaagattagtccttgtgaacgccgtgtactttaaaggattgtggaaatcacgcttccagcctgagaacaccaagaagcggacattcgtcgccgctgacggcaagtcataccaggtgcctatgttggctcagctgtccgttttcagatgcggcagcacctctgctcccaatgacttgtggtataactttatagagcttccctatcacggtgaaagtatcagcatgctgatagctctacccacagagagctcaacccctttaagtgcgattatcccgcatatctcgacaaaaactatcgattcttggatgtcaatcatggtcccaaaacgtgtgcaggtcattttgcccaaatttactgctgtcgcccagaccgacctcaaagagcctctgaaggtcttgggaatcacggacatgttcgactcgtcgaaggcaaactttgccaaaataactcgttctgagaatcttcatgttagccatattcttcagaaggccaaaatcgaggtgtctgaggacggcacaaaagctagcgctgccaccactgccatactgattgcacgtagttcacctccatggttcatcgtcgacagaccattccttttcttcattaggcataacccaacaggggctgtattgtttatgggccagatcaataagccttag

SEQ ID NO: 240217 - DNA, 264 bp, synthetic construct
  misc_feature 1..264: note = Description of Artificial Sequence: Synthetic coding sequence
  source 1..264: mol_type = other DNA
atgaactggcatctgccactctttctgctggcctctgttactttgccaagcatttgcagccacttcaacccactgtccctagaagaactcggaagtaataccggaatccaggtgttcaatcagatcgtgaaaagtaggccacacgacaatattgtaatctcacctcacggaatagccagtgtgctcggcatgttgcaactaggcgcagacggacggaccaaaaagcagctggccatggtgatgcggtacggcgtgaacggctag

SEQ ID NO: 240218 - DNA, 1257 bp, synthetic construct
  misc_feature 1..1257: note = Description of Artificial Sequence: Synthetic coding sequence
  source 1..1257: mol_type = other DNA
atgcaggctttagtgctgctgctctgcattggcgctttgcttggtcattcctcgtgtcaaaaccccgcttcgcccccagaagagggttccccagacccggattctaccggggcactcgtagaagaggaagatcctttctttaaggttcccgtcaacaaacttgcagcagccgtctctaacttcggctatgacctgtacagggtgcggagttctaccagcccaacaacaaacgtgttgttatctccactgagcgttgcaactgcacttagtgctctctcacttggcgcagaacagagaaccgagtctattatccacagggccctgtactacgatttgatcagttcacctgacattcatggcacatataaagagcttctcgacacagttacagctcctcagaagaacttgaagtcggccagcagaatcgttttcgagaaaaaactgcggattaagagcagttttgtagcgccactggaaaaaagctatgggaccaggccgcgagtcctgacaggcaacccgagacttgacttgcaggaaatcaacaactgggtacaggcgcagatgaaggggaaacttgcaagatcaacaaaggagatcccagatgaaatcagtatccttctgcttggggtggctcatttcaagggccagtgggtcaccaagttcgattcccggaaaacaagtctcgaagacttttatcttgacgaggagcgcacagtgcgcgttcctatgatgtcggaccctaaagctgtgctgcgatacgggctcgacagcgacttgtcatgtaaaatcgcccagctacctctgacaggcagtatgtcaattatcttcttcctgcccctcaaggtgacacagaatctgacattaattgaggagtcattgactagtgagttcatccatgatattgacagggaactgaagacagtgcaggctgttttgactgtccctaaactgaaactttcatacgaaggcgaggtcactaaaagcctccaggagatgaagctgcaatctttgtttgactcacctgacttcagcaaaattaccggcaaaccgataaagctgacacaggtagagcatagggcgggattcgagtggaacgaggacggtgccggtacaactcccagcccgggtctgcaacccgcacacctcacattcccactcgactatcacctgaaccagccttttatctttgttctgcgggacacagataccggagcgttactgtttattggtaagatcttggatccgagaggaccttag

SEQ ID NO: 240219 - DNA, 1233 bp, synthetic construct
  misc_feature 1..1233: note = Description of Artificial Sequence: Synthetic coding sequence
  source 1..1233: mol_type = other DNA
atggcgttcctcggacttttttcacttctcgtcttgcagtcaatggctactggcgctacatttccagaggaggctattgctgacctgtccgtcaatatgtacaacagactgcgtgcgacgggagaagacgaaaatattctgttctctcctctatccatagctctggcaatgggcatgatggagcttggggctcagggctccacacaaaaggaaatacggcactcaatgggctacgactctctgaagaacggagaagagttttcattcctgaaggaatttagtaatatggtcacggccaaagagtcacagtacgtgatgaagatagctaattcattgttcgtgcaaaatggattccatgttaatgaggagttcctacaaatgatgaagaagtactttaatgcagccgttaaccacgtggattttagccaaaacgtggccgtggctaattacatcaacaagtgggtggagaataacaccaataatctcgtgaaagatctcgtgtcccccagagactttgacgctgccacctatctggctctgattaatgcagtttacttcaaaggtaattggaaatctcagttcagacctgaaaacactagaacgtttagcttcaccaaggacgatgaaagtgaggtccagataccaatgatgtaccagcaaggcgagttttactacggggaattctctgacgggtcaaacgaggcaggcggaatctatcaggtactggaaatcccttatgaaggcgatgaaatcagcatgatgttagtgctatcccgccaagaagttccccttgccacgctggaacccctagtgaaggcgcagttggttgaggagtgggcaaattccgtcaagaagcagaaagtggaagtttatctgcccaggtttacagttgagcaggaaattgatctgaaggacgtccttaaggctttgggcatcaccgaaatttttatcaaggatgccaatcttaccggactctctgacaacaaggagatcttcctgtcaaaagctattcacaaaagctttctcgaggtgaatgaggagggttcggaggcggctgctgtctctggaatgattgccattagtcgcatggccgtactatatccccaggtcatagtggaccacccatttttttttctcatcagaaatagacgaacgggtaccatcctttttatggggagggtgatgcatcccgagactatgaacacctctggacatgactttgaagaactgtag

SEQ ID NO: 240220 - DNA, 1233 bp, synthetic construct
  misc_feature 1..1233: note = Description of Artificial Sequence: Synthetic coding sequence
  source 1..1233: mol_type = other DNA
atggcttttcttgggttgtttagtctgctcgtgttgcaatccatggctacgggagctacctttcctgaggaggcgatcgccgatcttagtgtgaacatgtataacaggctccgagcaacaggggaggacgagaacatcttgtttagccccctctctatcgcgttggctatgggtatgatggagctgggagcccaggggtcaactcaaaaagaaatcagacactctatgggatacgacagtctgaaaaacggcgaggagtttagttttcttaaagagttttctaacatggtgacagctaaggagtctcagtacgtaatgaagatagcaaatagtttgttcgttcagaacggtttccatgtgaacgaggagttcctccagatgatgaaaaagtactttaatgcagcagtgaaccatgttgacttctcccaaaatgtcgctgtggctaactacatcaacaagtgggttgagaacaataccaataacctcgtcaaagatctggtatcaccacgcgacttcgacgccgctacatatctggccctgatcaatgcagtttatttcaagggaaattggaagtcgcagttccgccctgagaatactcggacctttagttttactaaggatgatgaatctgaagtccagatccccatgatgtatcagcaaggcgaattctattatggagaatttagcgacgggagtaatgaggccggaggtatttaccaggtgctcgagatcccgtacgagggggatgagatcagtatgatgcttgtcttatcaaggcaggaggtgccactggcgaccctggaacccctggtgaaagcccaactcgtggaggaatgggctaacagcgtgaaaaaacaaaaggttgaagtgtacctacctcggttcaccgtcgagcaagagattgacctgaaagatgtgctgaaagctcttggcatcacagaaatcttcatcaaggacgccaatctgaccggcctgtcggacaacaaggagatatttttatctaaagctattcacaagtcgtttctggaagtcaatgaagaaggctctgaagctgctgcggttagcggcatgatagcaatctccagaatggccgtgttatatccgcaggttatcgtagaccacccctttttcttcctgatccggaatagacgtactggaacaatcctctttatgggacgggtgatgcaccctgaaactatgaatacaagtgggcatgatttcgaggagctctag

SEQ ID NO: 240221 - DNA, 738 bp, synthetic construct
  misc_feature 1..738: note = Description of Artificial Sequence: Synthetic coding sequence
  source 1..738: mol_type = other DNA
atggctttccttgggctgtttagtcttctggtcctgcagagcatggccactggagcaacttttcctgaggaagctatagccgacctgtctgtaaacatgtacaatcgactgcgcgctaccggcgaggacgagaatatcttattctccccactgagcatcgctttggcaatggggatgatggaattgggcgctcaggggtcaactcaaaaggaaatccgtcactcaatgggttacgatagtttgaaaaacggcgaggagttctccttcctgaaggagtttagcaacatggtgactgcaaaggaatcacagtatgtgatgaaaattgcaaactccctcttcgtgcagaatggttttcatgtgaatgaagaattccttcagatgatgaaaaaatactttaatgctgctgtgaaccacgttgactttagccagaatgtcgccgtcgcaaactatatcaacaagtgggtcgagaataatacaaacaatttagtgaaagacctggtaagccccagggactttgacgcagcaacctaccttgccctcattaatgccgtgtactttaaggggaactggaagtcacaatttagaccggagaacacaagaacatttagtttcactaaggatgacgagtccgaggtgcagattcccatgatgtatcagcaaggtgagttttactatggggagttcagtgatggaagcaatgaagccggtgggatctaccaagtactggaaatcccgtag

SEQ ID NO: 240222 - DNA, 483 bp, synthetic construct
  misc_feature 1..483: note = Description of Artificial Sequence: Synthetic coding sequence
  source 1..483: mol_type = other DNA
atggcattcttgggcctgtttagcctgctggtgctgcagtcaatggccaccggcgctacattcccagaagaggcaatagccgacctctccgtaaacatgtacaatagattgcgcgctaccggggaagacgaaaacattctgttctcccccttgagtatcgccctggccatgggcatgatggagcttggagctcagggcagcacccagaaagagattagacactctatgggatatgactcacttaaaaatggcgaggagttctcattcttgaaggagttctccaatatggtcacggctaaagagtcccaatatgtgatgaaaattgccaactccctattcgtgcaaaacggcttccatgttaatgaagagtttttacagatgatgaaaaaatacttcaacgctgctgtgaatcacgtcgacttttctcagaatgtggcagtggcaaattacattaataagtgggtcgagaacaacacaaactag

SEQ ID NO: 240223 - DNA, 591 bp, synthetic construct
  misc_feature 1..591: note = Description of Artificial Sequence: Synthetic coding sequence
  source 1..591: mol_type = other DNA
atggtagggggactgaagaggaaacattccgatctggaagaggaggaggagcgctgggaatggtctccagccggattgcagagttatcaacaagcactcctaagaatttccctcgataaggttcagcgcagtctgggtcccagagctccgagtttgcgtagacacgttctgatccataatacccttcagcagctacaggccgcattaaggttagctcctgcacctgctctgcccccagaaccgcttttcctgggggaggaggacttttccctgagtgccaccatcggatccatcttgcgggagctggacacatccatggatggtactgagcccccacagaaccctgttaccccccttggactccagaacgaagtgccccctcagccagatcccgtttttctggaggccctcagttctaggtacctgggtgattctggactagacgatttttttctggatatcgatactagcgcagtcgaaaaggaacccgcaagggccccacctgaacctcctcacaacctattctgcgcgccaggatcctgggagtggaatgaactggaccatattatggaaatcatccttggttcatag

SEQ ID NO: 240224 - DNA, 591 bp, synthetic construct
  misc_feature 1..591: note = Description of Artificial Sequence: Synthetic coding sequence
  source 1..591: mol_type = other DNA
atggttgggggtttaaagagaaaacatagcgacctggaagaggaagaggagagatgggagtggtcaccggctggcctgcagtcttatcagcaggctcttctccggattagcctggacaaagtgcaaaggtctctcggcccaagagcccctagtctgagacgacacgttctgattcataacactctacagcagttgcaggccgctttgaggctcgcccctgccccagccctcccaccagagccactattcctaggtgaggaggacttctctctgagcgctacaataggcagtatcctgcgggagctcgacactagcatggacggtactgagcctccccaaaatcctgtgacacccctcggactgcagaatgaggttccacctcagcctgacccggttttcctcgaggccctgtcctcgcgatatctcggcgacagtggtcttgacgatttttttctagatatcgatacaagtgccgtcgagaaagagccagcccgtgcccctcccgagccacctcacaacctgttttgcgcacccggaagttgggagtggaacgagctcgaccatatcatggaaattattctcggttcctag

SEQ ID NO: 240225 - DNA, 369 bp, synthetic construct
  misc_feature 1..369: note = Description of Artificial Sequence: Synthetic coding sequence
  source 1..369: mol_type = other DNA
atgaagctgctaacagggctcgtcttttgctctttggtcctgggcgtctcatccaggagctttttttctttcctcggggaagcctttgacggcgctcgcgatatgtggcgcgcatattctgacatgagagaggctaattacattggtagcgacaagtattttcatgctaggggtaactacgacgctgctaaaagaggtcccggaggggcatgggcagccgaggtgatcactgatgcccgagaaaacatccaaaggttcttcgggcacggagctgaggactctctcgctgaccaggcagccaatgaatggggaaggtctggcaaggaccctaatcactttaggcctgcagggctgccggaaaagtattag

SEQ ID NO: 240226 - DNA, 369 bp, synthetic construct
  misc_feature 1..369: note = Description of Artificial Sequence: Synthetic coding sequence
  source 1..369: mol_type = other DNA
atgaagctccttactgggttggttttttgctcgttagtacttggcgtgtctagtcggtccttcttcagcttcctgggagaggcttttgatggggctcgcgatatgtggcgcgcttacagcgatatgagggaggctaactatataggatcggacaaatatttccacgcccgtggcaactatgatgccgctaagcgcggacccggaggagcatgggctgctgaggtcattaccgacgctcgcgagaacatacagagatttttcggtcacggggcagaggattcattagctgatcaagcagcaaacgaatggggtcggtctggaaaggatcctaaccacttccggccagccggtttgccagagaagtattag

SEQ ID NO: 240227 - DNA, 369 bp, synthetic construct
  misc_feature 1..369: note = Description of Artificial Sequence: Synthetic coding sequence
  source 1..369: mol_type = other DNA
atgaagctcctgacaggcttggtcttttgctcactggtgttgggggtaagctctcgctccttcttttctttcctcggcgaggcttttgatggcgctagagacatgtggagggcgtattccgatatgcgcgaagctaactatattggatcggataaatattttcatgccagaggaaattacgacgccgctaagcgcggaccgggaggggcttgggctgcggaggtgatcaccgatgcacgtgaaaatattcagagattttttgggcacggtgcggaggactcgctggctgatcaggcggcaaacgaatggggcaggagtgggaaagaccccaatcactttaggcctgctgggttaccggagaagtattag

SEQ ID NO: 240228 - DNA, 369 bp, synthetic construct
  misc_feature 1..369: note = Description of Artificial Sequence: Synthetic coding sequence
  source 1..369: mol_type = other DNA
atgaagctgctgaccggcctggtgttctgctccttagtgctctctgtgtcctcacgatctttttttagctttctgggcgaggcctttgacggggctagagacatgtggcgggcatatagcgatatgcgagaagctaattatataggatcagacaaatattttcatgccaggggcaactatgacgcagctaagaggggtccaggaggcgcttgggcggctgaggtgattagtaacgctagagagaacatccaacggttaactggcaggggggcagaggacagcctggccgatcaggccgctaataagtggggcaggtccgggagggacccaaaccacttccgcccagcagggctccccgagaagtattag

SEQ ID NO: 240229 - DNA, 252 bp, synthetic construct
  misc_feature 1..252: note = Description of Artificial Sequence: Synthetic coding sequence
  source 1..252: mol_type = other DNA
atgaagttgctgaccgggttggtgttttgctccctcgttctctctgtcagcagccggtctttcttttcttttttgggagaagcgtttgacggcgctcgggacatgtggagagcctactccgatatgagggaggccaattatatcggttcagataaatacttccacgccagaggtaattacgatgccgctaaacgcggtcctggaggagcttgggcagccgaggttattagtctgttcagcgctgagctgtag

SEQ ID NO: 240230 - DNA, 369 bp, synthetic construct
  misc_feature 1..369: note = Description of Artificial Sequence: Synthetic coding sequence
  source 1..369: mol_type = other DNA
atgaagctgcttactggactcgtcttttgctcactggtgctgtcagtgagcagtcgatccttcttctcctttcttggagaggccttcgacggtgcgagggatatgtggcgtgcctatagcgatatgcgcgaggctaactatattggttctgataagtactttcatgccagaggaaactatgacgccgcaaaacggggtcccggtggtgcatgggccgcagaagtaatctccaatgcaagagaaaatatccaacgcctgactggccgaggcgcagaggatagcctcgccgatcaggccgctaacaagtggggacggtctggcagggatccgaatcacttccgccctgctggtctgcctgaaaaatactag

SEQ ID NO: 240231 - DNA, 369 bp, synthetic construct
  misc_feature 1..369: note = Description of Artificial Sequence: Synthetic coding sequence
  source 1..369: mol_type = other DNA
atgaagctgctaaccggcctagtgttttgtagtctggtgctatcagtgtctagtcggagttttttctctttcctcggagaggcattcgacggtgctagagatatgtggagggcgtactccgatatgcgcgaggccaactatattggctcagacaaatacttccacgcgaggggcaattatgacgctgctaagcggggtccgggaggtgcttgggctgcagaggtcatctctaacgcgagagagaacattcaaaggctgactggtaggggcgcagaggattctctggcggatcaagcagcaaataaatggggtcgttcgggtagagatcccaatcacttcagacccgcagggctgccggaaaaatattag

SEQ ID NO: 240232 - DNA, 393 bp, synthetic construct
  misc_feature 1..393: note = Description of Artificial Sequence: Synthetic coding sequence
  source 1..393: mol_type = other DNA
atgaggttatttaccgggattgtgttctgcagcttggtcatgggagttacatcagaatcatggcgctcattctttaaagaggccctccagggtgtgggcgacatggggagggcttactgggacattatgatctctaatcaccagaattccaatcgctatttgtatgccagaggcaattacgacgccgcacagagaggccctgggggtgtgtgggcggctaaactgatttcaagatcccgcgtataccttcagggcctgatcgattgttacttgtttggtaattccagcaccgtgctggaggacagtaagtctaatgagaaggccgaagaatggggtcgatctggaaaagaccccgaccgcttccggcctgacggcctgcccaaaaagtactag

SEQ ID NO: 240233 - DNA, 1278 bp, synthetic construct
  misc_feature 1..1278: note = Description of Artificial Sequence: Synthetic coding sequence
  source 1..1278: mol_type = other DNA
atgggtgaagacgcggctcaggctgaaaagttccaacaccctgggtcggatatgcggcaagaaaagccgtcatctccttctccaatgccatcatccacaccttcacctagccttaacctgggcaataccgaagaggccattagagataattcccaagtaaacgcggttacagttctgacgctgctggacaaattagtgaacatgctcgacgcggtccaggagaaccaacacaagatggagcagaggcagatctccctggaggggtcagtgaagggaattcaaaacgatttgacaaaattaagcaagtaccaggcgtcaaccagcaatactgtgagcaagctgttagaaaagagcagaaaggttagtgcccatacacgggctgtaaaagagagaatggacaggcaatgtgcccaggttaaacgcctggagaacaaccatgcccagctcctgaggcgcaaccattttaaagtactgatattccaggaggaaaatgaaatcccagcatctgtgttcgtgaaacagccagtgtcgggagcggtcgagggcaaggaggagctgccagacgaaaacaaaagtctggaggagacactgcatactgtggatctttcatcagacgatgatctacctcacgacgaggaggctttggaggacagcgctgaagagaaggtggaggagtcaagagccgagaagatcaagcgctcctcactgaagaaggttgatagcctgaagaaagctttttcacggcagaatattgagaagaaaatgaacaaactcgggaccaaaattgtctctgtggaaaggcgcgagaagattaaaaaatctttgaccagcaatcaccaaaagatttcctcgggcaaatcttcacccttcaaagtgtcccctttaacattcggtagaaaaaaggtacgcgaaggcgagtctcacgcagagaacgagacgaagtccgaggatctgccttcgtctgaacagatgcccaatgaccaggaggaggaatcgttcgctgaggggcatagcgaggcgtctctagcttccgccttggtagagggggagattgctgaggaggctgctgagaaggcaacatctcggggttctaacagtggaatggactctaatatagatctgactattgtggaagacgaagaagaggagtccgttgcgctggagcaggcccagaaggtgcggtatgagggcagctacgcactgacttctgaggaggctgagcgaagcgacggagatccagtgcaacctgcagtgcttcaggtccaccagaccagctag

SEQ ID NO: 240234 - DNA, 1290 bp, synthetic construct
  misc_feature 1..1290: note = Description of Artificial Sequence: Synthetic coding sequence
  source 1..1290: mol_type = other DNA
atggctcagccaggcacactgaacctaaataatgaagtggtgaagatgcgaaaggaggttaaaaggattagagtgcttgtgatcaggaagcttgtgcggtctgtgggccgactgaaatccaagaaaggaacagaagatgccctattgaaaaaccagcgaagggcccagcggctattagaggaaatccacgccatgaaggagctcaagcccgacattgtcaccaagagcgccctcggcgatgatataaattttgagaaaatattcaaaaaaccagattcaactgccactgaacgcgctatagccaggctagccgtgcaccctctcctcaaaaagaagattgatgtcttgaaggccgctgttcaagcgttcaaagaggcgaggcagaatgtggctgaagtagagagctcgaagaacgcatccgaggacaaccattccgagaacaccctttactctaacgataatggcagcaacctgcagcgcgaggcgacggtgatcagcgaacagaaagtgaaggaaaccaagattcttgccaaaaagcctatccacaactctaaggaaaaaattgcaaagatggagcacggaccaaaagccgtcactatcgccaacagtccctcaaaaccttccgagaaggattctgtagtgtcacttgagtcccaaaagacacctgccgaccctaagctgaagaccctatcccaaacaaagaaaaataaaggaagcgattcttcattgagcgggaattccgacggcggtgaggaattctgcgaggaggaaaaagaatatttcgatgattccaccgaggaacggttctacaaacagtcatccatgtctgaagactcagactcaggggacgattttttcattggaaaggttaggcgcacgagaaaaaaggagtcatcttgccactccagcgttaaagagcagaagcccctggaaaaggtgtttctaaaagaggacacgggagagacccacggcgatacaagaaacgacaagatcaagcctagtactgagacacgcaagctggagtccgtcttctttcactctttgtctggctcaaaaagcagtagaagaaatttcaaagagcaggctcctaaaactagatccttggacttcccccaaaatgagcctcagataaaaaaccagttcaataagaaactgtcaggtcgattagagaacacaaagcagcagttgcagctcccgctgcacccaagctgggaggctagcagacgccgtaaagaacaacagtcaaatattgcggtctttcaaggtaagaagattactttcgatgattag

SEQ ID NO: 240235 - DNA, 1296 bp, synthetic construct
  misc_feature 1..1296: note = Description of Artificial Sequence: Synthetic coding sequence
  source 1..1296: mol_type = other DNA
atgacggtgaagactgaagccgctaaaggcacactgacatattctcgtatgcggggaatggtcgccatcctcatagcttttatgaaacagcgtaggatgggcctaaatgacttcatccagaagattgccaataatagctacgcctgcaagcacccagaggtccagagtattttgaagattagtcagccgcaggaaccagaattgatgaacgccaaccctagccctcccccatcaccgtcccagcagattaatcttggtcccagcagcaatccgcatgctaagccttccgacttccacttcttgaaagtcatcgggaaaggctcattcggaaaggtgctcctggctaggcataaggcggaggaggtgttctacgcagtgaaagtactacagaaaaaggcaattctgaagaagaaagaggaaaaacacataatgagcgaacgtaacgttctattaaagaacgtcaaacatccattcttagttggactgcatttcagtttccagaccgcggataagctgtactttgtccttgattatattaacggaggggagctattttaccatctacagcgggagaggtgtttcttggagccacgggctcggttttatgccgcagagattgcctcagccttaggctacctccactccctgaacatcgtttacagagatctaaagcccgaaaatatccttttagatagccagggccatatcgtgttgactgacttcgggctgtgcaaggagaatatcgaacataattctacaacctccacattttgtgggacgcccgaatacctggctccagaggttctgcataaacagccctacgaccggactgtggactggtggtgcctgggcgcagtactgtatgagatgttatatgggctgccccctttctactccaggaatacagccgagatgtatgataacattttgaataaaccgcttcagctgaaaccgaacatcacaaattcagctagacatctgttggaggggcttcttcagaaagacaggaccaaacggctgggagccaaagacgatttcatggagatcaaaagccacgtattcttctctcttattaattgggatgatctgattaataagaagatcacaccgccttttaatccaaatgtaagtgggcctaacgatctgagacattttgaccccgagtttaccgaggagcctgtccctaactcaatcggcaagagccccgattctgttctggtcacagcatcagtgaaggaagctgccgaggccttcctagggtttagctacgctcccccaacagattccttcctttag

SEQ ID NO: 240236 - DNA, 1266 bp, synthetic construct
  misc_feature 1..1266: note = Description of Artificial Sequence: Synthetic coding sequence
  source 1..1266: mol_type = other DNA
atgaaaccatccaagcggttcttcatctcccccccttcgagtaccgctttcatgaagcagaggaggatggggttgaatgactttatacagaaaatagcaaacaatagctacgcgtgtaagcatccggaggtccagtccatattaaaaatctcccagccccaagagcccgagctaatgaatgcaaacccaagcccacccccatctccaagccagcagatcaatcttggcccttcctcaaatcctcacgccaaaccgtccgattttcacttcctcaaagtcatcgggaagggctcctttggaaaagtgctgcttgctcgacacaaggcagaggaagtattttatgcagtcaaagtgttacaaaaaaaagcaatattaaagaaaaaggaagaaaagcatataatgtctgagagaaatgtcctactcaagaacgtgaaacatccattcttggttggcctccatttctcctttcagacagccgataagctctacttcgtgctggactatatcaacggtggcgaactattttatcatctgcagcgtgagaggtgctttcttgagcctcgggcaaggttttacgccgcagaaatcgccagtgcgctcggttatctccactctctgaatattgtttatcgggatctcaagcctgagaatatcttgctggatagccagggccacatcgtgctgacggatttcggcctttgtaaggaaaacattgaacacaattctacaacatccactttctgtgggacaccagagtacttagctcctgaggttttgcacaagcaaccttacgatcggactgtcgattggtggtgtctgggagctgtgctgtacgaaatgctctatggcttgcccccattctacagtaggaacacagcagaaatgtacgacaacatcctgaacaaaccactacagctgaagccaaatataactaattctgcacggcacctcctcgagggcttgttgcagaaagaccgcaccaagagactaggggctaaagatgatttcatggaaatcaagtcgcatgtcttcttctctttaataaactgggatgatttgataaataaaaagattacaccacctttcaatcctaacgtgtcagggcctaatgatctgaggcattttgatcccgaatttaccgaagaacctgttcccaactcaatcggtaagagtcctgattctgtgttggtgacagcttctgtaaaggaagccgcagaagcttttctgggttttagttacgcaccgccaactgatagcttcctttag

SEQ ID NO: 240237 - DNA, 1581 bp, synthetic construct
  misc_feature 1..1581: note = Description of Artificial Sequence: Synthetic coding sequence
  source 1..1581: mol_type = other DNA
atggtaaataaagatatgaacggatttcctgtgaagaagtgttccgcgttccaattcttcaaaaagcgcgtccgacggtggataaagagcccaatggtgtccgtagataagcatcagagtcccagcctcaaatacacaggaagctctatggtgcatattccccctggcgagccggatttcgagagtagcctgtgtcaaacatgcctgggggaacacgcatttcagcgcggtgtgcttccccaggaaaacgagagttgctcatgggagacgcagtctgggtgcgaagtgcgggagccgtgtaaccacgctaatatcttaaccaagccagaccccagaaccttctggacaaacgacgatccagcctttatgaagcagcggcgtatggggctgaatgactttatacagaaaattgcaaacaacagctatgcttgcaaacaccctgaagtccagagcattcttaagatctcacaacctcaggaacctgagctaatgaatgcaaacccttctcccccaccaagtccaagtcagcaaatcaatctggggccatctagtaatcctcacgccaaaccatctgatttccactttctaaaagtgattggaaaaggatcttttggtaaggtgctcctggccagacacaaggccgaggaggtattctatgccgtgaaggtgttacagaagaaagcgatcctcaaaaaaaaggaagaaaagcatattatgagcgagcgcaatgtgcttctaaagaacgtcaagcatccctttctggtgggtctgcacttcagctttcagacagcagacaagctgtatttcgtcctggactatataaatggcggagagctgttctatcacctccagcgggagcgttgctttctggagcctcgcgcacggttttacgctgccgagatcgcaagcgctctcggatatttgcactcactgaatattgtgtaccgcgacctcaagcctgaaaacatcctgctcgactctcagggccacattgtcctgactgattttggtctttgcaaagagaatatcgagcacaactcgacaacctccaccttctgtggcacccctgagtacctggcccctgaggttctgcacaagcagccttatgaccgaacagtagattggtggtgtctaggtgccgtgctgtatgaaatgctgtacggcctgcctcctttctactcccgcaacacagccgagatgtacgacaatatcctgaataagccgctgcaactcaagcctaatattaccaatagtgccagacacctcctcgaaggtttactgcagaaggataggaccaagcgccttggcgctaaggatgacttcatggagatcaagagtcacgtttttttctcgctgatcaattgggatgacctgatcaacaaaaagatcacgccaccgttcaaccctaatgtgtccggtcccaacgatctgcgccactttgaccccgaattcactgaggaacccgtgccgaactctatcgggaaaagtccagatagcgtgctcgtgaccgccagtgtgaaagaagcagcggaagccttcctgggctttagctatgctccccctaccgactctttcctttag

SEQ ID NO: 240238 - DNA, 1338 bp, synthetic construct
  misc_feature 1..1338: note = Description of Artificial Sequence: Synthetic coding sequence
  source 1..1338: mol_type = other DNA
atgggggagatgcagggcgctctggccagagctcgcctcgaatctctcctcagaccacggcataagaaacgagccgaagcacagaagaggtcagaaagctttctgctctctggcttggcctttatgaaacagcgtagaatggggcttaatgactttattcagaagattgctaataattcctacgcatgcaaacatcccgaggtccagtccatcctgaagatctctcagcctcaagaacccgagttaatgaatgccaatccctcacctccaccttctccttcacagcagatcaatctcgggcctagttctaatccacacgcgaagccgagcgacttccactttcttaaagtgatcggtaaaggaagcttcggaaaggtgctgcttgctcgacacaaggctgaagaggtgttttatgccgtgaaggtactgcaaaaaaaagctattctcaaaaaaaaggaggagaagcacatcatgtctgaacggaatgtgctgttaaaaaatgttaaacacccgtttcttgttggcctgcatttttccttccagaccgcagataagctatacttcgtactcgactatattaacggcggtgagctcttctaccacctccagagagaacgatgcttcttggagccaagagcgcgattctacgccgcagagatcgcaagtgctctcggttatctccacagccttaacatcgtgtacagggatctcaagccagaaaacattctactggattctcaaggccacatagtactcaccgactttggcctgtgtaaggagaatattgaacataactctacaacgagtactttctgcgggacacccgaatacctggccccagaagtccttcacaaacagccgtacgaccggaccgtcgattggtggtgcctgggcgctgttctctatgaaatgctctacggtctccccccattttacagcagaaacactgcggaaatgtacgataacatcctgaacaaacccctgcaactgaagcccaatatcaccaactctgctagacatctgctagaaggcttgttacagaaggaccgaacgaagagattgggagccaaagacgatttcatggagataaaatcgcacgtcttcttcagtctcataaattgggacgacctgatcaacaagaagataactcccccatttaatcccaacgtgtcgggcccaaatgatctcaggcatttcgaccctgagttcacagaagagcccgtgccaaactctattggcaaaagccccgactctgtcttggtgacagccagcgtcaaggaggcagctgaggcctttctgggcttctcttacgctccccctaccgatagtttcctttag

SEQ ID NO: 240239 - DNA, 435 bp, synthetic construct
  misc_feature 1..435: note = Description of Artificial Sequence: Synthetic coding sequence
  source 1..435: mol_type = other DNA
atggtctcagtggacaagcatcagtccccttccctgaagtataccggcagttcaatggtgcacattcctccaggggagccagacttcgagagctctctctgccagacgtgcctcggagaacacgccttccagagaggggttcttccacaggagaatgagtcatgttcttgggagacacaatctgggtgtgaggtgagggaaccgtgcaatcatgccaacatccttacaaagcccgacccccgaacgttctggactaatgatgacccggcattcatgaaacagcgtcgaatggggctgaacgattttatacaaaagattgccaacaattcatacgcatgtaaacaccctgaggtgcaaagcatcctaaagatttcccagccccaggagcccgaactgatgaacgcaaatccaagtcctcccccttccccaagctag

SEQ ID NO: 240240 - DNA, 1380 bp, synthetic construct
  misc_feature 1..1380: note = Description of Artificial Sequence: Synthetic coding sequence
  source 1..1380: mol_type = other DNA
atgtcatctcaaagctccagcctgtcagaggcctgcagccgagaggcgtactctagtcataattgggcactccccccagcgtcccgatcaaatccacagcctgcatatccgtgggctacacgcagaatgaaagaggaggccataaaaccccctctgaaagcctttatgaagcaacgtagaatgggccttaatgattttattcagaagatcgcaaataatagctacgcctgcaaacaccctgaagtccagtccattctcaagataagtcagccgcaggagcccgaacttatgaacgcgaatcctagtccgccaccttctcccagccaacaaatcaacctgggaccaagttcgaatccccacgctaagcctagtgatttccatttcttgaaagtgatcggaaaggggagctttggcaaggtactgctcgctcgccataaggccgaagaggtgttttacgccgtgaaagtgctgcagaagaaagcaatcctgaaaaagaaagaggagaagcacatcatgagcgagaggaatgttctcctgaaaaatgtcaaacacccatttctcgtgggccttcacttctcattccagaccgcagataaactgtacttcgtcctggactacattaatggtggagaactgttctatcatcttcagcgagagagatgcttcctagaacccagggcgcgattctatgccgctgaaattgctagtgccctgggatacctgcacagcctaaatatcgtatatcgcgacctaaaacccgagaacatcttgctggattcccaaggacacatcgtcctgaccgatttcgggctgtgcaaggagaacatcgagcacaatagcaccacctccacattctgcgggactcccgagtacctggcaccagaggttctgcataagcagccttatgatcgcacagtggattggtggtgcctcggggcagtgttgtatgagatgttatacggattaccgccattctacagtcgcaacacagccgaaatgtacgataatatactgaacaaacccctacagctgaaacctaacattacaaactccgctagacacctcctggagggcctgctccagaaggaccggaccaaacggcttggagccaaagatgattttatggagattaaatcccacgttttcttctctctcatcaattgggacgaccttattaacaagaaaatcacccctccctttaaccccaatgtgtctggtcctaacgatctgaggcatttcgatcctgaattcacagaggaacctgtgccaaacagcattggaaaaagcccggattccgtactggtgacagccagcgtcaaagaggctgctgaggccttcctgggattctcgtacgctcccccaacagactccttcctctag

SEQ ID NO: 240241 - DNA, 183 bp, synthetic construct
  misc_feature 1..183: note = Description of Artificial Sequence: Synthetic coding sequence
  source 1..183: mol_type = other DNA
atggtgaacaaggacatgaatggatttcctgtgaagaagtgttcagcattccaattttttaagaaacgggtgcggagatggatcaaatcccccatggtttctgtcgacaagcaccagtcaccttctctgaaatataccggctcctcgatggtgcacatcccacccggagagcccgacttttag

SEQ ID NO: 240242 - DNA, 1284 bp, synthetic construct
  misc_feature 1..1284: note = Description of Artificial Sequence: Synthetic coding sequence
  source 1..1284: mol_type = other DNA
atgcagggcctgctcacgtcaggaaggaagcccagcggtggaggacgctgtactggcagaggcggatggcgcggacaatggtgtctcaaaccctggatggggggagccgatcccccaactccaaccctgtcctgcctgttgcttcccgttccacctgagctccctgatcactgctataggatgaattcatctcccgctgggacgcctagtccgcagccatctcgtgctaacggcaatattaaccttggcccaagtgcgaaccctaacgcacagcccaccgattttgattttcttaaagtgatcggaaagggcaactacggcaaagtgctgctggccaagagaaagtccgacggggcattctatgccgtcaaagtcctccaaaagaagagtatcctcaaaaaaaaggaacagtcccacattatggcagagagatctgtcctcctgaagaatgtgcggcatcccttcctagtcggccttcgctatagcttccaaactccagaaaagttatactttgttcttgactatgtgaacggcggtgagctattctttcatcttcagagagaaaggcgcttcttggagcctagggcccgtttctatgcagctgaggtagcttccgcaatagggtacctgcacagtctcaacattatttacagagaccttaaaccagagaacattctgcttgactgtcaggggcacgtcgtgcttacggatttcggactgtgtaaggaaggcgtggaaccagaagacacgacatcgactttttgcggtaccccagaatatcttgcccctgaagttcttcggaaagaaccgtacgatagggctgtggattggtggtgtctgggtgctgttctgtacgagatgcttcatggactgccaccattttacagccaggacgtctctcagatgtatgaaaatatccttcatcagccactgcaaatccctgggggacgcaccgttgccgcttgtgacctgctccaatcactgttgcacaaggatcagcgacagcggcttggcagtaaggctgattttctcgagattaaaaaccacgtgtttttctcgcccattaattgggatgacctgtaccacaagcgtcttacacccccttttaaccccaatgtgactgggcctgccgatctgaaacacttcgatcccgaatttactcaggaagccgtgtctaagagcattggttgtacacccgataccgtggcctcaagctccggggcatcgtccgcctttctaggattttcatacgcccctgaggatgatgatatcctggactgttag

SEQ ID NO: 240243 - DNA, 1101 bp, synthetic construct
  misc_feature 1..1101: note = Description of Artificial Sequence: Synthetic coding sequence
  source 1..1101: mol_type = other DNA
atgaatagcagccccgcagggacaccaagcccacagcctagccgtgcaaacggaaatattaatctggggcctagcgcgaaccctaacgcccagccaacagatttcgattttctgaaagtcatcggcaaggggaattacggtaaggtcctcctggccaaacgaaagagtgacggtgccttttatgctgtgaaagtcttacagaagaagtcaattttgaaaaaaaaggagtcccacatcatggctgagcggtctgtgctcttgaaaaacgtgaggcacccattcctagtgggcctccggtactcttttcaaaccccagagaagttatatttcgtgcttgactatgtaaacggaggagaactgttttttcacttgcagagggagcgacgttttctggagccaagggcaaggttttacgcagctgaagtcgcgtctgctataggctacctgcacagtttgaatatcatctatcgggatcttaagcctgagaacatcctcttggattgtcagggtcacgtcgtgctcaccgatttcggcctctgtaaggaaggggtggagccagaggacactacctcgacgttttgtggcacccctgagtacttggccccagaggtcctcaggaaagagccctacgaccgagcggtggattggtggtgtctgggagccgtactctacgagatgttgcacggcctgccgcctttctactcacaagacgtgtcccagatgtacgagaacatcttacatcagcctctgcagatcccaggagggaggaccgttgcggcttgcgacttgctgcaatctctactccataaggatcagagacagcgcctgggaagtaaagctgacttcctggaaattaaaaaccacgtgtttttctcccccatcaactgggacgacctgtaccataaaaggttaacccccccattcaatcccaacgttacgggaccagccgatctgaaacattttgatcccgagttcactcaggaggctgtcagcaaaagtatcggctgtacgcctgacactgtagctagctcgagcggggcatcctcggcattcctaggattttcctacgctcctgaagacgatgacatcctggactgctag

SEQ ID NO: 240244 - DNA, 1104 bp, synthetic construct
  misc_feature 1..1104: note = Description of Artificial Sequence: Synthetic coding sequence
  source 1..1104: mol_type = other DNA
atgaactcttccccagccggaaccccatccccccagccctcccgggctaacgggaacattaacttgggtccatcagcaaaccctaatgcacagccgacggactttgacttcttgaaggtgataggcaagggcaactatggaaaagtcctgctggccaagcgcaagtccgatggcgctttctatgctgtaaaagtcttgcagaagaagtcgatactgaagaagaaggagcaatctcatatcatggccgagcggtccgttctcttaaaaaacgtccggcacccttttttggtgggactgaggtacagctttcaaacacccgagaaactatacttcgtcttagactatgtcaacggcggtgaactgttctttcacctccaacgagaaagaaggtttctggagcccagggctaggttttatgctgccgaggtggcgtccgctataggctacctccattcgcttaacatcatttatcgggacctgaagcccgagaatattctcctagactgccaggggcatgttgtgctgactgatttcggcctgtgcaaggagggagtggagcctgaagatacaacttccactttttgtggtaccccagaatatttggctcctgaagtcttgcgcaaagaaccttatgacagagctgttgattggtggtgtttgggtgctgtgctctatgagatgctccacggactgcctcccttctactcacaagacgtctctcagatgtatgagaatatcctacatcaaccactgcagatcccaggcggaagaacggttgccgcttgcgatctgctgcagtccctcctgcataaggatcagaggcagagactgggctctaaggcggacttccttgaaatcaagaaccacgtgttcttttcccctattaactgggacgatctgtaccataagcggctaacccctccttttaaccccaacgtcactggcccagccgacttaaagcatttcgatcctgagtttacacaggaagcagtgtcgaagtccatcggttgcactccggacacggttgcgtccagctccggagctagctcggccttcttgggcttttcatatgctcccgaagatgacgatattttagactgttag

SEQ ID NO: 240245 - DNA, 1104 bp, synthetic construct
  misc_feature 1..1104: note = Description of Artificial Sequence: Synthetic coding sequence
  source 1..1104: mol_type = other DNA
atgaatagctcacctgccggtacccctagccctcagccatctagagctaatgggaacattaatctgggaccctctgcaaacccaaacgcccagccaactgacttcgatttcctgaaagtgataggcaaaggcaactacggtaaagtgcttctcgcaaaacggaagagcgatggagctttctatgcagttaaagtgcttcagaaaaaatctatcctcaaaaagaaggaacagtcacacataatggccgagagatctgtgctgctgaaaaacgttagacacccattcctggtgggcctgagatactcttttcaaactcccgaaaaactgtactttgtcctcgattacgtcaatggtggtgaactgttctttcatctgcagcgcgaaagaagattcctcgagcctcgggctcgtttctacgccgctgaggttgcctccgctattgggtatctgcacagtctgaacatcatctatcgggatctaaaacctgaaaatatcttgcttgattgccaaggccatgtcgtgctcaccgattttggtctgtgcaaggagggtgtggagcccgaggacaccactagcaccttctgtggaacacccgaatacctagccccagaggtgctgagaaaggagccttacgaccgggctgttgactggtggtgtctaggtgccgtgctttacgagatgcttcatggcctccccccattctactctcaggacgtgtctcagatgtatgaaaacatacttcatcagccgctccagattcctggcggacgcaccgttgcagcttgtgacctactccagtctctgctgcacaaggaccagaggcagagactgggctcaaaggctgacttcttagagatcaaaaaccacgtcttcttctccccgatcaactgggatgatctatatcacaagcggctcaccccccctttcaatccgaatgtcaccggtccagcagacctcaaacattttgaccccgagttcacccaagaggcagtatctaagtcaatcggatgcacaccggatacagttgccagcagcagtggagcctcatcagcctttctgggattttcctatgcgccagaagacgacgacattctcgactgctag

SEQ ID NO: 240246 - DNA, 597 bp, synthetic construct
  misc_feature 1..597: note = Description of Artificial Sequence: Synthetic coding sequence
  source 1..597: mol_type = other DNA
atgaactcctccccagctggcacgccttcgccacagcccagcagagcaaatggcaacatcaatctgggacccagcgccaacccaaatgcccaaccaaccgactttgatttcctgaaagtcatcggcaaggggaactacgggaaggtcctactggccaagaggaagagcgatggtgccttttacgcagtcaaagtgttgcagaaaaagagcattctcaagaaaaaggagagccacatcatggccgagagaagcgttttactcaagaacgtgaggcatccattcctcgtcggcctcaggtactcattccaaacgcctgagaagctttatttcgtcctcgattacgtcaacggcggtgaactgtttttccacctgcagagggaaaggaggtttctggaaccaagagccagattttatgcggcagaagtggctagcgccatcggttacctccatagcctaaacatcatctatagagacttgaaacccgagaacatcctgctggactgccagggtcacgtggtcctgacagacttcgggctgtgtaaggagggcgtagaacccgaggacaccacctccacattttgtggtacgcctgagtag

SEQ ID NO: 240247 - DNA, 1104 bp, synthetic construct
  misc_feature 1..1104: note = Description of Artificial Sequence: Synthetic coding sequence
  source 1..1104: mol_type = other DNA
atgaactcttcacccgcaggcaccccatcaccacagcctagcagagccaatggaaacatcaacctcggaccctccgcgaatcccaacgcccaacccaccgatttcgattttttgaaagtcatcggtaagggcaattatggcaaagtcttgctcgccaaacgtaagagcgacggagccttttacgctgtgaaagtgttacaaaagaaatccatactcaaaaaaaaggagcagagccacatcatggcagagaggtcagtgttacttaaaaatgtccggcacccgtttttggtcgggctccgatattcgtttcagacaccagaaaaactgtattttgtgctggactacgtgaacggtggcgagctgttctttcatcttcagcgcgaaagacgcttcctggagcctagggcccgattttatgccgctgaggtggcctccgccataggatacctgcatagcctgaatatcatttatagggatctgaagcctgagaacattctgctggattgccagggccacgtagtccttactgatttcggactttgtaaggaaggggtggaaccagaggatactacgagtacattttgtggcaccccggaatatctggctcctgaagtcttgaggaaggagccatacgaccgcgctgtcgactggtggtgcttgggcgcagtcctgtacgaaatgttgcacgggctccctccgttctacagccaggatgtctcacagatgtatgagaatatcctccaccagcccctacagatccccggagggagaacagtcgctgcctgcgatctactgcagtctctgctacacaaggatcagcggcagaggttgggttctaaagcggattttttagaaatcaaaaaccatgtgtttttcagcccaatcaactgggatgatctataccacaagaggctgactccaccctttaaccccaacgtgacaggcccagcagatctaaaacactttgatcctgagtttacccaggaagccgtgtcaaaatctatcggttgcacccctgataccgtggcatccagcagcggagctagctcagccttcctagggttcagctacgcaccggaggacgatgacattctcgattgctag

SEQ ID NO: 240248 - DNA, 1182 bp, synthetic construct
  misc_feature 1..1182: note = Description of Artificial Sequence: Synthetic coding sequence
  source 1..1182: mol_type = other DNA
atgcagggcctcctgacatcaggaagaaagccctcgggtgggggtcgctgtactgagctcccggaccattgttatcgcatgaacagctctcctgcaggaacccctagccctcaaccttcccgggcaaacggcaatattaacctgggaccatccgccaatcctaacgcccagccgaccgacttcgacttcctgaaggtgatcggaaagggaaactacggaaaggtcctgttagccaaacggaagtctgatggcgcattttacgctgtaaaagtactgcagaagaagtctattctcaaaaagaaggaacagtcccatatcatggctgaacgctctgtcctgcttaagaatgtgagacacccctttctggtcggcttgagatactcatttcagaccccagaaaaattatatttcgttttggactacgtgaacgggggtgagttgtttttccatctgcaacgcgagaggcgtttcctcgagcccagagctagattctacgccgctgaggtcgccagtgccatcggatatctccattcccttaatataatatatagagacctgaagcccgagaacattctcctggactgccagggccacgtcgtcctaactgattttggcctttgcaaagagggagtggagccagaggatacaacctcgactttttgtggaacccctgaatacctcgcacctgaagtgctcaggaaggaaccgtacgacagagcagttgattggtggtgcctgggtgccgtcctttacgaaatgctccacggtttgccaccgttctacagccaggatgtcagtcagatgtatgagaatatccttcatcagccccttcaaatcccgggaggtcgaaccgtcgcggcttgcgacctgttgcagagcttacttcacaaagatcaaaggcagcgcctcggttcaaaagctgattttctcgaaatcaaaaatcacgtgttcttttcacctatcaattgggacgatctgtatcacaaacgcctcacgcccccattcaaccccaatgtcaccgggccagcagacctgaaacacttcgaccccgaatttacccaggaggccgtgtctaagtctatcggctgcactccagatacagtggcctcctcctcaggagcttcatccgcattcctcggctttagctacgcgccagaggacgatgatatattggactgttag

SEQ ID NO: 240249 - DNA, 1491 bp, synthetic construct
  misc_feature 1..1491: note = Description of Artificial Sequence: Synthetic coding sequence
  source 1..1491: mol_type = other DNA
atgcagcgggaccatacaatggattacaaagagtcatgtccgtccgtgtccatacctagctccgatgaacacagggaaaagaagaagagattcacagtgtataaggtgctggttagcgtaggcagaagcgaatggtttgtttttcgccgatatgcagagttcgataagctgtataacacgctgaagaagcagttccctgcaatggccctgaagatcccagcaaaaagaatatttggagataatttcgatcccgacttcattaaacagagaagagccggattgaacgagttcattcaaaacctagtccggtatcccgaactctacaatcatccggatgtgagagcctttttacagatggattctccaaagcaccagtcggacccaagcgaagacgaagatgagcgctcttcacagaagctgcattccacctctcagaacattaatctggggccttccggcaacccacacgccaaacccacggacttcgacttcctgaaggtgattggcaaggggtcctttggcaaagtgctcctagcaaagaggaaactggatggaaagttttacgcagttaaggtgctgcaaaaaaagattgtgcttaaccgtaaggagcaaaaacatattatggccgagcgcaatgtgctacttaagaacgtcaagcatccgtttttggtgggacttcactacagcttccaaactactgagaagctctacttcgtgctggacttcgtgaacggaggagagttatttttccacctgcagagggaaagatccttcccggagcaccgtgctcgcttctacgccgcagagatcgcctctgcattggggtaccttcacagtatcaaaatcgtctacagggatctgaaacccgagaacatcttgcttgacagtgtcggccatgtggtactgactgactttggactgtgcaaggaaggcattgctatttctgataccaccacaacattctgcggcacgcctgaatacctcgctcccgaggtgatccgaaaacagccctatgataacaccgtcgattggtggtgtctaggcgctgtgctctacgagatgctctatgggctgccacctttctactgcagagatgtggccgagatgtacgataatattttgcataaacctttgtcacttcgtccgggtgtgagcctgacggcttggtctattctcgaggagctgctcgaaaaggatagacaaaatcggttgggagctaaggaagattttctggagatccagaaccatccattctttgagtcactgtcgtgggccgaccttgttcagaagaaaatccccccacctttcaatccgaacgttgccggacccgatgatattcgcaacttcgacacggcatttactgaagaaactgtaccatatagcgtctgtgtgtccagcgactactctattgtgaacgcttccgtgctcgaagctgacgacgcattcgtcggattctcatatgcgccaccttcagaggacttgttcctgtag

SEQ ID NO: 240250 - DNA, 1491 bp, synthetic construct
  misc_feature 1..1491: note = Description of Artificial Sequence: Synthetic coding sequence
  source 1..1491: mol_type = other DNA
atgcaacgcgatcacactatggactataaggaatcctgtccctcggtcagtataccttcctctgatgagcaccgagagaagaaaaaaaggtttacagtctataaagtcctggtcagtgtggggagatctgagtggttcgtgttcagacgttacgctgaattcgataaactctataatacactgaagaaacaattccctgcaatggcccttaaaatcccggcaaagcggatttttggcgacaactttgacccagacttcatcaaacaacggagagctggattgaacgaattcatccagaatttggtgaggtaccccgaactgtataaccacccagacgtgagggcattccttcagatggattccccgaaacaccagtcggatcccagcgaagatgaggacgagaggagcagccagaagctgcactctacatcccagaacataaaccttgggccttcggggaatcctcacgcgaaaccaaccgacttcgactttctgaaggtcattggaaaggggtcttttgggaaggttttacttgccaaaagaaagctcgacgggaagttctacgcggttaaagttctacagaagaaaatagtgctcaacaggaaagagcaaaaacacattatggccgagagaaatgtcttgctcaagaacgtaaaacacccatttctcgtgggactccactattcttttcagaccactgagaagctctacttcgtccttgactttgtgaacggcggagagcttttttttcacctccagcgcgaacgcagttttcccgagcacagagcgcgtttttacgccgcagaaatcgcctccgccttaggttatctacactctatcaagatagtatatcgggatttgaagccagaaaacattctcttggatagtgtgggacacgtagtcctcactgattttgggctctgcaaggaaggcattgctatctcagatactacgaccacattctgtggaacacctgagtatctcgcccctgaggtgatacgaaagcaaccctacgataacaccgttgattggtggtgtttaggggctgttttgtatgaaatgctgtacggcttaccacctttctattgccgcgatgtcgctgagatgtacgataacattctgcataagccactgtcactacggcctggggtttctctaaccgcttggtctatcctcgaggaactgctcgaaaaggaccgccagaaccgcctgggtgccaaagaggatttcctggagattcagaatcatccgttcttcgaatctctctcctgggctgacttggtccagaagaagatccctcccccatttaaccccaatgtagctggccctgatgatatccgcaactttgacaccgcatttaccgaggagaccgtaccatactcagtttgtgtgtccagtgattactcaatcgtgaacgcaagcgtgctcgaagcagacgacgccttcgtgggcttctcctacgccccaccgtcagaggacctgttcctgtag

SEQ ID NO: 240251 - DNA, 1491 bp, synthetic construct
  misc_feature 1..1491: note = Description of Artificial Sequence: Synthetic coding sequence
  source 1..1491: mol_type = other DNA
atgcagagagaccacactatggactacaaggagtcttgtccatcggtgagtattcccagtagcgatgaacatagagaaaagaaaaagcgctttaccgtgtataaagtgctagtgtcagtcggcagaagtgagtggttcgttttccgtagatacgcagaatttgacaaactgtataacacgctgaaaaagcagttccccgctatggcccttaagattcctgccaagcggatattcggagataacttcgaccctgatttcattaaacagcgaagagccggtctgaacgaattcatccagaacctcgtccgttaccccgaactgtacaaccatcccgatgttcgagcattcctgcagatggactctccaaaacatcagtctgatcccagtgaggatgaggacgaaagatcaagccagaaactccatagtactagccagaatatcaatctgggaccatcgggcaacccgcatgccaaacctactgactttgacttccttaaggtgatcggcaagggcagtttcggtaaagtcctcttggccaagcggaagctggacggaaagttctacgccgtgaaggtcctccagaagaaaatcgtccttaacagaaaagagcaaaaacacattatggccgaaaggaacgtgctcctaaaaaacgtcaagcacccttttttggttggattgcactattcattccagaccaccgagaagctatacttcgtgttggatttcgttaacggaggagagttattcttccatttgcaacgcgaaagatccttcccagaacatcgagcccgtttctacgcagccgagattgcttcggccttgggttatttgcactcaattaagatagtgtacagggatctgaagcccgagaacatcttattggacagcgttggacacgtcgttctgactgactttggcctgtgtaaggaaggcatagccatatcagatacaactacaactttctgcggcaccccagagtatctcgctcctgaggtgatacgaaaacaaccctacgacaacacagtggactggtggtgccttggagccgtgctgtatgagatgctgtacggcctgcccccattctactgccgcgatgttgcggagatgtacgataatattttgcacaaacccttgagccttcggcctggcgtatccctaactgcctggtccatcctagaggaacttttggagaaagacaggcagaacaggctcggggcaaaagaggacttcctcgagatacaaaaccatcccttttttgaatctctgagttgggccgacctggtccagaagaaaatccccccaccgttcaatcctaacgttgccggaccagacgatattaggaactttgacactgccttcactgaagagacagtcccctattccgtctgcgtatcaagtgactactccatcgtcaacgcctcggtgctagaggcagacgatgctttcgtcggtttctcatacgctcccccatctgaggacctttttctttag

SEQ ID NO: 240252 - DNA, 1491 bp, synthetic construct
  misc_feature 1..1491: note = Description of Artificial Sequence: Synthetic coding sequence
  source 1..1491: mol_type = other DNA
atgcagcgtgaccatactatggattataaggagtcatgtccctctgtttcgattccctcctccgatgaacacagggagaagaaaaaacgctttaccgtctataaagtattagtgagcgttggaagaagcgaatggtttgtatttcgtcgctatgccgaatttgataagttgtataacaccctcaaaaaacaattccctgctatggccctgaaaatcccagctaaaaggatcttcggggacaactttgatccagactttatcaagcagagaagagctgggttgaatgaattcattcagaatctcgtcaggtaccccgagctgtacaaccaccctgatgtaagagccttcctacagatggacagtcctaagcaccagagtgatccgagcgaggacgaggatgaaaggtctagccagaagctacactctacgagccagaatattaacctaggccctagcggcaatccccacgccaagccaacagactttgactttctgaaggttattggaaaggggagttttgggaaagtgctgttggccaaaagaaaactcgacggaaaattttatgccgtgaaggttctacagaaaaaaatcgtgctgaataggaaagaacagaagcatatcatggccgaaaggaatgtgctgttaaagaatgtgaagcatccctttctcgtcgggttgcactacagcttccagactacggagaagctttattttgtgctggattttgtaaatggtggggagctgttcttccacttacaacgcgaaaggtcttttcctgagcaccgagcgaggttctacgcagccgaaatcgcatctgctcttggatatctccacagcattaaaatcgtctatcgagatctgaaacccgaaaacatcctcttagattctgtgggtcacgtggtcctcacagactttggtctgtgcaaagagggcatcgcaatctccgataccacaactaccttttgcggaactcctgagtacttggctcctgaggtcatcagaaaacaaccttacgacaataccgtggactggtggtgtctgggagccgtgctatatgagatgttgtatggattgccaccgttctactgtagggatgttgcagagatgtacgacaacattctccacaaacccctgtctctgaggcccggtgtcagtctaactgcgtggtccattcttgaggagctgttagagaaggatcgccagaaccgactgggtgcaaaagaggacttccttgaaattcagaatcaccccttctttgaaagcctcagttgggccgacctggtccaaaaaaagatccctccaccgttcaaccctaacgtggcaggacccgacgacatccggaacttcgatactgcctttactgaggaaaccgtgccttattccgtttgcgtctcttccgattactcaattgtgaatgcctcagtcctggaggccgatgacgcatttgtcggtttttcatatgcaccccctagcgaggatctgtttctgtag

SEQ ID NO: 240253 - DNA, 1395 bp, synthetic construct
  misc_feature 1..1395: note = Description of Artificial Sequence: Synthetic coding sequence
  source 1..1395: mol_type = other DNA
atgcaacgagaccacaccatggattacaaagagagctgtccctcagtgagtatccccagctcagatgagcatcgtgagaagaaaaaacgttttaccgtctacaaagttctggtgagcgtcggaagatcggagtggttcgtttttcggaggtatgccgagttcgataagctctataataccctgaagaagcagttccctgcaatggccctcaagatccccgctaagcgaatctttggggacaactttgacccggactttatcaagcagcgcagggccggtctcaacgagtttatacaaaatctcgtgagatacccagagttgtacaaccacccagacgtgcgagccttcctccagatggacagccccaaacaccaatctgatccctccgaagacgaagacgagaggagtagccagaaattgcattctacatctcaaaatattaacctgggaccaagcgggaatccccatgctaaacctacagactttgatttcctcaaggtaatcgggaaaggatctttcggaaaagtattactggcaaagcgcaagctagacgggaagttctatgcagtaaaagtactccagaaaaagatcgttttgaatcgcaaagagcagaagcacatcatggctgaacggaatgtcctattgaaaaatgtcaaacaccctttcttagtaggcctgcattattcctttcagaccaccgaaaagctgtattttgtgctggatttcgtgaacggaggtgaactgttctttcacctacaacgagaaagatcttttcctgagcaccgggctcgattctacgccgcagagattgccagcgcactgggttatctgcactcaattaagatcgtgtacagagaccttaaacccgaaaatatactgctcgattctgtcggtcatgtggtcctgaccgactttggcctgtgcaaggaagggatagcgatctcagacaccaccaccacattttgcgggacccctgagcctccgttttattgccgcgacgtggccgagatgtacgataacattctgcataaaccattgtcgctgcggcctggagtgtctctgactgcctggtcaatactggaggagctcctggagaaggaccgacagaaccgacttggtgctaaggaggacttcctcgagattcagaatcaccctttcttcgagagtcttagttgggcggatctggtccagaagaagattcctcccccttttaacccaaatgtggccggtcctgatgacatcagaaacttcgatacagctttcacagaagaaacggtgccttacagtgtatgcgttagcagcgattacagcatagtgaatgcttccgtcctggaagctgacgatgcgttcgttggctttagctacgcaccgccatcagaagatctttttctgtag

SEQ ID NO: 240254 - DNA, 1491 bp, synthetic construct
  misc_feature 1..1491: note = Description of Artificial Sequence: Synthetic coding sequence
  source 1..1491: mol_type = other DNA
atgcagagagatcatactatggactacaaagagtcgtgccccagcgtttcaatacccagctcagatgaacaccgcgagaaaaagaagagatttacagtgtataaagtgctggtctcagtgggcagaagcgaatggttcgtgtttcgcagatatgccgagttcgataagctgtacaacacgctaaaaaagcagttccctgccatggctctcaagatccctgccaaaagaatttttggcgacaatttcgaccccgattttattaaacagaggagagcaggcctgaatgagttcattcagaatctggtccgctacccagaattgtataatcatcctgacgttagggcttttttgcagatggacagccccaaacaccagagcgatcctagcgaagatgaggacgagagatccagccagaagctacacagtacttcacagaacattaacctgggcccttcaggcaatcctcatgccaaacctaccgacttcgactttctcaaggtgataggtaagggcagcttcgggaaggtccttcttgcaaagaggaagctcgacgggaagttttatgcggtcaaggttctccagaagaagattgtccttaaccggaaggagcagaagcacatcatggctgagaggaatgtgctgctaaagaatgttaaacatccgtttctggtggggctccactactcatttcaaacgacagaaaaactctattttgtactagacttcgtgaacggcggagaattgttctttcacttacaaagggagcgttccttcccagagcatcgagcgagattttacgcggcagaaatcgcatcagctctgggctacttacattctattaaaattgtgtatcgtgatttgaaaccggagaatatcctcttagatagcgttggccatgtggtactgactgattttggcctctgtaaggagggaattgccattagcgacacgacaacaacattttgcggaacaccggaatatctcgcaccagaagtgataaggaagcaaccctacgacaacaccgtagattggtggtgtctgggagcagtgctatacgagatgctttatgggctgcctcctttctactgccgagatgtggccgagatgtacgataatatcctgcacaaacccctgagcctgaggccgggagtctctcttaccgcttggagcatcctggaagagctcttagagaaagataggcagaatcggcttggcgctaaagaggatttcttggagattcagaaccatcccttcttcgaatcccttagctgggcagatctagtgcagaagaagatccccccaccctttaatcctaacgtggctggccctgacgatatacgcaattttgataccgcgtttaccgaggagacggtgccctactcagtttgtgtctcctcagattacagtattgtcaatgcgtcggtactcgaggccgatgacgcattcgtcggattctcctacgctcctccaagtgaggacctctttttgtag

SEQ ID NO: 240255 - DNA, 1491 bp, synthetic construct
  misc_feature 1..1491: note = Description of Artificial Sequence: Synthetic coding sequence
  source 1..1491: mol_type = other DNA
atgcagagagaccacactatggattataaagagagctgtccttctgtgagcatcccttccagcgatgagcaccgggagaagaaaaagagattcactgtctataaggtgctcgtaagcgttggtagaagcgagtggttcgtttttagaaggtatgctgagtttgataagctctacaatacattaaaaaagcaatttcctgctatggcattgaagatcccggctaaacggatcttcggggacaacttcgatcccgacttcattaagcagcggcgagcagggttaaatgagtttatccagaaccttgtgagataccctgagctatataatcatccagacgtcagggccttcttacagatggatagccccaagcaccagagcgacccaagtgaggatgaagatgaaaggagttcacaaaagctgcactccacgagccagaacatcaatttaggccctagcgggaacccacatgccaaacccactgattttgacttccttaaagtcataggcaaaggatctttcgggaaggtgctgctggccaagcgaaagctggacggaaagttctacgctgtgaaagtgcttcagaaaaaaatagtactgaacaggaaggaacagaagcatattatggccgagagaaacgttttactcaagaatgtcaagcaccctttcctggttgggctccattactcatttcagacaaccgagaagctatacttcgtattagactttgtcaatggcggtgagctgtttttccatctgcaacgtgaaagaagttttccagagcatagggccaggttctacgccgctgagattgcttcagccttgggatacctgcattctattaagatcgtttatcgtgacctgaagcctgagaatattcttctggatagtgttggtcatgtggtgctcacagatttcgggctttgcaaggaaggaatagcaatttcagacacaacgaccacgttctgcggcactccagagtaccttgcgcctgaagtgatacggaaacaaccatatgataatactgttgattggtggtgtcttggagccgtcctctatgagatgctgtatgggctgcctccattctactgtcgcgacgtggccgaaatgtatgataatatcctgcacaaacctttgtccttacgccctggcgtatctctgacagcctggtctatacttgaggagctactcgagaaagaccgccaaaacaggctgggggcaaaggaagacttcctggaaattcagaatcatccttttttcgagagcctgtcatgggctgacctggttcagaaaaaaatacctcccccattcaacccaaacgtggctggccctgatgatattcggaattttgacacagcctttactgaggagacagtcccgtatagcgtgtgcgtatcgtccgactactctatagtcaacgcctctgtgctagaagccgacgacgccttcgttggtttttcttatgctcccccatcggaggatctctttttgtag

SEQ ID NO: 240256 - DNA, 1725 bp, synthetic construct
  misc_feature 1..1725: note = Description of Artificial Sequence: Synthetic coding sequence
  source 1..1725: mol_type = other DNA
atggaggcttctctgggcattcagatggacgagccaatggccttctctccgcagagagacagattccaggccgaagggtccttaaagaaaaacgagcagaatttcaaacttgcaggggtcaagaaagatatcgagaaactgtacgaagccgtgccccaattatccaacgtttttaagatcgaggataagataggagagggtacattttccagcgtgtatctggccaccgctcagctgcaggtcggccctgaagagaaaatcgccttgaagcatctaatccctacaagccacccaataagaattgcagcagaattacagtgccttacggtggccggtggacaagacaacgtgatgggagtgaaatattgtttccgcaaaaacgaccacgttgtcatcgcaatgccatatttggaacacgagtctttcttggacatcttgaacagcctgtcatttcaggaagtgagggagtatatgctgaacctttttaaagcactgaagcgtatccaccagttcggaattgtacatcgagacgtgaagccctccaattttctgtacaatagaaggctgaagaaatacgccctcgtggatttcgggctcgcacagggcacacatgatacaaaaattgaattgctgaaatttgttcagagcgaagcacagcaagaaagatgtagccagaacaagagccatataatcacaggaaacaaaatcccacttagcggcccagtgccaaaggagttagatcagcagagcactaccaaggcctctgtcaaaagaccgtacaccaacgctcaaatacagatcaagcagggcaaggacggaaaagaaggtagcgtaggtctgagtgtgcaacgcagcgtgttcggtgaaaggaatttcaacatacactccagtatatctcatgagtcacctgcagtgaaattaatgaagcaaagcaagaccgtcgacgttttgagtcggaaacttgccaccaaaaagaaagctatatcaacaaaagtgatgaacagcgctgtcatgagaaaaacggcatcatcttgtcccgcatcactcacctgcgattgttatgcaaccgataaggtctgctcaatttgtctctctaggcgccagcaggtggctccacgcgctggaacgccaggcttcagggccccagaggtactgactaaatgccctaaccagactacggctattgatatgtggtctgcaggtgtgatttttttgtctctcctttcaggccgttacccattttacaaggcctccgatgaccttaccgccctggctcagatcatgacaatccgtggctcacgcgagaccatccaggccgctaagacctttggaaagtccatcttgtgcagcaaagaggtgcccgctcaggatctgcgcaagttatgcgaacgtctacggggaatggactctagcacccccaagctcacctccgatattcaggggcatgcatcccatcagccagcaatctcagaaaagaccgaccacaaggcctcttgcctcgtacagaccccacctgggcagtatagcggcaattcattcaaaaagggagatagcaactcctgcgaacactgcttcgacgagtacaacaccaacctcgagggatggaatgaagttcctgatgaggcctacgatctcctagataaattgctcgatttgaatcccgctagcaggatcactgcagaggaggcactattgcaccctttctttaaagatatgagcttgtag

SEQ ID NO: 240257 - DNA, 1611 bp, synthetic construct
  misc_feature 1..1611: note = Description of Artificial Sequence: Synthetic coding sequence
  source 1..1611: mol_type = other DNA
atggttctggatcttgacctcttcagagttgataaaggcggtgacccggctctgatccgtgagacccaggagaagcgatttaaagaccctggattggtggaccagctggttaaggccgactctgaatggaggcgctgtagattcagggccgacaacttgaacaagcttaagaatttgtgttctaaaactatcggagaaaaaatgaaaaagaaagagcctgtcggggacgacgaatcagtccccgagaacgtcttgagtttcgatgatttgacagccgacgccctggctaacctcaaggtgtcgcagataaagaaggttcggctcctcatagatgaagcaattttaaagtgcgatgcagaacggattaagctagaggctgagcggttcgagaatcttcgtgagattggcaatctattgcatccctccgtccccatcagcaatgacgaagacgtggacaacaaagttgaacgaatatggggggactgcactgtgcgcaaaaagtacagccatgtggacttggtcgtcatggtcgacggattcgaaggggagaaaggggcagtggttgcaggtagccgcggatatttcctgaaaggagtgctggtcttcctggagcaagcccttatacagtacgctctgcggacactgggatcacggggttacataccaatctacacaccattcttcatgagaaaagaggtgatgcaggaagttgcgcagctgtcccagtttgacgaggagctttataaggtcattggaaaaggttccgagaaatccgacgataattcctatgatgagaagtatctaatagccactagcgaacaacccatcgctgcattgcacagagacgagtggctacggccagaggatctgccaattaagtacgccggattaagtacttgttttcgtcaggaagtggggtcacacggtcgtgacacccgaggcatattccgagtgcatcaatttgagaagattgaacagttcgtgtatagtagtccacatgataataaaagctgggagatgttcgaagagatgatcactacagcagaagagttttaccagtcactcggaatcccttaccacattgtcaatatagtgtcgggcagcctgaaccacgccgctagcaaaaaactggacctcgaggcctggtttcctggatcaggcgcattcagggaactggtttcttgcagtaattgtaccgactatcaggcccgtaggctgcgaattagatatggtcagactaagaagatgatggataaacggaaaaataaccttcacctcagcacacaaaacaaactggaagccagcctgttcagccccaaaaaggtggaattcgtgcacatgctcaatgctaccatgtgcgctactacccgtaccatttgcgctatactggagaattaccaaaccgaaaagggcatcaccgtccccgagaagctgaaagagttcatgcccccagggttgcaagagctcatcccattcgttaagccagcccctatcgaacaggaacccagcaagaaacagaagaagcagcatgaaggttccaaaaagaaggcagcagccagggacgtcaccttggaaaacagactccagaatatggaggtaacagacgcttag

SEQ ID NO: 240258 - DNA, 1563 bp, synthetic construct
  misc_feature 1..1563: note = Description of Artificial Sequence: Synthetic coding sequence
  source 1..1563: mol_type = other DNA
atggcagcctcaatggctagacgtctctggcctctcctgacccgcaggggatttcgaccaaggggtggatgtattagtaacgattctccacggaggtctttcactacagagaagcgcaaccggaatctcctctacgaatacgctcgcgagggctactccgccttgcctcagctggatatagaaaggttttgcgcctgccccgaggaggcggctcatgccctggaattgcgcaaaggcgaactgcgttctgctgacctccccgcaattattagtacatggcaggagctcaggcagttgcaagagcaaatccgctccttggaagaggaaaaggccgcagtgactgaggccgtgcgcgcattgctggccaatcaggattccggcgaggtgcaacaggttagactggaccccggtgctggcagtatttttgggccaacattcttgcctttccctggtcagctaagcctgctggtggaagcccaactggaggagcagttttatctgcaggcactcaagcttcccaatcagacacaccctgacgttcccgtaggggacgagagccaggctcgcgtgctgcatatggttggcgataagcccgtattctctttccagccgaggggtcacctggagattggagagaagctggatatcatccgccagaaacggttgtcacacgtgtctggccatagaagctattacctgcgaggagctggcgctctgctccagcatggactagtgaatttcacttttaacaaactactgagacggggtttcactcccatgacagttccggacctgcttcgtggcgctgtctttgaggggtgcggtatgacccccaatgcaaacccctcccagatttacaacatagatcccgcacgcttcaaggacctaaatctagcgggaactgctgaagttggtctcgccggatacttcatggatcatacggttgcgtttcgcgaccttcccgtgaggatggtgtgcagttctacgtgttatcgggcagaaactaacacaggacaggagcctcgtggcctttaccgggtgcatcactttaccaaggtggagatgtttggggttaccggcccaggtctcgaacagagcagtcagttgctcgaggaattcctgtcacttcagatggagatactgacggagctgggtcttcacttcagagtacttgacatgccaactcaggagttgggtctcccagcttacagaaagtttgatattgaggcctggatgccaggaaggggacggtttggagaagttactagcgcgagcaattgtacagattttcaatctaggcgattgcatatcatgtttcagaccgaggcgggagaactgcaattcgctcacacagtgaacgccacagcttgcgcagtgcccaggctcctaatcgctctgctcgagagtaaccagcagaaggacggaagtgtgctcgtacccccagccctccaatcatatctgggcactgaccggatcactgcccctactcatgttcctctccagtacatcggacctaaccagcctcgaaaacctgggctgcccggacagcctgcagtgagttag

SEQ ID NO: 240259 - DNA, 426 bp, synthetic construct
  misc_feature 1..426: note = Description of Artificial Sequence: Synthetic coding sequence
  source 1..426: mol_type = other DNA
atggagatgctgcagggcctccttctccttctgttgttgagtatgggaggggcatgggcgtcccgggagcctctgcgtccttggtgtcaccccattaatgcaatactggcagttgagaaggagggttgcccagtgtgcattacggttaacaccacaatatgcgcagggtactgccccaccatgatgagggtattgcaagccgttctgcctcccctgccacaagttgtttgtacgtaccgcgatgtgcggttcgagtctatccgcctacctggttgccccaggggagtagacccggttgtttcctttcccgttgcgctctcttgcaggtgtgggccatgcaggaggtcgacttcagactgcggtggacctaaagatcacccactcacatgtgaccacccccagctttccggtcttctgttcctctag

SEQ ID NO: 240260 - DNA, 837 bp, synthetic construct
  misc_feature 1..837: note = Description of Artificial Sequence: Synthetic coding sequence
  source 1..837: mol_type = other DNA
atgggggcacgccttagtagacgccgactgccggctgatccttccttggcccttgatgcgctgcccccagaactgctggtccaagtgcttagccatgtgcccccacgttctctggtgactcggtgccgtccagtttgcagagcatggagagacattgtggatgggccaaccgtgtggttgttgcagctcgcccgtgaccgcagcgccgaaggcagggccctgtatgccgtggcacagagatgccttcccagtaatgaagacaaggaggaattccctttatgtgctctggctagatattgtttgcgagcgccattcggtaggaacctgatcttcaactcgtgcggcgaacagggctttagaggctgggaagtagagcacggtggaaatggctgggcgattgaaaagaatttgacacctgtgcctggtgcgccttctcagacttgtttcgtcacttctttcgagtggtgctcaaaaagacagcttgtggatctggttatggaaggggtgtggcaggagctgcttgattctgctcaaatcgaaatctgtgtcgccgattggtggggagctcgtgagaactgtggctgcgtttatcaactgagggtacggttactggacgtatacgaaaaggaggttgttaagttctctgcatcccccgatccggtacttcagtggaccgagcggggttgccgtcaggtgtctcatgtgttcacgaactttggtaaaggtatcagatacgtgagtttcgaacagtacggccgagacgtgtcttcttgggtcgggcattacggcgcactggttacccacagtagcgttagagtacggataagactgtcctag

SEQ ID NO: 240261 - DNA, 864 bp, synthetic construct
  misc_feature 1..864: note = Description of Artificial Sequence: Synthetic coding sequence
  source 1..864: mol_type = other DNA
tttaagcaggggctgtggttgctggagatgggcgcaagactcagccgccgacgcctccccgcagacccctctttagctcttgacgccctacctcctgaactgctcgtccaggtccttagccacgttccccctcgctcattggtgacccggtgtcggcctgtgtgccgtgcttggcgcgatatcgtcgacggccctacagtttggctgttgcagctggcaagagatcgtagtgccgaggggagagccttgtacgccgtggctcagagatgtcttccatccaatgaagataaagaagaatttcctctgtgcgcacttgcacgctactgcctccgtgccccattcggacggaaccttatctttaacagctgtggcgaacagggcttcaggggttgggaggttgaacatgggggtaatggctgggctattgaaaaaaacctcacccctgtgccaggggcacccagccagacttgtttcgttacaagtttcgagtggtgcagcaagagacagttggtcgatcttgttatggagggcgtctggcaagagcttctggactccgcccagattgaaatctgcgtggcagactggtggggggcacgagaaaattgtggttgtgtttaccagcttcgggtccgtcttctcgatgtgtacgagaaagaagtcgtgaaattttcagcaagtccagaccctgtgctgcagtggacagaaagaggctgccggcaggtctctcatgtgttcacgaatttcggcaaaggtatcaggtatgtgagctttgaacagtacggcagggatgtgagctcttgggtgggacattatggggcactcgtgacacattcttctgtgcgcgtcagaattaggctaagttag

SEQ ID NO: 240262 - DNA, 1563 bp, synthetic construct
  misc_feature 1..1563: note = Description of Artificial Sequence: Synthetic coding sequence
  source 1..1563: mol_type = other DNA
atggccgcttcaatggctcgacgcctgtggcccctgctaacccgtcgcggattcaggccaaggggtggttgcataagcaacgactcccctaggcgcagctttacgacagagaaacggaacaggaacttgctttacgaatatgcacgtgaaggctatagtgccctgccccagcttgacattgaaagattctgcgcctgccccgaagaagccgcacacgccctggaactccggaagggagaactcagatcagcggatctgcccgctattatcagtacttggcaggaattgaggcagctgcaagagcaaattcgttcgctcgaggaggagaaagctgcagtgaccgaagcagtcagggccctgcttgccaaccaggattcaggagaggtccagcaggttaggctggaccctggcgctggatctattttcgggccaactttcctccccttccccggtcagcttagcctccttgtggaggcccagctggaggagcagttctacctgcaggctttgaagctgccaaatcagacgcacccagacgtccccgtgggagacgagagtcaagcaagagtccttcatatggttggggacaagccagtattctccttccaaccacgcggacacctcgagatcggagagaaactggacatcattcgacagaagagactgtcacacgtgagtggtcatcgatcttattatctgcgaggagcaggtgcactcctacagcacggcttggtgaacttcacgtttaacaaactgttaaggcggggattcacacccatgacagtgcccgacttgctgaggggtgctgttttcgagggttgcggaatgaccccaaacgctaacccctcgcagatatataacattgaccccgcacgattcaaagacctgaaccttgctggtacagctgaggtcggcctcgctgggtacttcatggatcatacggtcgcctttagagacctgccagtacgcatggtttgttcctccacatgctatcgcgctgaaaccaataccgggcaggagccacggggtctataccgagttcaccactttactaaggtggagatgtttggcgtgactggccctggcctggaacaatcctctcagctgctggaggagttcctctctctacagatggagattctgactgagctggggctccactttagggtcctcgacatgcccacgcaggaattggggctgccggcttaccgtaagtttgacatcgaggcgtggatgcctggtcgtggacggttcggggaggttaccagcgcctcaaactgtacagactttcagagccgtcggctccacatcatgtttcagaccgaggccggtgagctgcagttcgcccatacagttaacgccactgcctgcgcggtcccacgccttctcatcgcattgctggagagcaaccagcagaaggatggctctgtgctggtgcccccagcgctgcagtcttatctcgggacagaccggattactgcgcctacccacgtccccctgcaatatatcggacccaaccaacctagaaaacccggtctgcctggtcagcccgctgtgagctag

SEQ ID NO: 240263 - DNA, 1557 bp, synthetic construct
  misc_feature 1..1557: note = Description of Artificial Sequence: Synthetic coding sequence
  source 1..1557: mol_type = other DNA
atggagggtgtgtggcaagagctgctagactccgcccagattgagatctgtgtggcagactggtggggcgctcgggagaattgcgggtgcgtgtaccagctgagggttcgtctgctcgatgtttatgagaaggaggtcgtgaagttctcagcctctcccgaccctgtactgcaatggaccgaacgaggatgtaggcaggtaagccacgtattcaccaacttcgggaaaggaatccgctacgtgtccttcgagcagtacggcagagacatttccacttggcaggaactcaggcagctgcaagaacagattcgatccctcgaagaagagaaggccgctgtgacggaggctgtgcgcgcattgctggcgaatcaggattccggcgaagtccagcaggacccaaaatatcagggcctaagggccagaggcagagaaattagaaaagagcttgtccacttgtacccccgtgaggcccagctggaagagcaattctatctgcaggctctcaagctgccaaaccagactcacccggatgtccctgtaggggacgaatcccaggctagagttctccatatggttggagataagcccgtattttcatttcaacctcgcggtcacctcgaaatcggagaaaaactagacatcattaggcagaaaaggctcagtcatgtgtccggtcataggtcgtactatctgaggggtgcaggcgcactccttcagcacggtctggtgaatttcacctttaataagctgctccgtaggggatttacaccaatgacagtgcccgatctgctgcgaggcgcagtcttcgagggatgcggaatgacacccaatgctaacccctcccaaatttataacatcgaccccgcaagatttaaggatctgaatctggctgggacagcggaggtcggcctcgctggctactttatggaccacaccgtggcatttagagatctcccagtgcgcatggtatgctcctccacctgttatcgggcagagaccaataccggacaggagcctcgtggcctatacagggtccatcatttcaccaaggttgagatgtttggagtgactggccctggactcgaacagtcctcgcaactgcttgaggagttcttgagtttgcagatggagatcctgactgaacttggccttcactttcgggtccttgacatgcctactcaggaactcggactgccagcctaccgcaagttcgacatcgaggcctggatgcccggtcgagggagatttggggaggtgacatccgcgtcaaattgtactgactttcagagcaggaggctgcatattatgtttcagacagaggccggtgagctgcagtttgcccacaccgtgaatgccacagcatgtgccgttcccaggttattgatcgcactgctggagtcaaaccaacagaaagacggcagtgttttggttccccctgctctgcaatcttacttgggcaccgaccgaattacagcacccacccacgtacctttgcaatatatcgggccaaaccaacctcgcaaacctggactgcctggacagcctgctgtcagctag

SEQ ID NO: 240264 - DNA, 711 bp, synthetic construct
  misc_feature 1..711: note = Description of Artificial Sequence: Synthetic coding sequence
  source 1..711: mol_type = other DNA
atggctgcctctatggcgagacggctttggccactcctgactcgcaggggttttagaccaaggggagggtgtataagtaatgatagcccccgtagatcattcactaccgagaagcgcaaccgcaaccttctctatgagtatgctagagagggatattcagctctgccgcagctggatattgagaggttctgtgcatgtcctgaggaggctgcgcacgccctggaactgcgcaagggagaattgaggtctgctgaccttcccgctatcatctcgacatggcaggaactgcgccagctccaggagcagattaggagcttggaggaggagaaagccgctgtgaccgaggccgttagagcactgttagccaatcaggactcaggggaagttcagcaggacccaaagtatcagggcctgcgcgcacggggtagggagatccgcaaagagctggtgcatctttatccacgcgaggcccagctggaggaacaattctatctgcaggccctgaaattgcccaaccagacccatcccgacgttccggtgggcgatgagagccaggctcgtgtgcttcatatggtaggagataagcctggagcttgcccgacttgcttggccaccggtcccatcacgtgtgcaggcctagagccttcctgttccactgcatggtctaccagccactccacatccttctccgcaggcgcttccccaccttag

SEQ ID NO: 240265 - DNA, 1281 bp, synthetic construct
  misc_feature 1..1281: note = Description of Artificial Sequence: Synthetic coding sequence
  source 1..1281: mol_type = other DNA
atgcatgctctttttgcagactctttcgcggcacttggcaggctggataacattacactggtcatggtcttccacccccagtatctggagtccttcctcaaaacacaacattaccttttgcagatggatgggcctttgccactccactatcggcactacataggaatcatggccgctgctcggcaccagtgctcttatctggtcaatttgcacgttaacgatttcctgcacgtgggaggggacccaaaatggctgaacggtctggagaatgctccccaaaagttgcagaacctgggtgagttaaacaaagtacttgctcacagaccatggctcatcaccaaggagcatattgagggcttgctgaaggctgaggagcattcatggagcctcgccgagctggtgcatgcagttgtgctgctgacacactaccatagtctcgccagctttacatttgggtgcggaatttcccctgaaatacactgtgacggtggacacacctttcggccaccatccgtgagtaattactgcatttgcgacataactaacggaaatcatagcgtggatgagatgccggtaaattcagcagagaacgtgtccgtatctgattctttctttgaagtggaggccttaatggagaagatgagacagctccaggagtgccgggatgaggaagaagcctcgcaagaagagatggcttctaggttcgagattgagaaacgcgaaagcatgttcgtcttcagttccgatgacgaggaagtcactcccgcacgggctgttagtagacacttcgaggacacgtcatatggctacaaggatttttcaaggcacggcatgcatgttcctaccttccgcgtccaggattactgttgggaagatcacggctacagtctggtaaatcgcctgtatcccgatgtgggacaactgattgacgagaaattccatatagcttataacctaacttacaataccatggccatgcacaaggacgttgacacttcaatgctgcggagagcaatttggaactacatccattgtatgttcgggataagatatgacgattacgattacggtgagatcaatcagttgctagaccgctcctttaaagtgtatatcaagacagtggtttgtaccccagagaaggtgacgaaacggatgtacgattcgttttggcggcaattcaagcacagcgaaaaagtgcacgttaacctactcttgattgaggccagaatgcaggctgaactcctctatgcactccgcgctatcaccagatacatgacctag

SEQ ID NO: 240266 - DNA, 1479 bp, synthetic construct
  misc_feature 1..1479: note = Description of Artificial Sequence: Synthetic coding sequence
  source 1..1479: mol_type = other DNA
atgaggctggccgctgcggcaaacgaagcatatacagccccactggccgtgagcggactgctgggttgcaagcagtgcggcggtggtagggatcaagatgaggagcttggcatacgcatccctagaccactgggacagggccctagtaggtttatcccggaaaaagagattctacaggtggggtctgaggacgcccagatgcacgctttgttcgccgacagttttgctgccctcggccgattagataacatcacattggttatggtattccacccacagtatctcgaatcattcctgaaaacccaacactacctcctgcagatggatggccctctacccctgcactaccgtcattatataggtatcatggcggcagcaagacaccaatgttcataccttgtgaaccttcatgtgaacgattttttgcacgtgggcggagatccaaagtggcttaacggactcgagaatgccccacaaaaactgcagaacctaggcgagctgaataaggtgctagctcataggccatggttgatcactaaagaacacatcgaaggattactgaaggcggaggagcatagctggagcttagcagaactggttcatgccgtcgtccttttgacacactatcattctctggcatcctttacttttggctgcggaattagcccggagattcattgtgatggcggacacacattcagaccaccatctgtgtccaattactgtatttgcgacatcaccaacgggaaccattccgtggatgagatgccagtgaactctgcagagaacgtatctgtatctgactcattctttgaggtagaggcattgatggaaaaaatgcggcagttgcaagagtgtagagatgaggaggaggcgagccaggaagagatggcatccagatttgaaatcgagaaacgagaatccatgttcgtgttctccagtgatgacgaggaggtgactccggctagggcagtcagccggcattttgaagacactagttatggttataaagacttcagtaggcacggcatgcatgtgcccaccttcagagtccaggattactgctgggaggaccacggatattctctggtgaaccgactctatcctgacgtcggccaattgatagacgaaaagttccacatagcctataatctgacctacaacacaatggctatgcataaggatgtcgacacatccatgcttaggcgagccatctggaactatatccactgcatgtttggcattagatacgacgattatgactatggggagatcaaccagcttttggatcggagtttcaaggtctacatcaaaacagtggtgtgcacccccgagaaggtgaccaagcgtatgtacgacagcttctggagacagtttaagcattctgagaaggtccacgtgaatcttctcctgattgaggctagaatgcaagccgaactgctgtatgcactgcgtgccattacaagatatatgacatag

SEQ ID NO: 240267 - DNA, 1656 bp, synthetic construct
  misc_feature 1..1656: note = Description of Artificial Sequence: Synthetic coding sequence
  source 1..1656: mol_type = other DNA
atggctgaaggggagaacgaggtgagatgggatgggctgtgctccagagattccacgactcgagaaactgctctagaaaatatcagacagactatactccggaaaacagagtacctgagaagcgtgaaggaaaccccccatagacccagcgatggcctgagcaacactgaatcttccgacggtcttaataagctattagcccatctgctgatgctgagtaaacgatgcccttttaaggatgtgagggagaaatctgaatttatcctgaaatctatccaggagttaggcatccgtatccccaggccccttgggcagggcccatctcgtttcataccagaaaaggagatccttcaggttggctctgaggatgcccagatgcacgccctctttgctgacagctttgccgcactgggaaggttagacaacattactctggtgatggtgtttcacccgcagtatctggaatcgtttctcaagactcaacactatctcctacagatggacggcccactcccacttcattaccggcactatattggcatcatggccgcagctagacaccagtgcagctacctggtgaacctgcatgtgaacgactttctgcacgtggggggagatcctaaatggctcaacggactggagaatgctccccagaagctccagaacctcggagaactgaacaaggtactggcgcaccggccatggttgattaccaaggagcacatcgaggggctgctcaaagcagaggaacactcctggagcttggcagagctcgtacatgccgtggtattgctgactcattaccactccttggcgtcgttcactttcggctgtggcatctcacccgagatccactgtgacggaggacatacgtttcggccaccaagtgtctccaactactgcatatgcgacatcaccaacggcaaccattcagtggatgagatgcctgtcaattccgccgaaaacgtgagtgtatcagattctttcttcgaggtggaagctctgatggagaaaatgaggcaactacaggagtgccgggatgaagaagaggcttcacaggaggagatggcctctaggtttgaaatcgagaaacgggagtcaatgttcgtgttctcttccgacgatgaggaggtgactcctgcccgtgcagttagccggcacttcgaggatacctcctacgggtataaagatttctccaggcacggaatgcatgtccccacctttagggtacaggattattgctgggaagaccacgggtatagcctggtgaatagattgtatcccgacgtggggcagctcattgacgagaagttccatattgcttacaacctcacctataataccatggccatgcataaggacgttgatacctccatgctgaggcgggcaatttggaactacatccactgcatgttcggcatccgctacgacgactacgactatggcgagattaaccaactactggatagatcttttaaggtctatataaaaactgtggtctgtacacccgagaaagtcacgaagaggatgtatgactcattctggcggcaattcaagcacagcgaaaaggttcacgtaaatctcctgctgatcgaagctaggatgcaggcagagctcctgtacgcactcagagctatcacaaggtatatgacatag

SEQ ID NO: 240268 - DNA, 1302 bp, synthetic construct
  misc_feature 1..1302: note = Description of Artificial Sequence: Synthetic coding sequence
  source 1..1302: mol_type = other DNA
atgagggccgaagggctgggcggactcgagcgcttttgtagccctggaaagggaaggggcctgagagctttgcagccattccaggtgggcgatctcctgttcagttgcccggcttatgcctacgttctgaccgtaaacgagagaggtaaccactgcgagtattgttttacacgcaaggaaggactgagtaagtgcggccgatgtaaacaggctttttattgcaatgtggagtgtcagaaggaggattggcctatgcacaaactggagtgttcccctatggtggtgttcggagaaaattggaatccttctgagacagtgcggctcaccgctcggatcctagccaaacagaaaatacatccagagcgcactccgtcagagaaactcctggcagttaaagagtttgaaagccatctcgataagctggacaatgagaagaaagatctgattcaatctgatattgccgctctgcaccacttttactccaaacatttgggcttcccagataacgactcactcgtggtcctgtttgcccaggtcaattgcaatggattcaccatcgaggacgaggagctgagccatcttgggagtgccatctttcccgacgtggccctgatgaatcattcatgctgccctaatgtgatcgtgacatataagggcacccttgccgaagtgagagccgtacaggagatcaaacccggagaagaggttttcacatcttatattgatctcctgtacccaaccgaggatagaaatgacagactgagggacagctacttttttacctgtgaatgccaggaatgtacaacaaaggacaaggacaaggcaaaagtggaaatccgaaagctgagcgatccccctaaggcagaagcaatccgggacatggtcagatatgcccgaaacgtcatcgaagagttccgacgagcaaaacattacaagtcaccctctgagttactagaaatttgcgagctgtcccaagaaaagatgtcatcagttttcgaagacagcaatgtgtatatgttacatatgatgtaccaggcgatgggtgtttgcttgtacatgcaggactgggagggggcactgcagtatggccaaaaaattattaagccctattccaaacattatccactctactccctgaacgtagcgtcaatgtggctgaaattaggtcggctgtatatggggctcgagcacaaggccgcaggtgagaaggccctgaagaaggctatcgcgatcatggaagtggctcacggaaaggaccatccttacatcagcgagatcaaacaggaaattgaatcacattag

SEQ ID NO: 240269 - DNA, 819 bp, synthetic construct
  misc_feature 1..819: note = Description of Artificial Sequence: Synthetic coding sequence
  source 1..819: mol_type = other DNA
atgagagccgaagggctcggagggctggagagattctgcagcccgggtaaaggcagagggctaagggccctccaaccattccaggtgggggacttgttgttcagttgccccgcatatgcctatgtgctgacagtgaatgagaggggcaatcactgcgagtactgtttcactaggaaggagggtctgagcaaatgcggacgttgtaagcaggccttttattgtaacgtggaatgtcagaaggaggactggcctatgcacaagctcgagtgctcccctatggtggtctttggtgaaaactggaatccctcggagaccgtgagactgaccgccaggatcttggccaaacagaagatccatcccgaacgaacccccagcgagaaactgctggctgtgaaagagttcgagtcacatctggataagttggataacgagaaaaaagacctgatccagagtgacattgccgctttacatcacttttactcaaaacacctgggatttccggataacgactcccttgtggtgctttttgcccaggtcaactgtaacggttttactattgaagatgaggagttatcccatctcggctccgccatattccccgacgtagctttaatgaatcattcttgctgcccaaacgtgattgtcacctataaaggaactttggccgaggtgagggccgtgcaggaaatcaagcccggagaagaggtttttacttcatatatcgatctgctgtaccctacagaggataggaacgatagactgagggatagctatttctttacatgtgaatgccaggagtgcaccacaaaggataagtag

SEQ ID NO: 240270 - DNA, 5711 bp, synthetic construct
  misc_feature 1..5711: note = Description of Artificial Sequence: Synthetic coding sequence
  source 1..5711: mol_type = other DNA
atggccgcaggcacctgggccgctgccgctgcagcagccgctgccgactacttcgttttggttgcattcggcccacaccctcgagggagtggggaagggcaagggcagatcctgcaacgcttccctgaaaaggattgggaagacaaccccttccctcaggggatcgagctcttttgtcagcccagcggatggcagctgtgcccagaaagaaatcctccaacgttctttgtggcagtgctcactgacatcaactctgaaagacactattgtgcctgcctcacattttgggaaccagctgaaccaagccaggagactaccagagtggaggatgctacagagagggaagaggaaggagacgaggggggacaaactcatctctcaccgacggctccagccccatctgcacagttgtttgcccctaaaaccctggtattagtgagcagattagatcatacagaagtctttcgaaattcactcggcctgatttacgctatccatgttgaaggtcttaacgtatgtttagaaaacgtgattggtaacctgttaacgtgtacagtgcctctcgccggaggttctcagcggacaatttcacttggggctggagatcgccaggtgatacaaaccccactggcggacagcttaccagtgagccggtgcagcgttgcactactgttccgccaattagggatcaccaacgttcttagtctgttttgcgccgctctgacagagcataaggtgctttttctgtccaggtcttaccagcgcctcgccgacgcctgcagaggcctgctggcgctgctgttccccttgagatattcttttacctacgtccctattctgcctgcacagttgttagaagtgctgtccacaccaaccccattcattattggggttaacgctgctttccaggcggagactcaggagctcctggacgtcatagtggccgacctcgacggcggaaccgttacgattcccgaatgcgtgcacattccccctctcccagagcctctccaaagccagactcatagcgtacttagtatggtgcttgacccagaactggagctcgccgacttggcgtttccgccacccaccacctccacgtcatcactcaaaatgcaagataaggagctgagggctgtctttcttcggctctttgcgcagctgctccagggctatcgatggtgtcttcacgtcgtgagaattcatccagagcctgtgatccgcttccacaaagccgcatttttgggtcagagaggcttggtggaggatgatttcctgatgaaggtactggagggaatggctttcgcaggctttgtgtctgaaagaggagttccgtatcggccaacagatctgttcgatgagctcgtggcacacgaagtagccagaatgagagccgatgaaaatcatccccagcgcgtgctcagacacgtgcaggagcttgcggagcagttgtacaagaatgagaatccataccccgctgttgcgatgcacaaagtgcagaggcctggtgaaagctcccatctgcggagggtacccagaccctttccaagattggatgaggggacagtccaatggatcgttgaccaagctgccgctaagatgcagggggctccacccgcagtgaaagcggaacggcgaacaacagtaccctctggacctccgatgacagctatactggaacggtgcagtggcctccatgtaaattccgcacgccgtttggaagtcgtccggaactgcatttcttacgtgttcgaagggaagatgctggaggcaaaaaaactcctccctgcagtcctaagggcactcaaggggagggcggcacggagatgccttgcacaagaactacatctgcatgtgcagcaaaatcgggctgtcttagatcaccaacaatttgactttgttgtcagaatgatgaactgctgcctgcaggactgtacaagtctagacgagcacggcatcgcagccgctttactgcctttggtcacggctttctgccggaagttaagcccaggggtcacacaatttgcatacagctgcgtacaagagcacgtggtgtggtctacgccacagttctgggaagccatgttttacggagacgttcagactcacatccgcgcactttacctcgagcccacggaagacctggctcccgctcaggaagtcggagaggccccttcccaggaggacgaacgctcggcattggatgttgcctcagaacagcgtaggttgtggcccaccctctcacgggaaaagcagcaggagctcgttcagaaggaggagagcacggtatttagtcaggccatccattacgctaacagaatgtcttaccttttgctgccactggatagctccaaaagccgtctcttgagggagagagccggactgggggatttggaatcagcctccaattcacttgtcaccaactctatggctgggtccgtcgccgagagctacgataccgagagcggattcgaagacgctgagacttgcgatgtggctggagcagtggtgaggttcattaaccggttcgtcgataaggtttgcaccgaatccggggtcacttctgatcaccttaaaggcttacatgtaatggtgccagacatagtgcagatgcatattgaaacgctggaagctgtgcagagagagagcaggagactgccaccaatacaaaaaccaaagctccttaggcctcgtttattgcccggtgaggagtgcgtgctcgacggtttaagagtctatctgctccctgatgggagagaggagggcgcaggcggaagcgcaggcggaccggctctgctgccagcagagggggctgtgttcctcacgacatatcgcgttatcttcaccggtatgccgacggaccccctcgtgggcgaacaggtggtggtacgcagctttcccgtcgcagccttgacgaaggaaaagcgcataagcgtccaaactccggtcgaccagctgttgcaggacgggctgcagttgcgttcttgcacattccagctgcttaaaatggcattcgacgaggaagtgggctctgattccgctgaactgttccgcaaacagttgcataagcttagatacccaccggatatacgggctaccttcgccttcacccttgggagcgcccacacacctgggaggcctcccagggtcaccaaggacaaggggcctagcctcaggaccctctctcgcaacttagttaaaaatgccaaaaaaacgatcgggaggcaacatgtgacacgaaagaaatataatccacccagctgggaacaccgagggcagcctcctcccgaggatcaggaggatgaaatctctgtgagcgaggagcttgagccgtcgacactcactccttcaagcgctttgaaaccatctgaccgcatgacaatgtcaagtctggtcgaacgggcttgttgccgagattaccagcgcttgggtctgggcacgttgtctagcagcctttctcgggctaagtcggagccttttcgaatcagccccgtaaacagaatgtacgctatctgtagaagctatccaggcttattaatcgttcctcaatccgttcaggacaacgcgctccaacgagtctcacgttgctatcgccagaacaggttccccgtcgtctgttggcgcagtgggagatccaaggctgtgttgctaaggtctggtggcctgcatggtaaaggggtggttgggctcttcaaggcacagaacgccccatccccaggccaatcacaggccgattcttctagtttagaacaggagaaatatcttcaggcggtggtgtcttccatgcccaggtacgcagacgcctctggcagaaacacgctcagcggcttctccagcgctcatatgggcagtcatgtgccttcaccacgcgcaagggtcaccacactgagtaaccccatggctgcaagcgcctccaggcgcacagctcctagaggaaaatgggggagtgtgcgaacgtctggtcgcagttctggactggggaccgacgtgggaagtcgcctggcaggtcgcgatgcgctggctcctccccaagccaacggcggacccccagatcccggtttcctacggccacagagggcagcactatatattttgggagacaaagcccagctgaaaggagtaaggagtgacccgttacagcagtgggaactggttcccatcgaagtgttcgaggccagacaagtgaaggcctcctttaagaagctgctcaaggcatgcgtgcccggatgccctgctgctgaaccttctcctgcttctttcctgcgtagcctcgaggactctgaatggctcattcagatccacaaacttcttcaagtgtcagttctggtagtcgagctgctagattccggctcatcagtccttgtgggactggaggacggttgggatatcaccacccaagttgtcagcctggtccagcttcttagtgaccctttttacagaacccttgagggtttccgcctgttggttgagaaggagtggctctccttcggccatcgcttttcccacaggggagcgcatacactggccggacaatcttcgggtttcacacccgtgtttcttcagtttctggactgtgtacatcaggttcacctccagttccccatggaatttgagttctctcagttctaccttaaatttctgggctaccatcatgtctcccgcagatttagaactttcctgttggatagcgattacgaacgcatcgagttgggtctgctgtacgaagagaagggagaacgaagaggacaggtgccatgcaggagcgtctgggagtacgtggatagactgtccaaacgaaccccagtatttcacaactacatgtacgccccagaggatgctgaggtgctgcgcccatatagtaacgtgtcgaacttgaaggtgtgggatttctacaccgaggagacactggccgagggcccaccctacgactgggagcttgctcagggaccaccggaaccgccagaagaagagagatccgatgggggtgctccgcagagcagacggagggtggtttggccatgctatgactcctgccctcgggctcaacccgacgccatctcacgcctactggaagagctgcagcgcctagaaacagagttggggcagcccgctgagaggtggaaggatacctgggatcgtgtgaaggcggcacagagactggaaggtcggcctgatggcagggggacgccctcctctctgctggtctccacggctccacatcaccgacgatctctgggcgtgtacttacaggagggcccagtcggatctactctgagtttgtctcttgattccgaccagtccagcggatctacaacatccggctcaagacaggctgcaagacggtctacatccaccctgtactcccagttccaaactgccgaatcggaaaacagatcatatgagggaacactgtacaaaaaaggagcgtttatgaagccttggaaggcaaggtggttcgtgctggataagacaaaacatcagctcagatactatgaccaccgagttgacacagaatgtaaaggtgtaatcgacctagctgaggtggaagccgtggctcctggcacccccaccatgggagcccctaagacagtcgatgagaaggccttcttcgacgtcaagacaacaaggagggtgtacaatttctgtgctcaggacgtgccaagcgcgcagcaatgggtggaccgtattcagtcatgcctgtcagatgccta

SEQ ID NO: 240271 - DNA, 2697 bp, synthetic construct
  misc_feature 1..2697: note = Description of Artificial Sequence: Synthetic coding sequence
  source 1..2697: mol_type = other DNA
atggcagcgggtacatgggctgctgctgcagccgcagctgcggcagactacttcgtcctcgtagccttcgggcctcaccctcgaggttccggggaagggcagggccaaattctccagcggtttcctgaaaaagattgggaggataatcctttccctcagggaatcgaactgttctgtcagccgtctggctggcagctgtgccccgagagaaacccacccactttctttgtggccgttctgacagacatcaactctgagcgtcactattgtgcctgcctaacattctgggaaccagcggagccctcccagcaggaaacaacaagagtggaagatgcaactgagcgtgaagaagagggggacgaaggcggacaaacacatttaagccccactgcgccagcgcctagcgcacagctcttcgctccaaaaactctggtgttggtctcccgtttggatcataccgaggtgttcagaaattccctcgggctaatctatgctattcatgttgaaggcttaaatgtctgtctggaaaacgtcattggtaacctgctgacttgtaccgtgcccctggccggtgggtcacagcggactatatcattgggggctggagatagacaggttatccagactcccctcgccgattccctacctgtgagcagatgttccgtggcccttctgttccggcagctgggcatcaccaatgtgctgagcctattttgtgcggcacttaccgagcataaagtactcttcttgtccaggagttaccagaggttggccgatgcatgcaggggactgctcgccctgttatttccactgcgatactcctttacgtatgtgcctattttgccggcacagttgctcgaggttttgtccacacctacccctttcattattggagtgaacgctgcctttcaggcagagacacaagaacttctggacgtgatcgtcgctgacttggacggaggaaccgtcaccattcctgagtgtgtgcacattcctccgctgcctgagccactgcaatcgcagacccatagcgtgctgtcaatggtcctggatcctgaactagaactcgctgacctggcctttccaccgccaacgaccagcaccagctctttgaaaatgcaggataaagaacttcgggcagtctttctgagattgttcgcccagctcctccaaggctaccgctggtgtttgcacgtggttagaatccaccccgaaccagtgatcaggtttcataaagccgcttttctaggacagaggggcctggtggaggacgatttcctgatgaaggtgctcgagggtatggcatttgccggttttgtcagtgaaagaggagtcccctaccgccctaccgatttgtttgacgaactggttgctcacgaggtcgcccgtatgcgggcagatgagaaccacccccagagggtcttgaggcatgtgcaggagctcgcagagcagctttataagaatgagaacccttacccagctgtggccatgcacaaagttcagcggcctggtgagagtagccacttaaggcgcgtgcccagacctttcccaagactcgatgaggggaccgttcagtggattgtggaccaggccgcagctaagatgcagggagcaccgcctgctgttaaggcggaacggagaaccacggtcccctccgggccacccatgacagccattcttgaaagatgtagcggcttgcatgtgaactcagcacgccgtctcgaagtggtgaggaactgcatctcctacgttttcgaggggaaaatgctggaagccaaaaaactgctgcctgctgtccttagagcgttgaaggggagggctgccagacgttgccttgcccaggagctgcatctgcacgtgcagcagaatcgcgctgtcctggatcaccagcaatttgatttcgtggtgcggatgatgaattgttgcctccaggactgcacatccctcgatgagcacgggattgcagccgcattattaccccttgtcactgccttctgtcgcaaactgtcccccggagtgactcagtttgcctactcctgcgttcaggagcatgtcgtatggtccacacctcaattttgggaggctatgttctatggagatgtccagacacacattagggccctctaccttgagcccaccgaagacctggccccagctcaggaggtaggagaggcgcctagccaggaagatgagcggtcagccctggatgtcgccagtgaacagaggcgcctgtggccgactttgtctcgggaaaagcaacaggaacttgtccagaaggaggagtctaccgtcttctctcaggccattcactacgctaacagaatgtcttacctgttacttccgctggacagtagcaagtccaggcttcttcgggagagggctggactgggggacttggaaagcgcttccaactcacttgtcacaaactccatggccggatctgtcgcagaatcctatgacactgaaagcggcttcgaagacgcagagacatgcgacgtggcgggtgcggtcgtgaggtttataaacagattcgttgataaagtttgcaccgagagtggcgtgacgagcgatcacctaaaaggcttgcacgtgatggttccagacatcgtccaaatgcacatcgagaccttggaagccgtgcagcgcgagagcagacggctgccaccaattcagaaacccaagttactgcgcccttag

SEQ ID NO: 240272 - DNA, 5681 bp, synthetic construct
  misc_feature 1..5681: note = Description of Artificial Sequence: Synthetic coding sequence
  source 1..5681: mol_type = other DNA
atggcccgtctggcagattattttgttttggtggcgtttggccctcatcctagggggtccggcgagggacagggtcagatactccaacgattccccgaaaaggattgggaggacaatcccttcccccagggtatcgaactgttttgtcagcctagtgggtggcagctgtgtcctgagaggaatcctcccactttctttgtggcggtgctgaccgatatcaactccgaacgtcattactgcgcttgtctgacattctgggagcctgccgagccatcccaagagactacccgcgtggaagatgccaccgaaagagaagaggaaggagatgagggtggtcagactcacctcagtccgaccgctccggctcccagtgcacagctcttcgcccctaagactttggtgctagtcagcaggctcgaccatacagaggttttcagaaactcactcggtcttatctacgcgatccatgtagaaggcctcaatgtgtgcctcgagaatgtgattggcaacttgctaacgtgcacagtgcctctcgctggtggtagccaacgcactatttcactgggggctggagaccgccaggtgattcagactcccctggccgattcacttccagtgtctcggtgctcggtggccttgttgttccgccaactgggtatcacaaacgtgctgagcctgttctgcgcagcattgaccgagcataaagtcctgtttctatcgagatcctaccagcgcctcgcggacgcttgtcggggtctgttagccctgttgtttccgctgcgttacagttttacttacgtgcctatcctcccagcccagctgttggaagtgctttccactcccacaccatttattattggggtcaacgcagcttttcaggctgagacccaggagcttctggacgttatcgtggccgatctggacggcggtacagtgacgatcccagaatgtgtgcacatcccacctctaccggaacctttgcagagtcagactcacagcgtgctgtcgatggtgctggatcccgagttggaactagccgacctggcctttccaccacctaccacctcaacgagtagcttaaaaatgcaggacaaggagctccgagcggtgtttctcagacttttcgctcaattgctacaggggtatcgctggtgcctccatgtagtgcgcattcacccagaacccgtcatccggttccataaggccgctttccttggtcagagggggctggtggaagacgactttctgatgaaagtcctagagggcatggcctttgctgggtttgtatctgagaggggggtgccataccggccaacggatctatttgatgaacttgtcgcccacgaggtggctagaatgagagccgatgagaaccacccccagcgggtcttacggcacgtacaggagctggcagagcagctgtataagaacgaaaatccataccctgctgttgcaatgcataaggttcaacgacccggtgaaagcagtcatcttcggagagtcccacgcccttttccgcgactcgatgaaggcacagtgcaatggattgtagaccaggccgctgccaaaatgcaaggagctccacccgctgtgaaagccgagcgaagaacgacagtgccatcggggccacctatgactgcaatactcgagagatgttccggcctgcacgtcaattcagctcggaggctggaagtagtgagaaattgtatatcatatgtgttcgagggcaaaatgctggaggctaagaaactgttgcccgcagtgctcagggctttgaagggtcgggcagcacgcaggtgtttagcacaggagctgcaccttcacgtacagcaaaaccgcgctgtgctggaccatcagcagttcgatttcgtggtgcggatgatgaattgctgcctgcaggactgtacgagtctcgatgagcatggaatcgcagcagcactgctaccgctggtgacggccttttgccgcaaattgagccccggtgttacccaattcgcctacagttgcgttcaggaacacgtcgtgtggtcaacccctcagttctgggaagccatgttctacggagatgtgcagacccatatccgcgctctatatttagagcccacggaggatctggcgccagcacaagaggtcggcgaagccccatctcaggaggacgaacgctcagccctggatgtggcgtcagaacagagacgcctgtggccgactctatctcgggagaagcagcaggaactggtgcagaaggaagagtccacggttttctcccaggctattcactacgcaaataggatgtcctacctgctactgcctctggactcctcgaagtcccggctgttacgggaaagggctgggctcggcgacctcgagtccgctagtaactcactggtcaccaactcaatggccggttccgtggctgagtcctacgacactgaaagcggcttcgaggacgcagagacatgcgatgtggcaggggctgttgtgcgcttcatcaaccgcttcgtagataaggtgtgcaccgaaagtggggtgacatctgatcacctgaaaggcctacatgtgatggtgccagacatcgtacagatgcatatagaaacactcgaggctgtgcaacgcgaatccaggagactgcccccaatccagaagccaaaactgctaaggccaagactgctgccaggagaggaatgtgtgttggacggactgcgagtatacctgctgccagatggacgcgaagagggcgctggcggtagcgctggaggcccagctctcttgcccgcagagggtgctgtgttcctgactacttatcgcgtgattttcactggaatgccaacagaccctctcgtaggggagcaagtggtagtgagatcatttcctgtagccgctctgaccaaggagaaaaggatcagtgtgcagacaccagtcgaccagctgttgcaggatggcctgcagttacgcagttgtactttccagctcttgaaaatggctttcgacgaggaggtcggctcagactctgctgaactgtttagaaagcagctccataagttgaggtatccaccggatatccgcgcaacctttgcattcacactcggcagtgcacacaccccaggacgcccacctagagtaacaaaggataagggacccagcctccgaaccctttcacggaacctcgtaaaaaacgctaagaagaccatcggacgacagcacgtgaccagaaagaagtataatccaccatcatgggagcaccggggacagccaccaccggaggaccaggaggatgaaatctccgtgtctgaagaacttgaaccctcaacactgactccatcttccgccctgaagccctccgaccgaatgacaatgagctccctggtggagcgcgcatgttgtcgcgattatcagcgcctcggcctggggacactttcaagctccctctctcgggcaaagagcgaaccctttcgaatatcccccgttaaccgtatgtacgccatctgccgttcttaccccggactactcattgtgccgcagtcagtccaggacaacgctttacagagggtgagcaggtgctataggcaaaatagattccccgtggtgtgctggaggagcggcaggagtaaggcggtcctgctccgttccggaggtctccacggcaaaggggttgtgggcctttttaaagcgcagaacgcacccagccctggccagtcacaagccgattcttctagcctcgagcaggaaaagtatttgcaggcggtagtgtcgagcatgcctcggtacgccgatgctagcggccgtaatacattatcggggttctcctccgcgcacatgggatcccacgtgccctctccccgtgcaagagttaccactctgtcaaatccaatggccgctagcgcctctagaaggaccgcacccagggggaagtggggatctgtcagaacaagcggtcgatcatccggcttggggactgacgtgggaagccgcctggccggaagagatgccctggcccctccacaggcaaacgggggtccccctgatcccggatttctcaggccccagcgagctgccttgtacatcctaggcgacaaggcgcagttgaaaggggtgcgatctgacccgctacagcagtgggaacttgtgccaatcgaggtattcgaagccagacaggttaaagccagtttcaaaaagctcctcaaggcgtgcgttccagggtgcccagccgcagaacccagccccgcaagcttcctgagatccctggaagactctgaatggttgatccagatccacaaactgctgcaggtcagcgtactggttgtcgagctcctagactcaggcagcagtgtgttggtgggcttggaagatggctgggatataacgacccaggtggtgtcgctggtgcagctgttgagtgatcccttctacagaacactcgagggcttccgccttctggtggaaaaggagtggctctcttttggtcatagattctctcatcggggagcccataccttggctggtcagtcaagtggctttacgccggttttcctccaatttctcgactgcgtgcaccaagtgcacctgcaattcccaatggagtttgagttcagtcagttttaccttaaatttttgggttatcatcacgtatcgcgtcgttttcgcacctttctgcttgacagcgattacgaacgcattgaacttgggctcttgtacgaggaaaaaggggagcgcagggggcaggtgccatgtcgaagtgtttgggaatacgtagatagactctccaagaggacacctgtgtttcataattacatgtatgcacccgaggacgcagaggtactccggccatactccaacgtaagcaatttaaaggtgtgggacttctatactgaggagactcttgcagaggggcctccctacgattgggaactcgcccaaggccctcccgagccccctgaagaagaaagaagcgacggtggggctccacaaagtcgacgcagagtagtttggccatgttatgactcatgcccacgggcacagcctgacgccatatctcgactattggaagagcttcagcgtctggagactgagctcggccagcccgcagagcgatggaaagacacatgggaccgcgtcaaagcagcccagcgactggaaggtcggccagacgggagggggacacctagctccttgctcgtgtccaccgcccctcaccaccgcaggtccttgggcgtgtacttgcaagaagggccagtggggtcaactctttctctctcactggacagcgatcagagcagtggtagcaccacttccgggtctcgtcaggctgcaagaaggtccacaagtacactgtacagtcagttccaaaccgccgagtcagagaatcgatcttacgagggcaccttgtataaaaaaggggcttttatgaagccttggaaggcgagatggttcgtgctcgataagaccaaacatcagcttagatactacgaccatagagtagatacagaatgtaagggggttatagacttggcagaggttgaggccgtggcacctggcacacccactatgggagcccctaaaactgtagacgagaaggcatttttcgatgtcaaaacaacacgaagggtgtataatttttgcgcacaggacgtcccttctgcacaacagtgggtagaccgtatacaatcttgtctgagcgatgctta

SEQ ID NO: 240273 - DNA, 5603 bp, synthetic construct
  misc_feature 1..5603: note = Description of Artificial Sequence: Synthetic coding sequence
  source 1..5603: mol_type = other DNA
atggctcgcctggccgattactttgtgctggtggcgtttggaccccatcctcgaggatccggggaaggccagggtcagatacttcagagattccctgagaaagactgggaggacaacccgttccctcaaggtatcgagttgttttgtcagccatcaggatggcagctgtgcccagagaggaaccctcctacattcttcgtggcggtgctcaccgacatcaattcagaacggcattactgtgcctgtcttacattttgggaacctgcagagccgtctcaggagaccacccgagtggaagatgctactgaaagggaggaagaaggagacgagggtggacagacccatctgtcacccaccgcgccagcccctagcgctcagctttttgctcctaagaccctcgtgctcgtcagcagattagaccatactgaagtgtttagaaacagtctcggtctcatctatgcaatacacgttgaaggcttgaatgtctgtttggaaaacgtcatcggtaatctcctgacctgtactgtgcctctcgccggaggatcacagcggacaatatcgctcggcgcaggtgatagacaggtcattcagacacccctggccgattcactaccggtttcacgctgtagtgtggcactgctcttcagacagctgggcatcaccaatgtgttaagtctgttctgtgctgccctgacagagcacaaagtgctgtttctctcccgtagctaccaacgtttagccgatgcctgcaggggactcctcgctctgctgttcccgttgcgctacagcttcacgtacgtcccaatattgccggctcaattgctagaagtgctgagcacccctaccccgttcatcatcggtgtgaacgctgctttccaggctgagacgcaggaactgctggatgtgatcgtcgcagacctggatggcggaaccgtaacaatacccgagtgcgttcatatccctccacttcccgagcctcttcagtcacagacacatagtgtcctatccatggtattggaccctgaactggaactggctgatttagccttccccccaccaacgacaagcacctcctctctcaagatgcaagataaggagcttagagctgtgttcctgcgtctgtttgcccagcttctccagggctaccggtggtgtctgcatgtagtccgcatccaccctgagccagttattagatttcataaagccgctttcctcggacaacggggtttggtggaagacgactttctcatgaaagtgctggagggcatggcctttgctggatttgtgagcgaacgcggagtcccctatagacctactgacctgttcgatgagctggtcgcccacgaggtggcacgcatgcgggctgacgaaaatcaccctcagcgtgtcttgcgccacgttcaggagttagcagaacaactctataagaatgaaaatccctatcccgcagttgccatgcacaaggtccagaggccaggcgagtcttcacatctccgaagggttcctagacctttcccccgactggacgaaggcaccgtgcaatggatcgtggaccaggctgccgcaaagatgcagggtgcgccaccagccgtgaaggcagagcggagaactacggtgcctagtggtcctcctatgacagctattctggaacgttgttctggcctgcacgtgaactcagccagaagactggaggtggtccgcaactgtatctcctatgtgtttgaggggaagatgctcgaggccaaaaaactgcttcctgctgtcctcagggcactaaaaggcagagcagcgaggagatgcctggcccaagaactgcatctccacgtccagcagaacagagcggtgttagatcatcagcagttcgacttcgttgtgcgcatgatgaactgctgcctgcaggattgcacttccctggatgagcatggcatagccgctgccttactccccctcgtaacagctttttgtcgcaagctcagtcccggtgtcacacagttcgcatatagctgtgtgcaggagcacgtggtgtggagtaccccccaattttgggaagccatgttctacggcgatgtccagactcacatcagggcgctgtatttggaaccaactgaagacttggctccagcacaggaggtgggtgaagccccttcccaggaggacgagcgaagcgcgctggatgtggcctccgagcaacgtaggctctggccaacactctcccgggaaaaacagcaagagctggtgcaaaaggaggagtccaccgttttttcacaggccatccactatgctaatagaatgagttacctactcttgccgctggactccagtaagagccggttgctgagggaaagagctggactgggcgatttggaatctgcctcaaacagtttagttaccaattccatggccggaagcgttgcagaaagctatgataccgaaagcggattcgaggacgccgaaacttgtgacgtggcgggtgctgttgtgagattcatcaatcggtttgtcgataaggtttgtactgaaagtggagtgacaagcgaccatctaaagggtctccacgtcatggtcccagacatcgtccagatgcatatagaaactttggaggctgtgcaacgggagtctagaaggttgccccctatacaaaaacccaaacttttgcgcccacgactgctccctggggaagaatgcgtgctggacgggctccgtgtatatctgctccccgatggccgtgaggaaggagccggaggcagtgccggaggacccgctctgctccccgctgagggcgcagtgttcctgactacgtacagggttatcttcaccggcatgccaacggaccccctggtgggagagcaggtggttgtcagaagcttcccagtggcagcacttacaaaggagaagaggatcagtgtacagacacctgtggatcaacttttacaagacggtttgcagcttaggtcctgcacgttccagctcttaaagatggctttcgacgaagaagtggggagcgacagtgctgagctgtttagaaagcagctccataagctgagatacccccctgatataagagcaacctttgcattcacactggggtctgcccataccccagggagacctcccagagtgaccaaggacaaggggccaagcctgagaacactctctcggaacctggtcaagaatgccaagaagacaattggcaggcagcacgttacacgaaagaaatacaatcccccatcttgggaacataggggtcagcctcccccagaggaccaggaggacgaaatttctgtgtctgaagaactggagcccagtaccctcacacccagtagtgccctgaagccctccgaccgcatgaccatgtcatcactggtagagcgagcttgctgccgggattaccagcgtctcggcctgggcaccctttcttcttcgctttccagagcgaaatcagagcctttcaggatcagtccagtgaaccggatgtatgctatctgtaggtcatacccaggcctgctaattgtgccccagagcgtgcaagacaatgcgttgcaaagagtgagtcgttgttacaggcagaatcggtttcccgtggtgtgctggcgctcaggcagaagtaaggcagtgttactgagaagtggcggattgcacggaaaaggtgtggtgggacttttcaaagcacagaacgcaccgtcaccaggccaaagtcaggctgatagttcttctctggaacaggaaaaatatctccaagccgtggtatcaagcatgcccaggtatgcagatgcatcaggacggaatactctgtctggcttcagcagtgcgcatatggggtcccacggcaaatggggtagtgttagaacgtctggaagatctagtggactcgggacagatgtggggagcagactggccggtcgagacgctcttgcgcctcctcaggcgaatggaggaccccctgaccccggatttctgcgccctcagcgggctgctctttacatccttggagataaagcccaactcaagggcgtgagatctgaccctctccaacagtgggagcttgttccaatcgaggtgtttgaagctcggcaagtaaaggcctcttttaaaaagctactgaaggcatgtgtgccaggatgccctgccgctgaaccttcacctgctagctttcttaggagtttagaggacagcgagtggctgatccagatccacaagctgctgcaggtgagtgtgttagtcgtggaactgctagactccggtagtagtgtgctcgtcggtctggaggatggatgggacataacaacccaggttgtcagcttggtgcaactgctgagcgatcccttttatcgaacccttgagggatttcggcttcttgttgagaaggagtggttatcattcggacacagattctcgcacagaggagcccacaccctggccggtcaaagtagcggttttactccagtgtttctccaattcttggattgcgtccatcaagtgcacttacaattcccaatggagttcgagttttcacaattttacctgaaatttttgggttaccaccacgtttctaggagatttagaacattcctgcttgactcagactatgaacgcattgagttgggtcttctttacgaggagaaaggagagcggcgaggccaggtcccctgccgatccgtatgggagtacgtggacagactctccaagaggactcctgttttccacaattatatgtacgcccctgaggatgccgaggttctccgcccttactccaacgtttccaacttaaaagtctgggatttctacaccgaagagacactagctgagggacccccatacgattgggaactagctcagggtccacccgagccgcctgaagaggaacggtctgacggtggcgctcctcagtccaggcggagagtcgtctggccgtgctatgatagttgtccacgcgctcagcccgacgccatctcgcgtctgctcgaagaactccagcgtctggagaccgagttagggcagcccgcagagcggtggaaggacacctgggaccgggtaaaggccgctcagaggttggaaggccgacccgacggcagaggtactccgtcctctctgctggtgtctaccgcccctcaccataggcggtccctgggggtctatctccaagagggacccgtgggctcgacactgtctctgagtctcgactctgatcagtcctcaggcagcacaacatccggctctcgtcaggctgctcgcaggtcaacaagtaccctgtatagccaatttcagacggccgaatcagagaatcgctcctacgagggaacgctgtacaagaagggtgccttcatgaaaccatggaaagcgaggtggttcgtgctcgacaaaacaaaacatcaacttagatattatgaccatcgcgtggacactgagtgtaagggggtgatcgacctggccgaggtggaagcggtggccccaggcacccctacgatgggtgctcccaagaccgttgatgagaaggccttcttcgatgttaaaaccactaggagagtgtacaacttctgtgcccaggatgtaccaagtgcccagcaatgggtcgatcggatccagtcttgccttagtgatgctta

SEQ ID NO: 240274 - DNA, 5550 bp, synthetic construct
  misc_feature 1..5550: note = Description of Artificial Sequence: Synthetic coding sequence
  source 1..5550: mol_type = other DNA
atggccaggctcgccgactactttatagtcgtgggctacgaccacgaaaagcccggatctggcgagggcctggggaagataatacagcgctttccacagaaagattgggatgacaccccgttccctcagggtatagaactattctgtcagcccggagggtggcagctgtcaagagagaggaagcagccaacattcttcgtggtggtgttaaccgacatcgactcagatagacattactgtagctgtttgactttctacgaagccgagatcaatctgcagggcacaaagaaggaggagatcgaaggtgaagccaaggttagcggactgatccagcctgccgaggtgtttgccccaaagtccttggtgctggtgagcaggttatactatcctgaaatttttcgtgcatgcctgggccttatctatacagtgtacgtggacagcttgaacgtgagtctggagtcattgatcgcaaatctctgcgcttgtctcgtcccagccgcaggtggttcccagaaactcttttctctgggcgcaggagacagacaactcattcaaacccccttacatgatagtctgcctatcactggtacgtccgtagcactgcttttccagcaactagggatccaaaatgtgctctccctgttttgcgcggtgctcacagaaaacaaggttctgtttcatagcgcctcatttcagcggctctctgacgcctgcagggctcttgaaagcttaatgttccctctcaaatactcatacccatacatccccatcctgcctgcccaactgctggaggtactctccagccccactccctttatcattggcgttcacagcgtgtttaagacagacgttcatgagttactcgacgtgataattgcagatctggacggtggcaccataaagatccctgaatgcattcatctatcaagcctgcccgaacctctcctgcatcagacccagtcagctttatcactgatcctccaccccgaccttgaggtcgcggatcacgcgttcccaccaccacggaccgcgctaagccactcaaaaatgctcgataaggaggtccgtgccgtttttctgcggttatttgcccagctctttcagggatatagatcctgccttcagctgatccgaatccacgcggaaccagtgatccacttccacaaaaccgccttcctggggcaacgaggtttggtggagaacgattttttaaccaaggtcctctccggtatggccttcgctggctttgtctctgaacgaggccctccctatcgctcatgcgatctgttcgacgaactcgtcgccttcgaggttgagcggataaaggttgaagaaaacaatcccgtgaaaatgattaagcatgtgcgagaattggccgagcagctgtttaaaaatgagaaccccaatccacacatggccttccagaaagtcccacggccaactgagggtagtcacctccgcgtgcacatcctcccattccccgaaataaacgaagcccgtgtgcaagagttgatacaggaaaacgtcgccaagaaccagaacgccccaccggcaacccgaattgagaaaaaatgcgtggttcccgctggaccccctgttgtatccattatggataaggttactactgtgtttaactccgcacagcggctggaggttgtgcgaaactgtatctcttttatttttgaaaataaaatccttgaaaccgagaaaactctcccagctgctctgagggccttgaagggaaaggccgctagacagtgcttaaccgacgagctgggcctccatgtgcagcagaacagagctatactggatcatcagcaattcgattatataattcgtatgatgaactgtacactgcaggattgctcatccctggaggagtataatattgctgctgccctcctgccccttacctcagcattctacagaaagctggcccctggtgtgtctcagtttgcctacacttgcgtgcaagatcaccccatttggacaaatcagcagttttgggagacaacattttacaatgctgtgcaggagcaggtccgatctctatatctgtcggccaaagaggataaccatgcaccacaccttaaacagaaggataagttaccagatgaccattaccaggaaaagacagctatggatctggccgctgagcagctgagactctggcccacccttagtaaatccacccagcaagagttggtgcagcacgaagaatctactgtgttttcccaggctatacattttgccaacctgatggttaacttactggtcccactggatacgtcaaagaacaaacttctcaggacttctgctcccggtgactgggagtcgggctccaactctattgtcaccaactccatcgcaggatctgtggctgaaagctacgacacagaatctggctttgaggacagcgaaaacaccgacattgccaactcagtggtgcggttcatcacccggttcattgataaggtttgtactgaatctggggtgacacaggatcacataaaaagcttgcactgtatgataccaggtattgttgcgatgcacatcgagacactcgaggccgtccatagagaaagccgcaggctgcctcccatacaaaagccaaaaatcctccgacctgccttgctccccggtgaagagatcgtgtgtgaaggtctgcgagtcctgctcgacccagatggccgtgaagaagcgactggcggactcctgggcggtccccagttactgcccgcagaaggtgcgctcttcctcactacataccggatcctgtttagaggaactccccatgaccagctggtcggggagcagactgtggtgcggtccttcccgatcgccagcattaccaaggaaaaaaagattaccatgcagaaccagcttcagcagaacatgcaggagggacttcagatcacaagcgccagcttccagcttattaaggtggcctttgatgaggaggtatcccccgaagtcgtcgaaatattcaagaagcagctcatgaagtttcgttacccgcagtctattttcagcacgttcgctttcgctgctgggcagaccactccccagattatcttgcccaagcaaaaggaaaaaaatacctccttcagaacattctcaaagacaatcgtcaagggagctaagagagctggaaagatgactatcggcagacagtatctcctgaaaaaaaaaaccggaacaatcgttgaggaacgagtcaacagaccaggatggaatgaagacgatgatgtaagtgtatccgacgagagcgaattgcctacctctacaacgctcaaggcttctgagaagtcaactatggagcagttggtcgaaaaggcttgtttccgggactaccagagattggggctagggaccattagtgggagcagttctaggagccgacccgagtatttccggatcaccgcatcaaaccgcatgtacagcctatgccgatcctatccaggactattggtcgttccccaagccgttcaggattcctccctgcccagagtcgctcggtgttacaggcacaatcgcctgcccgtggtatgctggaaaaatagtaggtcaggcaccttgctgttacggagtggcggttttcacgggaagggtgtggtgggactctttaagtcacagaacagcccccaggctgccccaacttcttccctcgaatctagtagttctatagaacaggagaaatacctccaggcgctgctcaacgccgtgtcggtgcatcagaaattgagaggaaactccacactgaccgtgcgtccagccttcgcccttagcccaggcgtgtgggcttccttgcgttctagtaccaggttgatttcgagtcccacttcatttatcgatgttggtgcccgtttggcaggtaaagaccactccgcgtcattttccaattcatcctacctgcagaatcagctcctgaagcggcaggctgcattgtatatcttcggagaaaagtctcagctgcgcaactttaaagtcgagttcgctctgaactgcgagtttgtgcccgtcgagttccatgagatccgtcaggtgaaggcgtcttttaagaagctcatgagggcgtgcattccttccacgatacctacggactccgaggtgacatttctaaaggctctcggggacagcgagtggtttccacagttgcacaggataatgcaacttgccgttgtcgtcagtgaagtattggagaatggcagctccgttctggtgtgtttggaagagggctgggacattaccgcgcaggtgactagcctggtccagctcctttctgacccattttacaggactcttgagggtttccagatgctcgtcgagaaggagtggctctcctttggacacaagttttctcaaaggtcaagcctaaccctaaactgccagggctctgggtttgcccctgtattcctccaatttctggattgtgtgcaccaggtgcacaaccagtaccccacggaattcgagtttaacctgtattaccttaaattcctggcgttccattatgtgagtaatcgatttaaaaccttcctactcgactccgactatgaacgccttgaacatggtacgctcttcgacgataaaggcgagaagcacgctaaaaagggcgtctgcatttgggaatgcatcgatcgaatgcataaaaggtcgcccatatttttcaattatctttattctcctctcgagattgaagctctcaaaccaaatgtaaacgtctcttcgttgaaaaagtgggattattacattgaagaaacgctgagcacaggtccatcctatgattggatgatgctgacacctaagcatttccccagcgaagattctgatctggcaggagaggccggtcctaggtcccagaggaggaccgtttggccatgctatgatgatgtgtcttgtacacagcccgatgctctcacatcgctcttttcagagatagagaaacttgagcataagctgaaccaagctcctgagaagtggcaacaactttgggagagagtaacggtcgacctgaaagaagagcctcgcacagatagatcccagcggcacctttctcgctcccctggcatcgtcagtacgaatctaccatcatatcagaagagatcattattacacttacccgactcgtctatgggggaagaacagaacagcagtattagtccctccaacggggttgagcgacgggctgccacattgtactcccagtacacttctaagaacgatgaaaatcggagtttcgaaggaactctctataaacggggtgccctcttgaaaggctggaagccgcgttggtttgtgctggacgtgacaaaacatcagctgcgctactacgatagcggggaggacacatcctgtaaaggtcacatcgatcttgccgaggtcgaaatggtcatacctgcaggacccagcatgggcgctcctaaacacactagtgacaaggcttttttcgatctcaagacatcgaagcgagtctacaatttctgtgcacaggatggccagtcagcacaacagtggatggacaagattcagagttgcattagcgacgcataa

SEQ ID NO: 240275 - DNA, 4791 bp, synthetic construct
  misc_feature 1..4791: note = Description of Artificial Sequence: Synthetic coding sequence
  source 1..4791: mol_type = other DNA
atggagagccgggagactctgagctcttcccgtcagagaggaggagagagcgactttctgccagtctcgtcagccaagcccccagcagcccctgggtgtgccggtgagccgctgctcagcactccgggtcccggaaaaggcataccagtggggggtgaaaggatggagccagaagaagaggatgagttaggttccggtcgtgatgtcgactccaattccaatgcagacagcgagaaatgggtagccggtgacggattggaggagcaagaatttagtattaaggaagcaaattttacagaaggatctttgaaactgaagattcaaactaccaagagagccaagaagcccccaaagaatctggagaattatatctgccctcccgagattaaaatcacaataaaacagtccggggatcagaaggttagcagggccggtaagaatagcaaggccactaaagaggaggagcgcagccacagcaagaaaaagctcctaactgcttctgacttggccgctagcgatctaaagggcttccaaccccaggcttatgaacgaccccagaagcattcaaccctgcactatgacactggtttaccacaggatttcaccggggatactttgaaaccaaaacaccagcagaagagctccagtcagaaccacatggactggagtactaactccgatagcggacccgttacacagaactgtttcatttcacccgagtctggcagggaaaccgcctctacttctaagattccagccctggagcccgtggcatctttcgccaaggcccagggtaagaaaggctctgccggaaatacttggagccagctcagcaataataataaggatttgctgctagggggtgtcgcaccttccccttcgagccatagctccccagcgcctccctcgtcctcggctgagtgcaacggcttacagcctcttgtggaccaggatggcggaggcacaaaggaaccccctgagcccccaacagtggggagtaagaagaaatcctccaagaaggatgtgatcagccagacaatccccaatcctgacttagattgggtgaaaaacgctcagaaagcattcgacaacaccgagggcaagagggaggggtactctgctgacagcgcccaagaggcttcccccgctcggcaaaacgtttcctccgctagcaaccctgagaacgattcgagccatgtgaggattaccattccaataaaagcccctagcctggatcctaccaaccacaagagaaaaaagcggcaatctataaaggcagtggttgagaagatcatgcctgagaaggcgctggcatcaggaataacgatgagcagtgaagtggtgaatcgcattctgagcaatagcgagggcaacaagaaggatcctagggttcccaaattaagtaagatgattgagaacgagagtccatcagtcggactcgaaaccgggggtaatgccgaaaaagtaatccccggtggcgttagtaagcctagaaagccccctatggtgatgacgccacctacctgcacagatcattccccttcaagaaaactgcccgaaattcagcaccccaagttcgccgctaagcgtagatggacgtgctcaaaaccaaaacccagcaccatgttgcgggaggctgttatggctacatcagacaaactcatgctggagcctccgagcgcctaccctatcactcctagtagtcctctctatacaaacaccgactccctcaccgttattactccagtgaaaaaaaaacggggtcggccaaagaagcagccacttcttactgtggagactatccatgagggtacgtcaacttctccagtaagtcccatctctagggagttccctgggactaaaaagcggaagaggcgaaggaacctcgccaagcttgcccaacttgttcccggagaggataagccaatgtccgaaatgaagttccataaaaaagttgggaagctgggggtgctggataagaaaactatcaagaccattaacaaaatgaaaaccctgaagaggaagaacatccttaatcagatacttagctgctccagcagcgtggcactgaaggctaaggcccctccagaaactagcccaggagccgctgctatcgaaagtaagctaggtaagcagatcaacgtgtccaagagaggcactatctacattgggaagaagcgcggtcgcaaacctcgggctgaactgccacctccgagcgaggagccaaaaaccgccattaaacacccacggcctgtttccagccagcctgacgttccagccgtcccctcaaactttcaatctctagtggcctcgtcccccgctgcaatgcatccccttagcacccaactgggaggcagtaatgggaacctgtctcccgcatctacagagacaaacttctctgaactgaaaactatgcccaaccttcaaccgatttctgcccttccgactaaaacgcagaagggaatacactccggcacttggaagctgagccctccacgactcatggctaatagcccttcccacctctgcgaaattggcagcctgaaggagatcaccctaagtcccgtatccgagtcacattctgaggaaactattccttctgacagcggtatcggtaccgacaataattccacatcggatcaggcagagaaatcctctgaaagccgtagaagatattcttttgacttttgctcattggataatcctgaggccattcctagtgatacgtccaccaagaatcggcacggacaccggcagaagcatctgattgttgacaatttcctggcccacgagagcctcaaaaagcctaagcataaacgtaaaaggaagagtctccaaaaccgcgacgatttgcaattccttgcagacctggaggagctaatcactaaatttcaagtcttcagaatctcacaccgctcatacaccttctaccatgaaaacccttacccttctatttttaggatcaactttgatcattattatccggtgccttatatccagtatgatcctctcctgtacttaaggcgaacctccgaccttaagtcgaagaagaagagaggccgacccgcaaaaaccaatgacacaatgaccaaggtcccattcctccagggcttcagctaccctataccctcgggcagttactacgccccttacggtatgccatataccagcatgcccatgatgaacctcgggtactatggccagtatcctgctcctctgtatctgagtcacaccctgggtgctgcaagcccgtttatgcggccaaccgtgccacctccacaattccatacgaactctcacgtcaagatgtctggtgccgctaaacataaagccaagcatggcgtacatttgcaggggccagtgagcatgggactgggggacatgcaacccagtctgaaccctccaaaagtgggatctgcctctctctcaagcggccgtcttcataaacgcaaacataaacacaaacataaacacaaagaagacaggattcttgggacccacgacaatctgagtggactctttgcaggcaaagcaactggttttagctcgcatatcctgtctgagaggctatcaagtgcggataaagagctccctctggtttccgagaaaaacaaacataaggagaagcagaaacatcagcatagcgaggccggtcataaagcctcaaaaaacaactttgaagtggatactctgagtactttatctctctcggacgctcagcactggacccaagccaaggaaaaaggggacctcagctccgaacctgtggattcatgtactaagcggtattccggcagcgggggagatgggggtagcacgcggtctgagaatctcgacgtgttctcggagatgaacccttccaacgacaaatgggatagtgacgtctctggctcgaagcggagatcctacgagggcttcggaacctatagggaaaaagacattcaggcctttaagatgaatagaaaggagcggtctagctatgacagttcaatgtctcctggaatgcctagtcctcacctcaaggtagatcagaccgctgtccatagtaaaaacgagggatcagtgcctacaatgatgacccgtaagaagcctgccgcagtggactccgtgaccatacctccagccccagtgctgagccttctcgctgcttccgccgcaacatccgatgcagtcggttctagcctcaaaaaaagattcaaaagaagagaaattgaagccattcagtgtgaggtgcggaaaatgtgcaactacacaaagattctgtcaactaagaaaaacttggaccatgtgaataagattctcaaggctaaacgcctccagcgccagagcaaaactggcaataacttcgtgaagaagagacgtggcaggccaagaaaacagcctacgcagttcgatgaggacagcagggatcaaatgccggtgctggagaagtgcatcgatctccccagcaagcggggtcagaagccaagcctgtctcccttggtgctggagccagccgcaagtcaggatactatcatggcgacaatcgaggccgtcatccacatggctcgcgaagccccacccctgcctcccccaccgcctccaccacttccaccgccaccccctccaccgcttcctccaccgccaccgctccccaagacccccaggggtggtaaacgcaagcataagccacaggcacccgcacagcctccgcagcaatcaccgcctcagcagccactaccccaggaagaggaggtgaaagctaagagacagaggaaatctagaggtagcgagagcgaggtgctgccgtat

SEQ ID NO: 240276 - DNA, 729 bp, synthetic construct
  misc_feature 1..729: note = Description of Artificial Sequence: Synthetic coding sequence
  source 1..729: mol_type = other DNA
atggagagtcgagaaaccctatcatcaagcaggcagcgaggcggagagagcgattttctacccgtgagttccgcaaaacctcctgctgcccctggctgtgcgggagaacctctgctgagcacccctgggccaggaaagggcattccggtgggcggtgaaaggatggaacctgaggaggaggatgagctgggctccggcagggacgtcgattctaacagtaatgccgattccgaaaagtgggtggctggagacggcctggaggagcaggagtttagcataaaagaagcgaattttactgaaggctctctcaagctcaaaatccaaaccactaaacgggctaagaagccaccgaaaaacctggagaattacatctgtcccccagagataaagatcaccattaaacagtctggggaccagaaggtcagccgggcaggaaagaatagcaaggcaacgaaggaggaagaacggagccactctaagaaaaaactgctaacagccagtgatctggctgcaagcgatcttaagggcttccaaccacaaatcaaagacagttccaaagaggaggtgtggaagagacgcggaggccaaggcatcccttttaagaaacagtttctatcccaggagagggctatgtgcttttcttgtcccaggaacccttttcccgctaagcctggatcacttacattgcccttccattctgaaccagccgtctgggcccaggaagtgtag

SEQ ID NO: 240277 - DNA, 414 bp, synthetic construct
  misc_feature 1..414: note = Description of Artificial Sequence: Synthetic coding sequence
  source 1..414: mol_type = other DNA
atggagtcccgcgagacactgtcttcaagtagacagagggggggagagtcagactttctgcccgtcagctctgctaaaccccctgccgcacctggttgtgcgggagagccactattgagcactcccggtccgggaaaaggcatccctgtcggcggagagaggatggagccggaggaggaagacgaactgggttcaggaagggacgtggactctaactctaacgcggatagcgagaaatgggtggccggagatggattggaggaacaggagtttagcataaaggaggcgaactttacagaaggctccctcaagctcaagatacagacaactaagcgggctaagaaaccacccaaaaacctcgagaactacatctgcccgccagagattaaaataacaattaagcaatcaggctag

SEQ ID NO: 240278 - DNA, 2055 bp, synthetic construct
  misc_feature 1..2055: note = Description of Artificial Sequence: Synthetic coding sequence
  source 1..2055: mol_type = other DNA
atgttcgcagaggccgctaagacgacgcgcccatgtggaatggccgaattcaaggaaaaaccagaggctccaacagaacagttagacgtggcgtgtgggcaggaaaatttgcccgtgggcgcatggcccccaggagccgcaccagcgccttttcaatatacacccgatcatgttgttggacctggggctgacattgatcctacacagatcacatttcctggttgtatttgtgtcaagacaccgtgtctcccaggaacatgctcttgtttgcggcacggagagaattatgacgacaactcatgccttagggatatcggtagcgggggtaaatacgcagagccagtcttcgagtgtaatgtactctgtaggtgcagcgaccactgtagaaacagagtggtgcagaaggggctccagttccacttccaggtgtttaagacccacaaaaaaggctggggcctccgcacgcttgaatttattcccaagggacggtttgtgtgcgagtacgctggcgaggtgctgggattttccgaagtccagaggagaattcatctccagactaaaagtgactcgaattatattatcgccatcagagaacatgtgtacaatggacaggtaatggagactttcgtcgatccaacatatattggcaacatagggcgatttcttaatcatagctgtgagccaaatctgctcatgatcccggtaagaattgactctatggttcctaaacttgcacttttcgccgctaaggacattgtcccggaagaggaactgtcatacgactattctgggcgatacctcaacctaaccgtctccgaggataaagagcgcttagatcacggaaaactcaggaagccatgttactgtggggcaaagagctgtacagcttttttgcctttcgattctagtctgtattgccccgtggagaaatccaatatctcctgcggcaatgagaaagaaccaagtatgtgtggctccgctccttccgtgttcccatcatgtaagagactgacccttgaaacgatgaaaatgatgctggacaaaaagcagatacgggctatctttctttttgagttcaagatggggagaaaagcagctgaaaccaccagaaatataaacaatgcctttgggccaggtactgccaatgaacggaccgtacagtggtggtttaagaaattttgcaagggagatgaatcgctggaagacgaggagcgctcaggcagaccgtctgaagtagacaatgatcagttgagagccattatcgaagctgatcccctgacaactacccgggaggtggcagaagagctaaacgtcaaccacagtaccgtggtcaggcatctcaaacagatagggaaggtaaagaaattggacaaatgggtaccacacgagctgactgagaatcagaaaaaccgtcgatttgaagtctcgtccagtctgatcctcagaaatcataatgaaccctttttggacagaatcgtgacctgtgacgagaagtggatcttgtatgataaccggcgacgttcagcgcagtggttggatcaagaggaagcacctaagcacttccctaagccaattctccaccccaagaaagtgatggtaaccatctggtggtccgccgctggcctcatccattatagtttcttgaaccctggggagaccatcacctcagaaaagtatgctcaagagattgatgagatgaatcagaagctgcaaagactacaattggccttggtcaacaggaaggggcctatcctacttcacgacaatgctcgccctcatgtggctcagccgactcttcagaagttgaacgagctgggctacgaggtgttgcctcaccccccttactcgcctgatctcctgcctactaattatcatgtattcaaacacctcaataactttctgcaggggaagcgctttcacaaccagcaggatgctgaaaacgcattccaggaattcgtggaaagtcagtccaccgatttttacgcgacaggcatcaaccagctgatttctcggtggcagaaatgcgttgactgcaatggatcctacttcgactag

SEQ ID NO: 240279 - DNA, 1098 bp, synthetic construct
  misc_feature 1..1098: note = Description of Artificial Sequence: Synthetic coding sequence
  source 1..1098: mol_type = other DNA
atgttcgctgaggccgcaaagacaacacggccttgcgggatggcagaatttaaagagaagccagaggcccctacagagcagttggacgtggcatgtgggcaggagaatctcccagtcggagcatggccacctggcgctgcacctgccccatttcagtacacaccagatcatgtggtcggtccaggagcagatatcgacccaacccaaatcacattccctggctgcatctgtgtgaagaccccatgcctgcccggtacctgctcgtgcttgcggcatggcgagaactatgatgataatagttgcctcagagatatcgggtccgggggtaaatacgcggagcctgtgtttgagtgcaacgttctctgtcgatgctccgatcactgccggaacagggtggtgcaaaagggtctccagtttcacttccaggtctttaagacccataagaagggttggggactgcggacgctagagttcattcccaaaggacgctttgtatgtgaatacgccggagaggtcttgggattttcagaagtacagcggagaatccatttgcaaaccaagtctgatagcaactatatcatagccatacgggagcacgtgtacaacggtcaggtgatggaaacatttgtcgacccgacatatattgggaacatcggcagattcctcaaccacagttgcgagcccaatttactgatgatccccgtgaggatcgattctatggtgcccaagctagcactgttcgccgctaaggatatagtcccagaagaagagttatcatatgattattccggccgttatttgaatctcaccgtgtctgaagacaaagagagactggatcacgggaaactgcgaaaaccctgttattgcggcgctaaatcttgcactgccttcctgcccttcgatagctcactctactgccccgtggagaagagcaacatcagctgcggtaacgagaaggaacccagcatgtgtgggtccgcacccagcgtgttcccatcctgcaagcgtctgacactcgaggtcagtctcttcagtgataagcagctggctcctccttattccggaaggcagtggcttgcgagcttcacaagcgcatag

SEQ ID NO: 240280 - DNA, 516 bp, synthetic construct
  misc_feature 1..516: note = Description of Artificial Sequence: Synthetic coding sequence
  source 1..516: mol_type = other DNA
atgttcgccgaagcagccaagactaccaggccttgtgggatggcagagttcaaagagaaacctgaggccccaaccgaacagctggacgtcgcttgtggacaagaaaatctgcccgtgggagcctggccacccggtgctgcccctgctcctttccagtatacacctgatcacgtggtggggccaggtgctgatattgaccctactcaaatcacattcccagggtgcatttgtgtcaagactccctgcctgccgggaacctgctcttgtctcaggcacggagagaattatgacgacaatagctgtctgagggatatcggtagcggagggaaatacgcagagccagtctttgaatgcaacgtcctttgtcgctgctctgaccattgtaggaacagggtggtacagaaaggtctccaattccactttcaggtattcaagacccacaaaaaggggtggggtcttaggacgctggagtttatccctaaagggcgtaaagttgagcaccagctttggaagtag

SEQ ID NO: 240281 - DNA, 1101 bp, synthetic construct
  misc_feature 1..1101: note = Description of Artificial Sequence: Synthetic coding sequence
  source 1..1101: mol_type = other DNA
atggacagcgacgatgaaatggtggaagaagccgtcgaaggccacctggacgacgatgggctcccacatggattttgtaccgtgacctacagcagtaccgacagatttgagggaaactttgtacacggggaaaagaacggccgtgggaaattctttttcttcgatggctcaacactcgagggctattacgtcgacgacgccctgcaggggcagggggtgtatacatacgaggatgggggagtcctgcaaggcacatatgtcgacggagaacttaatggccctgcacaggaatatgataccgacggcaggctaatttttaagggccagtataaagataatatcagacatggcgtgtgttggatttattaccccgatggcggatctttagtgggtgaggttaatgaagacggcgaaatgacaggagaaaagatagcatatgtctaccctgatgagcgcactgccctgtacggaaagttcattgacggtgagatgatcgaaggcaaattagcaacattgatgtcaactgaagagggtcgccctcacttcgagctcatgcctggcaattccgtgtaccactttgataagtctaccagctcttgcatctccacaaacgcacttctgcccgatccttacgagtccgagagagtttatgtcgccgaatccctgatcagttcagccggagaggggctgttcagtaaagttgctgtgggacctaacactgtgatgtccttttacaacggagtgaggatcactcaccaggaagtggactcacgcgactgggcgctgaacggcaacaccctgtcactggatgaggaaacagttattgacgtgcccgagccctacaaccatgtgagcaagtactgtgcatcactggggcacaaggcgaaccacagcttcaccccaaattgtatttacgatatgtttgtgcatccacgatttggaccaatcaaatgtatacgcactctccgcgctgtggaagctgacgaggaattgacggtcgcctacggctatgaccattcccccccaggaaagtctggacccgaagccccagagtggtatcaggttgagctgaaggcttttcaggccacgcagcaaaagtag

SEQ ID NO: 240282 - DNA, 5124 bp, synthetic construct
  misc_feature 1..5124: note = Description of Artificial Sequence: Synthetic coding sequence
  source 1..5124: mol_type = other DNA
atggatcaggagggtggaggcgatggtcagaaggctccgagctttcagtggcgaaactataaactgatagtggatccagccctagaccctgccctgcggaggccctcccagaaggtgtataggtacgatggagttcattttagcgtcaatgacagcaaatacatcccggtcgaggatctccaagaccctaggtgccacgtgcgatctaaaaatcgagattttagcttgcctgtgcctaaatttaagctggatgaattctacatcggccagattcccctgaaggaggtcacttttgcccgtctcaacgacaatgtgagagaaacgttcctgaaagatatgtgccgcaaatatggcgaggtagaagaggtagaaatcctgctacacccccgtacaagaaaacacctcggtctagcgcgtgttctctttacttctacaaggggggcaaaggaaaccgtcaaaaatctgcaccttacctctgtgatgggcaacatcatccacgcccaattggacattaagggacagcagcggatgaagtattacgaactgattgtaaatggcagttataccccacagacggtccccacaggagggaaagccttgagcgagaaattccaggggagcggtgccgcaactgaaaccgcagaaagccggcgaaggtcgtctagcgacactgcggcatacccggctggtacaaccgccgtcggaacacccggaaacggcacaccgtgcagccaggataccagtttttcctcgtccagacaggatacgccttcgtcctttggccagttcacccctcagtcctcccaaggaacaccctacacatctaggggcagtactccatattcccaggatagtgcctacagctcatctaccacctcaaccagctttaaacctcggcgatccgaaaactcttaccaggatgcatttagccggcgtcattttagcgcctcaagcgcgtcaactacagcctcaaccgccattgccgcaacgactgctgccacggcatcatcatccgcctctagttcctccctaagctcatccagctccagttcatcttccagctcatcttcacagttccgaagctctgacgctaattatcctgcctactacgagtcttggaaccggtatcagcgccacacgagctacccccctcgccgtgccaccagagaggagcctccgggtgccccattcgctgagaacaccgctgagcggttcccgccttcatatacctcatacttaccgcctgagccgagcagaccaaccgaccaggactacagacccccagcaagtgaggccccacctcccgagcctcctgagcccggaggaggaggagggggagggggacccagccctgagcgcgaggaagttcgcacatctcccagacccgcatcacccgctcggtccgggagtccagccccagagaccacaaatgagtctgttcccttcgctcagcacagctcactagacagtaggatcgagatgctcctgaaagagcagcgatccaagttctcatttctggcctccgacacagaggaggaggaagagaactcttcaatggtgctaggcgcacgggacacaggttctgaggtcccgtcgggttctgggcatggcccttgtacccctcccccagcccctgctaattttgaagacgtggccccaacggggagcggggagcccggtgccactcgggagagtcccaaggcaaacggccagaaccaggcaagtccctgttcctccggtgacgatatggagatttctgacgatgatagggggggttctccaccccctgcccctaccccaccacagcagcccccaccgccacccccaccaccccctccccctccaccttatctcgcatccttgccgcttggatatcccccacatcaaccagcttatctgttgccaccccgaccagacggaccgcctccccctgaatacccacccccaccaccccctccgcctcacatctatgactttgtgaactccttggagctaatggatcgcctgggcgctcagtgggggggaatgccaatgtcatttcagatgcagacacagatgctgactcgtttgcatcagcttcgccagggtaagggtctgatcgctgcttcagctgggccacctggtggcgctttcggagaggccttcctgccattcccccctccacaggaggctgcttatggactcccctatgcgctatacgcccagggacaggaaggcagaggcgcatatagccgagaggcttaccacttgcccatgcccatggctgcggaacctctcccctcatcatccgtgagcggcgaggaagcacggctccccccaagagaggaggcagaacttgccgagggaaagactttaccaacggccggaaccgtggggagagtgcttgctatgttagttcaggagatgaagtccataatgcagcgggacctgaatagaaagatggtcgaaaatgtagcgttcggcgcatttgaccagtggtgggagtccaaagaggagaaggccaagccgttccagaacgctgccaagcagcaagcaaaggaagaagacaaagagaaaacaaaacttaaagagcctgggcttctcagcttagttgactgggcgaagagtggtggaacaaccgggatagaggcctttgctttcggatccggcctgaggggagccctccgactgcccagctttaaggtcaagcgcaaagagccttcagagatatctgaagcctccgaggaaaaaaggcccaggccctctacccccgcagaggaggatgaagatgatccagagcaagaaaaggaagctggcgaacccggtcggcctggtacgaagccgcctaagagagatgaggagcgcggaaagacccagggtaaacaccgaaaatccttcgccctggactctgagggtgaagaagcctcccaggagagttcttctgagaaagacgaagaggatgatgaggaagacgaggaagatgaagatcgagaggaagcggtcgacacaaccaagaaggaaaccgaggtctcggatggcgaggatgaggaatctgatagctcctccaaatgtagtctgtacgccgactctgatggagagaacgatagcacatccgattcagagagctcttcctctagctcaagtagttctagtagcagctcttcaagttcctcctcttcctctagttcttcttcggagtccagtagtgaggacgaagaggaagaagagcgccctgccgcacttccctccgccagccccccacctagagaggtgcctgttcccacacctgcgcctgttgaagtccctgtccctgaacgggtcgcaggcagtccagtaacccctctcccagagcaagaggcttcccctgccagaccggctgggccaactgaggagagccccccttctgcccctctgcgacccccagaacccccagcaggaccccctgcgcctgctcctagaccagatgagagaccgtcaagtccaatcccgctccttccgccaccaaaaaaacgccgaaagactgtgagcttctccgcaatcgaggttgtgccagccccagagcctcctcctgccacacctccccaggccaaatttccaggacccgcttctcgaaaggcccctaggggggtagagagaaccattcgcaacttgcctttagatcatgcctcactagttaagagttggccggaggaagtctcccgcggaggcagaagtagggcaggcggtcgcggaaggcttacagaagaggaggaggccgaacccggtacagaagtagacctcgctgtgctggctgacttggcactgacccctgcgaggagggggctgccagccctgcctgcggtggaggattctgaggcgacagagaccagtgatgaagccgagcgccctaggccattgctgtcgcatatcttattggagcacaactacgcattggccgtcaagcccaccccacccgctcccgctttgcggccacctgaaccggtgcctgctccagccgctctattttcgagccctgccgacgaggtcttagaggcgcctgaggtagtggtggctgaagcagaggagcctaagcctcagcagctgcagcagcagcgcgaggagggcgaggaggaaggcgaagaggaaggtgaagaagaggaagaggaaagctctgattctagcagctcaagcgatggcgagggcgctctgcgacggagaagtctcaggagccacgctagaagacggcgtccccctccgccaccaccacccccacccccacgtgcatacgaacccagaagtgagttcgagcagatgaccatcctgtacgacatctggaacagcggtcttgacagcgaggacatgtcctacctccggttaacatatgagagattgttacagcaaacctccggagctgactggctcaacgatactcactgggtacatcacacaatcactaatttaacgaccccaaagaggaagaggaggccacaggatggacctcgggaacaccagacggggtccgccagatctgaaggctactatcccatctctaagaaggaaaaggacaagtatttagatgtttgccccgtcagcgcccgacagctggagggagtggacacacagggcaccaatagagtactttcggagagacggtccgagcaaaggaggcttctgtccgccatcgggacctccgccattatggactcggatctcctgaaattaaatcagctcaaatttagaaaaaaaaagctgcgcttcgggagaagccgaatacacgaatggggactgtttgctatggagcccatcgccgctgatgagatggtgattgaatatgtggggcaaaatatccgacagatggtagccgatatgcgcgagaagcgctatgtccaggagggcataggatcctcctacctgtttcgagtggaccacgatacaattattgacgcgactaagtgtgggaatttggccaggttcatcaatcactgttgcacccctaattgctacgctaaagtgatcactatagagtcgcagaaaaagattgtaatttacagtaagcagcccatcggcgtcgatgaggagataacgtacgactataagttcccacttgaagacaacaagataccctgcctctgcgggacggaatcctgcagagggtcacttaactag

SEQ ID NO: 240283 - DNA, 213 bp, synthetic construct
  misc_feature 1..213: note = Description of Artificial Sequence: Synthetic coding sequence
  source 1..213: mol_type = other DNA
atggaccaagaagggggtggagatggacagaaggccccaagcttccagtggcggaactacaagctcattgtcgaccctgcactggatcccgctctccggagaccaagtcagaaagtgtaccggtacgatggagttcacttctccgttaacgattctaaatacattcccgtggaggacctccaggatcccaggtgtcatgtgcgaagtaaatag

SEQ ID NO: 240284 - DNA, 744 bp, synthetic construct
  misc_feature 1..744: note = Description of Artificial Sequence: Synthetic coding sequence
  source 1..744: mol_type = other DNA
atggaccaggagggtgggggtgatggccagaaggcaccgtcttttcagtggagaaactataaactcatcgtggacccagcgcttgatcctgctctcagacgtccatctcagaaagtgtatcggtacgacggggtgcatttctctgtaaacgattccaagtacattcccgtggaagatcttcaggatcctcggtgtcacgttagaagtaagaatcgtgacttttctctgccagttccaaagtttaagttggacgagttttatataggtcagatccctctcaaggaggtgacattcgcccgtctaaatgacaatgtacgcgagacttttctcaaggacatgtgtaggaagtacggagaggtggaggaagtggaaatactgttgcaccccagaacccgaaagcatttaggcctagccagagttctcttcaccagtacaagaggggctaaggagaccgtgaagaacctccatctcactagcgttatgggtaatataatacatgcccaactggatattaagggtcagcagcgtatgaagtattatgagttaattgtgaacggatcatatacaccccaaaccgtccccactggcggtaaggcattgtcagagaaattccagggctcaggagccgctaccgagacggccgagagtagaagaaggtcctccagtgacaccgctgcataccccgctgggacaaccgcggtcgggactcccggtaacgggactccatgcagtcaagacacttag

SEQ ID NO: 240285 - DNA, 5771 bp, synthetic construct
  misc_feature 1..5771: note = Description of Artificial Sequence: Synthetic coding sequence
  source 1..5771: mol_type = other DNA
atggagaactcccaccctccgcatcatcaccaccagcaacctccccctcagcctggcccttctggagaaagaagaaaccaccactggcgcagttacaaactgatgatcgaccccgctctgaaaaaaggacatcataagctgtataggtacgacggccagcattttagtctcgctatgtccagcaatcgcccagtcgagatagttgaggaccctcgggtggtgggaatttggactaagaataaggaactggagctttctgtgcccaagtttaaaatagatgagttttatgttggtccagtgcctcctaagcaggtgactttcgccaaactgaacgataacatccgagagaacttcctcagagatatgtgtaaaaaatacggggaagtggaagaagttgagatcttgtataacccgaagacaaagaaacacttgggtattgctaaggttgtgtttgccaccgttagaggcgctaaagacgctgtacagcatctacactcaacaagcgtgatggggaacattatccacgttgagttggacactaagggcgagacccgcatgagattctatgagctcctggtcactgggaggtacactccacagactctgcctgtcggggaactggatgcagtctccccaatcgtcaatgagacccttcaactgagcgatgctctgaaacgcctgaaggatggaggtttgtcagcaggttgcggcagcggaagctcttctgtgacgcccaattcagggggaacacccttctctcaggataccgcctacagttcctgtaggttggatacccctaacagctatggtcaggggacacccctgaccccccgactgggcactccttttagccaggacagttcatactcaagcaggcagcccaccccatcatacctttttagccaggaccctgccgttacatttaaagccaggcgtcacgagtcaaaattcacggacgcctataataggcgccatgagcaccattacgtgcataactccccagccgttaccgccgtagcaggtgccactgctgcatttcggggtagctctgacctcccatttggcgctgtgggcggtacgggcggatcaagcggcccaccattcaaggcccagcctcaggactcagccacatttgcacacactccacctcccgcacaggccacaccggcacccggtttcaaaagtgctttctccccgtatcagacacccgtggctcatttcccccctccacctgaagaaccaacagccacagctgcattcggtgccagggactcaggtgagtttagacgcgctcccgcaccccctccacttccgccagcagaaccactggctaaagagaagcctggcaccccaccagggccacctccgcctgatactaatagtatggaattgggcggtagacccacttttgggtggtcaccagaaccctgcgattctcctggaactcccactctagaatcaagccctgcaggccctgagaagccccatgattcgctggatagccggattgaaatgctgcttaaggaacagagaacgaagctcctgtttttacgggagcccgattcagatacagagttgcagatggagggaagccccataagcagctccagctctcagctctccccactggctccgtttgggaccaatagccaaccaggattcagaggccctacacccccatcatcaaggccaagcagtaccgggctagaggatatcagtccaacccccctaccggatagtgatgaggacgaggagctcgacctgggtctggggcctcgcccaccccctgagcctggcccacccgaccctgccggattgctgtcccagacagccgaggttgcactggatctcgtgggggatcgaacccctacatctgagaagatggatgagggccagcagagctcaggagaagacatggaaatcagtgacgatgagatgcccagtgctcctatcactagcgctgactgtccaaagcctatggttgtgaccccaggtgccgctgctgttgccgcacctagcgtcctggctccaactctgcctctcccccctccccctggctttcctcccctcccccctccccctccgccacctccaccccaaccaggttttccaatgcctcccccactcccaccccctccacctcccccacccccagcccaccctgctgtgaccgtccctccacctcctctgcctgctcctccaggcgtgcctccacctcccattctgccgcctctgcctcccttcccccctggtctcttccccgtaatgcaagtggacatgagccatgtgcttgggggtcagtggggagggatgcccatgtcattccagatgcaaacccaagtgctcagccggctgatgacagggcaaggagcttgcccttacccaccatttatggctgccgctgccgctgccgcttccgccggtttgcagttcgtcaacctgccaccctacagaggccctttttccttgtctaacagtggtcccggtaggggacagcattggcctcccttgccaaagttcgatcctagcgtcccccctccaggctacatgcccaggcaggaggacccccacaaagccaccgtcgacggcgtcctattagttgtactgaaagaactaaaggctataatgaaacgggatctgaacaggaaaatggtcgaagtcgtcgcttttcgggctttcgatgaatggtgggacaagaaggagcgcatggctaaggcctccctgactcccgtgaagagcggcgagcataaggatgaagaccgtcccaagccgaaagaccgcatagcttcgtgcttactggaaagttggggcaaaggggaaggcctgggctacgaaggcctgggtctagggattggtctgcggggagcaatcaggctccctagctttaaggtgaagcgcaaggagcctccagacacgacatcttcaggagatcagaaacgcttgaggccttccacaagtgtcgacgaggaggatgaggagtcagagcgggagcgggacagagatatggctgacactccttgtgaactggctaaacgcgatcctaaaggcgtcggggttcggagacgaccggctaggccgctggaacttgacagtgggggagaggaggacgagaaggagtctctgtccgaggaacaagagtccactgaagaagaggaagaggctgaagaggaggaggaagaagaggacgacgacgacgacgattctgacgaccgcgatgagtccgagaacgatgacgaagacaccgctctgtccgaggccagcgaaaaagatgagggagacagcgacgaagaagaaactgtatctatcgttacgagcaaagcggaggccacttcatcaagcgaatcatctgagtcgtccgagttcgagtcctcctctgaatcatcaccctcatcctccgaggacgaggaggaagtggtggccagagaggaagaggaggaggaagaggaggaggagatggttgccgaagagtctatggcttcagccggacccgaggacttcgaacaggacggcgaggaggctgcacttgcgccaggagcccctgccgtggactccctgggcatggaggaagaagtggatatcgagacagaggccgtggctcccgaagaaagaccctccatgttagatgagccaccacttccggtgggcgtggaagagcctgctgatagccgtgagccaccagaagagcccggactctctcaggagggcgctatgttgctgtctccagaacccccagccaaagaggttgaagcaagaccgccactaagtcccgagcgagcacctgagcacgatctggaagtcgagccggaaccccctatgatgttgccgcttcccttgcagccaccattaccccctcctagacccccaaggcccccaagcccacctcctgagccagagacaacagacgcctcacatccgagtgttcctcctgaacctctggccgaggaccatccaccgcacactccaggtctgtgcggcagccttgccaaatcacaaagcacagagacggttcctgccacaccgggaggtgaaccgcctctcagcggagggtcatctgggttatccctgtcgtctcctcaggtccccggttcaccgttttcttacccggctccctctcccagtctgtctagtggtgggctgccgaggactcccggaagggatttctctttcacaccaacattctctgaacccagtggccctctgctgctgcctgtttgtcccctgccaacaggcaggagggatgagaggtccggacctcttgccagcccggtgctcctggaaaccggactgccactgccactcccactgcctctaccattaccgctagcattgcctgcagtcctccgggctcaagcccgagctccgacccccctaccacccctactccccgcacccctggccagctgtcccccacccatgaaaagaaaacccggaagaccaagacgctctccgccatcaatgctgagtcttgacggtccactggtacgacctcctgccggtgccgcacttggtcgggagctgctgcttcttcctggacagcctcagacacctgtctttccaagcactcatgatcccagaactgtaacactcgacttcagaaatgccggtatccccgcacccccacctccacttccccctcagccaccccctccaccgcctccccctcctgtagaaccaacaaagctccctttcaaggagcttgacaaccagtggccatctgaagcaataccccctggcccaagggggagagatgaggtgactgaagaatacatggaattggctaaatctcggggaccttggcggaggcctcctaaaaaacgtcacgaagacctggtgcctccagccggaagtcccgagttatcccctcctcagccgctttttcgaccacggagcgagttcgaagagatgactatcttgtacgacatatggaacggtggcattgacgaagaagacatcaggtttctgtgtgttacctatgagaggctgctccagcaggataacggcatggattggcttaacgacaccttgtgggtataccaccctagcaccagtctcagctccgccaagaagaaaaagcgcgacgacgggatccgcgaacatgtcaccgggtgtgccagaagcgaaggattttacactatcgataaaaaggataagttaagatatctgaattcctcacgcgcttcaaccgatgagcctccagctgacacccagggcatgtctatccctgcacaaccacatgcctccactcgagctggcagcgagagacggtcagagcaaaggcggttattgtcatctttcacaggctcctgcgactcagatctcctaaaattcaatcaactgaaattcagaaagaagaagctgaagttctgtaagtcgcacatacatgactggggattattcgctatggaaccaatagcagcagatgagatggtgatcgaatatgtgggacagaatataaggcaggtgatagctgacatgagagagaagcggtacgaggacgaaggaatcggttcctcttacatgtttcgcgtggaccacgataccataattgatgcaacaaagtgtgggaactttgcacggtttatcaaccacagttgcaacccaaactgctacgccaaggtgataacagtggaatcccagaaaaaaattgtgatttatagcaagcagcacattaatgtcaatgaagaaataacctatgactataagtttcctattgaggacgttaagatcccatgtctatgtgggagtgagaattgccgcggtaccctcaatta

SEQ ID NO: 240286 - DNA, 5771 bp, synthetic construct
  misc_feature 1..5771: note = Description of Artificial Sequence: Synthetic coding sequence
  source 1..5771: mol_type = other DNA
atggaaaacagccaccccccacaccaccatcatcagcagcctcctccacaacctggaccctccggtgagcgcaggaaccatcactggagatcttataaacttatgatagatcctgctctcaagaaggggcaccataagctgtatcgctacgatggacagcacttctctctcgctatgtcatctaaccggccagtggagatcgtcgaagaccctcgagtcgtgggcatttggaccaagaataaggagctcgagctaagcgtaccaaaattcaagatcgatgagttctacgtagggccagtgcccccaaaacaagtgacattcgccaaactgaacgataacatcagagagaattttctcagagacatgtgtaagaagtatggcgaggtggaggaagtcgaaattctttacaaccccaaaacgaagaagcatctgggaatcgccaaagtggtatttgcaacagtgcgcggagctaaggatgcagttcagcacttacatagcacgagcgtaatggggaatatcatccatgtcgaactggacaccaagggggagactagaatgagattctacgaactcctggtgacaggacggtacactccccaaactcttcctgtcggagagctggatgcagtgagccctatcgttaacgagacactccaactcagcgacgctctgaagagactgaaagacggcggactgagcgctggatgcggatccgggtcttcttccgtgactcctaattcaggtgggacgccgttttcccaagatactgcatactcttcatgtcgcctagatacccctaactcgtatgggcaaggtaccccgctgactccacgcttaggaactcctttcagtcaagattccagttacagttcccggcagccaaccccaagctacctcttttctcaggacccagcagtgacttttaaagcacgccgacacgagagcaagttcaccgacgcatataaccgacgccacgagcatcactacgtgcacaactcgccagcagtgacggcggtagcaggcgcaaccgccgcattccgaggaagctcagatttgcccttcggcgctgtggggggaacaggcggtagttccggccctccatttaaagcccaaccacaggactcggcgacgtttgcccacactcctcctcctgcgcaggcaactcccgcaccaggtttcaagtccgcctttagcccataccagaccccagttgcacatttccccccacccccagaagaacctactgcgacagccgctttcggggcaagagacagcggagagtttaggcgagcccctgctccacccccattaccccctgccgaacctctggccaaggaaaagcccggaaccccacctgggccacctccccctgataccaacagtatggagctgggaggacggccaacgtttggatggtcccccgaaccctgcgactcccccggaactcctaccttagaaagcagcccagccggtcctgaaaagcctcacgacagtttggatagcagaattgagatgctgttgaaggagcagcggacaaaactgctgtttctcagggagccagattccgataccgagctgcagatggaaggctcccccatcagttcatcttcctctcagttgagcccattggctcccttcggtaccaacagtcagccagggttcagggggccaaccccaccctcatcacgaccctccagcacggggctggaggacatctctccaacaccactgcccgacagcgacgaagacgaagaactcgacctcggcttgggcccaaggcccccaccggaacctggacccccagatccggctgggctgctctcccagactgctgaggtggcgctggatctggttggcgaccgcactcccactagtgaaaagatggatgagggacaacagagcagcggcgaggacatggagattagcgatgatgaaatgccaagcgcccctatcacttccgccgactgcccaaagcctatggttgttacccccggtgccgctgccgttgccgctccctcagttctcgccccaacgctaccccttccaccacctccaggctttcccccattgcccccacccccacctcccccaccaccacagccaggttttccaatgccccctcctctgcccccacccccaccccctcctcctcctgcacaccccgctgttaccgtcccacccccaccactgcccgctccaccaggagtgcctcctccgccaatcttgcctcctctgcctccctttccccctggattgttccctgtcatgcaggtggacatgagccacgtgctgggcggacaatggggcggaatgcctatgtctttccagatgcaaactcaagtcctgagtcgccttatgactgggcaaggtgcttgcccctatccccctttcatggctgcagccgctgccgctgcatcagcagggctacagtttgtgaacctgcccccttatagaggaccattttcactgtcaaactcaggccctggcaggggacagcactggcccccactgccaaaatttgacccctcagtaccccctccaggttatatgcctaggcaagaggatcctcacaaggcgactgtggacggcgtgcttctggtcgtccttaaggagctgaaagccataatgaagcgggacctgaaccggaaaatggtggaagtcgtggcttttcgggcattcgacgaatggtgggataagaaggaaagaatggctaaggcgtcattaacccctgtgaagagtggtgaacacaaagatgaggacaggcccaagcctaaagataggattgcttcttgtctgttagagtcatggggtaagggcgagggtctcgggtacgaagggttgggacttggaattggtctcagaggggctatccgcctgccctcgttcaaagttaaaaggaaagaaccgcctgacactacctcttctggcgatcagaagcgactgcgaccctctacctcggtcgacgaagaggatgaggagtctgagcgagaacgggacagggacatggctgatacaccttgtgagctcgccaagcgcgacccgaaaggagtgggcgtgaggcggagacctgcaaggcccctggaactggactctgggggagaagaggatgagaaagagagcctctcggaagaacaggagagcacagaagaggaagaggaggctgaggaggaggaagaagaggaagatgatgacgacgacgattcagatgatagagacgagtcagagaacgatgatgaggatacagccttaagcgaagcgagcgagaaggacgagggcgactccgacgaggaagagacggttagcattgtcaccagcaaggcagaagcaacatctagttccgagagtagcgagagctctgaattcgagtcttctagtgaatcctccccttccagcagcgaggacgaagaagaggtggtagccagggaggaggaggaggaagaggaggaggaggaaatggtggctgaggaaagcatggcctcagctgggcctgaagatttcgagcaagacggagaagaagccgcattggcgccaggtgcccctgccgtcgatagtctggggatggaggaagaagtggacatcgagacagaggccgttgcccctgaggagaggccttccatgctggatgaaccaccccttcccgttggcgtcgaagagcccgctgattctagagagcctccagaggagcctgggctctctcaggagggggcaatgctattaagccctgagcccccagcaaaggaggtggaagcacgaccaccattgagcccggaacgggcaccagagcatgacctggaagtggagcctgagccacccatgatgctccccttgccactgcagccaccccttccccctccaagaccccctagaccaccgtccccaccaccggagcctgaaacgacagatgcatctcatccttcggtgccccctgaacccctggccgaagatcatcctccccacacaccaggcctgtgcggcagtctggccaagtcccaatcaaccgaaactgtccctgcaacaccagggggagaacccccactcagtggaggcagctcagggctgtcccttagttccccccaagtgccgggatccccttttagctaccccgcaccttctccgagtttatcctcaggagggttgcctaggacaccgggaagagatttctcttttactccaacattctctgaaccatccggccctctactgctccccgtctgtcccctccccaccggtcgacgagacgaaagatctgggccactggcaagtcccgtgctcttggaaacaggcttgcccctgccactgccactgccgctgccgctacccctggctctgccagctgtactgcgcgcacaagcgagggccccaactcctctgccaccactgctccctgccccattggccagctgtcctccccctatgaagcgaaagcccggaagacctagacgctctccgcctagtatgctcagcctggatggtcccctggtaagaccaccggctggagcagctttaggacgcgaattgctgctcctgcctgggcaaccacaaactcccgtctttccttccactcacgacccaaggaccgtaacactggatttcagaaatgccggaatccccgcacctcccccaccgctgccaccacagcctcccccaccacctcccccacctcccgtcgagcccaccaagctcccttttaaagaactcgacaaccagtggccctcggaagccatcccacccggaccacgaggacgggatgaggtcacagaagaatacatggagctcgcaaaaagcaggggaccctggagacggcctcctaagaagaggcatgaagacctcgttcccccagctggcagtccagagttgtctccccctcagccactgttcaggccaagatcagaattcgaagaaatgactatattgtacgatatctggaacggcggaatagatgaggaggacatcaggtttctttgtgtcacctatgaacgactcctgcagcaggataatggaatggactggctgaatgataccctctgggtgtaccaccctagcacctccctctcttcggcgaagaaaaagaaacgggatgacgggatccgcgagcacgtgacaggatgtgctcggagcgagggtttctacactatcgataagaaggataagttgagatacctcaacagtagccgtgcctcaactgatgagccccctgccgacacacaggggatgtctattcccgcacaacctcacgcaagtacccgggcaggcagcgaaaggaggtctgagcagaggcgtttgctctctagcttcaccggtagttgcgattccgacctgctcaagtttaaccaacttaaatttaggaaaaagaagctcaagttctgcaagtcccacatccacgattggggacttttcgctatggagccaatagccgcagacgagatggtgattgagtatgttggccagaacattcgccaggtaatagcggatatgagagagaagaggtatgaggatgaaggcattggatcctcgtatatgttcagggtggatcatgatactataatcgatgccactaagtgcggcaacttcgcacgctttattaaccacagttgcaatcccaactgctatgctaaggtgataaccgttgagtcacagaagaagatagtgatctacagcaagcaacatatcaacgtcaacgaagagataacttatgactacaagttcccaatagaggacgtaaaaataccgtgtctgtgtgggtccgagaactgccgtggcacacttaacta

SEQ ID NO: 240287 - DNA, 7694 bp, synthetic construct
  misc_feature 1..7694: note = Description of Artificial Sequence: Synthetic coding sequence
  source 1..7694: mol_type = other DNA
atgaagcagctgcaaccccagccaccccctaaaatgggagacttttatgacccagaacacccgacacccgaagaggaagaaaacgaggcaaagattgagaacgttcagaagacaggcttcattaaaggtccaatgtttaaaggggtggcatctagcaggtttctgccaaaaggcaccaagacaaaggttaatctcgaggagcaggggagacagaaggtcagtttcagtttcagcctcactaagaaaacattgcagaatcggttcctgacggcactgggaaatgagaaacagagtgatactcctaacccccctgctgtgcctttacaggtggacagcactccaaagatgaaaatggaaattggagataccctctctaccgcagaggaatcatctccccctaagtcccgggtggaactcggcaagatacatttcaagaagcatcttctgcatgttacatccagacccctgctggctacaaccaccgcagtagccagcccccctacccacgcagcccctttgccggctgttattgccgaatccaccacagtcgattctccaccctccagtcccccaccaccccctcccccagctcaggcaactacgctgtctagtccagctcccgtgaccgaaccagtcgctctgcctcacactcccatcactgtgttaatggccgctcccgtgcccctccccgtggacgttgctgtcagatcccttaaggaaccacctatcattattgtgcccgagagcctggaggctgataccaagcaagataccattagtaactctctggaggagcatgttactcagatcctcaacgagcaggctgacataagcagtaaaaaggaagacagccatataggtaaagacgaggagatcccagactcatcgaagatttcactgagttgcaaaaagacaggaagtaagaaaaagagtagtcagtccgagggaatctttctgggcagcgaaagcgacgaggactccgtacgaacatcgagctcacaaagatctcacgacttaaaattctcagcatccattgagaaggagcgcgacttcaagaagtcctccgctccccttaagagcgaggacttgggtaaaccctcccgctccaagaccgacagagacgacaagtatttcagctattccaagttagagcgggatacccggtatgtgtcaagtcgatgtcggtccgagcgagaacggcgacgttcaagatctcactctcgctctgaacgcggttctcgtaccaacttatcctactctcgctcagagcggagtcactactatgacagcgaccggcgataccaccgttcgtctccctacagggagagaacacggtattctcgcccatacacggacaatagggcacgggagagctctgatagtgaagaggagtataagaaaacctatagtcggcgaaccagctcgcactcctcctcatatcgagacttaagaacatcatcgtactcgaagagtgacagggactgcaagaccgagacatcttacctggaaatggagcggagagggaagtacagctcaaagttggagagggagtccaagcgtactagcgaaaatgaagctatcaaacgttgctgttcaccgcctaacgagttgggctttcggagaggcagctcttacagcaaacatgactctagcgcttctagatacaaaagtaccctgtcaaagcccatccctaagtctgataagttcaagaacagtttttgttgcactgaattgaatgaggaaattaaacagagtcactcgttcagtctgcaaacaccctgtagtaagggtagtgagctcaggatgataaacaaaaaccctgaaagggaaaaagctggcagcccggcaccgagcaaccgcctgaatgactcccccaccttgaaaaagctagatgagttgcctatttttaaaagcgagtttatcacccacgacagccatgactctataaaggaactagatagtctcagtaaggtaaagaacgatcaattgcgtagcttctgcccgattgagctaaacattaatggctcacctggtgcagaatctgaccttgcaactttttgcacatcgaaaacagacgcagttcttatgacgtcagacgactctgtcacaggatctgagctgagccctctggtgaaggcatgcatgctgtcttccaacggttttcaaaacatctccaggtgtaaggagaaggacctcgatgacacctgcatgctccataaaaaatcagagtctccttttcgggaaactgagcccctggtttcaccacaccaggacaagttaatgtccatgcccgtaatgacagtcgattattctaagaccgttgtcaaagagcccgttgatacacgagtgtcatgctgcaagaccaaagatagcgatatctactgtacacttaacgattcaaacccatctctgtgcaacagcgaggcggagaatatcgaaccatctgtgatgaagatctcttctaatagtttcatgaatgtgcacctggagagtaaacccgtcatctgcgacagtcgaaacctgactgaccactctaagttcgcatgtgaggagtataagcaaagcattggatctacatccagcgcctccgtgaatcactttgacgacctttatcagcctatcggcagctctgggattgcttctagtctgcagtctctgcctcccggaatcaaagtggattctctgactctgcttaagtgcggcgaaaatacttctcccgtcctggacgccgtactcaagagcaaaaaatcctcggagttcctgaagcacgcgggaaaggagaccatcgtggaggtcgggtccgatcttcccgatagcgggaagggttttgcaagcagagaaaatcgccgaaacaatggactgagcggcaaatgcctccaggaggcacaggaggagggtaactccattctgcccgagcgaagaggtcgccctgaaatctctctagatgagcgaggtgagggcggacatgttcacaccagcgacgactctgaggtggtgttctcctcctgcgacctaaacctgactatggaggacagtgacggagtgacctacgctctaaaatgtgattccagtggacatgcaccggagatcgtgagcactgtgcacgaggattacagcggctcgagcgaatcgtcgaatgacgagagcgactccgaggacactgattccgatgatagtagtatccctaggaatagactacaaagcgtggtcgtggtacccaagaacagcacattaccgatggaagagacctcgccctgctccagtcgcagttcccagagttataggcactattctgatcactgggaggatgagcggctagagagtaggcgacacctctacgaagagaagttcgagtcgatcgcctccaaagcctgtccccagacggacaaattctttcttcacaagggtactgagaaaaatccagagatctcattcactcagtcaagccggaagcaaatcgataatagactcccggagctgtcccatccacagtccgacggagtggacagtacgtcccatacagatgttaagtcggacccactcggacaccctaacagtgaggaaacggtcaaggctaaaatcccctcccggcaacaagaagaacttcccatctattcctctgactttgaggacgttcctaacaagtcatggcagcaaacaactttccagaaccggccagattctcgactgggtaagaccgagctcagtttcagtagcagctgcgagatcccacatgtggatggcttgcatagttccgaagagctgcggaatttgggatgggatttctctcaggaaaagccttctactacataccaacagccagattccagctacggcgcatgtggtggacacaaatatcagcaaaacgccgaacagtatggcggaacaagggactattggcaagggaacgggtattgggatccgcgatcaggtaggccaccagggactggcgtggtgtacgatcgcactcaaggacaggtaccagactcactgaccgacgatagagaagaggaggaaaattgggaccagcaagatggctcgcatttctccgaccagtcagataaatttctcctgtccttgcagaaggacaaaggctctgtacaggcgccagaaatatcgagtaattccattaaagacacccttgcagtcaatgagaaaaaggacttcagcaaaaatcttgagaaaaacgatatcaaggaccgtggcccactgaaaaagcgacgtcaggaaatcgagtccgacagtgagtccgatggagagcttcaagatcgcaaaaaagtgcgggtagaggtcgaacagggagagaccagcgtgccccctggcagcgctctggtgggcccttcctgcgtaatggacgatttcagagacccccagcgctggaaagagtgcgccaagcagggtaagatgccttgctatttcgacctcatcgaagaaaacgtttatctgaccgaaaggaagaagaataagagccatagagatatcaaaaggatgcagtgcgagtgcacccccctgtcaaaggatgaaagagcccagggagagatagcgtgtggcgaggactgtctaaatcggcttctcatgatcgagtgtagttcccgctgccctaatggcgactattgctctaaccggaggtttcagcgcaagcagcatgctgatgtagaagtcatactcacagaaaagaaaggctgggggcttagagctgcaaaggacctcccctcaaataccttcgtactcgagtattgtggggaagtgctggatcacaaggagttcaaagcaagagtgaaggaatatgctaggaacaagaacattcactattacttcatggcactgaagaatgacgagattatagatgctactcagaaaggaaactgctcaagattcatgaaccactcatgcgagcctaattgcgaaacccagaagtggaccgtgaacggtcagctccgcgtgggcttcttcaccactaagctcgtcccgtccggctcggagctgacattcgactaccagttccagcgttatggaaaggaggcccagaaatgtttttgtggctctgcgaactgccggggatatttgggcggtgagaaccgcgtgtccatccgggcagctggtggtaagatgaagaaagaaaggagtaggaagaaggatagcgtggacggggaactagaggccttaatggaaaacggagaaggccttagtgacaaaaatcaagtattaagtctctccaggctcatggttagaattgagacgctggagcagaagcttacatgcctggagctcatacagaacacacatagccaatcatgcctgaaatcctttctggagagacatggcctgagtctactatggatctggatggccgagctaggagacggcagagaaagcaaccagaagctccaggaggagatcataaaaactctggaacacttacccatccccaccaaaaacatgctcgaggagtcaaaggttctcccgatcattcagcggtggtcacagacaaaaaccgcagtgccccctctgagtgagggcgatggttattcatctgagaatacctctcgggctcataccccactgaatacgccagatccttcaactaagcttagcacagaggccgacacagacacacccaagaaactcatgtttcggaggctaaaaatcatttctgaaaactctatggattcagccattagtgatgccacaagcgagctcgaaggcaaggacggaaaggaagatctggatcagctcgaaaacgtacctgtcgaggaggaagaggaactgcagagtcagcagttgcttccccagcaactccccgaatgtaaggttgacagcgaaaccaacatcgaagcatctaagctgcccacatccgagcccgaagcggatgcagaaatcgaacccaaggaaagtaacggcactaagctggaggagccaataaacgaggaaacacctagccaggatgaggaagagggcgtatccgacgtggagtctgaaaggagccaggaacagcccgacaagacagtggatatcagtgatcttgctacaaagctgctggacagctggaaggatctcaaagaagtgtataggatccctaagaaaagccaaacagaaaaggagaatacgacaacggagagagggcgagatgcggttgggttccgcgaccagaccccggcaccaaaaaccccaaacagatcaagagaacgcgatccagacaagcagacacagaataaggagaagcgaaagaggcgttcttctttatccccgccttcctccgcctacgagagaggcaccaagcggccagacgataggtacgatacccccacttctaagaagaaggtgcggattaaggacaggaataagctctccaccgaggaaaggcgcaaactttttgaacaagaagtagcccagcgtgaggcccagaagcagcagcaacagatgcagaacctgggaatgacaagcccactgccttacgactcgctggggtacaatgcccctcatcatcctttcgccggatatccgccaggatacccaatgcaagcctacgttgaccctagtaaccctaacgccggtaaggtcctgcttcccactcccagcatggatcctgtctgctcccccgctccgtacgatcatgctcagcctttagtaggtcatagcactgagcccctgtctgcgcctccacccgtgcccgtcgtgccacatgtcgcagccccagttgaggtcagctcatctcagtatgtcgcccagagtgatggcgtggtgcaccaggattcatcggtggccgtcctgccagtgcccgctcccggacccgtccagggacaaaactactcagtctgggattccaaccagcagtctgtcagtgtccaacagcaatactctcccgcacagagccaagctacaatttattaccagggccaaacatgcccaacagtgtacggcgtcacttcgccatactctcagacaacacctcccatcgtgcagagttatgctcagccatctctccagtacatacagggtcagcaaatcttcacggcccatcctcaaggagtggtagtgcagccagcggcagcagtgactactatcgtagctccaggtcagccccagcccctccagcccagcgagatggttgtgacaaataaccttcttgacttaccacccccaagcccccctaagcccaagactatagtgttaccccctaattggaagacagcgcgagaccccgagggaaagatttattactatcacgtcatcacccgtcagacacagtgggacccccctacgtgggagtcaccgggagacgatgcctccctggaacacgaagcagagatggatctcggaacccccacctacgatgagaacccaatgaaggccagcaaaaaaccgaagacagcagaggcagacacaagttctgagctggctaagaagagcaaagaagtgtttagaaaggaaatgagtcagttcatcgtccagtgcctcaatccctatcgcaagcctgattgtaaagtaggcaggataactacaacagaagactttaagcatctggccaggaagctcacacatggcgtaatgaacaaagagctgaaatattgtaagaatcccgaagatctggagtgcaacgaaaacgtgaagcacaaaactaaagagtacatcaagaagtacatgcagaagttcggcgcagtttacaaaccaaaagaagacacagagctagaata

SEQ ID NO: 240288 - DNA, 7694 bp, synthetic construct
  misc_feature 1..7694: note = Description of Artificial Sequence: Synthetic coding sequence
  source 1..7694: mol_type = other DNA
atgaagcagctgcagcctcagccgcctcccaagatgggagatttttatgatcctgagcaccctacaccggaagaacaggaacccgaggcaaaaatcgaaaacgtacagaagaccggcttcatcaaagggcctatgttcaaaggggtggcttcatcccgtttcctccctaaaggcacaaaaaccaaggtgaatcttgaagaacagggtcgccagaaagtctccttcagtttttccctgacaaagaagaccctccagaatagattcttgaccgccctcggaaacgaaaagcagagcgatacccccaatccccctgcagtccctttacaggtcgactctacaccaaaaatgaaaatggagattggggacactctaagcacagcagaagagagttctcctcccaagagccgggttgagctgggcaagatccacttcaaaaaacacttgctgcacgttaccagtcggcctttgctggctactaccacggccgtcgcctccccccctactcacgcagcccctctccctgccgtcatcgccgagagcactacagtcgattcgcccccatccagcccgccaccaccgccaccaccggctcaagccacaacgttaagcagcccagcgccagtgaccgaaccagtggccctcccccacacaccaattaccgttctgatggcagctcccgtgccccttccggtggatgttgcggtgcggtcactgaaagaacctcccatcattatcgtgcctgaatctctcgaagccgatacaaaacaggacacaattagcaattctttggaagaacatgttacacagattctcaatgagcaggccgacatcagctctaagaaggaagacagccacatcgggaaggatgaagagatcccagattcaagcaaaatcagtctttcttgtaagaagactgggagcaaaaagaaatctagccagtcagaaggcatctttcttgggagcgagtccgacgaggactcggtacgcaccagctcaagccaacggagccatgacctgaagttcagcgcctctatcgagaaggagagagatttcaaaaagtcttcagctccgctgaagagcgaggacctggggaagccaagtcgctctaagaccgatcgtgatgacaagtattttagctactctaaactcgaaagagacacccgctatgtctcaagtcgatgcaggtctgaacgcgagcgacgtaggtcccggtctcattcacgctccgaaagggggtcacgaactaacctgtcttacagccgttctgagcggtcccactattacgactctgatcgccgataccatcgttcttcgccttacagagaacgtacaagatactctagaccgtataccgacaaccgagcccgtgagagcagtgactccgaggaagagtacaaaaagacatattccaggaggacaagttctcactctagttcataccgtgacctgcggacctccagctacagcaagtctgaccgggattgcaaaacggagacaagctacttggagatggagagacgcggaaaatacagctcaaagttggaaagggaatcaaagaggacctctgaaaacgaggctataaaacggtgctgcagtcctccgaatgagttaggatttcggagaggcagctcttattccaaacacgacagctctgctagtagatataagagcactctgagcaaacctataccaaaaagtgataagtttaagaatagcttttgctgtaccgaacttaatgaggaaatcaagcagagtcattcgttcagtcttcaaacaccatgcagcaaaggctcggagctgcgcatgattaataagaatccagagagagagaaggccggaagccccgctccgtctaacagactgaacgacagccctaccctgaagaaactagatgaattacctatcttcaagagtgagtttattactcatgattctcatgattcgataaaggagcttgattcgctgtccaaggtgaaaaacgaccagctgcggtccttctgtcccatagagctcaacatcaacggatccccaggcgctgaaagcgaccttgcaactttctgtacatctaagaccgacgccgtgttaatgaccagtgacgactctgttaccgggtcagagttgagcccgctggtgaaggcctgcatgctgtcctccaatggatttcaaaacatttccaggtgcaaggaaaaggatcttgatgacacatgcatgctccacaaaaagagtgagtcaccctttagggagactgagcccctggtgtcgcctcatcaggataagctgatgtccatgcccgtgatgaccgtggattacagtaaaactgtggtgaaggaacctgtagatactcgtgtatcctgttgtaaaaccaaggattccgacatctattgtacactgaacgatagcaacccatcactctgtaattctgaggcagagaacatcgaaccctcggtcatgaagatctcatccaacagctttatgaatgttcaccttgaaagcaagccagtaatttgtgattctcgcaatctaactgatcactctaagttcgcatgcgaagaatataagcagtccatcggctccacaagctctgccagcgtgaatcactttgacgacctgtatcagcctatcggctcgtctggaatagcttcaagcttgcagagtcttcctccgggtattaaggtcgacagtctcaccttactgaaatgcggtgaaaacacttcgcctgtgctggacgccgtcctcaaatctaaaaaatccagtgaattcttaaaacatgctgggaaggaaactatcgtggaggttggctccgacctcccagattcaggcaaaggatttgccagtagagagaatagacgcaataatggactgtctgggaagtgcctgcaagaggctcaggaggaaggcaactccattctgcccgagcgacgtggaaggccagaaattagccttgacgagaggggggagggagggcacgttcatacgtccgacgatagcgaagttgttttcagtagttgtgacctaaacctgaccatggaagattcagacggcgtgacctatgctctgaaatgtgactccagtggccatgcaccggagatcgtctcgactgtgcatgaggactattctgggagctctgaaagtagtaatgatgagtcagattctgaggacaccgattccgacgattcctccattccgcgaaatcggctgcaaagtgtcgtggtggtgcccaagaactctactttaccaatggaggaaacatcaccctgctcctcccggagtagccagtcataccggcactattcagatcattgggaggatgagcgactggagagtcgaagacacctatacgaggaaaagttcgagagcatcgccagcaaagcctgcccccagacggacaaatttttcctccataaagggacagagaagaaccccgagattagctttacgcaaagttctcggaagcagatcgacaataggctgcctgaattgtcacacccccaatctgatggcgtcgactcaacttctcataccgacgtaaagtctgaccccctgggtcatccaaattccgaggagacagtaaaggcgaaaatccccagccgccagcaagaagagttacccatatacagttcagactttgaggatgtccctaacaagtcctggcagcaaaccacgtttcaaaatcgcccagatagccgtctgggaaaaacggaactgtcattctcgtccagttgtgagattccacacgtggatggcttacactcatcagaggaactgcggaatctaggctgggatttctctcaggaaaaaccaagcacaacttaccaacaaccagatagtagctacggcgcttgtggcggacacaagtaccaacaaaatgctgagcagtacggtgggacgcgggactactggcaaggcaatggctattgggacccacggagcggccgaccgccaggcacaggggtcgtgtacgaccgcactcagggccaggtaccagattccctgaccgacgatcgtgaggaggaagagaactgggatcagcaggatgggtcccacttctccgatcagagcgacaagtttctgcttagtctgcagaaagacaagggcagtgtccaggccccagagatcagcagcaattcgattaaagatactctggctgtgaacgagaaaaaagacttttccaagaacctcgagaaaaacgacatcaaagaccgaggcccactcaagaagcgcagacaggagatagagagcgattccgaatctgatggggaactacaggaccgcaaaaaggtacgcgtggaggtggaacagggagagacgagtgttccccctggatccgccctggtgggccctagctgtgtcatggacgatttccgcgacccacagcgttggaaggagtgtgctaagcagggaaagatgccatgttattttgacctgatcgaagagaacgtataccttactgagcgaaaaaagaataaatcccaccgcgatataaaacgcatgcaatgtgagtgcacaccactgtctaaagacgagagagctcagggagagatcgcttgtggagaggattgcttaaaccggttgctgatgattgaatgttcgagccggtgccccaacggcgactactgttctaatcgcagatttcagcgtaagcagcatgccgacgtggaggtgattttgacagaaaagaagggctggggactgcgagccgctaaagacctgccttcgaacacatttgttctcgagtattgcggagaggtccttgaccataaggagttcaaggcccgagtgaaggagtacgcaagaaataagaatattcattactacttcatggctctgaaaaacgatgagatcattgacgctactcagaagggtaattgttcacgcttcatgaatcactcctgcgaacctaactgtgaaactcagaagtggacagtgaacggccaactgcgcgtcgggttttttaccacaaagctagtgccctctggatctgaattgaccttcgattaccagtttcaaagatatggcaaagaagcacagaaatgtttttgtgggagcgccaactgcagggggtatctgggaggagaaaaccgcgtgagcattcgggcagccggaggcaagatgaagaaggaaagaagcaggaagaaagacagcgtagacggtgaactggaagctctaatggaaaacggagagggcctaagcgacaagaaccaggttctgtccctgtcccgcttgatggtgcgcatcgagactctcgagcagaagcttacctgcctcgagctgattcagaacactcacagccagtcttgccttaagtccttcctggagcggcacgggttgtctctgctctggatctggatggctgagcttggggacggtcgggagtctaaccagaaactacaggaagagatcattaagacactagagcacctgcctatcccgacaaagaacatgcttgaagaaagtaaggtgctacctattatccagaggtggtcacaaacgaagaccgcggtcccccctttgtccgaaggagatggctattcttctgagaacaccagtagggcccacactcccctcaacacccctgatccgagcacaaagctctctaccgaagctgacaccgatacaccgaagaagctaatgtttagaagacttaagatcatctccgaaaacagtatggattcagccattagcgatgcgaccagcgaactcgagggtaaagatggcaaggaagacctcgatcaattggaaaacgttccggtggaggaagaagaagagttacagtcccagcaactgttacctcagcaactgccagaatgcaaggttgactctgagacaaatatcgaggcaagcaagctgcctacatctgagcccgaggctgacgccgagatcgagcctaaagagagcaacgggacgaaactggaggaaccgatcaacgaggagacaccttcccaggatgaagaggagggggtaagtgacgtggagtcagagagaagccaggagcagcccgacaagacggtggacatttctgaccttgcaaccaaactgctggattcatggaaagatctgaaggaggtttatcggatccccaaaaagagtcagaccgaaaaggagaacacgacaacagagcgcggtagagacgctgtgggattccgcgaccagacacccgcacctaaaacacctaaccggtccagggagcgcgatcctgacaagcagacacagaataaggagaagagaaaacggaggtccagcctgtcaccacccagcagcgcatacgagcggggtaccaagcggccagacgaccggtacgacacccctacctctaagaagaaagtgcggatcaaggacaggaacaagctctctaccgaagaaaggcggaaactgttcgagcaggaagtggcacaacgcgaagcacagaaacagcagcagcagatgcagaatctcggaatgactagcccacttccttacgactcactcgggtacaacgcccctcaccacccttttgcaggttaccctcctggctaccccatgcaggcctatgtcgacccaagcaacccaaatgctggtaaggtgttgctgcctaccccctccatggacccggtgtgttcgccggctccatacgaccatgctcagccgctagtgggccacagtacggaaccactgtcagctcctccgccagtgcccgttgtgccacacgtggcagccccagtagaggtctcttcttctcagtacgtcgctcagagtgacggggtagtgcaccaagattcttcagtagccgttctacccgtgcccgcacccggtcccgtgcagggacaaaattattcagtctgggacagcaaccaacagtcagtttctgtgcagcaacagtactccccagcccaatcacaggctacgatatactaccagggacaaacatgtcccaccgtgtacggtgtgacatccccttactcacagaccacacctcccatcgtccaatcttacgctcaacctagtctgcagtatatacagggacagcagattttcaccgcacatcctcagggtgtggttgtccaacctgccgctgcggtgactacaatcgtggcaccaggccagccacagccactgcagcccagcgagatggtagttacaaataatcttttggatctgccaccaccttctcccccaaaacctaaaacaatagtactgccacctaactggaaaaccgctcgggatcccgagggaaagatctactattatcatgttataacaaggcagacgcagtgggaccctcccacatgggagtccccaggcgacgacgcttctctggaacacgaggccgagatggatttaggtacgcctacctacgacgagaatcctatgaaagccagcaaaaaaccgaaaaccgccgaagcagatacgtcaagcgagctggccaagaaaagtaaagaggtcttccgaaaagaaatgagtcaattcattgtgcagtgcttgaatccatatcgaaagccagactgtaaagtagggcgaatcacaactacagaggattttaaacatctcgcacgtaaactgacacatggcgtcatgaataaggagctgaagtactgtaagaaccctgaagacctggaatgcaacgagaatgtaaagcataagactaaagagtatattaagaagtatatgcagaaattcggcgcagtgtacaaaccgaaagaagacacggagctagagta

SEQ ID NO: 240289 - DNA, 5144 bp, synthetic construct
  misc_feature 1..5144: note = Description of Artificial Sequence: Synthetic coding sequence
  source 1..5144: mol_type = other DNA
atgaagcagttgcagcctcagccaccgccaaagatgggcgacttctatgatcctgaacatccgactcccgagaagaaggagcgggaggctaaaatagaaaatgtccaaaaaacgggctttatcaaaggaccaatgttcaaaggggtagcatctagtcgattcttgccaaaaggtaccaagacaaaagtgaacctagaggagcagggacggcaaaaagtatctttctctttttcactcactaaaaaaacattacagaacaggttcctgaccgcgctcgggaatgagaagcagagcgatacccctaacccacccgctgtcccgctgcaggtcgattccaccccaaagatgaagatggagatcggggacaccctgagcactgccgaggagtctagtccacctaaaagccgggtggagctcgggaagatccactttaaaaaacacctgttgcacgtgacttcacgtcctcttcttgcaactacaacagccgtggcgagtcccccaacccacgccgcacccctgccagcagtcatcgcagagagcactacggtggactctccgccatcgtcaccccctcctccccctccacccgctcaagctacgacgctttcctccccggctccagtgactgagccagttgcactgccacacacgccaataacggtgctgatggccgcacctgtcccgcttcctgttgacgtggccgtaaggagcctgaaggagccacctataattatagtgcccgagagcctggaggcagatacaaaacaagacaccatctccaattccctcgaggaacacgtaactcagatcttaaacgaacaggcagacatatcatcgaaaaaggaagacagtcacatcggtaaagacgaggagattccagacagtagtaaaatcagtctctcttgtaagaagactggctccaaaaagaaaagctcacagagcgaggggatcttcctggggagcgagtctgacgaagactcagtaagaactagcagctctcagagatcacacgatctcaaatttagcgcctcaatagagaaagagcgggattttaagaaaagctccgcccctctgaagagcgaggacttgggaaaaccctcccggagcaagactgatcgcgacgataaatatttctcatacagcaaactggagcgcgatactaggtacgtctcgagtcggtgtaggtccgaacgggagcggagacgcagtcggtcacatagccgctcagaacgcggatccaggacaaacttgtcatactcacggtcggagcgcagccattattatgactcagatcgcagatatcaccgcagttcaccttacagggagcgtacccgttactctcggccatataccgataatcgtgcacgagagtcttccgattcagaggaagaatataaaaaaacatacagccgaagaacgtcttcccattcgtcttcctatagggacctccgaacaagcagttattctaagtctgaccgagactgtaagaccgaaacttcctacctcgaaatggaacgccgtggtaagtattccagcaaactggagagagagtcaaagcgtacctcagagaacgaagcaatcaaaagatgttgttctccacctaacgagcttggattccgccgagggagtagttattccaaacacgactcaagtgcctctcgatataaatcaacattaagtaagcctatcccaaaaagtgacaagttcaagaatagcttttgctgcacagaacttaacgaggagattaagcaaagtcattcatttagtttgcagacaccctgttctaaaggttctgagctgcggatgatcaataaaaatcccgaaagagaaaaagccggatctcctgcacccagcaataggcttaatgattcaccgacccttaaaaagctcgatgaactgcctatttttaaatccgagttcattacacatgactcccacgacagcatcaaagagttggactccctgtcaaaggtgaagaatgaccaactgaggagtttctgtcccattgagctgaacattaatgggtcacctggggcagagagtgatcttgcaacgttctgcacatcaaaaaccgacgccgtactgatgaccagtgatgacagcgtaaccggctcagagctgagcccattggttaaggcctgcatgttgtcctcaaatggattccaaaacatcagccgatgtaaagagaaggatctcgacgacacctgcatgctccataaaaaatccgaatcaccctttagagagaccgagcctctcgtttccccacatcaggacaagttaatgtcaatgccagtgatgactgtggactattctaaaacggttgtgaaggaacccgtcgacaccagggtaagctgctgcaaaactaaggattctgatatctactgcaccttgaacgatagtaacccgagcttgtgtaactcagaggcagagaatatcgagccttcggtgatgaaaatcagttccaattccttcatgaatgtacacctcgagtccaagcctgtgatctgcgattctcggaacctgacagatcattctaagtttgcctgtgaggagtacaagcagagtattgggagcaccagctcagcctctgtcaaccacttcgatgatctgtaccaaccgattggatcatctggaattgcctccagtctccagtccttgccccctggcatcaaggtcgactctctgactctactgaaatgcggcgagaacacatcgcccgtgctggacgcggtgctgaaatcaaagaagagctcagaattcctgaaacatgctggtaaagaaaccatcgttgaggtgggctctgatctgcccgacagcggcaaaggatttgccagccgagagaaccgcagaaacaacgggctgtctgggaaatgcctccaagaggctcaggaagaaggaaattccattctgcctgagagacggggacgaccagaaatcagcctcgatgaacgcggtgaaggtggccatgtccacaccagtgatgattccgaagtggtcttctccagctgcgacctgaatctgacaatggaagactcggacggagtcacttacgccctcaagtgtgacagctctggccatgcacctgaaattgtatctactgttcatgaagactattccggcagctccgagagcagtaatgatgagtctgactcggaggatactgactcagatgacagttcaattcccaggaacagactgcagtcagtggtcgtcgtgcccaagaatagcactctccctatggaggagacctcgccgtgcagctcacgtagtagtcagagctatcgacactattctgatcattgggaagacgagcgcctggaaagccgcagacacctgtatgaagaaaaattcgagagcatcgcatcgaaagcttgcccacagacagacaaattttttttgcacaagggcacggaaaagaaccccgagattagcttcacacaaagcagcagaaaacagatcgataacagactgccagaacttagccaccctcaatccgacggcgtagactcaactagccacacagacgttaagagcgatcctctcggtcatcccaattccgaagaaactgtgaaagccaaaatcccctcccggcagcaagaggagctgccaatttacagcagcgattttgaggatgtgcctaataagtcatggcagcagaccacctttcagaatcgaccagattcaaggctcggtaaaacagaactgtccttcagttcgtcttgcgagattccccatgtagacggcttgcactccagtgaagaactgcggaatttgggctgggacttttctcaggagaagccctcaaccacctaccaacaacccgattccagctacggcgcatgtggaggtcacaaatatcagcagaatgccgagcagtacggaggcacacgagactattggcagggaaacgggtattgggacccaaggagcggacggccaccagggaccggggtggtgtatgaccggacccagggtcaggtcccagatagcctcacagatgaccgggaagaagaagagaattgggatcagcaagacggaagccattttagcgaccaatccgacaaatttttgctctcactgcagaaagataaaggatccgtccaggccccagagatctcttcaaactcgatcaaagacactctcgccgttaacgagaagaaggatttttccaaaaatttggagaaaaacgacatcaaagacagaggccctttgaaaaagaggaggcaggaaatcgaatccgacagcgaatccgacggcgaattgcaagaccggaagaaggtcagggtcgaggtggaacaaggggagacttcagttcctcccggatcggcactagtgggccctagctgcgtgatggatgacttcagggacccacagcggtggaaggaatgcgctaagcagggaaagatgccatgctactttgatttaattgaggagaatgtgtatctcacagaaagaaagaaaaataaatcccacagggacataaaacgcatgcagtgtgagtgtactccgctgtcaaaggatgagcgggctcaaggagaaatcgcttgtggcgaagattgcctcaatcgcctcttgatgatcgagtgctcctcgaggtgccccaacggggactattgcagcaaccgccgatttcaacggaaacagcatgctgacgtcgaagtaatattgactgagaagaagggatgggggttgagggcagcaaaagatctgccatccaatacctttgtgttggaatactgcggggaagtattggatcacaaggaattcaaagccagagttaaggagtatgccagaaacaaaaacattcactactatttcatggccctcaagaacgacgagataatcgatgctacccagaaggggaattgtagcaggtttatgaatcactcttgcgaaccaaactgcgagacccagaagtggacagttaatgggcagttacgcgtcgggttcttcacaaccaagctagtaccctccgggtccgaattaacgttcgactatcaatttcagcggtacggtaaggaggctcagaaatgcttctgcggcagtgctaactgcagggggtatctggggggagaaaacagagtgtcaatccgggctgccggaggtaagatgaaaaaggaacggtcacgaaaaaaggactctta

SEQ ID NO: 240290 - DNA, 3876 bp, synthetic construct
  misc_feature 1..3876: note = Description of Artificial Sequence: Synthetic coding sequence
  source 1..3876: mol_type = other DNA
atgtccagccttcctgggtgtataggcttagacgctgctacagccaccgttgagtcggaagagatcgctgagctacaacaggctgtagttgaagaattgggaatctctatggaggagttgcgtcattttatagatgaggaactcgaaaagatggactgcgtgcagcagcgaaaaaagcaactcgccgagctggagacctgggtgatccaaaaggaatctgaggtggcacacgtggatcagctgttcgacgacgccagccgggctgtcactaattgtgaatcgcttgtgaaagatttttactcgaagctcggactacagtatcgggatagttcaagcgaggacgagagctctaggcccaccgagattatcgagatccccgacgaggacgatgacgtcctgtctatcgatagtggggacgccggatctagaactccaaaggaccagaagcttagggaggccatggcagcgctaagaaagagtgcccaggatgtccagaaattcatggatgctgtgaacaagaagtcatcatcccaggatttgcacaaaggaacgctgtctcagatgtcaggcgagttgtctaaagacggagatctcattgtgagcatgaggatcctcgggaaaaagcgcaccaaaacttggcataagggtaccctcattgcaatccaaaccgtgggcccaggaaagaagtataaggtgaagtttgacaacaaggggaaatccctgttatccggcaatcatatcgcttacgactaccatccgcctgcagataagctctacgtgggatctagagttgtagccaagtacaaggacggtaaccaggtgtggttatatgctggaattgtggccgaaacccctaacgttaagaataaattgaggtttctgatctttttcgatgatggctacgcctcatacgtgactcagagtgaactgtacccgatctgccgccctttgaagaagacgtgggaggatattgaggatatatcttgtcgggactttatcgaggaatacgtcacggcgtatcccaatcgtcctatggttctgttaaaatcgggccagctcataaaaacagagtgggaaggcacctggtggaaaagtcgcgtcgaagaggtcgatggcagcctggtgcgtattctttttctggatgataagaggtgtgagtggatatataggggctcaacaagactggaaccaatgttctccatgaaaactagttcagcttctgccctcgagaaaaaacaaggccaactaaggacaagaccaaatatgggcgctgtccgctcaaaggggccagttgtgcagtacactcaggacttaaccggtaccggcacccagttcaagcctgtggaaccccctcagcccacagcacctcccgctcctccttttccgccagcgccacctctgagcccccaggccggagatagtgacttagagagtcaactcgcccagtcaaggaagcaagtcgctaagaagtcaacttctttccgacccggttccgtcgggtcgggccatagctcccctaccagtcctgccctttccgagaacgtgagtgggggaaaaccaggtataaaccaaacgtaccgatcccccctgggctccaccgcctccgcccctgctccttccgccctgccagcccctccagctccgccagtcttccatggaatgttagaacgtgcacctgctgagccctcttaccgtgccccaatggaaaaactgttttatctaccacatgtttgctcctatacatgcctcagtcgggtgagaccaatgcgcaacgagcagtatcgcggaaagaatcccctccttgtccccttgctgtatgactttcgccgaatgacggcaaggagacgggttaaccgtaaaatgggttttcacgtaatttataagaccccatgtgggttgtgtttgcgcaccatgcaggaaatagagcgctatctgttcgagactgggtgtgatttcctgttcctagaaatgttctgtctcgatccctatgtgcttgtggaccgcaaatttcagccttacaaaccattttattacatcttggatataacatacggtaaggaggacgtgcccctcagctgcgtgaatgagattgataccaccccaccaccacaggtggcctattctaaggagcggattcccggtaaaggcgtttttatcaacacagggcctgagttcctggttggatgtgattgcaaagatgggtgcagagacaagtctaagtgtgcctgtcatcagcttactatccaggccacggcctgtaccccaggcggtcagattaatccgaattccggttatcagtacaaacgtctggaggagtgtctcccaaccggggtgtacgagtgtaataagaggtgcaagtgcgaccctaacatgtgcaccaatagactggtgcaacacggcctgcaggtgaggctgcagctatttaaaactcaaaacaagggatggggtatacgatgcctcgatgacatagccaagggctcctttgtgtgtatatatgccggtaagatcctgactgacgattttgccgataaagagggattggaaatgggggatgagtacttcgccaatctggaccacatcgaaagtgtggaaaacttcaaagaggggtacgagagcgatgcaccatgcagttccgattcctcaggcgtagacttaaaggaccaggaggatgggaatagcggcaccgaggatccagaagagagtaacgacgacagcagtgatgataacttctgtaaggatgaggacttcagtaccagttccgtttggcgtagctacgcaacccggagacagactaggggacagaaagaaaacggcttgtccgagaccaccagcaaggatagccatcctccagatctgggaccaccccacatcccggtcccaccaagcataccagtcggtgggtgtaaccctcccagtagcgaagagacacctaaaaataaagtcgccagctggctctcctgtaattccgtgtcagagggaggttttgcggattctgactcacattcatctttcaagactaacgaggggggagaggggagggccggtggctctcggatggaggccgagaaggccagcacaagtggtctcgggattaaagatgagggcgacattaagcaggccaaaaaagaagataccgacgacaggaacaagatgtcagttgtgacagagtcatcgcgcaactatggatataatccttcccccgttaaaccagaggggcttaggaggccaccatcaaagacttcaatgcaccagtcacgtcgcctaatggcctccgctcagtcaaaccctgatgacgtcttgacgctctcctcctctaccgaatcagaaggcgaatctggcacaagtcgtaaaccgaccgccggacagacttccgctaccgctgtggattctgatgatatacagactatttccagcggatctgagggcgatgatttcgaggataagaaaaacatgacagggccaatgaaaagacaggtggctgtgaagagcacgcggggatttgccctcaaatcaacacacggaatcgcaatcaagagcacaaacatggcttctgtagacaagggagaatcagcccctgtcaggaagaatactaggcagttctatgacggggaggaatcttgctatatcatcgatgcaaagctcgaaggcaacctgggcagatacctgaatcactcttgtagccctaatctcttcgtccaaaacgtgtttgtggacactcacgacctccggttcccttgggtggccttttttgcttccaagcgcattagagcgggaacggagctcacttgggattacaactacgaggtcggcagcgtcgaaggtaaggagctactctgctgctgcggagcaatcgagtgtcgtggtagactcctgtag

SEQ ID NO: 240291 - DNA, 1194 bp, synthetic construct
  misc_feature 1..1194: note = Description of Artificial Sequence: Synthetic coding sequence
  source 1..1194: mol_type = other DNA
atgagttctcttcctgggtgtatcgggctcgacgctgcgaccgcgaccgtcgagtccgaggaaatcgcagagctgcagcaggctgtcgttgaggagttaggtatcagtatggaggaactgcgacacttcattgacgaggagcttgagaagatggattgtgtgcaacagcgcaagaaacagctggcagaactggaaacatgggtgattcagaaagaatcagaggtagcacacgtggaccagctatttgatgatgcttcgagagccgtgactaattgcgaatccttagtgaaggacttttactctaaactcggtctgcagtaccgcgattcctctagcgaggacgagagttcccggcctaccgagattattgaaatccccgatgaagacgacgacgtactgtctatcgattctggagacgccggaagccgtacaccgaaggatcagaagctgcgcgaggcaatggctgccttgaggaaatccgcccaggatgtgcagaagtttatggacgccgtgaacaaaaaaagtagctcgcaagatctgcataagggaaccctgtcacagatgtcaggcgaattgagcaaagatggggacctcattgtttcaatgcggatacttggaaagaagagaaccaaaacttggcataagggaacactgatcgccatccaaaccgtcggcccaggaaagaaatataaggttaaatttgacaacaagggcaagtcattgctcagcggaaatcatatcgcttacgactatcacccacccgctgacaagctttacgtggggtcccgggtggttgccaagtataaagatgggaatcaggtgtggctgtatgccggtatagtggctgaaacaccaaatgtcaagaataagctgagattcctcatttttttcgatgatggctacgcaagttacgtgacccagtcagagctttaccctatttgcagaccacttaagaagacttgggaagatatcgaggatatcagctgccgagacttcatagaagagtatgtcacggcttatccaaatcggcctatggtgcttcttaagagtggacagctgattaagaccgagtgggagggaacgtggtggaagagtcgcgtggaggaggtcgacggctccctagtcagaatccttttcctggtactgttcttctctacaatcctggaagcagaggtgggcggaggcggaacttag

SEQ ID NO: 240292 - DNA, 750 bp, synthetic construct
  misc_feature 1..750: note = Description of Artificial Sequence: Synthetic coding sequence
  source 1..750: mol_type = other DNA
atgtcatcactcccagggtgtatcggccttgatgcagcaacagcgactgttgaaagtgaagagattgccgagcttcagcaggcggttgtggaggagctagggattagcatggaagaactgcgtcacttcattgatgaggaactggaaaaaatggattgcgtgcagcaacgcaaaaagcagctggcagagctagagacctgggtaatccagaaagaatcggaggtggcccatgtggatcaactgtttgatgacgcttcgcgagctgtaaccaattgtgagtcgcttgtcaaggatttctacagcaaactgggcctgcaatacagagattccagtagcgaggacgagtcttcccgcccaaccgagataattgaaatacccgatgaagatgacgacgtcctatcaatcgactctggcgacgcaggtagccgtactccaaaagaccagaaactccgcgaagcaatggcagccctgaggaagtccgcgcaggacgtccagaaattcatggacgctgtgaataagaagtcctcctctcaggatttgcacaaaggaactctgtcccagatgtcaggcgagctgtccaaggacggagatctcattgtgtcgatgcgaatcctcggcaaaaagcgcacgaaaacctggcataagggtactcttattgccatccagaccgttgggttctccttctcactcatgatggcaatgttaccaatgagtcattcccggaattgcataccttttgctggccactag

SEQ ID NO: 240293 - DNA, 3873 bp, synthetic construct
  misc_feature 1..3873: note = Description of Artificial Sequence: Synthetic coding sequence
  source 1..3873: mol_type = other DNA
atgtccagtctccctggctgcattggactggatgcagccaccgctacggtagagagcgaagagatcgcagaactccaacaggccgtcgtggaagaacttggtatcagcatggaggagctgaggcattttattgatgaagagttggagaagatggactgcgtgcagcagcgaaaaaagcagctggccgaactagaaacctgggtgatccagaaagaatctgaggttgcacacgttgatcagctgttcgacgacgccagtagggccgtgaccaactgcgagagcctcgttaaggatttttacagtaagctgggcttacaatatagagacagttcttccgaagacgagtcatccaggccgaccgagatcattgagatcccggacgaagatgacgatgtgctgtccatcgacagtggcgatgcaggtagccggactccaaaggaccaaaagctgagagaagctatggcagcgctgcggaaaagtgcccaggacgtgcagaaattcatggatgctgtcaataaaaaatcctcttcacaggatttacataagggcaccttgtcacagatgtctggagaactctctaaggacggcgacctaatcgtgagcatgcgcattctgggcaaaaagcgaactaagacttggcataagggcaccctgattgccatccagacagttgggccaggaaagaagtacaaagttaagtttgacaataaggggaagtctctgttgagtggcaatcatattgcttacgattaccatcctcccgctgacaaactgtatgttgggtctcgggtggttgctaagtataaggatggcaatcaggtttggctctatgcgggaatcgttgccgaaacccctaacgtgaaaaacaagctgcgcttccttatcttctttgacgatgggtatgcttcatacgtgacacaatccgagttgtatccaatttgtcgcccactgaagaagacctgggaggacatagaggatatctcctgtagagactttatagaggaatacgtcaccgcctaccccaatagacccatggtgcttctgaagtccggtcagcttatcaagactgagtgggagggaacatggtggaagagcagggtcgaggaggtcgatggctccctggtgcgaatactgtttcttgacgataagaggtgcgaatggatttacagaggctcaacccggctggaacctatgtttagtatgaagacctcatccgcctccgccttggagaaaaagcaggggcagctccggacccgcccaaacatgggagcagtgagatctaaagggcctgtggtacagtatacccaagatttgacgggcaccggaacacaatttaaaccggtcgaacctccccagccaactgccccaccagcccctccatttcctcccgcaccccctctctcccctcaggctggtgactccgacctcgagagtcaacttgcgcagtctagaaaacaggttgccaagaaatcaacaagcttccgaccagggagcgtgggttctggccattccagtccaactagtcctgccctaagcgaaaacgtcagcggtggcaagcctggcatcaaccaaacctatagatccccccttggaagcactgcctctgcccctgcgccaagcgcccttcctgctccacctgctcctcccgtctttcacggcatgttggagagagcgcctgccgaaccatcttaccgcgcaccaatggagaaactgttttatcttccccacgtgtgctcatacacctgcctgtcaagggtacggcctatgagaaatgagcagtatcggggaaaaaatcctttgctggttcccctcctttacgactttagaaggatgacagccaggaggcgagtgaatcggaaaatgggtttccacgtgatctacaagaccccctgtgggctgtgcctaaggacaatgcaagaaattgagagatatctctttgaaactgggtgtgattttttatttctggaaatgttctgtttggatccctatgtgctggtcgaccgaaagttccagccctataaacctttctactacattctggacataacatacggcaaggaagacgttcccctatcctgcgtgaacgagattgacacaacacctccaccgcaagtggcttattcaaaggagcgcattccaggcaagggcgttttcatcaatactggacccgaattcctggtagggtgtgactgcaaggacggctgtagagataagtcaaaatgtgcttgccatcagctgaccattcaagctaccgcatgcacgcccggagggcaaattaacccgaattccggctatcagtacaagagactggaagagtgtctccccaccggagtgtacgaatgcaataaacgatgcaaatgcgatcccaacatgtgtaccaaccgcttagttcagcatggccttcaggtccgactgcagttgtttaaaacacagaacaaaggctggggaatccgttgtctcgatgatattgcgaagggctcctttgtatgtatctacgctgggaaaattcttacggacgattttgccgataaagagggattggaaatgggagacgagtattttgccaatctggaccacatcgagtccgtggaaaattttaaagaaggttacgaatccgacgctccctgttcttctgacagctccggggtggacttgaaagatcaggaggacggcaactcagggacagaggatcctgaagagtctaatgacgattcctccgatgataacttctgcaaggacgaggacttctctacctcctctgtgtggagaagctatgccactcgcagacagactcgagggcagaaagagaacggcctctccgaaacgacatcgaaagatagccatcccccagacctgggacctccgcacatcccagtcccccctagcataccagtaggaggctgtaacccaccgagttcagaggagacacccaagaacaaggtggcctcatggctgtcctgcaactcagtgtctgaaggaggcttcgccgattccgactctcattcctccttcaagaccaatgagggaggagaaggtcgcgcaggcggaagtcggatggaggccgaaaaggcaagcacgagtggactaggtattaaggacgaaggagatattaaacaagctaagaaagaagacaccgatgaccgaaacaagatgagtgtggtaactgaaagctcacggaactacggatacaatccttctcctgttaagccagaagggctgcgacggccaccctccaaaacctccatgcaccaatcaaggcgcctgatggcctccgcccagtctaatccagacgacgtgttgactctttcaagttctaccgaaagtgaaggcgaaagtggcacatctcgtaagcctactgcaggacagacgtccgccacggccgtagacagcgatgacatacagacgattagctcaggatcagaaggcgacgacttcgaggacaagaagaacatgacggggcctatgaaaaggcaggtggccgttaagtctacccggggtttcgctcttaaatcgacgcatgggatcgccatcaagagcacaaatatggcctctgtggacaaaggcgaaagtgctcccgtaaggaagaacacccggcagttctatgatggcgaagaatcatgctacatcatagacgctaagctggaggggaatcttggcagatacctgaaccactcatgcagtccaaacctatttgtgcagaatgtgttcgtcgacactcacgacctgcggttcccgtgggtcgcattcttcgcaagcaaaatccgtgccggaaccgaattaacctgggactataattacgaagtcggatcagtggagggcaaggaacttttatgttgctgtggggctatcgaatgtagaggccgactgctctag

SEQ ID NO: 240294 - DNA, 504 bp, synthetic construct
  misc_feature 1..504: note = Description of Artificial Sequence: Synthetic coding sequence
  source 1..504: mol_type = other DNA
atgtcgtctctaccgggatgcatcggacttgacgccgcaactgctaccgtggagtccgaggagatcgccgagttacagcaggcggtcgttgaggagcttgggatatcgatggaggagctacgacactttatcgatgaagagctcgaaaagatggattgcgttcagcaacggaaaaagcagctggctgagctcgaaacagtaggaccagggaaaaagtacaaagtgaaattcgataacaaagggaagtcactcctgtccgggaatcacatcgcttatgattaccaccccccagccgacaaattgtacgttggaagcagagtagttgccaaatataaggacggcaaccaggtgtggctgtatgccggaattgtagccgagactcctaatgttaaaaacaagctccgattccttatattcttcgatgatggatacgccagttacgtaacccagtccgagctgtaccccatatgcagaccccgtgagtgtttcagtctaatcccgtag

SEQ ID NO: 240295 - DNA, 471 bp, synthetic construct
  misc_feature 1..471: note = Description of Artificial Sequence: Synthetic coding sequence
  source 1..471: mol_type = other DNA
atgagtagtttacctggatgcatcggcctggatgccgctaccgccacagttgagtcagaggaaattgcagagctacagcaggcagttgtagaagagctcggtatttccatggaagaactaagacacttcatagatgaggagctggaaaaaatggactgcgtccagcagcggaaaaaacagctcgcagagctggagacatgggtcattcaaaaggagtcggaagtcgctcacgtcgaccagctcttcgacgatgcatctcgcgctgtaaccaactgtgagtccctggtcaaagacttctatagcaagctgggattacagtaccgcgactctagttcagaagatgagagttccaggcccacggagatcattgaaattccagatgaggatgacgacgtgcttagcattgatagcggagacgcaggttctcggaccccaaaggaccaaaagctcagggaagcaatggcagcgtag

SEQ ID NO: 240296 - DNA, 3780 bp, synthetic construct
  misc_feature 1..3780: note = Description of Artificial Sequence: Synthetic coding sequence
  source 1..3780: mol_type = other DNA
atgtcatctcttccaggatgtatcggtctggacgctgcgaccgccaccgtggaaagcgaagaaatagccgaactccaacaggcagtagttgaagagctcgggatttcaatggaggagctgaggcatttcattgacgaggagctggaaaaaatggactgcgtacagcagagaaagaagcagctggcagagctggagacctgggttattcaaaaagaatccgaagtcgcacacgtcgaccagttgtttgatgacgcctcccgcgcagttacgaattgtgagagtctggtcaaggacttctactcaaagctgggtctccagtaccgggactcctcgagtgaggatgaatcttcaagaccgactgagataatcgagattccagatgaagatgacgacgtgctgtctatcgatagtggagacgcagggtcccgaaccccgaaggatcagaaactgagggaggccatggcggcactcaggaaatccgctcaggatgtccagaagttcatggatgcagtcaacaagaagagctcttctcaggatctgcataaaggaacactgagtcaaatgtccggtgaactgtccaaagacggtgatctcatcgtttctatgagaatcttgggaaagaagcgaaccaaaacttggcacaagggaacattaatcgcaattcagactgtgggccctgggaaaaagtacaaggtgaagttcgataacaaggggaagtctcttctctctggcaatcatattgcttatgattatcacccccctgcggacaaactctatgttggaagccgcgtggtggcaaagtacaaggatggcaaccaagtctggttgtatgccggtattgtcgctgaaacacctaatgtcaagaacaaacttcgcttcctgatattttttgacgacggatacgcaagctatgtaacacagagtgagttatatcccatatgccgccctttgaagaagacgtgggaagacatcgaagacatcagctgtagggatttcatagaggagtacgtgacagcctaccctaataggcccatggtgctgctgaaaagcggacaactgattaagaccgagtgggaaggaacttggtggaaaagccgagttgaggaagttgacgggtctctggtccggatccttttccttgatgataagcggtgcgagtggatataccgcggttcgacaaggttggaaccaatgttttctatgaaaacctcttccgccagcgcattagagaagaagcaggggcagctacgcacccgacctaatatgggggcagtcagaagtaagggcccagtggtgcagtatacgcaagacctgactggcaccggaacccagtttaaacccgtggaacccccacaaccaacggcacccccagcccctcccttcccaccagctcccccactgtctcctcaggcaggtgattccgacttagaaagccagctcgcccagagcaggaaacaggtagctaaaaaatcaacaagcttccggcctggatccgttggctccggacacagctctcctacatctcctgccctgagtgaaaatgtgtctggcggaaagccgggtatcaatcagacctacaggagcccactcggcagcactgcctctgcccctgctccctccgcgctgccagcgcctcccgctccacccgtttttcacgggatgctagaaagagctcctgctgagcctagttacagagccccaatggagaaactgttctacctgccgcatgtttgtagctacacgtgtctttctcgggttaggcccatgcggaatgagcagtacagaggcaaaaacccactgttggtcccacttttatacgatttccggaggatgaccgcccgtcgaagggtgaaccgaaagatgggcttccatgttatttataagactccatgtggactgtgtctgcgtacaatgcaagagatcgaacgttacctctttgagaccggatgtgactttctgttcctggaaatgttctgcctggatccgtacgtgcttgtggatcgtaaattccagccatataagccattctactatatcctggatatcacgtacgggaaagaggacgtcccactgagctgtgtcaatgagatcgacaccacccccccaccgcaggtggcatatagtaaggagcgaattccaggaaagggcgtgttcattaatactggccctgagtttctggtgggctgcgactgcaaagacggctgccgggacaaatcaaaatgtgcatgtcatcagctgacaatccaggccactgcttgcacacctgggggacagattaacccgaactctggataccagtataaacgcctggaggaatgtctgcctaccggggtgtatgagtgtaacaaacgatgcaaatgcgacccgaatatgtgcaccaacaggttagtgcagcacggactgcaagtgaggctccagttattcaagactcagaataaaggatgggggattagatgcctggatgatatcgccaaagggtctttcgtgtgtatttacgcaggtaagatcctcacagacgattttgccgacaaagagggactggaaatgggcgatgagtactttgccaacctggatcacatagaaagcgtcgagaatttcaaggaagggtacgagagtgatgcgccatgctcatccgattcatccggagtagacctgaaagatcaggaagatggcaacagtggcaccgaagatcccgaagagagtaatgacgatagctccgatgacaacttctgtaaggacgaggacttttcgacctcaagcgtgtggcggtcctatgcaacaaggagacaaacaaggggccagaaggagaacgggctaagtgagactacttctaaggactctcatccgcctgaccttggccctccacacatcccagtgcctcccagcatcccagtcggtgggtgcaaccccccatcctccgaggagacccccaagaacaaggtggcctcctggctctcctgtaatagcgtcagcgaaggtggcttcgcagactctgactctcacagctctttcaaaacgaatgagggaggagagggcagggctggagggtcaaggatggaggctgaaaaggcgagtactagcggccttggtatcaaggatgaaggcgatataaagcaagccaaaaaggaggataccgacgacaggaataagatgagtgtggttactgaatcctctaggaactacggatataatccttcccccgtaaagcccgagggactgcggagaccacccagcaaaacctccatgcaccagagcagacggctcatggccagcgcacagagcaatcccgacgacgttcttaccttatcatcaagcacagaatccgaaggagagagcggcacgtccaggaagcccacagccggtcagacatctgccacggctgtcgattccgatgacattcaaactatatcatcaggaagtgagggcgacgatttcgaagacaaaaagaatatgactggtccaatgaagcgtcaggtggctgtgaagagcacccgtggcttcgccttaaaatcaactcacggcatagcaataaagagcaccaacatggcgtctgtggacaagggagagtccgctcctgtccgcaaaaacactcggcaattttatgacggtgaggaatcttgctacatcattgatgccaagctggagggcaatttggggcgatatctcaatgttcgccctctgtcgcctcccctggatgcaggcctgtcacatgggcctcagatctcatttaacatcctgtacaaacccttctcatgctataaacttctgattagcaaatag

SEQ ID NO: 240297 - DNA, 492 bp, synthetic construct
  misc_feature 1..492: note = Description of Artificial Sequence: Synthetic coding sequence
  source 1..492: mol_type = other DNA
atgtctagcctgccaggttgcatcggactggacgccgcaacagcgactgttgaaagcgaagagatcgcagagctccagcaggcagtggttgaagaactgggaatctctatggaagaactgcgacattttattgatgaagaattggaaaagatggactgtgtgcagcaaagaaagaagcagctggcagaacttgagacatgggtgatacagaaggaatcagaagtggcccacgttgaccagctctttgacgacgcctcgcgagccgtgactaattgcgagtctcttgtcaaagacttctactcaaagttaggcttgcagtatagagactcatcaagcgaggatgaatcctctcgccctactgagatcattgagattccagatgaggatgatgatgtgctcagtatcgacagcggagatgccggttcccggacgccaaaagaccaaaagctgcgcgaggctatggccgctcttaggaaatctgcccaggattag

SEQ ID NO: 240298 - DNA, 1911 bp, synthetic construct
  misc_feature 1..1911: note = Description of Artificial Sequence: Synthetic coding sequence
  source 1..1911: mol_type = other DNA
atgtccagtctgccaggatgtattggactggatgctgcgactgcaactgtcgagagtgaagagatcgctgagttacagcaggccgtcgtagaggagctgggtataagtatggaggagctgcgccatttcatcgacgaggaactggagaaaatggactgtgtgcagcaaaggaaaaagcagctggccgaactcgaaacatgggttatccagaaggaatccgaagtagctcacgtcgatcagctcttcgatgatgccagcagagccgtcaccaattgcgaaagcctggttaaagacttttatagcaaactgggcttacagtacagggacagctcaagtgaggatgagagctctagacccaccgagataatcgaaatccccgatgaggatgatgacgttctctccattgactctggggacgccggatcccgcacacccaaagaccagaaattgcgggaggcaatggctgcattgcgcaagagcgcccaagatgtgcagaaattcatggacgccgtgaataagaaatcaagctcacaggatcttcataaaggcactctgagccaaatgagcggcgagctgtctaaagatggggatttgatcgtgtccatgcgaattttgggaaagaaaaggaccaaaacctggcataagggcacattgatagcaatccagacagtggggcctggcaaaaagtataaagtgaagtttgataacaaggggaaaagcttattgtcaggcaatcatatagcttatgattatcaccctccagcggacaagttgtacgtgggaagccgggtggtcgcgaagtataaggacggcaatcaagtatggctgtatgccggaattgtcgcagagacaccaaatgtgaaaaataaactgcgtttcctgatcttctttgatgacggatacgcaagttatgtgacccagtcagagctatacccgatatgtcggcctctcaagaagacctgggaggatattgaagatatttcttgtagggattttattgaggagtacgtgactgcctaccccaatcgtccgatggtgcttttgaaatctggtcagctcatcaagactgaatgggagggcacttggtggaaaagccgcgtcgaagaggtcgatggaagcctagtcagaattctgtttctggacgacaagcgctgcgaatggatctaccgtggctctacaaggctggaacctatgttctctatgaaaacctccagcgcctccgccctggaaaagaaacaggggcagctgagaacccggcctaatatgggagctgtaaggagtaaaggcccagtggtacagtacacccaagacctcaccggaacaggaacgcagttcaaacctgtcgaacccccacagccaactgccccacccgctcccccattccctccggcacctccgctgtccccacaagccggtgactccgagtcactagagtcccagctcgcccagagccgcaagcaggttgctaagaaatcaaccagctttaggcctggtagtgtggggagcggccattcttcccctacctcccccgctttgtccgaaaacgtgtccggtggtaaacccggaattaatcaaacttacaggtcacccttaggctctacagcgtccgcccctgcacccagtgcattgccagcacctccagcgcctccagtgttccacggcatgctcgagagagcaccagcagagccaagctatagagcaccaatggagaaattattttatctcccacacgtctgctcatacacctgcttgtcacgcgtacgtcctatgcgcaacgagcaataccgcggaaaaaaccctctgttggtacccctgctctatgacttccgtcgcatgaccgcacgtaggcgggtaaacaggaagatgggattccacgttatttataaaacaccatgcgggttatgtctttag

SEQ ID NO: 240299 - DNA, 2160 bp, synthetic construct
  misc_feature 1..2160: note = Description of Artificial Sequence: Synthetic coding sequence
  source 1..2160: mol_type = other DNA
atgggcgagaagaatggggacgccaaaaccttttggatggagctggaggacgacggaaaggtcgattttattttcgaacaggtacagaacgtattgcaatcactgaaacagaagatcaaagacggatctgctactaacaaggagtacatccaggccatgatactcgtgaacgaagccacgattatcaactcctcaacctccatcaagggcgcttcccagaaagaggtgaatgcccaaagctctgaccctatgccggtgactcaaaaagagcaggagaacaaaagcaacgcttttccaagcacctcgtgcgagaatagttttccggaagactgtactttcttgacaaccgagaacaaggagatcttgtctctggaagataaagtggtggattttcgggagaaggatagttcttccaacctttcctatcagtcacatgattgctccggagcctgcctgatgaagatgcccctgaacttaaagggagagaatcccctccagttgcccattaaatgtcactttcagcgaagacacgcaaagacaaacagccactctagtgccctgcacgtctcatacaagaccccttgcggtcggagtctgcgcaacgtggaagaggtgttccgctaccttctcgagaccgaatgcaattttttattcaccgataacttctctttcaacacttacgtgcaactggctagaaattacccaaagcagaaggaggttgtttcagacgtcgatatatctaatggggtcgagagcgtcccaattagtttttgtaacgagattgactcacgcaagctgccacagttcaagtaccgcaaaacagtttggccacgcgcttataacctcaccaacttttccagtatgtttaccgattcatgtgattgctccgaggggtgcatagatatcacgaaatgcgcctgtctgcagctgacagctaggaacgccaagacaagtccgctcagctccgacaagatcacaaccggctacaaatataagcgactgcagaggcagattcccactggcatttatgaatgcagtcttttatgcaagtgcaaccggcagctgtgccaaaatcgagtagtccagcacggcccacaagtacgcctccaggtttttaaaacagagcaaaaggggtggggtgtaagatgtctcgacgatatcgaccgcggtaccttcgtttgtatctactcaggtcgcctgctttctagagcaaatacagaaaaaagttacggaatcgacgagaacggacgcgacgaaaatactatgaaaaacattttctctaagaagcgtaagttggaggtcgcctgcagcgactgcgaggtagaggtgctgcctctgggactagaaacacacccgaggacagctaaaactgaaaaatgtcctcccaagttctctaacaatccgaaggaactcaccgttgaaaccaagtacgacaatatctcacggattcagtatcattcagtcatccgagatcctgagtccaagaccgcaattttccagcacaatggcaaaaaaatggagttcgttagttctgagagtgtaactcctgaggataacgacggatttaagccccctagggagcacttgaactctaagactaagggggcacaaaaagattcttcttcaaaccacgtagatgagttcgaggataacctgctgatcgaatccgacgttatcgacattacaaagtatagggaggagactcctcccaggtctcggtgtaaccaagccaccacgcttgacaaccagaacataaaaaaagcaattgaggtgcagatccaaaagcctcaggaaggacggtccaccgcgtgtcagaggcagcaggtattttgcgatgaggaactcctttccgagacgaaaaatacctccagtgacagtttgacgaagtttaacaaaggtaacgtattcctacttgacgccacaaaagaaggaaacgtgggacgcttcctaaaccatagctgctgccctaatctgctcgtgcagaacgttttcgtggagacacacaatcgcaactttccgctagtcgcattttttactaaccggtacgtgaaagctcgcaccgaactcacttgggattatggttatgaggcgggtacggtcccagaaaaagagatcttctgccagtgcggggtgaacaaatgtagaaagaagatactgtag

SEQ ID NO: 240300 - DNA, 2124 bp, synthetic construct
  misc_feature 1..2124: note = Description of Artificial Sequence: Synthetic coding sequence
  source 1..2124: mol_type = other DNA
atgggagaaaaaaacggtgatgcaaaaactttttggatggagctggaagatgacgggaaggtggatttcatctttgagcaagtccagaatgtactgcaaagtctgaagcagaagattaaagacgggtccgctaccaataaggagtatatccaggccatgattttggtgaacgaagcaacaatcatcaactcatctactagtatcaaagacccaatgcccgtcactcagaaagaacaggagaataagagcaatgcttttccatctacttcctgtgagaattccttccctgaagattgtaccttccttacaactgaaaacaaagagatcctttctctcgaggataaggtagtcgatttccgcgagaaagactccagctcgaacctctcctaccagagtcacgattgctcgggcgcttgtttgatgaaaatgcctctcaatctgaaaggagagaatccactgcagctacctatcaagtgtcacttccaacgcaggcacgctaaaaccaactcgcacagctccgcactgcatgtgagctataagaccccgtgcggccgaagcctgagaaatgtcgaagaagtatttaggtacctgcttgaaacagaatgcaacttcttgtttacggataatttttcctttaatacctatgtgcaacttgcccgaaactatccgaagcagaaagaagttgtgagtgatgtcgatatctcaaatggagtggagagcgtgcctatctctttttgcaacgaaattgacagccggaagttgcctcaatttaaatatcggaaaactgtgtggcccagggcctacaatctgacaaatttcagctccatgttcacagatagctgcgactgttctgagggctgtatcgacatcaccaaatgtgcctgcctgcaactgaccgcgagaaatgccaagacaagcccactgtcttctgataaaatcaccacagggtataagtataaaaggctgcagagacagatccctaccggaatttatgaatgcagccttttgtgcaaatgtaatcgacagttgtgccagaatcgtgtcgtgcagcatgggccacaggtgcgtctacaggtttttaagacagagcagaagggctggggggttcgctgtctggacgacatagaccgcggtaccttcgtgtgcatatacagcggtcgactgctcagcagggcaaacactgagaaatcatacggaattgatgagaatggaagagatgagaacaccatgaagaacatcttttctaaaaagcggaaactcgaagtggcttgttcagactgtgaagtggaggtgctacccctcggccttgagacccacccacgaactgctaagaccgagaagtgtcccccaaaattcagcaacaatccaaaggagcttacagttgagaccaagtacgataatatcagccgtatacagtatcactccgtcattcgcgatccagagagtaaaacagccatttttcaacataacggaaagaagatggagtttgtctcttcagagtcggtcacacctgaggacaatgatggtttcaagcctccaagagaacacttgaatagcaagactaaaggtgctcagaaagactctagctcaaaccatgtcgatgaatttgaggacaatttgctgattgaaagtgacgtgattgacattaccaaataccgtgaggaaaccccgcctcggagtcgctgcaaccaggctacaaccctggataaccaaaacataaagaaggcaatcgaagtccagatacaaaaaccccaggagggcaggtccactgcctgccagcgacaacaggtcttctgcgacgaagaactgttaagcgagacaaaaaacaccagctcagactccttgaccaaattcaacaaaggcaacgtgttcttgctggatgctaccaaagaaggcaacgtagggcgtttcttgaatcatagctgctgcccaaacctgctggtgcagaacgttttcgtggagacccacaaccgtaacttccccctggtcgccttctttaccaatagatatgtgaaggctagaactgagctgacatgggactatggatatgaggccggtaccgttccagagaaggagattttctgccagtgtggcgtgaacaagtgccgtaagaagattttgtag

SEQ ID NO: 240301 - DNA, 975 bp, synthetic construct
  misc_feature 1..975: note = Description of Artificial Sequence: Synthetic coding sequence
  source 1..975: mol_type = other DNA
atgagtaggccctcatccacaggtccttccgctaataagccatgttccaaacagccacctccgcagccccagcacacacctagcccggcagcaccgcctgccgcagcaaccatctccgccgcagggccaggcagctctgctgtgcccgcagccgcagctgttatctccggtcctggcggtggcggtggcgcagggcctgtttccccccagcatcacgagctcacctctctgtttgaatgtccagtttgcttcgattatgtcctcccacctatcctgcagtgccaagccggacacctggtctgtaatcagtgccggcagaagctctcctgttgccccacttgtcggggagccttgacccccagcattaggaacctcgctatggagaaggtggctagtgccgtgcttttcccatgcaaatacgccacaaccggctgtagcctgaccctacaccacacagagaagcccgaacatgaagatatctgtgagtataggccctactcgtgtccttgtcctggggctagctgcaagtggcagggttcattggaagccgtaatgagtcatctcatgcacgctcacaagagtatcactaccttgcagggggaggacatcgtgttcttggcaaccgatatcaatttgcctggagccgtggactgggtcatgatgcagtcctgcttcggacatcactttatgctggtcctggagaagcaagaaaaatatgagggacatcagcaattttttgcaatcgtcctacttattgggacgaggaaacaagccgaaaacttcgcttatcggctggaacttaatggtaatcgcaggcggcttacatgggaggcaacccctagatccattcacgacggtgtcgctgctgctatcatgaactcggattgcctggtttttgacactgcgatcgctcatttgttcgctgacaacggcaatctcggaataaacgtgacaatttccacctgctgcccttag

SEQ ID NO: 240302 - DNA, 990 bp, synthetic construct
  misc_feature 1..990: note = Description of Artificial Sequence: Synthetic coding sequence
  source 1..990: mol_type = other DNA
atgatgtcgaactcttcttccgaaatcgacgtcatcaagaccagaatacccacctatgatgaggatgacaataccatactatatgcttacgaaaccaagcccgaattcgttaacaaggagcctaacatagtgtctgatgcctcttgcaatacagaggaacagttaaaaactgtagatgacgtcctgatacactgccaggtcatctacgacgccctgcagaacctggataagaaaattgatgtcattcgaaggaaagtaagtaagatccagaggttccacgcacgaagcctgtggactaatcacaagagatatgggtataagaaacactcttaccgcctggtgaagaagttaaaattgcagaagatgaagaaaaatgaagtttatgagactttctcttaccctgagagttattctcctactctgcctgttagccgaagggagaacaactctcctagcaacctgccgagaccatcgttttgcatggaggagtatcagcgggcagaactggaggaagatccgattctttcgcggactcctagcccagtgcatccctctgactttagcgaacataattgtcaaccctactacgcgtccgatggcgctacatatggatcttcttctggactctgtctcggcaaccccagagcagatagcattcataatacttattctactgaccacgccagtgctgcccctcctagcgtcacaaggagccccgtggagaatgatggctatattgaggagggttccattacgaagcatccaagcacttggtctgtcgaagcagtcgtgctcttcctaaagcagactgacccattggccctttgtccactcgtcgacctgtttcgttcccacgaaatcgacggtaaagcactcttgttactgactagcgacgtgctcctaaagcacctgggggtgaagctgggcaccgccgtgaagctgtgctactacattgacaggcttaaacagggcaagtgttttgagaattag

SEQ ID NO: 240303 - DNA, 909 bp, synthetic construct
  misc_feature 1..909: note = Description of Artificial Sequence: Synthetic coding sequence
  source 1..909: mol_type = other DNA
atgatgtctaatagcagtagcgaaattgatgtgcaagagcccaacattgtgtcagacgcttcctgtaatacagaggaacagttgaagaccgtggatgacgttctgatccactgccaggtcatttatgatgctctgcagaaccttgacaaaaagatcgacgtgatccgacgcaaggtgtccaaaatccagagattccacgcgagaagcctgtggaccaaccacaagagatacggctacaagaaacatagctaccggctggtgaaaaaactgaagctgcagaagatgaagaagaacgaagtatacgaaacattctcttatcccgagagctactcacccactctgcccgtcagcaggagagagaataacagcccctccaacctccctagaccaagtttttgcatggaggagtaccaacgcgcagagctcgaggaagaccccattctttccagaacacctagcccggttcacccctcagacttctccgaacacaactgtcagccttactacgctagcgacggcgcaacatatgggtccagctctgggctgtgccttggcaacccaagggctgattccattcacaatacatattcaaccgatcatgcatccgccgctcctccttctgtgacccggtcgccagtggagaacgatggctacatagaagaaggttccatcacgaagcatccctctacttggtccgttgaggctgttgtgctgttcttgaaacaaaccgatcccctggctctttgcccgcttgtggatctgtttaggtctcatgagattgatggtaaagcccttctgctgctcacctctgatgtgctgttgaaacaccttggggtgaagctgggcactgcagtcaagctgtgctattatatagacagactcaagcagggcaaatgctttgagaactag

SEQ ID NO: 240304 - DNA, 627 bp, synthetic construct
  misc_feature 1..627: note = Description of Artificial Sequence: Synthetic coding sequence
  source 1..627: mol_type = other DNA
atgaaaaagaacgaagtgtacgagaccttctcgtaccccgagagctattcaccaacacttcctgtgtcaagacgagaaaacaatagtcctagtaacctgcctcggcctagcttttgtatggaggagtatcagagggctgagctcgaggaggatcctatcctgagccggactccttcccccgtacaccccagcgatttttctgaacataactgccagccttactatgcctcagacggagctacatatggtagctcatccgggctgtgtctgggcaatcctcgcgcagatagtatccataatacatacagcactgatcacgcatctgccgctcccccaagcgttacaagaagtcctgtggaaaatgatggctacatcgaagagggctccattacaaagcaccctagcacgtggtccgttgaggcagtcgtcctattcctgaagcaaacagatccgcttgcactttgccccctcgtcgatttgttccggagccacgagatagatggaaaggccctgctcctccttacttctgatgtcctgttgaagcacttaggcgtcaagcttgggactgccgtgaaactttgctactatatagacaggctcaaacaggggaagtgcttcgagaattag

SEQ ID NO: 240305 - DNA, 627 bp, synthetic construct
  misc_feature 1..627: note = Description of Artificial Sequence: Synthetic coding sequence
  source 1..627: mol_type = other DNA
atgaagaagaacgaagtgtacgagacgttctcctaccccgaatcatatagccccacgttacccgtgagccgtagggaaaataatagtccttccaatttaccaagaccttccttctgtatggaggagtatcagagagccgagctggaggaggacccaatcctcagcagaaccccaagccccgtgcatccttctgacttctcagaacacaactgccagccatactatgcttcggatggggcaacatatggcagtagctccgggctctgtttgggtaacccccgagccgactccatccataacacatatagtactgatcatgcttcagccgcacccccttcggtgacccggagccccgttgaaaacgatggatacattgaagaaggatctatcaccaagcacccatccacctggtctgttgaagccgtggtgctgttcctcaagcagaccgatcccctggccctatgtcccctggtggatctgttccggtcccatgaaatcgatggaaaggctcttctgctgctgacttccgatgtgcttctgaagcatctgggagtaaaactcggaacggctgtcaaactctgctactacatcgatcggctgaagcagggcaagtgcttcgagaactag

SEQ ID NO: 240306 - DNA, 447 bp, synthetic construct
  misc_feature 1..447: note = Description of Artificial Sequence: Synthetic coding sequence
  source 1..447: mol_type = other DNA
atgatgtcaaatagctcctcagagatcgatgtccaggagccgaatatcgtgtccgacgccagctgcaataccgaggaacaactgaagacggtggatgatgtgttgatccattgccaagtaatctatgacgccctgcagaatctcgacaaaaagatcgatgtgattcgcagaaaagtgtctaagatccagaggttccacgctcggagcctgtggactaatcataaacgctacggatataagaagcactcataccgactcgtgaagaaactcaagttgcagaaaatgaagaaaaatgaagtctacgaaacattctcttatcctgagagttactcacccactttgcccgtgtccaggcgcgagaacaatagccccagcaacctccctagaccttcattctgcatggaggaataccagcgagccgaacttgaggaggaccccattttatag

SEQ ID NO: 240307 - DNA, 2103 bp, synthetic construct
  misc_feature 1..2103: note = Description of Artificial Sequence: Synthetic coding sequence
  source 1..2103: mol_type = other DNA
atgggccagacggtcaatgaggactccatggacgtgaaaaaggaaaaccaggagaagacaccccagagctctacatcatccgtgcaaagagacgactttcactgggaagagtacctgaaagaaacaggatcaatcagtgccccatcagagtgcttcaggcagtctcaaatccctcctgtaaacgattttaaggtgggaatgaagctcgaggctcgcgatccacgaaacgcaacatccgtgtgcattgccacagtgattggtattaccggcgctagattgcggctacgcctggatggtagtgataacaggaatgatttttggaggctcgtggacagccctgatatacagcctgttggaacatgtgagaaggaaggcgatctcttgcagcctccgctcggataccaaatgaatacttcttcatggccaatgttcctgctgaagactctcaacggctctgagatggctagtgccaccttatttaagaaggaacccccaaagccccctctcaacaattttaaggtcggaatgaagctggaggcaatagacaagaaaaacccttacttaatatgcccagctactattggcgacgtcaagggcgatgaggtgcacatcacattcgatggatggagcggcgcatttgactactggtgcaaatatgattcacgcgacattttccccgcaggctggtgcagacttaccggggatgtgctccagccaccaggaacctccgtgccaatcgtgaagaatattgcaaagacagagtcgtccccatccgaagcttcccagcattctatgcagagccctcagaagaccactctgatcttacccactcagcaggtgcgcagatcaagccgcataaagcctcctgggccaacagcggttccgaagagaagttcctccgtgaagaatatcactccacgaaagaagggccctaattcgggcaagaaagagaagcccttgcccgtgatctgctccacctccgccgcttccctgaaatcactcacccgagaccgtgggatgctctataaggatgtggcgtccggtccctgcaaaatcgtcatgtctaccgtgtgcgtatacgtcaacaagcacgggaattttggccctcacttagacccaaaacgcatccagcaactgcccgatcacttcggacccggaccggtgaacgtcgttctgagaagaatcgtgcaagcgtgcgtggactgcgcgctcgagacaaagacagttttcggctacctgaaacccgataatcgaggaggtgaggtcataacagcatcttttgacggtgagactcacagcatccaactgccccctgtgaattcggcctcatttgcgctgcgctttttagaaaacttttgtcactcgctacagtgcgacaatttactgtcctcccagccattctccagtagcagagggcacacccacagtagtgccgagcacgataagaaccagtcagctaaagaagacgtcactgagcgtcagagcaccaaaaggtccccgcagcagaccgtgccatacgtcgtgcctctctcgccaaagctgcctaagaccaaggaatatgcgagcgagggggagcccctctttgccggtgggtctgctatccctaaggaagagaatctgagtgaggacagcaagtccagttccttgaattcagggaattatttgaatcctgcttgtcgcaatcccatgtacattcacacctcagtaagccaagacttctctcggagcgttccaggcactacgtcatcaccactcgtgggagacatctcccccaagtcctcacctcacgaagtcaagttccagatgcagcgcaagtccgaggcaccaagctacatcgcagtcccggacccatcagttctaaagcagggcttctccaaagatccatctacatggtctgtggatgaggtcattcagtttatgaagcacacggacccacagatcagcgggcctttagcagatctcttccgccaacacgagattgatggtaaggccctgtttctattgaaaagcgatgtgatgatgaaatacatgggattaaagctggggcctgctctcaagctttgctattatatagaaaaattaaaggagggtaagtactcttag

SEQ ID NO: 240308 - DNA, 1038 bp, synthetic construct
  misc_feature 1..1038: note = Description of Artificial Sequence: Synthetic coding sequence
  source 1..1038: mol_type = other DNA
atgcaatctcctcagaagaccactctgatcctgcccactcagcaggtccgccgtagttcacggatcaaaccgcctgggccaaccgccgtgccaaagagaagttctagtgttaagaatatcaccccccgaaaaaaagggcctaactccggcaaaaaggaaaagcccctgcctgtgatctgctcaacaagtgccgcttcactgaagtccctgacgagggataggggcatgctctacaaggatgtcgccagtgggccttgcaagattgtcatgtccaccgtgtgcgtgtacgttaataagcacggcaactttggccctcacctagaccccaaacggatccagcaactgcctgaccatttcggcccagggcctgtgaatgtcgtgctgaggagaatcgtccaggcttgcgtggactgtgccctagagaccaaaaccgtttttgggtatttgaagcctgacaaccgtggaggcgaggtgattaccgcctcatttgatggggaaacccacagcattcagctcccaccagtcaacagtgcgagtttcgcactgagatttctcgagaacttttgtcattccttgcagtgtgataatctgttgtcgtcccagccattctccagttctcgcggtcatacccattcaagtgccgaacacgacaaaaaccaaagtgcgaaagaggatgtgacagagagacagtctactaagcggagcccgcaacagaccgtcccctacgtggtacctctcagccctaagttgcctaagacaaaagaatacgcatcggagggcgaacccctctttgccggagggtcggccattcctaaagaagaaaacctgagtgaagattccaaatcgtcctctcttaattctggcaattacctgaatccggcttgccggaatccgatgtatattcatacgtctgtctcacaggacttcagtcgctctgttccgggaacgaccagctcgcccttggtgggagacatatcgcccaagtccagtccacacgaagtcaagtttcagatgcagcgtaaaagtgagggtaactag

SEQ ID NO: 240309 - DNA, 378 bp, synthetic construct
  misc_feature 1..378: note = Description of Artificial Sequence: Synthetic coding sequence
  source 1..378: mol_type = other DNA
taagcaaaagaagatgtcacggagcggcaatccactaagaggtcaccacagcagaccgtcccctatgtggtgcccctatctcccaagcttcctaagactaaggagtacgccagcgaaggggagcctctgtttgccggtggatcagcgatccccaaagaagagaacctgtccgaggattcgaaatcatcctccttgaattctggcaactaccttaatcccgcttgcagaaacccaatgtatatccatacaagcgtatcccaggacttctcaaggagcgttcccggtactacatcgagtcccctcgtgggcgacatctctcccaaatcaagcccccacgaagtgaaattccagatgcagaggaaaagcgagggcaattag

SEQ ID NO: 240310 - DNA, 1734 bp, synthetic construct
  misc_feature 1..1734: note = Description of Artificial Sequence: Synthetic coding sequence
  source 1..1734: mol_type = other DNA
atgggccagacagtgaatgaggattctatggacgtcaaaaaggagaaccaagagaagacacctcagtcccaaatcccacctgttaatgacttcaaggtgggaatgaaactggaagccagagacccacggaatgctacgtccgtctgtatcgctaccgtcatcggaataactggggctcggctgagactgaggctggacgggagcgacaatagaaacgatttttggcgcttagttgattcgccagatatccagcctgttggcacttgcgaaaaagaaggggatctcctgcagccaccccttggataccagatgaacacaagttcctggccaatgtttcttttgaagacgctgaacggaagcgagatggcatccgccaccctttttaaaaaggaaccacctaaaccccctctcaacaatttcaaggtgggtatgaaattagaggccatcgataaaaagaacccctacctcatttgccctgcaacaatcggggacgtaaagggggatgaggtccacatcacttttgacggatggtcaggcgcatttgactattggtgcaaatacgacagtcgggacatcttcccagctgggtggtgtcggttgactggagacgtccttcagccacccggtacatctgtgccaatcgtgaagaatatcgcaaagaccgagagctcccctagcgaggcgtcccaacatagcatgcagtccccccaaaaaaccaccctcatcctgccgacgcagcaggtacggagatcctcgcggatcaagcctccaggcccaaccgcggtccccaaacgatcgtcttcagtcaaaaatattacaccacgcaaaaagggacctaattccggcaagaaggagaagcctctccctgtgatatgctcgacaagcgcggcaagtctgaagtctctgacacgtgatcggggtatgctgtacaaggacgtggcgagcggcccttgcaaaatcgtaatgtcaacagtgtgtgtgtatgtgaacaagcacggcaactttgggcctcatctggacccaaagcgcatccagcagctccctgaccactttggccctggccctgtgaatgtggtcttgcgccgaattgtgcaggcatgtgtggattgtgcactcgaaaccaagactgtctttgggtaccttaagccagataatcggggaggtgaagtcattacggccagtttcgacggtgaaacccacagtattcaactcccacccgtaaacagcgcctcttttgctcttaggtttctggagaatttctgccacagtttgcagtgtgacaatctgctcagttcccagccttttagtagctcacggggacacactcacagctcggccgaacacgacaaaaaccaatctgcaaaggaggatgtaaccgaaaggcaatctactaaacgcagcccacagcagactgttccatatgtagtgccactgtctcccaagttgcctaagactaaggaatatgccagtgagggagagcccctgtttgctggagggtccgctattcctaaagaggagaatctttcagaggactctaaatccagcagcctgaacagcggcaattatctcaaccccgcttgccggaaccccatgtatatccacaccagtgtgtcacaagactttagcagaagtgtcccgggaacaacatcttcccccttggtgggagacatatctcccaagtcttcacctcacgaggttaaatttcaaatgcagagaaaaagcgagggtaattag

SEQ ID NO: 240311 - DNA, 615 bp, synthetic construct
  misc_feature 1..615: note = Description of Artificial Sequence: Synthetic coding sequence
  source 1..615: mol_type = other DNA
atgcagtcctatgctagtgctatgctgagtgtgtttaattcagacgactacagtcctgctgtgcaagagaacatccccgcactcaggaggtcctcttcctttctgtgtaccgagagctgcaattccaaataccaatgtgaaacaggcgagaatagtaaggggaacgtgcaggatcgtgtgaaacggccaatgaatgcttttatcgtgtggagccgggatcaacgacgaaaaatggctctggaaaacccacggatgagaaactctgagatatcgaagcaactaggctaccagtggaagatgctcacagaagccgaaaagtggccatttttccaagaggcccagaagctccaggcaatgcacagagagaaatatcccaattataaatatagacctcgcaggaaggcgaaaatgctcccaaagaattgttctctgctgccagctgatcccgctagcgtgctgtgctctgaagtgcagctggataaccggttataccgagacgattgtaccaaagcaacccattcacggatggaacaccagctcggacatttgcccccaattaatgctgcatcgagcccacagcagcgggatcgctattcacattggacgaaattgtag

SEQ ID NO: 240312 - DNA, 594 bp, synthetic construct
  misc_feature 1..594: note = Description of Artificial Sequence: Synthetic coding sequence
  source 1..594: mol_type = other DNA
atgcaaagttatgcttctgcaatgttgtcagtttttaattcagatgattattccccagccgttcaggagaatattcccgcactgcggagatctagtagtttcctttgcaccgaatcctgtaactctaagtatcagtgcgagaccggagagaactctaaggggaacgtgcaggatagagtgaaaagacctatgaacgcttttatagtctggtcccgggatcagaggcgcaaaatggcccttgagaatcccaggatgcgcaacagtgaaattagcaagcaattaggctatcagtggaagatgctgactgaggccgagaaatggccattctttcaagaagcccaaaaactgcaggccatgcaccgagagaaataccccaattacaagtaccgccctcggcgaaaggctaagatgctgcccaagaactgttcactgctccctgcggatcccgctagcgtattatgctccgaggttcagttggataatcgtttatatagggacgactgcaccaaagcaactcactctcgcatggagcaccaactggggcatctgcctcctatcaacgccgctagtgcagctacgggccctttgcagtag

SEQ ID NO: 240313 - DNA, 498 bp, synthetic construct
  misc_feature 1..498: note = Description of Artificial Sequence: Synthetic coding sequence
  source 1..498: mol_type = other DNA
atgcaatcatacgccagtgcgatgctgtctgtctttaacagcgacgactacagtcccgcagtgcaggagaacattcctgccctaagaaggagctcttccttcctgtgcaccgagagttgcaattcgaaatatcagtgcgaaactggtgaaaatagcaagggtaatgttcaagatcgcgtgaaacgcccaatgaacgccttcatcgtttggtcccgagatcagcggcgtaaaatggcgctggaaaatcctaggatgcggaattcggagattagcaagcaattgggataccagtggaagatgttgaccgaggccgagaaatggccgttcttccaagaggcccagaagcttcaagccatgcacagagagaaatatcctaactacaagtatcggcctaggagaaaagctaagatgctcccaaaaaactgctcattgctcccggcagaccctgccagtgtattatgcagtgaagttcaaggccaacaggtcgtccagggctag

SEQ ID NO: 240314 - DNA, 3729 bp, synthetic construct
  misc_feature 1..3729: note = Description of Artificial Sequence: Synthetic coding sequence
  source 1..3729: mol_type = other DNA
atgaaaaatctgcttactgaaaagtgcatctctagtcataattttcaccagaaggtgataaagcagcgaatggaaaaaaaggtggactctagatacttcaaagatggagcggtgaaaaagccctactcagccaagacattatctaataagaaaagttcagcttctttcggcatcaggcgcgaactaccaagcacctcccatctggtgcagtataggggcacccacacctgcacacgccagggacgtctgagagaactcagaattaggtgtgtagctcggaaatttctgtacctctggatccggatgacattcggtagagtatttcccagcaaagcacgattctactatgagcagaggctattgaggaaggtctttgaggagtggaaagaggagtggtgggtgtttcagcatgagtggaaactatgtgtgcgagcagattgccactacaggtactacctttataacttgatgttccaaacctggaaaacctacgtgcggcagcagcaggaaatgcggaacaaatacatcagggcagaggtacatgacgctaagcagaaaatgcgccaggcttggaagtcctggctgatatacgtcgttgttcggaggaccaagctccagatgcagactaccgctttggagtttaggcagagaattattctccgggtttggtggtctacttggaggcagcgcctcggacaagtccgcgtgtccagagctttgcatgctagcgctctgaaacacagagctctctcattacaggtgcaagcctggtcccagtggcgcgagcagctcttgtatgtacagaaagagaaacaaaaggtggtgtccgctgtgaaacaccatcagcactggcaaaagaggaggtttctgaaggcgtggttggaatacttgcaggttagaagagtcaagcgccagcaaaatgagatggcggagcggtttcaccatgtgaccgtgctgcagatctatttttgcgactggcaacaggcgtgggagcgcagggaatcactgtatgctcatcacgctcaggtggaaaaactggctcggaagatggctctacgcagagcgtttacccactggaagcattacatgttactgtgcgccgaggaggccgctcagtttgaaatggccgaagaacaccatcgacatagtcagctctacttctgcttccgggctttgaaggacaacgtgacacacgcgcatttgcaacagattcgccgtaacctagcgcaccagcagcatggggttacgttgttacaccgtttttggaatttgtggagatctcagattgaacaaaagaaagagagagagctcctgcccctcctgcatgccgcatgggatcactacaggattgccctactttgtaaatgtattgagctctggctccagtacactcagaagaggaggtacaaacagctccttcaggctagagccgatgggcacttccagcagcgggctctgcctgcagcattccacacatggaatcgactgtggcgctggcggcatcaggaaaacgtcctctctgctcgcgctacgcggttccacagggagaccctcgaaaagcaggtcttttccctgtggcgccagaagatgtttcaacatcgggagaaccgtcttgccgagaggatggccatcttgcacgctgaacgccagctactgtataggagctggttcatgtggcaccagcaggccgcagccagacaccaggagcaggaatggcaaacagtcgcatgtgcccatcaccgccacggcagactgaaaaaagccttctgtctctggagggagagtgcccaggggcttcggaccgagagaaccgggcgagtccgagcagctgaatttcacatggcgcagctgctccgctgggcatggtctcagtggagggagtgtctggccctgcggggagccgagcgccaaaaattgatgagggctgacctgcatcaccaacactcggtgctgcaccgcgcacttcaggcttgggtgacctaccaggggcgtgtgagaagtattttaagggaagtggccgcacgagagtcacagcacaatagacagctactgaggggcgctctgaggaggtggaaggaaaacaccatggcccgtgtggacgaggcaaaaaagacattccaggcatcaacacactatagacggacaatttgctccaaggtgctagtgcagtggcgcgaagctgtgagcgtccagatgtactacagacagcaggaagattgcgcaatttgggaggctcagaaggtgctcgacagggggtgccttcggacctggtttcagcggtggtgggactgcagccgcagatcagctcaacaacgccttcagctagagagagccgtgcagcatcaccacaggcaattgctgctcgagggcctggccaggtggaaaacacatcacctgcagtgcgtacggaagcgcctgttacacaggcaaagtactcagttattagcacaaagactgagccggacctgtttcagacaatggcgccagcagctcgcagcacgtcggcaggagcagcgcgctaccgttagggccctatggttctgggctttcagccttcaagccaaagtgtgggcgacatggttagccttcgtgcttgaaaggcgaaggaaaaaggccaggcttcagtgggcactgcaggcatatcagggccaactcttgcaggagggggctacaagactgcttcgcttcgctgcaagtatgaaggcgagtagacagcagcttcaggctcaacagcaggtccaggccgctcacagcctccacagggctgtccggaggtgtgcgacattatggaagcagaaagttcttggccgaggtggaaagccgcaaccgcttgctgccattgcgccttccaggaaggtcactttcgaaggccctctgcttaaccgcatcgcagccggagccggagatggaacactcgaaacaaaaagacctcaggcaagccgtcccctcggcgctctcggaaggctggccgcagaagaacctcatgctcttgagctgaacaccgcccatagcgccagaaagcagcctcgcagaccccactttttgcttgagccagcccagagccagagaccccaaaagccgcaggaacacgggttgggcatggctcagccagcagccccaagcctgactagacctttccttgccgaggctcccaccgcactggtcccgcactccccattacctggtgccctcagttctgcaccgggtcctaagcagccgccaacagccagcactgggcctgaactccttttgctccctttgtcctctttcatgccctgtggagccgcagcccctgctagagtctctgcccagcgcgcaactcccagagataaacccccagtgcccagctccctcgcttcagttcctgatccacacctgttgctaccaggagacttctcggctacaagggccggtccagggctctcaactgccggatcacttgacctggaagctgaattggaagagatccagcagcaattactccattaccagaccaccaagcagaacctttggtcatgtcgaagacaagcttctagcctccgtcggtggcttgaattaaacagagaggaaccgggacccgaggaccaagaggttgaacagcaagtgcaaaaagaactagagcaggttgaaatgcaaatccagttattagccgaagagcttcaggcccagcggcagcccatcggggcatgtgtggcgagaatccaggctctgcgccaggccctgtgctag

SEQ ID NO: 240315 - DNA, 3483 bp, synthetic construct
  misc_feature 1..3483: note = Description of Artificial Sequence: Synthetic coding sequence
  source 1..3483: mol_type = other DNA
atgaagaacctgctgacagagaaatgcatcagctcacacaattttcaccagaaggttattaagcagagaatggaaaagaaggtggactcacggttttattacgaacagaggctgctgcggaaggtgtttgaagagtggaaagaggagtggtgggtctttcagcatgagtggaagctgtgcgtgagagctgactgtcattatcgatactacctttataacctaatgttccagacatggaaaacttacgtgcgtcagcagcaggaaatgcgcaataaatacatcagggccgaggttcacgacgcaaagcagaagatgcgacaggcttggaagtcttggctaatctacgttgttgttaggagaactaaactgcagatgcagactacagctctcgaattccggcaacgaatcatcctccgggtgtggtggagcacgtggagacagcggctgggacaggtaagggtaagtcgcgctctgcacgctagcgccctcaaacatagggcactgtcactccaagtccaggcatggtctcagtggcgggaacagcttctttatgtccaaaaggagaagcagaaggttgtgtccgccgtaaaacaccaccagcactggcagaagcggaggtttctgaaagcctggctcgagtatctccaagttagaagggttaagagacagcagaacgagatggcagagcgtttccatcatgtgacagtgctacagatatatttctgcgattggcagcaggcctgggaacgacgtgagtccctttatgctcaccacgcacaggttgagaagttggctcgcaaaatggccctgcgcagggcgttcactcattggaagcactatatgctcctgtgcgccgaggaggccgctcaatttgagatggccgaagagcatcacaggcacagccagctttacttttgcttccgggcactgaaagataacgtcacacatgcccatctacaacaaatccgacgaaatctcgctcaccaacagcacggagttaccttactgcacagattctggaatctctggagaagccagatcgagcaaaaaaaggagcgggagctactgccactgctgcatgccgcttgggatcactaccgcatcgccttgctttgcaagtgtattgaattatggctacagtatacacaaaaacggagatacaagcaacttttacaggcgcgagctgatggtcacttccaacagagggccttgcccgctgcctttcacacttggaaccggctgtggcgatggcggcaccaggagaatgtgctctccgccagagctacaagattccaccgtgagaccctcgagaaacaagtgttcagcctatggaggcagaagatgtttcagcacagggagaatagattggccgagaggatggcaatattgcacgctgaaagacagctgctgtacaggtcttggtttatgtggcatcagcaagccgctgccagacatcaagagcaggaatggcagacagtagcctgcgcccatcataggcacgggagactaaagaaagcattttgcttgtggcgagaaagcgcgcaggggttgcgcacggagagaactgggcgagtgcgcgctgcagagtttcacatggcccagctgctgaggtgggcttggtcacaatggagagaatgcctagccctgaggggagctgagcgccagaagctcatgcgagcagatttgcaccatcaacatagcgtattgcacagagcactccaagcgtgggtcacgtaccagggcagagttaggagtatcttacgagaagttgctgctagggaatcacaacacaatcggcagttgctgagaggtgccctccgtcgatggaaggaaaacacaatggccagagtcgacgaggcgaagaagacatttcaggcaagcacacactatcgaagaacaatatgttcgaaggtgctagtgcaatggcgggaggcagtctctgtacagatgtattacagacagcaggaagattgtgcaatttgggaggcccagaaagttcttgacagagggtgcctgcggacctggtttcaacgttggtgggactgcagccgcagatcagcccagcagcgccttcagctggagcgggctgttcagcaccatcaccgccaactcctgttggagggcttggcacggtggaaaacacaccacctgcagtgcgtccggaagcgcctactgcaccgtcaatcaacgcagcttctggctcagcgtctgagccggacgtgttttcggcaatggagacagcaacttgctgcaagaaggcaggagcagcgcgctactgtccgggctctctggttttgggcattttcactgcaggcgaaggtatgggctacatggttagcattcgtcctggaaagaaggcgcaaaaaggctcggctgcaatgggcattgcaagcttatcaaggccagttacttcaggagggtgcgacccggctattgcgtttcgctgcctcaatgaaggcctctaggcaacagctgcaagcacaacaacaggtgcaggctgctcatagtcttcacagggcagtccgacgttgcgccacattgtggaaacagaaggtcctgggccgagggggaaagccacagccgcttgcagcaattgcccctagtaggaaggtgacgttcgaaggccctttgcttaatcgtatcgccgcaggggcaggcgatggcactctggaaacaaaacgtccccaggcaagtaggcccttgggagcactcggtcgtctggccgctgaggagccacatgctctagagttgaatactgctcactccgccaggaagcagcctaggagaccacactttctgttagaaccagcccagtctcaaaggccccagaaacctcaggagcacggcttgggcatggcccagcccgctgcaccctccctcactcgcccttttttggccgaggcaccaaccgctctcgtgcctcattcccctctgccgggagctctttcttctgccccaggccctaagcagcctcccaccgcgtcaaccggaccagaattgctgttgctgcccctgagttctttcatgccatgtggcgcagctgccccagccagggtctccgctcagcgagccacaccaagggataagcctcccgtgccttccagtttggcgtctgtgccggatccgcatttactgctgcctggggatttcagcgcaactagagcaggcccaggcctgtccaccgccggttccctcgatctcgaggctgaattggaggaaatacagcagcaactgttacactaccagactactaagcagaacttgtggagctgcaggcgacaggcctcctctttgaggaggtggctggagctgaatagggaggaacctgggccagaggatcaggaggttgagcaacaggtgcaaaaggaactagagcaggtggagatgcagatacagcttctagccgaggaacttcaagcccagcgccagcccattggcgcttgtgtggccagaatacaggcactgcgtcaggccctctgttag

SEQ ID NO: 240316 - DNA, 3096 bp, synthetic construct
  misc_feature 1..3096: note = Description of Artificial Sequence: Synthetic coding sequence
  source 1..3096: mol_type = other DNA
atgaagaaccttttgacggagaagtgcatttcttctcacaacttccatcagaaggtaataaagcagaggatggagaaaaaagtggattctaggttctactatgagcagaggctactgcgtaaagtgtttgaagagtggaaggaggagtggtgggtgttccagcacgaatggaagttatgcgttcgagccgactgccactatcgggtttggtggtctacctggcgccaaagactcggtcaggtacgcgtgagcagagcactccatgctagcgcactgaaacatcgagcgcttagcctccaggtgcaggcctggagtcagtggagggaacagctgctgtatgtacagaaagagaagcagaaggtggtgtctgctgttaaacatcatcaacattggcagaagcgtagattcctgaaagcgtggctcgaatacctccaggtccggagggtcaaacgccagcagaatgaaatggctgagcgcttccatcacgtcactgtgctccagatttacttttgtgattggcagcaggcatgggagcgtcgtgagtcgttatatgcccatcacgcccaagtcgagaaactagctagaaaaatggccctgcgcagggcttttacacactggaagcactacatgttgttgtgtgctgaggaagccgcacagtttgagatggcagaagaacaccatcggcactcccaattatacttctgcttcagggcacttaaagacaatgtcacccacgctcacctccagcaaatcaggaggaacctagcccatcagcagcatggagtgaccttattacacaggttttggaatctgtggaggtcacagattgaacagaaaaaagagcgcgaactgctgccattgctccatgcggcttgggaccactaccgcattgcactgctttgtaaatgcattgagctttggttgcagtacacacaaaagcgaagatataagcaactgctacaagcgagagctgacggtcacttccaacagcgagctctgcctgccgcattccatacatggaatcggctctggagatggcgacaccaggaaaacgtgctgagtgcgagggctaccagatttcaccgcgagacactggagaagcaggtattctcgctgtggcgccagaagatgtttcagcaccgagaaaatagactcgcagaacgtatggccattcttcacgcagagcggcagctgctctacaggtcttggtttatgtggcaccagcaggcagctgcccgacatcaggaacaagagtggcaaactgtcgcttgtgcacatcatagacacggtaggcttaaaaaagctttttgcctgtggcgggagtccgcgcagggtttgagaactgagcggaccgggagggtgagagccgctgagtttcacatggcgcagctactcaggtgggcttggtcccagtggcgcgagtgcctggctctgaggggggcagaaaggcagaagctaatgcgagccgacctccatcaccagcactccgtgctccatcgggctctgcaggcgtgggtcacgtaccagggcagggttagaagcattctgcgcgaggtggcagcccgagagagccaacataaccgccagctgctcagaggagctcttcggcgttggaaggaaaacaccatggcaagggtggacgaagcaaagaaaaccttccaagcgagcactcactatcgaagaaccatatgcagcaaggtgttggtacagtggcgcgaggcggtgtctgttcaaatgtattataggcagcaagaggattgcgctatttgggaagcccagaaggttctggatcgcggatgtttaaggacttggtttcaacgctggtgggattgtagtagacggtcagctcagcagcggctccagttggagagggccgtgcagcatcaccaccggcaactgctactggagggactggctcgctggaagacgcaccatttacagtgcgtcaggaagcggctcttgcaccggcagtctacccagcttcttgctcaaagacttagcaggacctgttttcgccagtggaggcagcaactagcggcaaggagacaggagcagcgggcaacggttagagccctgtggttctgggccttcagcctccaggctaaggtttgggcaacatggttggcattcgtgctggagagaaggcgcaagaaagccaggcttcaatgggctcttcaagcttatcagggccagttacttcaagaaggggctacaaggctgctccgcttcgcagccagcatgaaggcctctaggcagcagttgcaggcccagcagcaggtgcaagccgctcactccttgcatagagctgtccgaaggtgtgctaccttgtggaagcagaaagtccttgggaggggcggaaaaccccagccacttgccgcaatcgccccaagtcggaaggtaaccttcgagggtccgctgttgaacaggatcgcggctggcgctggagacgggaccctggaaacaaagagaccgcaggcaagcagaccacttggggcactgggacgactagcagccgaagagccccacgcattggaattaaatactgctcacagtgcaagaaaacagccaaggagaccgcactttctgctggagcctgcacaatcacaacgacctcagaagccccaagagcatgggttgggaatggcacagcctgcagcgccaagtctgacaaggccttttcttgctgaagcacccacagctttagtccctcatagccctttacctggagccctgtcaagcgcaccaggtcccaagcagccccctaccgcgtcaaccggtcccgagctcctcctgcttccactttctagttttatgccatgcggcgctgcagcccctgccagggtgagtgcacagagagccacccctagagataagccacccgtgccatcctccctcgcatccgtgcccgacccacacctgctgttaccaggcgacttctcagccacgcgcgcaggaccaggattgtccaccgcagcttggaccctcagactgaacctgagacgcagtagcagcaattattgcacaactcgcccaccctctcgaacgtcggggcctgtgggcggaaagagggcagcctgcgcaggaggctggtcctag

SEQ ID NO: 240317 - DNA, 2976 bp, synthetic construct
  misc_feature 1..2976: note = Description of Artificial Sequence: Synthetic coding sequence
  source 1..2976: mol_type = other DNA
atgaagaacctgcttacagaaaaatgcatcagttcccacaatttccatcagaaggtcatcaaacaacggatggagaagaaagtcgactccagatacttcaaggacggggcagtaaaaaaaccttactccgcaaaaacattgtcgaacaaaaagagctcagcgtcgttcggaattcggcgagagctgccctccacctcccacttggtgcagtatagaggtactcatacctgcactcgccagggcagacttagggaactccgcattcgcttttactatgaacaaaggcttctgcgaaaggtctttgaggaatggaaggaagaatggtgggttttccagcacgaatggaagctgtgcgtgcgcgctgattgtcattacagatattacctctacaatctgatgtttcaaacgtggaaaacatatgtccgccaacagcaagaaatgagaaacaagtatataagagccgaggtacacgatgcaaagcagaaaatgcggcaggcctggaagagttggctcatttatgtcgtagttaggcggacaaagctgcagatgcaaactactgccctggaattcagacagcggattattttacgggtatggtggtcgacctggaggcaaagacttggacaagttcgcgtttcaagagctttgcacgcgagtgccctgaaacaccgtgcgctgagcttgcaggtgcaggcttggtcccagtggagggaacagctattgtatgtacagaaggaaaaacagaaagtggtgtctgccgtcaaacaccatcagcattggcagaagcgcagattcttgaaagcatggcttgaatatctccaagtgcgccgtgttaaacgtcagcagaacgaaatggccgagcgatttcaccatgttaccgtcctccaaatctacttctgcgattggcagcaggcctgggagcgaagagagtccctgtacgcacatcatgcccaggttgagaaactggctcgcaaaatggctctgaggcgcgcatttacccactggaagcattacatgttactgtgcgctgaagaggctgcccagtttgagatggcagaggaacaccatagacattctcagctctacttctgcttcagagccctaaaagacaacgtaacacacgcccacctgcagcagattcgcagaaacttggcacaccagcagcacggggtgaccttgcttcatcgcttttggaacctgtggcggtctcagatcgagcagaaaaaggagcgtgagttgcttcccttgctccatgcagcatgggaccactatagaatcgctttgctgtgtaagtgtatagaattgtggctccagtacacacagaaacgcaggtacaaacagctgctgcaggcccgagcagacggacactttcagcagagagctttacccgctgcttttcatacttggaaccggctgtggagatggcgtcaccaggagaatgttctctctgctcgcgctactcgcttccacagggagactctagaaaaacaggtattctcgttatggcggcagaagatgttccaacatcgagagaataggctagcagagcgcatggccatcctgcatgcagagaggcaacttctgtaccgaagttggtttatgtggcatcaacaggctgctgcaaggcaccaggagcaagaatggcaaactgtcgcatgcgcccatcaccggcacggccgtcttaagaaggctttctgcttgtggagagaatctgcccagggtttgcggaccgagcgcaccggcagggtccgagcagctgagtttcacatggcacagctgctaagatgggcctggtcccagtggcgtgagtgtctcgctctgagaggcgctgaacgtcagaaattgatgagagctgatctccaccatcagcacagcgttctccatcgggctctccaggcatgggtcacctaccagggtcgcgtgcgcagtattctgcgagaagtagcagcacgtgaaagccagcagctccaagcccagcagcaagtgcaggccgcacacagcctccatcgtgccgtgcggaggtgtgcgacactttggaaacagaaggtgctaggtaggggcggtaaaccccaaccgctggcagcgatcgcacccagccgaaaggtaacgttcgagggtccactgcttaatcgcatcgccgcaggcgctggcgacgggaccctggagactaaacgcccacaggccagtcgtccactgggcgcactgggacgcctagcagccgaggagcctcacgcgttggagctgaacacagcacattccgctagaaagcagcctaggcgaccccacttcttgcttgaacctgctcagtctcaacgccctcagaaaccacaggagcatggcctgggtatggctcagccagccgcaccatctctgaccagaccctttcttgccgaggcccctactgccttagtgccacacagtccccttcccggagctcttagctccgctcctggccctaagcagcctcccacagctagcaccggtcctgagctcctgctgctaccactgtccagttttatgccatgtggtgcggctgcacccgcacgggtgagcgctcagcgcgcaacaccacgggataagccgcctgttcctagttcgctcgcaagcgtgcccgaccctcacttgctcttgcccggtgatttcagtgcaaccagagccggaccaggactgtcaacggccggaagtctcgatctagaggcggagctggaagagattcagcagcagttacttcactaccagactacgaagcagaacctatggtcttgcaggcggcaggcttctagcctgcgcagatggctcgagcttaatagggaagagcccggtcctgaggatcaggaagtggagcagcaggtgcagaaagagttagagcaggtcgaaatgcagattcagttgttagctgaggagctacaggcacaacggcagcccatcggggcttgtgttgcgagaatccaggccctgagacaggccctctgctag

SEQ ID NO: 240318 - DNA, 3636 bp, synthetic construct
  misc_feature 1..3636: note = Description of Artificial Sequence: Synthetic coding sequence
  source 1..3636: mol_type = other DNA
atgaagaatttgctgactgaaaaatgcatcagttcccataattttcaccagaaggtcatcaagcagagaatggaaaaaaaggtcgatagccgatacttcaaagatggtgccgtcaaaaagccatattcagctaagaccttgtccaataagaaaagttctgccagcttcggaatccggagagagttgcctagcacgtcccatctcgtgcagtatagaggcactcacacttgcacgaggcagggtcgactccgagagctgaggattcgctgcgtagcccgaaaattcctctatttatggatccggatgacctttggacgagtatttccgtcaaaggcacggttctattatgaacagcgcctacttagaaaggtcttcgaggagtggaaggaagaatggtgggtttttcagcatgaatggaagctttgcgttagagccgattgccactaccgctactacctctataatttgatgttccagacctggaaaacctacgtgagacagcagcaggagatgaggaacaagtatatacgggctgaagttcatgatgcaaagcagaaaatgaggcaagcctggaagagttggcttatctacgtggtggtcagaaggacaaagctacagatgcagacaacagctctggaattccgacaacgtatcattctcagggtttggtggtctacgtggcgtcagcgcctgggtcaggtacgagtgtcaagggcgctgcacgctagcgctcttaaacacagagctctctctctccaggtccaggcatggtcccagtggcgagagcaactcttgtatgtacaaaaggaaaagcagaaagtagtgtccgccgttaagcaccaccagcattggcaaaaaaggcgcttcctgaaagcctggttagaatacctccaggtgcgccgtgtgaaacgtcagcagaacgaaatggctgaacggtttcatcacgtaaccgttctacagatctatttctgcgattggcagcaggcctgggaaagacgcgaatccctgtacgcccaccatgcccaggtagaaaagttggcccgtaagatggccttgcggcgagcgttcacacattggaaacactacatgctgctgtgcgccgaggaagccgctcagtttgagatggccgaagaacaccatagacattcccagcttcttctccacaggttctggaacctttggaggtcccaaatagaacaaaagaaagagcgggaactgctccctttactgcacgcagcgtgggatcactatcgaatcgcactattgtgtaagtgtatagagctctggctgcagtacactcagaaaaggcgctacaagcagttactgcaggctcgggcagacggccattttcaacagcgtgccttgccagctgctttccacacatggaacaggctgtggcgatggcgccatcaagagaacgtgttatctgcgcgtgctactagatttcatcgggagacgctcgagaagcaggtattctccctgtggcggcagaagatgttccaacaccgggaaaatcgcctcgccgagcggatggccattcttcatgccgaaaggcagctgctgtatcggtcatggtttatgtggcaccaacaggctgcagcacggcatcaggagcaggagtggcagaccgtcgcttgcgcacaccaccgacatggccgactgaaaaaggccttctgcttgtggagagaatctgcccaaggcttaaggaccgaaagaacgggcagagtgcgggcagcagagttccacatggcccagttactcaggtgggcttggtcccagtggcgcgagtgtttggctctaagaggcgctgaaaggcagaagctcatgagggccgatctgcatcatcagcacagcgtgctacatcgggctcttcaggcctgggtgacctaccagggaagggttagatctattctccgggaagtcgctgcccgtgagtcccaacataacagacaactcctccgcggagcactccgaagatggaaggaaaacacaatggccagagttgatgaggctaagaaaaccttccaggcctctacccactaccggcgaactatctgctcaaaggttctggtgcagtggcgtgaggccgtctctgtccagatgtattacagacaacaggaagattgcgcaatctgggaggcgcagaaggtgctcgacaggggatgtttgagaacatggtttcaacggtggtgggactgtagcagacggtccgcacagcagcgactgcagttagagagagctgtgcagcaccaccacagacaacttctcctggagggccttgccagatggaagacacaccacctgcagtgcgtccggaagagactgctgcacagacagtctacgcagctgctcgcgcaacggctgagtcgaacatgtttcagacagtggagacagcagctggccgcaagacgacaggagcaacgggcaaccgtgcgtgccctttggttttgggctttctctctgcaggctaaagtatgggccacatggctcgcctttgtactggagcggaggcgcaagaaagccaggcttcaatgggctctccaggcctatcaaggacagctgctgcaggagggggctacaagactcctgcgattcgcagccagcatgaaagcctccagacagcagctgcaggcccagcagcaggtccaggccgctcatagcctgcatagggccgtgcgcagatgcgccaccctgtggaagcagaaggtcttgggccgtggtggcaagccgcagcccttggcagctattgcaccttctaggaaagtgacttttgaaggccctctcttaaatcgcattgccgctggggctggcgatggcactctcgaaactaagagaccgcaagcaagccggccacttggggctttaggcaggttagctgcagaggagccacacgcacttgagcttaataccgcacattctgccaggaagcagccacgcaggccccatttcctgctggaaccagcacagtcccagcggccacagaaaccccaggaacacggtttgggcatggcccaacccgcagcaccaagcctgactcgcccttttctcgccgaagcccctactgcacttgtgccccactctcccctccccggagctttgtcaagtgcaccaggccctaagcaaccaccaaccgcctcaactggccctgagctgctgctgctgccgctatcctccttcatgccttgtggggctgcagctccagccagagtgtctgcccaacgtgccactccaagggataagcctcctgtgcccagtagcctggcctccgtgcctgatccacacctactgctcccaggagatttctctgctaccagagccggtcccggactatcgacagctgggagcctggacctggaggctgagctcgaggaaatccagcagcagcttttgcactaccagacgactaaacagaacctgtggtcctgccgccgtcaagcgtcctctctgcgcagatggctggagctgaatcgcgaggagcctggacctgaagatcaggaggtagagcagcaggtgcagaaggaactggagcaggttgaaatgcagattcagctgctagcagaagagctgcaagctcagaggcagcctattggtgcgtgcgtcgcaaggatccaagctttgagacaagccctgtgctag

SEQ ID NO: 240319 - DNA, 3483 bp, synthetic construct
  misc_feature 1..3483: note = Description of Artificial Sequence: Synthetic coding sequence
  source 1..3483: mol_type = other DNA
atgaaaaacttgctaactgaaaaatgtatcagtagccataatttccaccagaaagtcattaagcaaaggatggagaagaaagtggactcccgattttactatgaacagagactgttgcgaaaagtattcgaggagtggaaggaggagtggtgggtcttccagcacgagtggaagctttgcgtccgagcggactgccactatcgttactatctctataatctgatgtttcagacctggaaaacctatgtgcggcaacagcaagagatgcggaacaagtacattcgcgcagaagtgcatgacgctaagcagaagatgcgacaagcttggaagtcatggctgatttacgtcgtggtcaggaggaccaaattgcagatgcagaccacagcgctggagtttaggcagcgtatcatacttcgcgtctggtggtctacatggagacagcgtctgggacaggtgcgggtgagtagggccctacacgcctccgcactgaaacatagagccctgtctctccaggtccaggcatggagtcaatggagagaacagctgctgtacgttcagaaggagaaacagaaggtggtgtccgcggtcaagcaccatcagcactggcagaagagaagatttttgaaagcttggcttgagtacctgcaggtgaggagggtgaagaggcagcagaatgaaatggcagaacgtttccatcacgtcaccgtgctccagatctacttttgcgactggcagcaggcctgggaacgacgggaatctctctacgctcaccatgcacaggtggagaagctggccagaaagatggccctccgacgagctttcacgcactggaaacactatatgctgctgtgcgcggaggaagcggcacagttcgagatggccgaggaacaccacaggcactcccaactctatttttgttttcgggcattgaaagacaatgtcacgcacgcacatctgcagcagattaggcggaatctggctcaccaacaacacggggtgacactgctccatcgcttctggaacctttggcgcagtcaaatcgagcaaaagaaggagcgggagctcctgcctctccttcacgctgcctgggatcattaccgcatcgctctgctgtgtaaatgtatcgagctctggcttcaatatactcaaaagcgaaggtacaaacaactcctgcaggcacgcgcagacgggcactttcagcagagggcactgccagccgctttccacacctggaaccgcctgtggagatggagacatcaggaaaacgtcctgagcgccagggctacgagattccatcgcgagacgctggagaaacaagtgttttccttgtggaggcagaaaatgtttcagcatcgcgaaaacagactcgcggagcggatggccatcctccatgcagaaaggcaactgctgtatcgcagttggttcatgtggcaccaacaggctgctgccaggcaccaggaacaggaatggcagactgtggcttgtgctcaccacagacacggacggctcaaaaaggccttctgtctttggagagagtccgcacagggcttgaggacagagagaaccggcagggtgagagctgccgagttccacatggctcaactacttcggtgggcgtggagccagtggcgtgagtgtctggctctgcgcggagccgaaaggcaaaagcttatgcgtgctgaccttcatcaccagcactcggtattacacagggccctccaagcttgggttacctatcaggggagggttcggtctatcttgagggaggtcgcggctagggaaagccaacacaaccgtcagctcctgcgaggggctcttcgaagatggaaggaaaataccatggcccgagtagatgaggctaaaaaaaccttccaggccagcactcactataggcgaacaatatgcagcaaggtgctagtgcagtggagggaggcggtgagtgttcagatgtactacaggcagcaggaagactgtgccatctgggaggcccagaaagttctggaccggggatgcttgcgcacctggttccagaggtggtgggattgtagtcgtcgtagcgcccaacagaggctgcagctggaaagggccgttcagcaccatcatagacagcttctactggagggcttggctcgctggaagacacaccacttacagtgcgtgcgcaagagactgttgcacaggcagtcgacccagctgttggctcagagactgtccaggacttgctttcgccagtggcgccagcagctagccgcacggaggcaggagcagagggctacagtgcgggcactttggttctgggccttctcactgcaggcgaaggtgtgggccacgtggctcgcctttgtgctggaacgcaggcgaaagaaggcacgccttcaatgggcattgcaggcctaccagggacagctactgcaggaaggagctacaagactgctacgcttcgccgcatccatgaaggctagtcgtcagcagctgcaggcccaacaacaggttcaggcggctcacagcttgcacagggccgtccgccgatgtgctaccctctggaaacagaaggtgctcggccgaggtgggaagccacagcccctggccgcaattgctccaagccgcaaggtgacattcgagggacctttattaaatagaatcgctgctggggctggcgacggcactttggagacaaagagaccacaagcctcccgacccctgggcgctctaggaagacttgctgctgaagagcctcacgccctcgaactgaacactgcccacagtgcacgcaaacagccgagacgccctcatttcctcctcgagccagcccagagccagcgtcctcagaagcctcaggagcatggactcgggatggcacaaccagcggctccatctcttaccaggcccttcctcgccgaagcccctacagcgttggtgccccactctccgttgccaggcgctctgtccagcgcacctggcccaaaacagcctcccacagcttcaaccggcccagaactgcttctgcttccgctttccagttttatgccttgtggagctgctgccccagcacgtgtgtcggcccagcgggctaccccacgggataagcctcccgtgccatcctcactggcgtctgtgcccgatccgcacctcctgcttcccggagacttctccgccaccagggctgggcctggactctccacagctggtagcctggacctagaggcagaattggaagagatacagcagcaactgctgcattaccagacaactaaacagaacctgtggtcctgcagacggcaggcctcgagcctccggagatggctggaactcaacagagaggagccgggacccgaggaccaggaagtcgaacaacaggttcagaaggagcttgagcaggtcgagatgcaaatccagctcctcgccgaagagcttcaagcacagaggcaaccaatcggtgcctgtgtggcgagaatacaggccctcaggcaggcgctgtgttag

SEQ ID NO: 240320 - DNA, 240 bp, synthetic construct
  misc_feature 1..240: note = Description of Artificial Sequence: Synthetic coding sequence
  source 1..240: mol_type = other DNA
atgaaaaacttgctgactgaaaaatgtataagctcccacaatttccatcagaaggtcattaagcaacggatggaaaagaaagtggattctcggtactttaaagacggcgctgtcaaaaagccatactccgcaaagacactatccaataaaaaaagcagtgccagctttggtattcgcagggagctgccttccacgtcccacctcgtgcagtatcggggaacacatacctgtacgcgttag

SEQ ID NO: 240321 - DNA, 3564 bp, synthetic construct
  misc_feature 1..3564: note = Description of Artificial Sequence: Synthetic coding sequence
  source 1..3564: mol_type = other DNA
atgaagaacctactaacggaaaagtgcattagctctcataacttccaccagaaagttattaagcagagaatggaaaaaaaggtggatagtagatatttcaaagacggcgcagtcaaaaagccctatagcgccaagacactgtccaataaaaaaagctccgcctcgtttggcatcagacgggagctgccgtcaactagtcacttggtgcagtacaggggaacccatacatgtactcgccaggggaggttgagagagttgaggatcagattttactacgagcagaggctgctgcgcaaggttttcgaagagtggaaggaagaatggtgggtgttccagcacgagtggaaactttgtgtgcgggctgactgccattatagatattatctatacaatcttatgttccagacatggaaaacgtatgtgcgccagcagcaggagatgaggaacaagtatatcagggccgaggtccacgatgccaagcaaaaaatgcggcaggcgtggaagagttggcttatttacgtcgtggtaagacggacgaaactgcagatgcagaccaccgccctcgaattcagacagaggatcatccttcgtgtatggtggtccacatggcggcagaggcttggccaggtgcgggtctcgagagccctacacgcctccgcgcttaaacaccgcgctctctcactgcaggtccaggcctggagccagtggcgagaacaactactgtatgtccaaaaagagaaacaaaaggtagtgtctgccgtgaagcaccaccagcattggcagaaaaggcgtttcctgaaggcttggctcgagtacctccaggtgcggagagtgaaacgccagcagaacgagatggccgagaggtttcatcatgttaccgtcctgcagatctacttctgcgactggcagcaggcctgggaaagaagagaatcgttgtatgcccatcatgctcaggtggagaagcttgccaggaaaatggccttaagaagagcattcacccactggaagcactatatgctgttatgcgctgaagaggcagcccaatttgagatggccgaagagcatcacaggcatagtcaactcctacttcatagattttggaatctgtggcggtctcagattgaacagaaaaaggagagggagcttttgcccctccttcatgcagcatgggatcactatcgaattgctcttttatgtaaatgtatcgaactgtggctgcaatatacccagaaacggagatataaacagctgctgcaagcccgtgccgatggtcacttccagcagcgtgctcttccagcagctttccacacctggaatagattgtggcgatggcggcatcaagagaacgtgcttagcgctcgggctaccaggtttcaccgagagacacttgagaaacaggtgttttccttatggaggcagaagatgtttcagcacagggagaaccggctggcggagcgcatggccatcctccacgcagagagacaattgctgtacaggtcttggttcatgtggcaccaacaggcagcagccagacatcaggagcaagagtggcagacagtcgcctgtgctcaccacagacatggacggttaaagaaagctttctgcctgtggagggagtctgcacaaggcctaaggaccgagcggactggtagagtaagggcggcagaatttcacatggctcaactgctgcgctgggcttggtcccagtggcgcgagtgccttgctctgcgaggcgctgaaagacagaaactaatgcgagccgacctgcatcaccagcattccgtgctgcatagagcccttcaagcctgggtcacttaccagggaagagtccgctctattttgcgggaggtggctgctcgagagtctcagcacaatagacagctgttgcgtggcgctcttagaagatggaaggagaataccatggctagggtggacgaagcgaagaagactttccaggcttcaacccactatcggagaacgatctgctcaaaagtgctggtgcagtggcgggaggccgtgtctgtccagatgtattataggcagcaggaagactgcgcaatatgggaagcccaaaaggtgcttgataggggatgcctgcgaacatggttccagcgctggtgggactgctcacgccgatcagcccagcaacggctccagctcgagcgtgcagttcagcatcaccacagacagttgctactagagggccttgccagatggaagactcatcacctgcagtgtgtgcggaaacgtctcctgcaccgacagagtactcaactcctggcccagcggcttagccggacatgttttcgacaatggcggcagcagctcgccgcacgacgccaggagcagagagctacagtgcgggctctgtggttttgggccttttcccttcaggccaaagtgtgggctacctggttggccttcgtgcttgagaggaggcgaaagaaggctcgacttcagtgggcgctacaagcttaccagggacagctcctgcaagaaggcgctactaggctgttgcggttcgccgctagcatgaaggcaagccgacaacagttgcaggctcagcagcaggtccaagcagcccactcccttcatagggcagtaagacggtgcgccacactttggaagcaaaaagttttggggaggggcggtaagccgcaaccactggcagccatcgcccctagccgcaaagtcacctttgaagggccactgctaaatagaatcgctgctggcgctggcgacggcacacttgagaccaaacgcccacaggccagcagaccattaggagcgttggggagactagcggctgaggagcctcacgcccttgagctgaacacagcccattcagccagaaagcagccgagaaggccccacttccttctggaacctgctcaatcacagcgcccacaaaagccccaagagcacggcctaggcatggcccagcctgccgcaccgtcccttacccgaccattcctggcggaggctcctactgccctggtcccgcatagtcctctgccgggtgcactttcatcagcccctgggcctaagcagcctcctacggcttccaccgggccagaactgttgttgctgcctctttcatcctttatgccttgcggcgcagcagcccctgccagggtgtccgctcagcgcgctaccccaagagacaaaccccctgtgcccagctctctggcctctgttcccgacccacatctgcttttacctggagattttagtgcaacaagagctggcccaggtctgtctaccgccggttccttagatcttgaggccgagctggaggagattcagcaacagcttctccactaccagacaaccaagcagaatctctggagctgtcgcaggcaggctagcagcctccgccgttggctggagttaaatcgggaggagccagggcctgaggaccaggaggtcgaacagcaggtgcaaaaagagctcgagcaggtcgagatgcagattcagctgttggccgaggagttgcaagctcagaggcaacctatcggggcatgtgtcgcaagaattcaggcactgagacaggccctttgttag

SEQ ID NO: 240322 - DNA, 378 bp, synthetic construct
  misc_feature 1..378: note = Description of Artificial Sequence: Synthetic coding sequence
  source 1..378: mol_type = other DNA
atggatgccgtggcggtgtatcatggcaagataagtcgcgagaccggagagaaactattgctggccacagggcttgacggctcctacctcttgagggatagcgagtcagtcccaggggtgtactgcctgtgcgtgctgtatcatgggtacatttatacataccgagtgtcacagactgagacaggatcctggtccgcagagaccgcacctggggtacacaagcggtacttcagaaaaattaaaaacctgatttcggcattccagaaacccgaccagggcatcgtgatccccctacagtaccctgtcgagaaaaagtccagcgcacgttccacacagggaattagagaagacccagacgtctgtctgaaggctccctag

SEQ ID NO: 240323 - DNA, 387 bp, synthetic construct
  misc_feature 1..387: note = Description of Artificial Sequence: Synthetic coding sequence
  source 1..387: mol_type = other DNA
atggacgccgtcgcagtctaccacggaaaaataagcagagaaactggggaaaaactactactagcaaccggacttgacggctcttatctgctcagagattccgaaagcgtgcctggtgtgtattgcctttgcgtgctgtaccatggctacatttatacctacagggtctcacagactgaaacgggttcctggtcagccgaaacggctcccggagtgcacaagcggtacttccgcaaaatcaagaacctgatcagcgcgttccagaagccagaccaaggtatcgtcatccccctgcagtatcccgtggaaaagaaaagctctgccaggtcgactcagggcactaccggtattcgcgaagaccctgatgtgtgcctcaaagcgccatag

SEQ ID NO: 240324 - DNA, 177 bp, synthetic construct
  misc_feature 1..177: note = Description of Artificial Sequence: Synthetic coding sequence
  source 1..177: mol_type = other DNA
atggacgctgtggctgtgtaccacgggaaaataagtcgggaaacaggggagaagctcctactggccactggtctcgatgggagttatctgttgcgggattcggagtccgtccccggtgtttactgcctttgtgtcctccatcactgggggtacatcaagtttattaacaagctatag

SEQ ID NO: 240325 - DNA, 234 bp, synthetic construct
  misc_feature 1..234: note = Description of Artificial Sequence: Synthetic coding sequence
  source 1..234: mol_type = other DNA
atggatcttccatattaccatgggagactcactaagcaggactgcgagacgctgcttctgaaggaaggtgtggacgggaactttctgctacgcgacagtgaatcaatacctggggttctgtgcctgtgtgtgtcattcaaaaatatcgtatacacttacagaatctttcgcgagaagcacggatactatcgtatacagaatagcaattccgactatgtggacgtgcttccttag

SEQ ID NO: 240326 - DNA, 399 bp, synthetic construct
  misc_feature 1..399: note = Description of Artificial Sequence: Synthetic coding sequence
  source 1..399: mol_type = other DNA
atggacctcccatactaccacggcaggctgacaaaacaggattgcgagaccttgctcttgaaagaaggcgtcgatggcaattttctcctgcgcgactccgagtcaatccctggcgtgctgtgcctatgcgtgagctttaaaaatatcgtgtacacttacagaatttttagagagaagcacgggtattatagaatccagaccgcagaaggctcgcccaagcaagtctttccaagtcttaaggagctcatatccaagtttgaaaagcctaaccaaggaatggtcgttcatttgctgaaacctatcaagcgcacctccccgtcactgcgttggcgagggctgaagctcgagctggagacattcgtgaatagcaattccgattacgtcgacgttctgccctag

SEQ ID NO: 240327 - DNA, 2271 bp, synthetic construct
  misc_feature 1..2271: note = Description of Artificial Sequence: Synthetic coding sequence
  source 1..2271: mol_type = other DNA
atgaatggagctccttcgcccgaggatggagcctcaccctcctctcctcccctcccgccaccacccccaccctcctggagggagttctgcgagtcccatgctagggctgcagccctggatttcgcacgtcgcttcagactgtatttggctagccatccacagtacgctgggcctggtgcagaagctgcttttagtcggagatttgccgaattgtttctgcagcatttcgaagctgaggtagccagggcttctggaagtctgagtccaccaatccttgcccctctgagccctggtgcagagatcagcccgcatgatttatctctggagagctgtcgggttgggggacccctcgcggttctgggcccttcccgcagttctgaagacctcgccggacctttaccctcgagcgtgtcttcatcctctacaactagctccaagccaaagctgaaaaaaaggtttagtttaagatcagtggggaggagtgtccgcggatctgtgaggggaatattgcaatggcggggaaccgtggatcctccttcctcagcaggcccattagagacctcctcagggcctccagtcctggggggaaattctaacagcaatagctcaggcggtgctggcacagttggccgaggactagtgtccgatgggacgagtcccggagagcgttggacacacagattcgagcgtttgagactcagcaggggcggaggggcactaaaagacggcgctgggatggtgcagagagaagaactgctcagcttcatgggcgcagaagaagcggcaccggaccccgcaggagttggcagaggcggaggagtggccggtccacctagcggtggtggagggcagccacagtggcagaagtgccgtctgctgttgcggagtgagggggaggggggaggcggttccaggctagagtttttcgtgccacccaaggcctcgcgacctcgcctctccataccctgctcttcgatcactgatgtccgaactaccaccgccctggaaatgccggatagagagaacaccttcgtcgtaaaggtcgaaggaccatctgagtacattatggagacagtggatgctcaacatgtaaaggcctgggtgagtgatatacaggagtgtctttccccgggaccttgtcctgccacgtctcctaggccaatgactctgcccctcgccccagggacaagctttctgaccagggaaaatactgactccctggagttaagctgcctgaatcattcagaatcactgcctagccaggacctgctcctgggaccatccgagtcaaacgatagactgagccagggcgcttacggtggcctgagcgatagaccctctgcctctatatctccctccagtgcctctatagccgctagccatttcgacagtatggaattactgcctccagaattaccacctaggatcccaatagaagaagggcctcctaccggcacagtccatccgctgagtgctccgtatccgcctctcgacactcctgaaacggctactggttcatttctatttcagggcgagcccgagggtggcgaaggggaccagcctttatctggatatccctggttccacgggatgctaagccgcctaaaggctgcgcagttggtgctcactggcggaactggaagtcacggtgtgtttttagtgcgccaaagtgaaacccgccgaggcgagtacgttctgacgtttaactttcagggtaaggccaaacacctgaggctgtccttaaatgaggagggacagtgcagggttcagcatctctggtttcaatccatcttcgacatgcttgagcacttcagggtgcatcccatccccctagagtctgggggttcatctgacgtagttctggtgtcctatgttccaagttcacaacgtcaacaggagcctacaaccagtcacgacccgccacagcctccagaacccccatcttggactgaccccccacagcctggcgctgaggaggcatcgagagccccagaggtcgcagccgcagccgcagcggcagcaaaagaaaggcaggaaaaagagaaagccggtggaggtggagtgcctgaagagttggttcctgtagttgagcttgtgcccgtcgtggaactcgaggaggcaattgccccaggatccgaagctcagggggcagggtcaggaggcgatgctggagtgcctccaatggtgcaactccagcaatcgcctctcggaggagacggcgaagaaggaggtcaccctcgggcaattaacaatcagtactccttcgtttag

SEQ ID NO: 240328 - DNA, 2016 bp, synthetic construct
  misc_feature 1..2016: note = Description of Artificial Sequence: Synthetic coding sequence
  source 1..2016: mol_type = other DNA
atgaacggcgcaccatctcccgaagacggtgcttcgccttcatcacctccgctcccgccaccaccacccccaagctggagggagttttgcgaatctcacgccagagcagccgctcttgattttgccagaagatttcggttgtacctcgcaagtcacccccaatacgctgggcctggtgccgaagcagcattctcaaggcgatttgcagagctgtttctgcagcattttgaggcagaggtcgcccgagcttcagggagcctgtcccccccaattcttgccccactgtctccgggtgcagagatcagtccccacgatctctcacttgagtcgtgccgggtaggcggacccctcgccgttctgggcccatcgagaagcagtgaggacctggccggtccgcttcccagcagcgtttcctcttcttcaacaacttcgagcaagcccaaactgaaaaagcgtttttccctccgctccgtaggaaggagtgtaagagggagtgtgcgaggtattctgcagtggcgaggcacggtggatccaccgtcatccgcaggaccactggagacatcgagtggcccaccggtgctggggggaaactcaaattctaacagctccggtggggctggaactgtggggagaggacttgtgtccgatggaacctcccccggtgagcgatggacccatcgcttcgaacgattgagattaagcaggggcggaggagcgctcaaggacggggcaggcatggttcaaagggaagagctgctatcttttatgggggcagaggaagccgctcccgatccagcaggggttggccgaggcggaggagtggctggcccaccaagcggtgggggaggtcagccacagtggcagaaatgtcgcctacttctcagaagcgagggtgaggggggtggcggttccagactcgagttctttgtgccgccaaaggctagcaggccacgcctctcgataccctgctcaagcataaccgatgtgcgtactacaacagccctagagatgccagatcgggagaatacgttcgttgtaaaggtggaaggccctagtgagtatattatggagactgtggatgctcagcacgtgaaggcttgggtgtcagacatccaggaatgcctctcacccggaccttgcccagccacttccccgagacctatgacgttgcctctggcacctgggacgtctttcctgacgcgggagaacaccgattccctcgagctcagctgtctgaaccacagtgaatctttacccagccaggatctcctgttaggacctagtgagtccaatgacagactgtctcagggagcatatgggggactttcggacaggcccagtgctagcatatcaccctccagcgcctcaatcgcagcctcacacttcgattctatggagctacttcctccagagctgcccccacgaatacctattgaggaaggaccccctactggcacagtgcatcccctctccgccccttatccccctctcgatacgcccgaaacagctacaggatccttcctgtttcaaggagagcccgagggtggagagggcgatcagccactgagcggttatccctggttccacggcatgctgtctcgactgaaagccgcacagttagtgcttaccgggggtacaggctctcacggggtctttctcgtgagacagagtgagactaggaggggggagtacgttctgacctttaacttccagggtaaagccaaacacctgcgcttgagcctgaatgaagaagggcagtgcagggtgcagcatctttggtttcaatctatattcgacatgttagagcatttccgcgttcatccaattccactggaatctggagggagctctgatgtcgttctggtctcttatgtgccctctagccagcgccagcaggggagagagcaggcaggctcacacgccggagtttgcgaaggagatggatgtcacccagatgcctcttgcacactgatgcccttcggagcctccgactgcgttacggatcatttaccctag

SEQ ID NO: 240329 - DNA, 2052 bp, synthetic construct
  misc_feature 1..2052: note = Description of Artificial Sequence: Synthetic coding sequence
  source 1..2052: mol_type = other DNA
atgaacggagccccatcgcccgaagatggcgcatcacccagttctcctcctctgccaccaccccctcctcctagctggagggaattttgcgagtctcatgccagggccgctgcccttgattttgcaaggcgatttcggctgtacctcgcctctcatccccagtatgctggccctggggcagaggctgccttttcccgacgattcgccgagctatttctccagcatttcgaagccgaggttgcacgtgcgtcgggctctcttagcccccctatcctggcgccactctctcctggagcggagatcagtcctcacgatctctcccttgaaagttgccgggtaggcggacccctggctgtgctcggacctagcagatcatccgaggatttagcagggcctcttccctctagcgtctcatcttcctctaccacctctagcaaaccaaagctgaaaaaacggttttctttgcggtccgtgggacgcagtgtcaggggttctgttcggggtatcctgcagtggcggggaaccgtcgatccgccaagcagcgcaggcccactggaaaccagcagcggtcctccagtactgggcggtaatagtaattctaactcgagcgggggagcaggtactgttggtcgtgggttagtcagtgatggcactagccctggagagaggtggactcacagattcgaacgactacggctgtcaagaggaggaggcgcactgaaagatggggcagggatggtccaaagggaggagttgctgtcttttatgggcgctgaagaagcagctcccgaccctgctggggtaggacggggtggaggagttgctggaccgccttccggcggaggaggtcagccccaatggcaaaagtgtcggctgcttctacgctccgagggcgagggcggtggtgggtccaggttggagtttttcgtgcctccaaaggcgtctcggccacgattgtcaattccttgctcatctatcactgacgtgcggacaacgacagccctcgagatgccagaccgagaaaacacctttgtggttaaggtcgagggtccgagtgagtatataatggagactgtcgatgcacagcacgtgaaggcctgggtgtctgatatacaagagtgtctgtcccccggtccatgccccgctacgtctcctaggcccatgacgttgcccctggcaccagggacttcattcttgacccgcgagaacactgactccctggagctcagctgcctgaaccacagtgaatcactcccatcgcaggacctcctgctaggccctagtgaatctaatgaccggctgtctcaaggggcttatgggggactctcagaccggccatccgcctccatctctcccagctctgcctccatcgcagctagtcatttcgattcgatggagctcctccctcccgaactccctcccaggatccccattgaggaaggcccacctactggcacggttcacccgctctctgcaccgtatccccctctggatacacctgagaccgcgacaggctccttcctgtttcagggcgagcccgagggcggagaaggcgaccagccgctgagtggatacccctggttccacggaatgctgagcagacttaaagccgctcagctggtgctgaccgggggaaccggctctcacggagtgttcctcgtacggcagtccgagacacggcgtggagaatacgtcttaacctttaacttccagggcaaagcaaaacatctccggctgtccttgaacgaggaaggacagtgcagggtccagcatctttggtttcagtctatctttgacatgctggaacacttcagggttcacccaatccccttagaaagcgggggttcgtcagatgtggttctggtgagctatgtgccatcctcccagcggcaacagggtgaacagagcagatctgcgggagaggaagtaccagtgcatcccagatctgaggccggttcccgcctaggcgctatgagaggctgtgcgagggaaatggacgctacacccatgccccctgcgccttcatgtccatcggaaagagtgaccgtgtag

SEQ ID NO: 240330 - DNA, 2016 bp, synthetic construct
  misc_feature 1..2016: note = Description of Artificial Sequence: Synthetic coding sequence
  source 1..2016: mol_type = other DNA
atgaacggcgcaccttctcctgaggatggcgcatctccgtcctctcctccactgccaccgcctccaccccctagttggagggaattctgcgaaagtcatgccagggccgctgccctggactttgcgaggcgattcagactctacttagcttcacatcctcagtatgccggtccaggcgcagaggccgcattcagtcggcgattcgctgaactattccttcagcatttcgaggcagaggtggcacgtgcgtccggatctttgagcccaccaattcttgcccctctttcccccggtgctgaaattagcccacacgatcttagcttagagtcatgccgggttggcggtcccttggctgtcctggggcctagcagaagcagcgaagatctggcgggtcctctgccctcctccgtgagttcatccagtactacatcttcaaagcccaaattgaagaaaagattctctttacgctcagtgggacgcagtgttcgcggatcggtgagaggcatcctgcagtggcggggaactgttgacccaccctccagtgccggtccactggaaacctcgtctggacccccagtcctagggggaaattccaattctaacagttcaggaggcgcaggcacagtcggacgagggctagtttcagacggcacatcccccggagaaaggtggactcatcggttcgagcgcctccgccttagtaggggaggaggtgctctgaaagacggggcaggtatggttcaaagagaggaactgctcagcttcatgggggcagaggaagctgcaccagatccagccggtgttgggagaggcggtggcgtcgccggtcccccatccggcggtgggggacagccacagtggcagaaatgcaggttgcttctgagatctgagggcgaagggggtggcggaagcaggctggaatttttcgtgccgcctaaagcatctagaccccgactgtccatcccatgcagcagcatcacagatgtacggacaactacggctctggagatgcctgacagagagaacactttcgtggtgaaggtggagggaccttctgaatatataatggaaactgtggacgcccagcacgtcaaggcctgggtctcagatattcaagagtgcttgtctcccggtccgtgccctgccacttccccgaggcctatgacactgcccctggccccagggacaagcttcttaacgcgcgagaataccgacagtctagagctgagctgccttaaccactctgagagcctgccctctcaggacctcctattgggcccaagtgagagtaatgaccgattatctcagggcgcatacggtggcctgagcgaccgaccaagcgccagtattagtccttcaagtgctagcattgctgcttctcactttgatagtatggaactgctccctcctgagctaccaccacgcataccaattgaggagggccctcccactgggaccgtgcacccattatcggccccatatccacccctggataccccagagacagcaaccggcagtttcctgtttcagggtgagcctgaagggggagagggtgaccaacccctgtcaggctatccatggttccatggcatgctttcccgactaaaggcagcccagctggtgctgaccgggggaacaggaagccatggtgtgtttttagtaagacaatccgaaacgcgcagaggggagtatgttctgaccttcaacttccagggaaaggccaaacatcttagactgtctctcaatgaggagggccagtgccgcgtgcaacacctctggtttcagtccatatttgatatgctggagcacttcagggtgcatcctattccactggagagcggcggaagctcagatgttgttcttgtgtcatatgtgccaagttctcagaggcaacagggcagagagcaggcaggcagtcacgcaggcgtgtgtgaaggcgacggctgtcaccccgacgccagctgcacacttatgcctttcggggcaagcgattgcgtcaccgaccacctgccctag

SEQ ID NO: 240331 - DNA, 1008 bp, synthetic construct
  misc_feature 1..1008: note = Description of Artificial Sequence: Synthetic coding sequence
  source 1..1008: mol_type = other DNA
atgcctgacagagaaaatacattcgtggtgaaggttgaaggacctagtgaatacatcatggagaccgttgacgctcagcatgtcaaggcatgggtctcagacattcaggagtgcctttccccgggaccctgtccagccaccagcccgcgtcctatgacgcttccattggctcccggaacaagtttccttaccagagaaaatacagattcactggaactgagctgcctcaaccattcagagtccctcccgtcgcaggacctcctattggggccaagcgagagtaacgatagattgtctcaaggtgcctatggcggtctgtccgatcggccttccgcttctatcagcccctcctcagcatccattgcagcttcacattttgactctatggagctgctgcctcctgagctgcctccaagaattcccatcgaagaaggcccaccgacgggcaccgtccaccccctgagtgctccatatccgcctcttgataccccagagaccgcaacaggttccttcctgttccagggggagccagagggtggggagggtgaccagccactgagcggttatccctggttccatggaatgctcagcaggctcaaggccgcacagctcgttcttacgggcggaacgggatcgcacggagtattcctggtgcgtcaaagcgagacacgtagaggagagtatgtgctaacctttaactttcaaggaaaagcaaaacatctacgattgtccctcaatgaggagggacagtgccgcgtgcagcacctgtggtttcaatccatcttcgatatgctggagcattttagggtgcatcctattcctctcgaaagcgggggttcttccgatgttgtgttggtatcttacgtgcctagcagtcagcgccagcagggtagggagcaggcaggctcccacgccggtgtctgcgagggagatgggtgtcaccccgatgcgtcctgcactctgatgcccttcggcgcaagcgactgcgtcactgatcatctcccctag

SEQ ID NO: 240332 - DNA, 1122 bp, synthetic construct
  misc_feature 1..1122: note = Description of Artificial Sequence: Synthetic coding sequence
  source 1..1122: mol_type = other DNA
atggccgaggccagtcgtccacgcctgagcatcccttgcagctccattacagacgtgagaaccacaacagctcttgagatgccagaccgagagaatacctttgtcgtaaaggttgagggtccaagcgagtatatcatggagacagtcgatgcccagcatgtcaaagcctgggtgtccgatatccaggagtgtttgtctccaggtccgtgccccgcaacgtcaccaaggccaatgacacttcctctggcacccggaaccagcttcttgacccgggaaaatacggattctctggagctgtcatgcctcaaccatagcgagtcattgccctctcaggatctgcttctggggccttccgaaagcaatgatagactgagtcagggcgcatatgggggtctgagtgataggccttcagcctctatcagcccatcgagtgcctccatcgcagcgagccattttgacagcatggagctgctaccccctgagttgccacctcgcattcctatcgaggagggacctcctacgggtaccgtgcaccctctctccgctccatacccaccgctggacactcccgagacagccaccggttctttcttatttcagggcgagccagaagggggagagggcgaccagcccttgtctggctacccctggttccacggtatgctctctcgactcaaagcggcacagttggtgctgactggcggaacaggctcccacggggtgtttctcgttagacagtcagaaacccggagaggagaatatgtgctgacttttaacttccagggcaaggccaaacatctgcgcctttcactcaatgaagaaggacaatgtcgtgtgcagcacctgtggttccagtcgatttttgatatgttggaacactttcgcgtacaccccatacctttagaaagcggaggatccagtgatgtggtgctcgtaagctatgttccaagctcgcagcgccagcagggagagcagtcacgttctgccggtgaggaagttccagtccatccccgatctgaagctgggtctcgactaggcgctatgaggggctgtgccagagagatggacgctaccccaatgcctcctgctccatcctgtcctagtgagcgagtcacagtatag

SEQ ID NO: 240333 - DNA, 1728 bp, synthetic construct
  misc_feature 1..1728: note = Description of Artificial Sequence: Synthetic coding sequence
  source 1..1728: mol_type = other DNA
atgaacggcccagcactccagcctagctccccttccagtgccccaagcgccagcccagctgccgctccacgcggttggtcagagttctgtgaactccatgccgtagcagctgcaagagagctcgccagacagtactggctcttcgcaagagaacatcctcagcatgctccgttgagagccgaactggtgagcctgcaatttacggacttattccagcgctatttttgccgggaggtgcgcgacggccgagctcccggacgtgactacagggatacaggtagaggaccaccagccaaggctgaggccagcccagaacctggtcctggcccagccgctcctggcctgcccaaagcgaggtcaagcgaggaactggcccctccaaggcctccaggcccatgctcctttcagcatttcaggaggtctctgcgtcatatctttcgtcgcagatcagccggagagctacccgcagctcacaccgccgctgccccaggcacccctggtgaagccgctgagactcccgcacggcctgggcttgctaagaagttcctgccctggtccctcgcgcgagaacctccacctgaagccttgaaggaagcagtcctaagatactctctcgccgacgaagcctctatggatagtggtgcaagatggcagagaggcaggttagctttgaggcgagccccaggtcccgacggtcctgaccgtgttctcgagctcttcgacccccctaagtcctctcggccaaagctacaggcggcttgttccagcattcaggaagttcggtggtgtacccggctcgagatgcctgacaacttatatacttttgtccttaaagtgaaagacagaactgatatcatctttgaggttggcgacgagcagcagctaaactcgtggatggctgagctgtccgagtgcactgggagaggactggagtctactgaagcggagatgcacatcccatcagcactcgagcctagtacgtcctcatcacccagaggctccaccgatagcctcaaccagggagcgtcacctggcggactgctggatccagcctgtcagaagactgaccacttcctctcttgttacccatggttccacggcccaataagtagggtcaaggccgctcaactagtccaactgcaggggcctgacgctcacggtgtgtttctggtgagacaaagcgagactagacggggagaatatgttctgacgtttaactttcagggcattgcaaaacacctgaggttgtcactcaccgagcgcggacagtgtagagtgcagcaccttcatttcccatcagtggtcgacatgcttcaccatttccaaaggtcccctatccccttggagtgcggtgcagcctgtgatgttaggctttcctcatacgtggtggtcgtgtctcaaccccctggctcctgtaatacagttttgtttcccttttctctgccacattgggattctgaaagtctgccccactggggaagcgaactcgggcttccccacctttcaagttcggggtgtccacgcggactctcgcctgaaggcctacccggtaggtcatcacccccagagcagatatttcacctggtgcccagtcccgaagaacttgctaacagcctccagcacctggagcatgaaccagtgaacagagcacgcgattccgattacgagatggattcatcttcacggtcgcacctgagagccattgataaccagtataccccactctag

SEQ ID NO: 240334 - DNA, 1122 bp, synthetic construct
  misc_feature 1..1122: note = Description of Artificial Sequence: Synthetic coding sequence
  source 1..1122: mol_type = other DNA
atgggattccccgtgctatgcagggggtggagacgcacctggcctggatgcgcttcttggctgggcgctccacctccgcagaaacccttactgagtcccctgcttctcaaccaccggtcctcaaagtcatcaagacccaaattgcaggccgcatgctcgagcatacaggaagtgcgatggtgtactcgtcttgaaatgccggataacctctatacctttgtccttaaagtaaaggatcggacagatatcatcttcgaggtgggagatgagcaacagttgaatagttggatggcagaactgagcgaatgcaccggtaggggactggagagcaccgaagcagagatgcatattcccagcgccctggaaccttctacctcatccagccctcggggaagcaccgattccctcaatcagggggcttcccccggtggactgctcgaccctgcctgtcagaaaacggaccacttccttagctgttatccttggttccacggccctatatcacgcgtgaaggccgctcaactggtgcagctacagggccctgatgcccacggagtgtttctagttcgtcagtccgaaacccggagaggcgagtatgtactgacattcaacttccaggggatcgccaaacatttgagactttccctgactgaacggggacaatgtcgggtccagcatttgcactttccctcagtggtggatatgttgcaccatttccaaagatcccctattcccctggaatgcggggctgcctgcgacgtccgtctgtccagttatgttgttgtggtatcgcagcccccaggtagttgtaacacagtactgtttccatttagtcttccccattgggattctgagtctctcccccattggggctcagaactgggcctgccacatctgtcaagcagcggctgcccgagggggctgtccccggaagggctgcccggtcggagcagcccacccgagcagatctttcatctggttccctcaccagaggagcttgccaattcactacaacacctggagcacgagccggttaatcgcgcaagagattctgactacgaaatggacagttcaagcaggagccatcttagagctatagacaatcaatatacacccctgtag

SEQ ID NO: 240335 - DNA, 1209 bp, synthetic construct
  misc_feature 1..1209: note = Description of Artificial Sequence: Synthetic coding sequence
  source 1..1209: mol_type = other DNA
atgataccacccagtagtcctagagaggatggagtcgacggcctgcccaaggaggcagtgggggcagaacagccgccaagccccgcttcaacaagctcccaggaaagtaagcttcagaagctgaagcggagcctatcgttcaaaaccaagagtctccgaagtaaaagtgccgacaacttttttcaacggaccaattccgaagatatgaaactccaagcgcacatggtggccgaaatttctccctcctctagtcccctaccagcccctggatcgcttacctccacacccgctagggctgggctgcaccctggtggaaaggcacacgcatttcaggagtatatcttcaaaaagcccacattctgtgacgtgtgcaatcatatgatcgtggggaccaatgccaagcacggactccggtgtaaagcatgtaaaatgtcaatacatcataagtgtacagatggtcttgccccacagcggtgcatgggaaagttacccaaaggattcagacggtactatagtagcccgttgctgatccatgagcaatttggctgtataaaggaggtcatgcccattgcctgcggtaacaaagttgaccctgtctacgagactttaagatttggaaccagtctggctcagaggaccaaaaaaggatcctctggttccggttcagactccccacacaggacatctaccagcgatctagttgaagtccccgaagaggccaatgggcctgggggagggtatgacttgcgtaaacgatcaaattcggtgttcacgtatcccgagaatggcacagacgacttccgggatcctgctaagaatatcaaccatcagggcagtctgtcaaaggaccccctgcagatgaacacctatgtggcactgtacaaattcgtgccccaggaaaatgaagacctggaaatgagaccaggggatattatcaccttgctggaggacagtaacgaagattggtggaaggggaaaatccaagacaggattgggtttttcccagctaattttgtccaaagacttcaacagaatgagaaaatttttcgttgcgtcagaacattcatcggctgtaaagaacaaggccagataacactgaaggaaaatcagatctgcgtgtccagcgaggaagagcaggacggtttcatccgagttctgtcaggaaagaaaaagggcctaatccctctggatgtcttagagaacatttag

SEQ ID NO: 240336 - DNA, 1005 bp, synthetic construct
  misc_feature 1..1005: note = Description of Artificial Sequence: Synthetic coding sequence
  source 1..1005: mol_type = other DNA
atgaaacttcaggcgcatatggttgctgagattagccctagtagtagcccgctccctgcccctggatccctgacgagcactccagctagggctggtctgcaccctgggggaaaagcccacgcttttcaagagtacatttttaaaaagccaacattctgcgacgtgtgcaatcacatgattgtaggaaccaatgcaaagcacggcctgagatgcaaagcatgcaagatgtccatacaccacaaatgcacagatgggcttgcgccacagcggtgtatgggaaagctgcccaagggatttcgtcgctactattcatcacctctcttgatacacgagcaattcgggtgcatcaaagaggtgatgccaattgcgtgcggaaataaggtcgacccggtatacgagacgctgcgatttgggacatcccttgcacagcggacaaaaaagggatcaagtggtagcggatcggattcgccgcacaggacaagcacgtctgatctggtggaagtgcccgaagaagccaacggtcctggagggggttacgacttgcggaagcgatctaattccgtcttcacataccccgagaatgggactgacgattttcgggaccccgcaaagaatattaaccaccaggggtccctctccaaagatccgctccaaatgaacacctatgtggctctgtacaagttcgtgcctcaggaaaatgaagatctggagatgagaccgggtgacatcattactcttttggaggacagtaatgaggactggtggaagggaaagatacaggacaggataggatttttccctgccaacttcgttcagagactccagcagaatgagaagatattccggtgtgtgaggaccttcatcggttgtaaggagcagggccagataacactcaaggagaaccagatttgcgtcagctctgaagaggaacaggacggtttcattagagtgttgagcggcaaaaaaaagggcttaattcctctcgatgtgctagaaaacatttag

SEQ ID NO: 240337 - DNA, 4422 bp, synthetic construct
  misc_feature 1..4422: note = Description of Artificial Sequence: Synthetic coding sequence
  source 1..4422: mol_type = other DNA
gtggccattattgctggaaattttgaactcgcagaatatattaaaaatcataaggaaacagatattgtgccttttcgcgaagcacccgcttatagcaacaggagacgcaggcctcccaatacattagcagcacccagggtactgctgcggagcaattcagataacaatctcaatgcatctgcccctgattgggcagtctgctcaacggcaacaagccatagatctctatctcctcaactgttgcagcagatgccgtcaaaacctgagggggctgccaagactattggaagctatgtgccaggacccaggagcaggagcccttctcttaataggttggggggagcaggcgaggacgggaagcgtccgcaaccactttggcacgttgggtctcccttcgcattaggtgcgaacaaggatagtttgagcgccttcgagtaccccggtcccaagcggaaactctactccgctgtgcctggcagactctttgtggcagtaaagccgtatcagccccaagtggatggcgagatcccactgcacaggggagatagggtgaaagtgctatccataggtgaggggggattttgggagggaagtgctagagggcatatcggatggtttcccgcagagtgcgttgaggaggttcagtgcaaaccaagggacagccaggccgagactcgggctgatagaagtaagaaattgttccgacactatacagtgggcagctatgatagttttgacacctcaagcgattgcattatcgaggagaaaacagtggtcctgcagaagaaggacaacgaaggcttcggattcgtgctccggggagccaaagccgacacacccattgaagagttcactccaacacccgcttttcctgcattgcaatatctggagagcgtagatgaagggggtgtagcttggcaggccggtctcagaacgggcgactttctaattgaggtgaataacgaaaacgtggtgaaggtagggcacaggcaagtcgttaacatgatcagacaggggggtaaccaccttgtgttaaaagtggtaaccgtaacccgcaacctggaccctgacgatactgccagaaagaaggcaccgccacctcctaagcgagcacccactaccgctctcacgctccggagcaagtccatgacatccgagctggaagaactcgtcgataaagataaacctgaagagattgtgccagcttctaagcctagccgagctgccgaaaatatggctgtcgaaccgcgtgtcgccactatcaagcaacgtcctagttccaggtgttttcctgcaggatccgacatgaactctgtttacgagcggcagggaatcgccgtaatgacccccactgtacccggtagcccaaaggcacccttccttggcattccccgaggaacgatgagaaggcagaaaagcattgacagccgcattttcctctccgggatcacagaggaagaaagacaattcctggctccacccatgctgaagtttactagaagtctcagcatgcccgacactagcgaggatatcccacctcctccccaatccgttccccctagtccacctccgcctagcccaacaacatataattgccccaagtcacctacacctcgggtgtatggaaccatcaaacccgcattcaaccagaactcagccgctaaagtatcccccgcaactagatctgacaccgtcgctactatgatgagagaaaaaggcatgtattttcgcagggaactggatcgttattccctggacagtgaagacctgtacagtcgcaacgcagggcctcaggccaacttccgtaacaagcggggacagatgccagagaatccttactctgaggtcgggaaaatcgcatcgaaagccgtgtatgtccctgcaaagcctgctcgtagaaaaggaatgctcgtcaagcagtctaatgtggaagactctcctgaaaagacgtgcagcataccaattcctactatcatagtgaaagagccttcgacctcctctagcggtaaatcctcacaaggttcgagcatggagatcgatcctcaggcccctgagcccccatctcagctgcgtcctgacgagtcactgacggttagtagtccttttgctgctgctatcgcaggggcagtaagggacagggaaaagcggctggaagctaggagaaattccccggcatttctatctacagacttgggtgacgaggacgttggacttggccctcccgcaccaagaaccaggccttcgatgtttcccgaagagggagactttgcagacgaggattccgccgagcaactctcatccccgatgccatcagccactcccagagagccggagaaccacttcgtcgggggagctgaagccagcgccccaggtgaagccggaagacctcttaattcaacgtcgaaggcccagggccctgagagcagtcctgcagtccctagcgctagctccggtacggcgggtcctggaaattatgtccatcctctcactggcagactcctcgaccccagctctcccctggctctggctctttccgccagggatcgcgcaatgaaggagagccagcagggtcccaagggcgaggcgccaaaagccgacctgaataagcctttgtacatcgataccaaaatgaggccttctctggatgctggcttccctactgtgacaaggcaaaacacaagaggtcccctccgccgtcaggaaactgagaacaaatacgaaacagatctcgggagggaccggaagggcgatgataaaaagaatatgctaattgacattatggatacttctcagcaaaagagcgctggtctacttatggtccatactgtggacgctacgaagcttgataatgcacttcaagaagaggacgagaaggccgaggttgaaatgaagcccgattccagcccaagcgaggtgccagagggcgtcagtgaaacggagggtgcccttcagattagtgctgccccagaacccaccacagtgccagggaggaccattgtcgcagtcgggagcatggaggaggcagtaatcctgccatttcgtatcccccctccccctttagcctcagtggatctggacgaggattttatatttaccgaaccgttgccccctcccttagaattcgctaacagctttgacatacccgacgatagggccgcatctgtgcctgctctctcagacctcgtcaaacagaaaaagagcgacacaccccagtccccatctttaaattcatcccagcccactaattctgccgactcaaagaagccagctagtctttcgaactgcctccccgcatccttcctgcctcctcctgaaagtttcgacgcagtagccgattcgggaattgaggaagtcgatagccgtagttcatctgatcatcacctggagacgacaagcaccatttccacagtctcgtcaatctctacactcagctccgagggcggagagaatgtggacacttgtactgtctatgctgatgggcaggccttcatggtcgacaagccacctgtgccacctaagccaaagatgaagcctatcatccataaaagtaacgcattataccaagacgcccttgtggaggaggatgtggactcctttgtgatcccccctcctgcccctccccctcctccagggtccgcccagcccggaatggccaaagtcctccagcctcggacttctaagttgtggggggatgtcacggaaatcaaatcacctatcctgagcggcccaaaagctaacgtgatttccgaacttaattctattctgcaacagatgaatcgagagaaactagccaaaccaggggaaggtctggattctccaatgggcgctaaaagtgcctctctcgctccacgtagcccagagataatgtccactatctcaggtaccagatcaaccacagtgacctttacagtacggcctggcacctcgcagccaatcactctgcagagtcgcccacccgactatgagtccagaacctccggaactcgacgtgccccttcccctgtcgtgtcgccaacggagatgaataaagaaaccctgccggcaccgctgagtgccgcaacggcctctccatcacccgcactctccgatgtgttcagtctgcccagccagcccccttcaggggacctatttggcctaaatcccgcaggccgtagccgcagcccgtcccctagcatattacaacagccaatttccaataagccctttacgacaaaaccagtgcacctttggaccaagccggatgttgcagactggctggagtcccttaatctgggtgagcataaagaagccttcatggataatgagatcgatggctcccacttgcctaacctccagaaggaggacctcatcgatttgggggtgactagggtgggacacagaatgaatatcgaacgggcattaaaacagctgcttgaccgttag

SEQ ID NO: 240338 - DNA, 5552 bp, synthetic construct
  misc_feature 1..5552: note = Description of Artificial Sequence: Synthetic coding sequence
  source 1..5552: mol_type = other DNA
atgccccgttcaccgacctctagcgaggatgaaatggcacaatcgttcagcgattactccgtgggaagtgagtcagatagttctaaagaagagacaatctatgatacgattagggctaccgctgagaaacctgggggagcacggactgaggaaagccaggggaacacactagttattcgcgtggtgatccacgatctgcagcagacaaaatgcatcagatttaaccccgatgctaccgtttgggtcgccaaacagcggattctatgtacactgacccagtcactaaaagatgtattaaattatgggctcttccagccggctagcaacgggagggacgggaagttcctggacgaagagagactgttgcgggagtatccacagcctgttggcgaaggcgtaccctctcttgagtttaggtataagaaacgtgtgtacaagcaggcaagtctcgatgagaaacagctcgctaagctacacacaaaaacgaacctcaagaaatgcatggaccacatccaacacaggctggttgagaaaattaccaagatgctggatcgcggtctcgatcctaattttcacgatcctgagactggggaaacgccactcacactcgccgcacaactcgatgattctgtggaagtgatcaaggccttaaagaacggcggagcacacctggactttcgcgctaaagacggcatgaccgctcttcacaaagcagctcgtgctagaaaccaagtggcgttgaaaactctgcttgaactgggtgcgtcccccgactataaggatagctacggcctgaccccactttatcatacggcaatagtcggtggcgacccttactgttgcgaactgctgctccatgaacacgcaaccgtctgttgtaaggacgagaatggctggcatgagatccatcaatcaaggtgctggggccacatatcagagccccaccacaccttactgagtgggagcgcgaggtctcagcagtcaagaagtgcctcgtctgctctccatgtgtgcgctatgtattcttcctttagctgcgttagaatcagcctcttgttccatggccgtatcacagaattaaaacagtacaagaagtcaacaccattccaagtcgccatcatagccggtaactttgaactggccgagtacattaagaaccacaaagaaaccgacatcgtaccatttcgagaggcaccagcgtattcgaacagacgccgacgccctccgaacacattggcggcacccagggtcttgcttagaagtaacagcgacaataatttgaatgctagcgcccctgattgggcggtttgtagcactgcaacatcacatcgctctctgtcccctcaactgctacagcagatgccatccaagcctgaaggtgccgctaagacaatcggtagttatgtgccagggccacgtagccgatctcctagcttgaataggctcgggggtgccggagaagatggcaagcggccacagcctctgtggcacgtgggttctccattcgcgctcggtgccaataaggactcgctctccgcattcgagtacccgggacccaagaggaagttatattccgctgtgcctgggagactcttcgtggcagttaagccctatcagccccaggtagacggcgaaataccactccatcgcggagaccgcgtcaaggttctcagcataggtgagggaggcttctgggaagggtccgctcggggtcacatcggctggtttcccgcagaatgtgtggaggaagtgcagtgtaagccgcgagattcgcaggccgaaacgcgcgctgacaggagtaaaaaactctttagacattataccgtcggctcttacgatagctttgatacctcatcggactgcatcatcgaggagaagacagtggtcctacagaaaaaagataacgagggttttggtttcgtgttacgcggtgccaaggcagatacgcccatcgaagagtttacgcctaccccagcatttcctgcgttgcagtatcttgagtctgtggatgaaggcggtgttgcctggcaggctggattacgtactggagacttcctcatcgaggtgaacaatgagaacgttgtgaaggtgggacatcgccaggtagtaaacatgattcggcaagggggaaaccacctggtgttgaaagttgttacagtgacgagaaatctggatcctgatgacactgctcgcaagaaggcccctccgcctcccaagagggcacctacgaccgcactaaccctgcggtcaaaaagcatgacatccgaattagaagaattagtggacaaaggtgtgattcggaaagttagcgataagccagaggagatcgtgccagcttcaaagccaagcagggctgctgagaacatggctgtggaaccccgtgtggctactatcaagcagcgcccttcttcccggtgcttcccagcgggatcagatatgaacagtgtgtacgaacggcagggaatcgccgtgatgacccccacagtgcctggtagtcccaaggcaccctttctgggtatacccagggggacaatgcgcaggcaaaagtccatcgatagtaggatcttcttgagcgggatcaccgaggaagagcgacagttccttgccccaccaatgttgaaattcacccggtccctcagcatgcctgatacatctgaagatattcctccaccaccccaaagtgtacccccttcacctcccccaccatcaccaactacgtataactgcccaaagtccccaaccccaagagtatacgggactattaagcccgcatttaaccagaattctgccgcaaaagtttcccccgcaacccgcagtgatacagttgctaccatgatgagggagaaggggatgtacttccgcagggagctggaccggtattctctggactccgaagatctatatagtaggaatgcaggtcctcaggccaatttccgcaataagcgcggacagatgccagaaaatccttatagtgaagtggggaagattgcctcaaaggctgtttatgtgccagctaagcctgcaaggcgcaaaggtatgttagtgaagcaatcgaatgtggaggactctcccgaaaagacctgtagtataccaatccccacaattatcgtgaaggagccatcaacaagcagttcagggaaatcctctcaggggtccagcatggagattgatcctcaggcaccggaacctccgtctcagctccgaccagatgaatctctgacagtgtccagtccatttgcggctgcaattgccggagcagtgcgggacagggagaaacgtttggaagccaggcgcaactctcctgcttttctgagtactgatttgggggatgaggatgtggggttgggcccacccgcacccaggaccagacccagtatgttccctgaagaaggggactttgctgacgaggactccgccgagcagcttagctcccccatgccatctgcaaccccgagagaacctgaaaatcacttcgtcgggggagccgaggcaagcgctcctggcgaggccggacggcctttgaatagtacgtctaaggcccagggtcccgagtcttccccagcagtcccatctgctagctctggtaccgccggacccggaaattatgtacatcctcttaccggcagactcctcgatccctccagtccacttgctttggctctgtccgcgagagacagggccatgaaagaatctcagcagggcccaaagggggaagctccgaaggcggatctaaataagcccctgtatatagacactaagatgcggccttctctggatgcgggattccccacggttacgaggcaaaataccagagggcctctgcggcgtcaggagaccgaaaacaaatacgagacagacctcggcagggatcggaaaggggacgataaaaagaatatgctgattgatattatggacacatcccagcaaaagtctgcaggattgcttatggtacacaccgtggatgccacaaagttggataacgctctgcaggaggaagatgaaaaagctgaggttgaaatgaaaccagatagtagcccatctgaggtcccagaaggcgtgagtgaaaccgagggcgctttgcagataagcgcggctcctgagcccaccaccgtgccaggccgaacgatagtcgcagtgggctcaatggaggaagctgttattctgcctttcaggatcccgccacctcctctggcctccgtggacctcgatgaagattttatcttcaccgagcccctgcctccacctcttgagttcgccaactccttcgacataccagatgatcgggctgctagcgtgccggcactttctgacctggtgaagcagaaaaagtcagatactccacagagtccaagcctaaatagttcacagcccaccaatagcgccgattctaaaaaaccagcctcactgagcaattgtctgcccgcttcttttttgccgcctccagaatcatttgatgctgtagcagacagcgggattgaggaggtagattcccgctcttcaagcgatcatcacttggaaacaacttctacaataagtaccgtctcctctatctctaccttgtccagtgaagggggtgagaatgtggatacttgtaccgtctatgcggacggccaggcgttcatggtcgacaaacccccagtgccaccgaagcctaagatgaagccaattatccataagtccaacgctctgtaccaagatgcactcgtggaggaagacgtggattctttcgtcattcctcctcccgcacctccccctccaccaggctccgcccagccaggcatggcaaaagttttgcagccgcgaacttcaaagctgtggggtgatgtcacagagattaaaagccctatcctatcagggcctaaagctaatgttatatccgaacttaactccatccttcagcagatgaaccgagagaagctggctaagcctggcgagggactggacagtcccatgggggctaagagcgcctctctcgctccccgaagccccgagatcatgtctaccatcagcggaacgcgatccactacagtcacatttactgttcggccaggcactagccaaccgattactctccagagtaggccccctgattatgaatctcgcaccagcggaacgcgcagagctccttccccagtggtgagtccaacagagatgaataaggaaacgcttcccgcacccctgtccgctgccactgcttccccaagccccgcacttagtgatgtttttagcctgccatctcagcccccaagtggcgatctttttgggctgaatcctgctggcagaagtcgatctccatctccctctatcctccagcagcctatctccaacaagcccttcactaccaaacccgtccacctctggactaaaccagacgtcgcagactggttggaaagcctgaatctcggagaacacaaggaggccttcatggataacgagatcgacggatcacacctgcctaatctccagaaagaagatctgattgatcttggggtgacaagggttgggcatcgtatgaacatcgagagagctttgaagcagctcctggaccgtta

SEQ ID NO: 240339 - DNA, 846 bp, synthetic construct
  misc_feature 1..846: note = Description of Artificial Sequence: Synthetic coding sequence
  source 1..846: mol_type = other DNA
atgatgatgaatgttccaggagggggagccgcagccgttatgatgacagggtataacaacgggaggtgcccacgtaactccctttactcagactgtattattgaagagaagacagttgtcctacagaaaaaggataacgaaggattcgggtttgttctgcggggagcaaaggcagataccccaatcgaggagtttactcccactcctgcttttcccgcactgcagtatttagaaagcgtagatgagggcggagttgcatggcaggccggattacggactggggactttttgatcgaagtcaataacgaaaacgtggtgaaagttgggcaccggcaggttgtgaacatgatccggcagggaggcaaccatttagttctgaaggtggtaaccgtcacacggaatttggacccggacgacacagctcgcaaaaaagccccaccgcctccgaagcgggcacctactacagccttgacgttgagatctaagagtatgacctcggaacttgaagaactggtggacaaaggcgtgatacggaagggaaaagacaagcctgaggaaattgtcccagcttcgaaaccttcaagggccgctgagaacatggctgtggagccacgggtcgcgaccatcaaacagcgccctagcagccgctgtttccctgcaggctctgacatgaatagcgtgtacgaacgccaaggaattgccgtaatgactcctaccgtgcccggaagccctaaagccccatttctgggcataccgcgaggaacaatgaggcgccaaaaaagtataggcaagaaatgcggaactcctccacaaaagctcccgctgggttttcagacgcaaccttag

SEQ ID NO: 240340 - DNA, 3762 bp, synthetic construct
  misc_feature 1..3762: note = Description of Artificial Sequence: Synthetic coding sequence
  source 1..3762: mol_type = other DNA
atgatgaatgtgccaggaggtggggctgctgcagtgatgatgaccgggtacaacaacggacgatgcccaaggaactccctctactctgactgcatcatcgaggaaaaaactgtggtgctgcagaagaaagataatgagggtttcggattcgttctacgcggtgctaaggctgacactccaattgaagagtttactcccacacctgccttcccagctttacagtatctggagagcgtggatgagggtggcgttgcatggcaggcagggctcaggaccggagactttcttatcgaggtgaacaatgagaatgtggtcaaggtaggtcacaggcaggtggtcaacatgatccgccaaggtggcaatcatctagtgctgaaggtggtgactgtcactagaaacctggatcctgacgacactgcacgtaagaaagcccctccccctccgaaacgggctccgactactgctctcaccttgagatcaaaatccatgacttcagagctggaagagttagtggataaggataagcccgaggaaatcgtccccgcatccaagccttccagggcagccgaaaatatggctgtcgaacccagggtggcgacgataaaacaaaggccttcatcaagatgtttccctgctggaagcgacatgaactctgtttacgagcggcaggggatcgctgtaatgaccccaacagtcccgggtagtccaaaggcacccttcttggggattcccagagggaccatgcgtaggcagaaaagcattgattcgaggatcttcctgagtgggattaccgaggaggaacgacaattcttagcacccccaatgctgaagttcacacgttcgctgtctatgccagacacgtccgaagacattccccctcccccacagagcgtgccaccatctccccctccccctagcccaacgacgtataattgcccgaaaagtcctacgccccgagtgtatggcaccattaagcccgctttcaatcagaactcggctgcgaaggtctcacctgcaacacgctctgacacagtggcaaccatgatgcgcgagaaagggatgtattttcgacgcgagctagacagatattccctggatagcgaggatctctattctcgaaacgccggacctcaagctaactttagaaacaagcgaggtcagatgcccgagaacccatacagtgaagttggtaagatagcatccaaagcagtctacgttccggcaaaacctgctaggcgtaagggtatgctagttaagcaaagcaacgttgaggattcccctgaaaaaacatgttccattcccatccctaccatcatcgtcaaggagccttccacctcttcctcgggcaagtcctctcaggggagctcgatggaaattgatcctcaggctcctgagcccccttcccaactgcgtccggatgaaagcctgaccgtgtcctccccatttgccgctgcaatcgctggggcagttcgagaccgcgagaagagacttgaggcacgccgtaactcccccgcttttttaagcaccgatctcggagacgaggacgtgggacttggtcctcccgctcccagaacacgccctagcatgttccccgaggaaggtgactttgctgacgaagactccgctgagcagctgtcctcaccgatgcccagtgcaactccccgtgagcctgagaatcacttcgtcgggggtgccgaggctagtgctcctggcgaggccggtcgaccgctgaatagcacgagtaaagcacagggtcctgagtcatccccagctgtgccttcagcttcaagtggcactgcaggccctggaaattacgtccatcccttgactggacgtctgctggaccccagcagcccgcttgccctcgctttaagcgctcgcgatcgggcaatgaaggagagtcagcaaggcccaaaaggcgaagcccctaaggcggacttgaataagccgctctatatcgatacaaaaatgagacccagcctcgacgctggtttccccactgtgactagacaaaacactcgcggacccctgcggagacaggagaccgagaataaatacgagaccgacctgggtcgagacaggaaaggcgacgacaagaagaacatgctcatcgatattatggacacaagccagcaaaagagtgccggactcctcatggtacacacagttgacgctactaagttggataatgccttgcaggaggaagacgagaaggccgaagtggagatgaaacctgattcgtccccgtccgaagtgccagagggagtgagcgaaactgaaggtgccctccagataagtgcagcccctgagcccaccaccgtcccgggaaggaccattgtcgcagtcgggtccatggaggaggctgtgatcctcccattcaggattccccctccccctctagcaagcgttgacctcgatgaggatttcattttcacagagccacttccaccccctctcgaatttgcgaattcattcgacattccagatgatagggccgcttcagttcctgctctgtctgacctggtcaagcagaaaaaaagcgacaccccgcagtctccttcactcaactcttcgcaacctacaaattccgctgactccaaaaagcccgcttccctctccaattgccttcccgcttcttttttgcctccaccagagtcattcgacgcagtcgctgactctggaattgaggaagtggactcacgaagttccagtgatcaccacctggagacaacgtcgaccatcagcacagtttcatcgatcagtactttgtctagcgagggtggggaaaatgtggacacctgtaccgtgtacgcagatggccaagcgttcatggtagacaagccacctgttcctcctaagccaaaaatgaaaccaataatccataagagcaatgcactgtatcaagatgccttagtggaggaggacgtcgattccttcgttatcccgccaccagccccacctcccccacctggtagcgctcagcccggaatggctaaagtcctacagcctcggacctccaaactgtggggcgatgtcacagaaattaaatctcctattctgtccggcccaaaagctaacgtcatcagcgaactgaattcaatattacagcagatgaatcgtgaaaagctggccaaaccaggggaaggcctcgattctccgatgggagccaagagtgcatctctggctccccgaagtcctgaaatcatgagtactatcagtggaacccgttctacaacagtcacctttaccgtgcgccctggcacgtcacagcctattacattgcagtcgcggcctcctgactatgaatctcggacgagcgggaccagacgggctccaagcccagtggtttcacccaccgagatgaacaaggaaacattgccggcaccacttagcgcagctaccgcatctcccagtccagccctgtcagacgtgttctcactgcctagccagccacctagtggggacctttttggcttgaaccctgccggtcggagtagatctccctccccatccatcttgcaacaacctatcagcaacaagcccttcactactaaaccagtgcacctgtggactaaacccgacgtcgctgactggctggaatccctgaatttgggggagcataaggaggccttcatggacaacgagatagacggtagccacttgccaaacctccagaaagaggacttgattgatttaggagttacacgcgtaggacacagaatgaatattgagcgcgctctaaaacaactcctagaccgttag

SEQ ID NO: 240341 - DNA, 843 bp, synthetic construct
  misc_feature 1..843: note = Description of Artificial Sequence: Synthetic coding sequence
  source 1..843: mol_type = other DNA
atgatgaacgtgccaggaggcggtgccgcagcagtgatgatgactggatataataacggccgatgcccgcgaaatagtctatacagcgactgtatcattgaagagaaaaccgtcgtcctgcagaagaaggataacgaaggatttgggtttgtcctcagaggagccaaggctgatacccccatcgaggaatttacccctacccccgcatttcccgcactgcaatatctggaaagtgtggatgagggcggagtggcctggcaggccggactgcggacaggggactttctcatcgaggtgaacaatgaaaacgtcgtaaaagttgggcacagacaggtagtaaacatgatccgccagggcggaaatcacctggttcttaaagtggtgactgttactcgcaatctagaccccgacgacactgctagaaagaaagcgcctcctccacctaaaagggccccaacaaccgcgctgaccctgagatcaaagagtatgacttcggagctcgaggaactggtcgataaagcttccgtgcgcaaaaagaaggacaaaccagaagaaatcgtgcctgcttccaaaccttctagagctgctgagaacatggccgttgaacctcgtgtggctaccattaaacaacgcccatcctcaagatgttttcctgctggaagcgatatgaattccgtttacgaacgtcagggaattgccgtgatgacacctacggtccctggttctcccaaagcgcctttcctcggaatccctcgcggaactatgagaagacaaaagtcgataggcaaaaagtgcggaaccccccctcagaaactcccgctggggttccagacccaaccctag

SEQ ID NO: 240342 - DNA, 4413 bp, synthetic construct
  misc_feature 1..4413: note = Description of Artificial Sequence: Synthetic coding sequence
  source 1..4413: mol_type = other DNA
atgaaatcccttctgaatgctttcacgaagaaagaggtgcccttccgggaagcccctgcatattcaaaccggaggcgcaggcctcccaacaccttggccgctcctcgggtcctgcttcgctctaactccgacaataatctgaatgcttcggccccagactgggcagtttgcagcacggcaacatcacaccgcagcctgagccctcagctcctacagcagatgccttccaagcctgagggcgcagctaagacgattggatcctacgtgcctggaccacggagccggagcccaagcctgaaccgcttagggggtgccggagaggatgggaaacgtccgcagccattgtggcacgtgggatcgccgtttgccctcggagcgaacaaagattccctttccgcgttcgaataccccggaccaaagcggaagctgtactccgcagtaccgggacgcctgtttgttgcggtgaaaccataccagccccaagtcgacggagaaatacccctgcaccgcggtgatcgggtgaaagtgcttagtattggggaaggaggcttctgggaaggctctgcgcgtggacacataggatggttccctgccgaatgtgttgaagaagttcagtgtaaaccgcgagacagtcaggccgagactcgtgcagaccggtcaaagaagttgtttcgtcattatactgttggctcatacgacagcttcgacacctccagcgactgtataattgaggaaaaaacagttgtcctacagaaaaaagacaacgaagggtttgggtttgtcttaagaggagctaaggcagacacccctattgaggaatttacaccaacccccgctttccccgctcttcagtatttagagtctgttgatgagggcggagtggcatggcaggccggtttgagaacaggcgacttcctcatcgaggtgaacaatgaaaacgtagtgaaagtcggacaccgccaggtcgtgaacatgatcaggcagggcggtaaccacctggttctcaaagtggtgacagtgaccagaaatttggacccagatgataccgcccgaaaaaaagctcctccgccaccaaaacgcgctcccactacagcgctaaccctacgcagcaagtcaatgaccagcgagcttgaggagttggtcgataaggcatccgtcaggaagaagaaggacaagccagaggaaattgtgcctgcctccaagccttcacgggcagctgagaatatggcggtggaaccaagggtggccactatcaagcagcggccatcaagccgttgcttccctgccggatcagacatgaactcggtctacgaacgtcagggtattgcggtaatgactccgaccgtgcctgggagcccaaaggctccatttctggggattccgcgagggacaatgcgaagacagaaatccatcgacagtcggatcttcctgtctggcataacagaggaggagaggcaatttctcgcacctcccatgctcaagttcactcgctctctcagcatgcctgacacttctgaggatatcccccctccccctcaatccgtcccgcctagccctccccctcccagccctactacgtataactgtccaaagagccctacacccagagtgtatggcaccatcaaacccgcttttaaccagaactctgccgctaaagtgtcccccgcaacacgcagtgacacagtggcaacgatgatgcgggagaaagggatgtacttcaggcgggaactcgatagatactcgctcgacagtgaggacctgtacagtagaaacgccggtccacaagcgaattttcgtaataaacgtggtcagatgccagagaacccatatagtgaggttggaaaaatcgcttcaaaggccgtttatgttccagccaagcccgcacgacgcaaaggcatgctggttaagcagtctaatgtcgaggattcaccagagaagacatgctccattccaatcccaacgatcatcgtgaaggaaccatccacctcgtcgagcggaaaaagttctcagggcagttcaatggaaatcgacccccaggcccctgagccacccagccagctgcgcccagatgaatccctgacagtctctagcccttttgccgcagccattgccggagccgtccgcgacagggaaaagagactcgaggcaaggcgaaatagtcccgcattcctctctactgatttaggcgacgaagatgttgggcttgggccaccggcaccacggaccagaccctcaatgttcccagaggaaggcgatttcgcagatgaggatagcgccgagcaactttcctcacccatgccctcagccactccccgagaacctgagaatcattttgtagggggtgctgaagcttctgcaccaggtgaggcaggtcgccctttaaattctacatccaaagcacaggggccagagtcctctccagcagtccccagcgcctcctcaggcacagctgggccaggaaactatgtgcatccgttgacggggagactactggatccctcgtcccccttagcgttagctctgtctgcgcgagaccgtgccatgaaggaatctcagcaggggccaaagggggaagctccaaaagcggacctaaacaagccgttgtatatcgataccaaaatgcgtccaagtctcgacgccggttttccaaccgtgacccgtcagaacactcgcggaccactgcgtcgacaggaaaccgaaaacaaatatgagactgatcttggccgagatagaaagggcgacgataagaagaatatgttgattgatattatggacacctcccagcaaaaatctgcagggctcctgatggtacatactgtggatgctaccaagctagacaacgcactccaagaggaagacgaaaaggccgaggtcgagatgaaacccgactcgtccccaagtgaggttcctgagggcgtgtctgagacagaaggagcgctccagatttcagccgcaccagagcctacaaccgtgccaggacggacaattgtagccgtgggctcaatggaggaggccgtaattctgcctttccgcatcccgccaccccctctggcttcagtcgatttagacgaagactttatttttacagaacctctgccaccccctctcgaatttgccaacagctttgacataccagacgaccgtgccgcttcagtgcccgcactcagcgatttggtgaaacagaagaaatctgatacgcctcaaagcccatctttgaactctagccaaccaacaaactcggcagattcaaagaaacctgctagcctgtcaaattgccttcccgcaagtttcctgcccccacctgaaagcttcgacgcggtggccgacagtgggatcgaagaggttgattcccggtcctcatccgaccatcacctagagacaacttccactatttcaacagtctcctctatcagcactttgagcagtgaaggcggagaaaacgtggatacctgtactgtctatgccgacgggcaggctttcatggtggataagcccccagtgccgcctaagcctaaaatgaaaccaataatccataaaagtaatgcattgtaccaagacgctttagtggaggaagacgtggactctttcgtgatccccccacccgctcccccaccacccccaggctccgcacagcccggaatggccaaggtgttgcagcccagaacctccaaactgtggggcgatgttactgagatcaaatcaccaatcctatctgggcctaaagccaatgtaatttccgagctgaattccatcctccaacagatgaaccgtgaaaaacttgctaaacctggggagggccttgacagtcccatgggcgctaagtcagctagccttgcaccacggagtcccgagatcatgtcgaccatatctgggacacgtagcaccactgtcaccttcacggttcggccaggcacaagccagcctataacgctacagtctcggccacctgactacgagtcccggacctcgggtacgaggagagccccatccccagtcgtaagccctacagagatgaataaagagacactgcctgctcccttgagtgcggcaacagcctctcccagccctgctctgagcgatgtcttttctctcccaagccagcccccatccggcgatctcttcggactcaatcccgcagggaggtcccgtagtcctagccccagcatcttgcagcaacccatcagcaataaaccatttaccaccaagcctgtgcacctgtggacaaaacccgacgtggccgactggttagagtcccttaatctgggggagcataaggaggcgtttatggataatgagattgatggcagccatctccccaaccttcagaaggaggacctgatagacctcggtgtgactagagtggggcacagaatgaatatcgagagggcactaaaacagcttcttgacagatag

SEQ ID NO: 240343 - DNA, 816 bp, synthetic construct
  misc_feature 1..816: note = Description of Artificial Sequence: Synthetic coding sequence
  source 1..816: mol_type = other DNA
atgatgatgaatgtccccggagggggagcggcagcggtgatgatgaccggttataacaacggcagatgtccacggaatagcctgtactctgattgtattatcgaagagaaaactgttgtgttgcagaaaaaggataatgaagggttcggattcgtgcttcgcggagcaaaagcagatacaccaatcgaggaatttacccccactccggcattcccggctctccaatatctggagtcagtggacgaggggggagtggcatggcaggccggtctgaggacaggcgactttttgatcgaggtaaacaatgagaacgtggtgaaagtgggacatcgtcaagtggttaacatgattcgtcaggggggaaaccacctggtcctcaaggttgttaccgttacgagaaatctggaccccgatgacactgccaggaagaaggccccaccaccaccgaagcgcgctcccacgactgctttaaccttgcgctcaaaaagtatgacgtccgagctcgaggaactggataaacctgaagagatcgtacccgcttctaaaccgtcaagagcagccgagaacatggcagtggaacccagagttgctacaataaagcagcgaccgtcctcacgctgctttcccgctgggtcagatatgaactcagtttatgaacggcagggcatcgccgttatgacccccactgtgccgggatcccccaaggccccttttttgggcattcctcgagggactatgaggcgccaaaagtctatcggcaaaaagtgtggaacacccccacagaagctgccacttggctttcagacacagccctag

SEQ ID NO: 240344 - DNA, 3765 bp, synthetic construct
  misc_feature 1..3765: note = Description of Artificial Sequence: Synthetic coding sequence
  source 1..3765: mol_type = other DNA
atgatgatgaacgtcccgggaggtggggctgcagccgtgatgatgactgggtataacaatggccgttgtccaaggaatagtctctattctgattgtatcatcgaagaaaaaactgtggtgttacaaaaaaaagataacgaggggtttgggtttgtgctgcgaggagccaaagctgatacacccatcgaagagttcacccccaccccagccttcccagcgctgcagtacctggagagcgtggacgagggaggcgttgcttggcaagccggactgcggactggagacttcttaattgaggtgaacaatgagaatgtcgtcaaggtgggccaccgtcaggtggtgaacatgattaggcagggcggaaatcatctggtgctcaaggtcgtgacagtcacgagaaacttagaccccgatgatacagcaagaaagaaagctcccccacctcccaaacgcgctccaacaacagcccttactctgcgaagcaagtccatgactagcgagttggaagaactggtggacaaagataaacccgaggagatcgtgccagcctccaagccttctcgtgctgctgagaacatggccgtggaacccagagttgcaactattaagcaacggccaagcagtcggtgctttcccgctgggtccgatatgaactctgtctatgaacgtcaggggatcgctgtgatgaccccaacggtcccaggatctcccaaggccccttttttgggaatccctagagggactatgcggcgacagaaatcaattgacagccggatattcctgtctggcataaccgaggaggaacggcagttcctagccccacccatgctgaaattcacacgttcactctcgatgccagacacgtccgaggacatacctcccccaccacagtcggttcctccatccccccctccaccgagccccaccacatacaactgccccaagagccctaccccacgggtttatgggactatcaagcctgcctttaatcagaactctgccgctaaagtgtcacctgccacgcggagcgataccgttgctaccatgatgcgggagaaaggtatgtatttcagacgcgagctggaccgatactcgctagactcagaagatctgtacagtcgcaatgcaggacctcaggccaactttcgtaacaaaagaggccagatgcctgagaacccatacagtgaggtgggcaaaatagcctcgaaagctgtgtacgttcctgctaagcccgctcggaggaaaggtatgcttgttaagcagtccaacgtcgaagactcacctgagaaaacttgttccattcccattcctaccattatcgtaaaagaacctagcacaagtagctccggtaaaagctcacaaggctcatcgatggagatcgatccccaagctccagaacccccaagccagttgcgccctgatgagagtctcactgtgagctcgccgttcgccgcagccatagctggggctgttagggaccgggagaagcggctggaagctcggagaaatagtcctgcgtttctttcaacggatttaggtgatgaggatgttgggctaggaccccctgccccaaggacaagaccgtccatgtttcccgaagagggcgactttgcggacgaggactcggctgagcagctctctagcccaatgccgtcagctacacccagagagcctgagaatcacttcgtgggcggagccgaggcaagcgctccaggtgaagcaggacggcctcttaatagcacgtcaaaagcccaggggcctgagagtagcccagcagtgccttctgcttcctccggcactgcaggccctggcaactatgtccaccccctgaccggccgactgttggacccatcatctccacttgccctcgccctttctgccagggacagggcaatgaaggagtctcaacaggggccaaaaggtgaagccccaaaggcagacctgaataaaccgctctatatcgatacaaaaatgaggcccagtctggacgccggttttccaaccgtgacgcggcagaacaccaggggccctctgaggcgacaggaaactgaaaacaaatatgaaaccgacctggggagggatcggaaaggggacgataagaaaaacatgctgattgacatcatggacacgtcccagcaaaaatcagctgggctgcttatggtgcacacagtcgacgccaccaaactggacaacgccttacaggaggaagatgaaaaggccgaagtggagatgaagccagacagtagcccgtccgaagtaccagaaggcgtgagcgagactgagggagctcttcagatttcggccgctcccgagcccacaaccgtccccggacgtacaattgttgccgtcggttccatggaggaggcggttattctgccatttcgcatcccaccaccaccactggcctcggtcgacctcgatgaggattttatttttacagaacctctccctccgccactcgagttcgctaactcctttgacattccagacgaccgggctgcgtcggtgccagctctcagtgatcttgtgaagcaaaaaaaaagcgatacgccccagtccccctccttgaactcttcgcagccaaccaactcggctgactctaagaagcccgcatccttgagtaattgcctacccgctagttttctcccaccaccggaatccttcgatgctgttgccgacagtgggattgaggaggtggattcacgcagttctagtgatcaccacctggagactacctccactattagcacagtgtcttctatttctaccctctctagtgaaggtggcgagaatgtggatacttgcacagtatacgccgacggacaggcgttcatggttgacaagccccctgtgccccctaaacctaagatgaagcccattatccacaagtcaaatgctctctatcaggatgcactggtcgaggaggacgtggattccttcgttatacctccacccgctcctcccccaccccctggatcagcccaacctggcatggccaaagtacttcagcccagaacatccaaactatggggtgacgttaccgaaatcaaatcaccaattctctctggaccaaaggccaacgtcatctctgaattgaactccatcctgcaacagatgaaccgggaaaagctggcaaaacctggtgagggtcttgactctcctatgggagcgaagtctgcatctctcgccccaagatcccccgagattatgtctaccattagcggcacaagaagtacaacagtcacttttacagtgagaccgggaacatcgcagccaattacgctccagagtaggcctcccgactacgagagccgcacctctggcacccgcagagcgccatcacccgtggtgagcccgaccgagatgaacaaggaaactctgccagcccctctttccgcagccacagcgtctccttcacccgcactctcagatgttttctcactaccatctcagcccccatctggcgacttgttcgggcttaatcccgcaggtcgaagtcgctccccctctccgtccattctccaacaacccatctcaaacaaaccattcactacgaaacccgtgcatctctggacaaagcccgatgttgctgactggctggagagcctcaacttaggggagcacaaagaggctttcatggataatgagatcgacggatcacacctcccaaatctccagaaagaggatttaattgatttgggcgtgacaagagtgggacaccggatgaacatagagagagctttgaaacagctcctggatcggtag

SEQ ID NO: 240345 - DNA, 915 bp, synthetic construct
  misc_feature 1..915: note = Description of Artificial Sequence: Synthetic coding sequence
  source 1..915: mol_type = other DNA
atgccacgtagcccgacctcttctgaggatgagatggcccagagcttcagtgattattctgtgggatccgaatctgacagttccaaagaggaaacgatttatgatacaattcgggctactgctgagaagcctggtggtgccaggaccgaagagagccagggcaacacactcgtcatccgggtcgtgatccatgacctccaacagactaaatgcatcaggttcaatccggacgcaactgtgtgggtggcaaagcagcgaatcctctgcaccctcacccagagcctaaaagacgttttgaactatggccttttccagccggcttctaacggcagggatggcaaatttctcgacgaggaacgactgcttcgcgagtaccctcagcctgtgggagaaggtgtgcccagtctggagtttagatataagaaaagggtgtacaaacaagcttctctggacgagaaacaactcgccaaattgcacactaaaacgaatctgaaaaagtgtatggaccatatccagcaccgactggttgaaaagattacaaagatgctcgacagggggcttgacccgaactttcacgatcctgagaccggtgaaacaccactcactttggccgcacagttggacgactcagtggaagtgatcaaggccctaaagaatgggggagcccacctcgacttcagagctaaggacggcatgactgctttacacaaggcggcacgggcacgtaatcaggtggctcttaagactctgctggagctgggagcctcacccgattataaagatagctacggcctgactccactctaccatactgccattgtgggcggtgatccctattgttgcgaactgctgctacatgagcacgctaccgtctgttgtaaagatgaaaatggatggcacgaaattcaccaatag

SEQ ID NO: 240346 - DNA, 5244 bp, synthetic construct
  misc_feature 1..5244: note = Description of Artificial Sequence: Synthetic coding sequence
  source 1..5244: mol_type = other DNA
atggacggcccaggggcaagcgcagtggtagtccgggtggggattccggatctccagcagaccaagtgcctgcgccttgacccggcagcccctgtgtgggcagctaagcaacgggtactgtgtgccttgaatcacagcctgcaggacgccctcaactatggcctgtttcagccacccagccggggaagagccggaaagtttctggatgaggagcggttgcttcaagagtaccccccaaacttggatacacccttgccgtacctcgaattcaggtacaagcgccgagtctacgcccagaatctgatcgatgataagcagttcgccaaactccacaccaaggccaatctgaagaaatttatggattatgtccagctgcacagcactgataaggtagctcggttgctggacaaaggactggaccccaatttccacgatcccgacagcggggagtgtcccctctccttggccgctcaactcgacaacgccaccgacctgctcaaggtactcaaaaatggaggagcccacctcgacttcagaactcgcgatggcttaacggctgttcattgcgctacacggcagaggaacgctgctgccttgacaaccttactggacctgggggcatcgcccgattataaggacagccgcggactaacgccactctaccatagtgccctgggcggtggtgatgcactgtgttgcgaacttctcctccatgaccatgctcagctggggattacggacgagaacgggtggcaggagattcaccaggcctgtcgctttggacacgttcagcacctcgagcatctcctgttttacggagctgacatgggcgcacaaaatgcttcgggtaatactgccctgcatatttgtgccctttacaaccaagagtcctgcgcccgagtcctgctgttccgcggtgctaatagggatgtcaggaactacaacagtcagactgcatttcaggtcgctatcatagcgggaaacttcgaactggccgaggtgattaaaactcataaggattctgatgtcgtgccattcagggagacaccctcgtacgccaagcgcaggagactagctggtccatccggcctcgccagcccaaggccacttcaacgctccgcctcagatattaacctgaaaggagaagcacaacctgccgcatcaccaggtccctccttgcgttctctgccccaccagctgctgctgcagaggcttcaagaggagaaagatcgggaccgtgatgctgaccaggaaagtaacatctcagggccattggctggacgagccggacaatctaagatctccgatccaggtcccggaccagggggagttggaggggcaccattgccccctcctggagctcccagatcgtgtattcgcattcgcgctcgctttcctgccccacccgctccccctgctcctccgcctcgtgggccaaagcgtaaactgtattccgctgtgccgggtagaaagtttatcgcagtaaaggcccactccccccagggcgaaggtgaaatacccttacatcgtggggaagcagttaaagtactttccataggtgaggggggtttttgggaaggtacagtgaaggggaggaccggctggtttcccgcagattgtgttgaagaagttcagatgaggcagcacgatacccgccctgaaacaagagaagatagaacaaagcgactatttcgacattacactgtgggaagctatgattctcttacctcccattctgactatgtgatagacgacaaggtggccgtgctgcagaagagagatcacgagggcttcggttttgtgctgcggggagcgaaagctgagacgccaatcgaagaatttacacctaccccagcttttcctgcgctgcaatatctagagagtgtcgacgtggaaggtgtcgcttggcgggctggcctgcgcaccggggacttcttgattgaggttaacggcgtcaacgttgtgaaagtggggcataagcaggtcgtcgcccttatacggcagggaggcaatcggctcgtcatgaaggttgtgtcagtgactagaaagccagaagaagacggtgcccgtaggagggctcctcctccacctaagcgggcaccttctaccaccttaacactgagaagcaaatcaatgaccgctgaactggaagaacttgcttctattcggaggagaaagggggagaaacttgatgagatgctggccgcagcagccgaaccaacactcagaccagacattgcggacgccgactccagggcagcgaccgtgaaacagcgacctacatctagaagaatcacccctgccgagatttcctcactttttgaacgtcaggggctgcctggcccagagaagttgcccggtagccttcggaaagggattccaagaaccaagtctgtcggggaagacgaaaaattggcctcattactcgagggccgttttcccagatcgacctcgatgcaggatcccgttcgagaaggtcggggaatcccaccgcctcctcagaccgcccctccccctcctccagcaccatattattttgacagcggtccccctcccgcattctctcctccaccaccgccaggtagggcctacgacaccgtgcgctcgtcattcaagcccggtctcgaagctcggctcggcgctggagctgccggtttgtatgaaccaggtgccgcactcggccctcttccatatcccgagcgccaaaaacgcgctcgtagtatgatcatactccaggactccgctcccgagtccggggacgctccccgtccacccccagcagctacacctcctgaacgaccaaaaaggcgccctaggccgcctggtcctgatagtccatatgccaatctgggggctttttctgcttctttatttgctccctctaagccccagcggaggaagtctccactggtgaagcagctgcaagtggaagatgcccaagaacgggcagctctcgccgtagggagtcccggacctggcggagggtccttcgctcgggagccttctccgacacacaggggccctcgaccgggtggccttgattatggggctggggatgggcctggtcttgccttcggaggacccggtcccgcaaaggaccggaggctggaggaaagaaggaggtctaccgttttcctgagtgtcggtgctatcgaaggctcagctcctggggctgacttgcctagtctgcagccaagcaggagcattgatgagaggctcttggggactggtcccactgccggacgagatcttctccttcctagccccgtgtctgccttgaagcccctagtctccgggccatctcttgggccatctggaagtacgttcatacaccccctcactgggaagccccttgacccgtcctctccgctggctcttgcactggccgctcgagaacgagctctggcaagtcaggctccctctaggtcaccaactccggttcactctcctgatgcagaccggccaggaccactttttgtagatgtgcaggccagggaccccgagagaggtagcctggctagtccggctttttccccacggagtcccgcatggatccctgtgccagctcggagggaagctgaaaaagtgccccgtgaggagcgcaagagtccagaagacaagaagagtatgattctcagcgtgcttgacacttcgctccaacgcccagccggactgatcgtggtccatgccactagcaatggccaggaacccagcagactggggggtgctgaggaggaacgacctggcactcctgaattagcgccagctcccatgcagtcagctgccgtcgctgagccccttccctcccccagggcgcagccacccggagggacccccgcagatgctggtcccggacaggggtcttcagaggaagagcctgagctcgtatttgccgttaatctacctccagcccagctcagctcttcagatgaggaaaccagggaagagctcgcgagaatcggcttggtgccgcctcccgaggaattcgcaaatggcgtgctgctcgccacgcctctggcagggcctggcccttcaccgacaacagtgcctagtcccgcatccggtaaacccagctctgagccgccaccagcaccggagagcgcagccgactccggcgtagaagaggctgataccaggtcatccagcgacccacatctggaaacaacctctaccatctccaccgtatcctcgatgtctactttgtctagcgaaagcggcgagctgactgacacccatacttcgtttgcagatggtcacacgtttctactcgaaaagccgcctgtcccaccaaagccaaagctgaaaagcccactgggcaagggcccagtgacatttcgcgacccgttgctgaaacagagctctgattcagaacttatggctcagcaacaccatgccgcatccgccggactcgcctccgccgctggtccagcccgtcctcgctacctgtttcaaaggcggtccaagctgtggggcgatcctgtggagtctcgcggtctgcccggaccagaagacgacaaaccaactgttatttccgagctgtccagccgactgcagcaactgaacaaggacacccggagcttgggagaggaacctgtagggggtctcgggtccctgctggatccggcaaagaagagccctatagccgctgcaagactgtttagttccctgggcgagctcagtagcatttccgcccagcggtccccagggggtcctggtgggggagcctcctactctgtcaggccctccggtcggtatccagtcgcaagacgcgcaccctcgccggtgaagcctgcctccctggaaagagtggaaggactcggcgctggagccggtggggcaggacggcctttcggtcttacaccacccaccatcctcaagagttcttctctgagtattccccacgaacccaaggaggtgaggttcgtggtgcgcagcgtaagtgccagatccaggagtccctccccttccccccttccatctccggcttcagggccaggcccaggcgcaccgggaccgaggagaccctttcagcagaaacctcttcagttgtggtcaaaatttgacgtcggtgactggctcgaatctatccacttgggtgaacatagagaccggtttgaggaccacgagatcgagggtgcccacttgccggctctcacgaaggacgatttcgtggagttaggtgtgacaagagtgggccacaggatgaacatcgaacgggcactgagacagctcgacggctcctag

SEQ ID NO: 240347 - DNA, 5228 bp, synthetic construct
  misc_feature 1..5228: note = Description of Artificial Sequence: Synthetic coding sequence
  source 1..5228: mol_type = other DNA
atggatgggccaggggcatcggcagtggtggtcagggtcgggatcccagatctacagcaaacaaaatgcctcagattagatcctgccgcaccggtttgggccgcaaagcagcgggtcttatgcgccttgaaccactctttgcaggacgctctgaactatggattattccagcctccttcccgtggcagagccggaaagttcctggatgaggaaaggctgctccaagagtaccccccaaaccttgacaccccactgccgtacttagagtttcggtacaagcgcagagtttacgctcagaaccttatcgatgataagcagtttgcaaaacttcatacaaaggcgaaccttaagaagtttatggactacgtccagcttcattccactgataaggtagcccgtcttctcgataagggcctggacccgaatttccatgatccagatagcggtgagtgcccactcagcttggcagcgcagttggataatgcgactgacctgctgaaggtgttgaagaatggcggtgcccatctggattttcgaacaagggatggtttaacagccgtgcattgcgccacccgccaaaggaacgctgccgcattgaccacgctcttggacttgggagcgtcccccgactataaagattcccggggtttaacacctttgtatcattctgctctgggcggtggcgacgctctgtgctgtgagcttcttctgcatgaccatgctcagttaggcatcaccgacgaaaacggctggcaggaaatacatcaggcatgtcggttcgggcatgtgcagcacttagagcatctgctgttctatggcgcagacatgggtgctcagaatgccagcggcaatacggccttacacatatgcgctctctacaaccaggagagttgcgctagagttctgctgttccggggtgccaaccgggatgtgaggaactacaattcccagacagcttttcaagtggcgatcatcgccggaaattttgaactggcagaagtaattaaaacacataaagactccgatgtggtgccctttagggagactccttcatatgctaagcggcgaagactcgcaggcccatcagggctggcgtctccacgaccactgcagcggtcggcatcggatattaacttgaaaggggaagctcagcctgctgctagcccaggcccttctttgaggagtctgccccaccagctcctcctccagagattgcaagaggaaaaggacagagaccgcgatgcagaccaggagtccaatatttccgggccactagccggaagggcgggacagagcaaaatcagcgagcctggagctcctcgaagctgtataaggattagagctcggttcccagcgccacctgcccctcccgctccaccaccgagaggtcctaaacgaaaactgtacagtgctgtgcccggtcgtaaattcatagcagtaaaggcacattctccccagggagagggggaaattccgttgcaccgaggggaagctgttaaagtcctttcaattggtgaaggcggattttgggaaggcaccgttaaaggaagaacaggttggttcccggcagactgcgttgaggaggtgcagatgcggcagcacgacactcggcctgaaacccgcgaggaccggaccaagcgacttttcaggcactacaccgtgggaagctacgacagcctcacatcgcactccgattacgtgattgacgataaggtggccgtgctgcagaaaagagaccacgaaggttttggattcgtcctcaggggagctaaagctgaaacacccattgaggagttcactcccacgccagccttccccgctctccaatatctcgaaagcgtcgacgttgaaggagtcgcatggagggcagggttgcggaccggagatttcctgattgaggtcaatggcgtgaatgtcgtgaaagttggacacaagcaggtggtcgctctgatcaggcagggcggtaatcgcctggtgatgaaagttgtgtctgttacaaggaagccagaggaggacggcgcaaggagaagagccccacccccaccgaagcgggcaccttctactactctgacactcaggtccaagagtatgacggctgagttggaggagctgggggagtggagggggagggaagggagcgaaaaactcgatgaaatgttagccgctgccgctgagcccacccttaggcccgacattgcggacgctgatagccgggcagctaccgtgaaacagaggccaaccagccgtcgcattactcccgctgagatatcaagtttgttcgaaagacaggggttgccgggacccgagaagctgcctggatccctgcgtaaaggcattccgagaactaaaagcgtgggagaagatgagaaactcgctagcctcctggaagggaggttccccagaagtacgtcaatgcaggatccggtccgagaagggagaggtattccaccaccgccacaaactgcccctccaccccctcccgcaccctattacttcgactcgggaccgcctcctgccttctcccctcctcccccaccaggtcgtgcatacgacaccgtgagatccagcttcaaaccgggactggaggctcgacttggggctggggcagctggcctctatgagcccggagccgctctcgggccactcccctatcctgagcgacagaaacgagctaggagcatgattatattacaggactccgctcctgaatcaggggatgcaccgaggcccccacccgcagctactcctcctgagagaccaaaacgcaggccaaggccaccagggcctgactcaccctacgcaaatctcggcgcatttagcgcctcattgttcgcacctagtaaaccacagcggaggaaaagcccactcgtgaagcagttgcaggtggaggatgcacaggaaagagctgcactcgcggtgggctcccctggtcctgggggaggctcctttgcaagagaacctagtcccacccataggggccctaggcccggaggactcgattacggtgctggagacggtcctggcctggcttttgggggaccgggtcctgctaaagataggcggctggaggaacggagacgctcaaccgtctttctgtccgtcggcgctatagaaggttctgcacctggcgctgacttgcccagcctgcagccttcccggtctatcgacgagaggcttttgggaacaggcccaacagccggaagagaccttctgctgccctcaccagtgtccgccctcaagcccctggttagcgggccttccttaggcccttcaggatccaccttcatacacccattgaccgggaagcccctggaccccagctcccccctcgcactggctctcgcagcacgtgaaagagcgctggccagccaggccccatcacggtctcctacccccgtccactctccagacgcagacagaccaggcccactgttcgtggacgtgcaggccagagatcctgaacggggttcactggcctcacctgcttttagcccacgctctcccgcatggataccagtgccggctcgtagggaggccgagaaagtgccacgcgaagagagaaaatcccccgaggataagaaaagcatgatcctctccgttttagacaccagcctccagcgccctgcaggcctcattgttgttcacgcgacatcaaacggtcaggagccaagccgactgggtggcgctgaggaagagaggccaggaactcctgagctggcccctgcccctatgcaatccgccgctgtggctgagcccctgccctctccccgagcccaaccgcctggtggcactccagccgacgccggacctggtcaagggtcttctgaagaagagccagaattggtgtttgctgtcaacttgccgcctgcccaattatcaagtagcgacgaggaaaccagagaggagctcgctaggatcggcctggtgccacccccagaagagttcgctaacggcgtcctcctcgccacacctttagcaggacctggtccctcccctaccacagtgccgtcccctgcatctggcaaaccatcctcagaaccaccccctgctcccgagagcgccgcagactccggcgtggaagaagcagacacgcgcagttcaagcgatccccaccttgagacaacatctactatctcaacagtctcaagcatgtcaactctgtcctctgaatcgggtgagctcaccgacactcatacaagcttcgccgacggccataccttcctgctggaaaaaccccctgtacccccaaagcctaagctcaagtcccctctgggaaaaggcccagtcacgtttcgcgatcctttgctgaagcagtcttctgactcagaactcatggcacaacaacaccatgccgcttctgccggtctcgctagtgctgcgggacccgcacgtcccagatatctctttcaacgccgaagtaagctatggggcgaccccgtggaaagtaggggtctgcctggccctgaagacgacaagcctactgttatttctgagctgtcatcccggctgcagcagcttaataaggacaccaggtcattgggcgaggaaccagtggggggactgggttccctactggatccagcaaagaaatctcctattgcggctgctagatgccgtagccctatggtgggactccggcttttctcgagcttgggcgagctctcctcaatctccgctcagcgaagcccagggggacctggtgggggagctagttactcagtgaggccctcaggacgataccctgtcgccaggcgagccccaagtcctgttaaaccagcgagcctcgaaagggtggaaggtctgggcgctggcgcaggaggcgctgggagaccatttggcctaactccgccaacgattctgaagtcctccagtttgagcattcctcacgagcccaaggaggtacgcttcgttgtccggagcgtgtccgctaggtctagatctcctagcccttcgcctcttcctagtccggctagcgggcctgggccaggagcccctggcccacggcgtcctttccagcagaagcctttacagctctggagtaaatttgatgttggcgactggctggagagcatccacctaggagagcatcgagacaggtttgaagatcatgagatagaaggcgctcatcttcctgcactaacaaaggacgacttcgtagaattgggcgttactagggttggccacaggatgaacatcgagagggcacttcggcaactggacggctccta

SEQ ID NO: 240348 - DNA, 2736 bp, synthetic construct
  misc_feature 1..2736: note = Description of Artificial Sequence: Synthetic coding sequence
  source 1..2736: mol_type = other DNA
atgcctcccaggcggtctatcgtggaagttaaagtgctcgatgtgcaaaaacggcgtgttcccaataagcactacgtgtatatcattagagtaacctggtcctctggctccaccgaggctatctacaggcggtatagtaagtttttcgatctgcaaatgcagatgttggacaagtttcctatggaagggggacagaaggatcccaagcaaaggatcattccttttctccctggtaagatcctgttcaggcggtctcacatcagggatgtggctgtaaaaaggctgatcccgattgacgagtactgtaaggcgcttattcaattgcctccttatatcagccaatgcgatgaggtgctacagttcttcgagaccaggccagaggacttaaacccgcctaaagaagaacacattgggaaaaagaagtccggtggggatcagacctctgtggaccctatggttttagaacagtacgtagtcgtcgccaattaccagaaacaagagagtagcgagatttcactgagtgtggggcaggttgtggatattatcgagaagaacgagtccggctggtggtttgtgagtactgcagaagagcaaggttgggtgcctgccacgtgtttggagggccaagacggagtacaggatgagttctctttacagcctgaggaagaggaaaaatacactgtgatctacccatacactgcaagagaccaggatgaaatgaatctcgaaaggggcgcagtggttgaggtcattcaaaaaaacctagagggatggtggaaaatccgttaccagggaaaagaaggttgggctcctgcatcatatctgaagaaaaactctggagagcctctgcctccaaagccaggccctggtagcccctcccatccgggagcacttgatctcgatggagtttccaggcaacagaatgctgtgggtagggaaaaggaactgttgtccagtcaaagggacggaagatttgaggggcgaccagtccccgatggggacgcaaaacagcgaagtcctaaaatgagacagcgtccgccacctcgcagagatatgactatccctagagggctgaaccttccaaagccccctatacctccccaggtggaagaggaatattacactatagccgagtttcagaccactattcctgacggcatctctttccaggcgggacttaaggtcgaagtcatagaaaagaacctcagcggttggtggtatatccagatagaagataaggaaggctgggccccagccacctttattgataagtacaaaaagacttcaaacgcctcacgccctaactttctggccccactaccccatgaggtgactcagctccgtttaggtgaagcggcagcgctggagaacaacactgggagtgaggccaccggacccagcaggcccctcccggacgccccacatggagtgatggacagcgggctgccctggtccaaggactggaaaggcagcaaagacgtgctgaggaaggcctccagtgacatgagcgccagtgccggttatgaggagatcagcgaccccgatatggaagaaaagccttctcttcctcctcggaaagagagtattatcaagagtgagggcgaactgctcgagagggagcgagaacgacagcggaccgagcaactgaggggcccaaccccgaagccgccaggtgtcatactgcctatgatgcccgcaaagcatatccctcctgctagagactcccgtaggcccgaaccaaaaccagacaagtcacgcctcttccaacttaaaaacgacatgggactggaatgtgggcataaagtgctggcaaaggaagtgaaaaaacctaacctgaggccaatatcaaaatctaaaaccgatctgcccgaggagaagccggacgcgaccccccagaacccctttttgaagagccggccacaagtcaggcccaagccagctcccagtccaaagacagaaccacctcagggagaggaccaggtggatatctgcaatctgcgctccaagttgagaccggctaaatcacaggacaaaagcctcctggacggtgagggccctcaggctgttggaggacaagacgtggcattttcacgcagtttcttgcccggtgaagggccagggcgtgcgcaggatcgcactggcaaacaggacggcctgagccccaaggagataagttgcagagccccacccaggcctgccaagacaacagatcccgtgagtaaatcggtccccgtcccactccaggaagcccctcagcagcgacctgtggtgcctccaaggagaccgccaccaccaaagaaaacttccagcagtagtcgcccactcccagaagtgagaggaccacaatgcgagggtcatgagagtagggcggcaccgacgccgggaagggcactcctcgttcccccaaaggccaagccctttctgtcaaattccttgggtggccaggatgatactagggggaaggggagcctcggaccctggggtaccggaaaaattggggagaatagagaaaaagcggctgcagctagtgttcccaatgcggatggcttgaaggattctctatatgttgccgtcgcagacttcgagggcgacaaagatacctcgtcctttcaggaaggaaccgtattcgaggttcgagagaagaactccagtggctggtggttctgccaggtgctttctggtgcacctagctgggagggctggattccttctaattacctcagaaagaaaccatag

SEQ ID NO: 240349 - DNA, 2805 bp, synthetic construct
  misc_feature 1..2805: note = Description of Artificial Sequence: Synthetic coding sequence
  source 1..2805: mol_type = other DNA
atggaagaaatttggaaattttcaacatacttgaaccttggatacgtctcaatgtgtctggagcatctcctctttgatcataagtactggctgaattgcatattagtggaagacaccgaaatacaggtgagtgtggacgacaaacatctcgagacaatatacctgggccttctcatccaggaagggcatttcttttgtcgcgcactctgttcagtgacgcctcccgctgagaaggaaggagaatgcctgactctgtgtaaaaacgaacttatctctgtgaaaatggccgaagccggtagtgaactagagggcgtcagcctcgtgaccggtcagcggggattggttctggtttccgcactggagccactgcctctgccatttcatcagtggtttttgaaaaattatcctggcagttgcggattatcacggaaaagagattggacaggctcctaccaaatcggtaggggcagatgtaaagccctcactggctatgaacctggcgagaaagacgaattgaacttctatcagggagaaagtatagagatcataggatttgtaatccctggcctgcagtggttcataggcaagtcaaccagcagcgggcaggtcggtttcgtgcccacccggaatatagacccagacagttattcccccatgtccagaaactcggcctttctctctgacgaggagagatgtagtctcctggccctgggctccgacaagcagaccgaatgctcttctttcctacatacattggctaggaccgatattacatcagtgtacagactcagcggctttgaatcaatacaaaaccccccaaacgacctgagcgcaagccaacccgagggctttaaggaggtcagaccgggacgcgcatgggaggagcatcaggccgtgggttcccgacagtccagtagttcagaggactcttctttggaagaagagttgttatccgccacaagcgattcctaccgcttacctgagccagatgatctggatgatccggaacttctgatggacctcagtactggacaggaggaggaggcggaaaatttcgctccaatcctggcgttcctcgaccacgaagggtacgccgatcacttcaagagcctttatgactttagtttctcctttctgacgtccagcttttattctttcagcgaggaagatgagtttgtggcttacttggaggctagtaggaaatgggcaaagaaatctcatatgacgtgggcgcatgctcgcttatgttttctgctcggcaggctgtctatcaggaaggtcaagcttagccaagctcgcgtgtactttgaagaagcgattcacatcctgaatggtgcattcgaagacctgtctctggtagccaccctttatataaacctggccgcaatctacctcaagcagcgcctccggcacaagggtagcgccctcctcgagaaagccggtgccctcctggcctgtctgccagacagagagagctccgcaaagcacgagctggatgtcgtcgcctacgtcttacggcagggaatcgttgttggttcctcccccctggaggctagagcctgctttctggccattcgcctgctgttgtccctggggaggcacgaggaggtactcccctttgctgagaggctccagttgcttagtggccaccccccagcctcggaagccgtggcatccgtcctgtcctttttatatgataagaagtaccttccccacctggccgtcgcttctgtacaacagcatggcatccaaagcgcacaggggatgtccctgcctatctggcaggtgcatctggttcttcagaatactacaaagctgctcggatttcctagtcccggttggggtgaggtgagcgccctggcttgccctatgctgaggcaggctctggctgcctgcgaggaactggcagataggagcacccagcgagctctgtgtttgatcctcagtaaagtatacctcgagcatagaagcccggatggcgctattcactatctgagtcaggcccttgtgctgggccagctgctaggcgaacaggaatcatttgagtcctccctgtgtctggcgtgggcgtatttgctcgcttctcaggctaagaaagctctagatgttctggagccactcctttgtagtctcaaggagactgagagtttaactcagcgtggtgtgatatacaatctgctgggcctggccttacagggcgagggtcgcgtaaaccgagcggctaaatcttacttacgggcacttaacagggcccaggaagtcggagatgtgcataatcaggcagtggctatggcaaatttggggcacctctccctgaagagctgggctcagcaccctgcccgaaactatttgctgcaagccgtgcgcctttactgcgagctgcaagcatctaaagagaccgacatggaactggtgcaggtattcttgtggttggcccaggttcttgtgagtggccatcagctgacacatgggttgctctgttacgaaatggccctgctgtttggcctgaggcatcgacatctgaagtccaagtacgtcccctgctgctgggaggctattgagaaatcagtcggctcctcatttatccatttcctatcacaggtgatatctttcatgagtctcctctgtgtccaggtgagtttcagacctcctaatccttcagccatctccacggcactgtgtccccagaccttacggcacgcttcacctacgatgtctacaggttggccatggctgtcgaactcaggaaccgggcgatggaaaggaggctgctggagtccctggggctcatttattggaacctag

SEQ ID NO: 240350 - DNA, 453 bp, synthetic construct
  misc_feature 1..453: note = Description of Artificial Sequence: Synthetic coding sequence
  source 1..453: mol_type = other DNA
atgagcgagcagatgatgcagagcgtcggttgccgcatctctttatcagtcttccagttcctcggagaccagagacaggagctcgtggcttttcacaggcttgccactgtgtattattcattacatatgtacgagatggccgaggactgttacctgaaaacactcagcctctgtcccccttggctgcagagtcccaaagaggccctttattacgcgaaggtgtattataggcttggacgactgactttctgtcagctcaaggatgctcacgatgctacagaatattttctgctcgcccttgccgctgcagtgttattgggcgatgaagaactgcaggataccatccggtccagactggacaatatctgccagagcccgttgtggcatagccgcccatctggctgtagttctgagagggccaggtggctttctggaggcggactggccctttag

SEQ ID NO: 240351 - DNA, 3867 bp, synthetic construct
  misc_feature 1..3867: note = Description of Artificial Sequence: Synthetic coding sequence
  source 1..3867: mol_type = other DNA
atgggaggatgcttctgtatacccagagagcgcagtttgacccggggaccgggaaaggagactccatccaaggatcccacagtgtcatccgaatgcatcgcctcgagcgagtacaaggagaaatgtttcctgccccagaatataaacccagaccttaccctgagcttttgcgttaagtctcgtagccggcgatgtgtaaacggcccattgcaggaggctgccaggaggcgcctctgggccctggagaatgaggaccaggaggtgcggatgctctttaaggatctgagtgcgagactggtctccatccagtcacagagagctcagtttcttataacttttaagacaatggaagaaatctggaagttttcaacatatctgaacctgggatacgtgagtatgtgccttgagcacttacttttcgaccacaagtactggctaaattgcatcttagtagaagatactgagatccaggtgagcgttgatgataagcatctcgaaactatttacctcggcctgctgatccaggaaggtcattttttttgtagggcgctatgctccgtgacccctccagcggaaaaagagggcgagtgcttaaccctctgcaaaaacgaattgattagcgtgaaaatggctgaagctgggtcagagctggagggtgtgtcactggttactgggcaaaggggactcgtgctcgtatcagctctggagccactccccctgccttttcaccagtggtttcttaaaaattacccaggatcctgcggtctgtcccgcaaaagggattggactggttcctatcagattggcaggggcagatgcaaggccctcaccggatacgagccaggggagaaggatgaattaaatttctaccaaggggagtccatcgaaataatcggctttgtgatacccggtctgcagtggtttataggaaagtctacctccagtggccaggtgggctttgtgccaacacggaatattgatcctgattcttatagtcccatgagcagaaactcggcctttttgagcgacgaggagcggtgctccttgttagctctggggtctgataaacagacagagtgtagcagtttccttcatacattggcacgaaccgatattacttctgtgtacagactgtcaggctttgagtcgattcagaatccaccaaatgacttgagcgcaagccagcctgaaggcttcaaggaggtccggccaggcagagcttgggaagagcaccaagcggtcgggagccggcagtcaagtagctcggaggactcctcgttggaagaggagctactaagcgccacaagcgattcataccggctcccggaaccagatgacctagatgacccagagctactgatggacctatccaccggccaagaggaggaggcagaaaactttgcccctatactggcctttctagatcatgagggctatgccgaccattttaaaagcttatacgacttttcttttagtttcctcactagctccttctacagtttttcagaagaagacgagtttgtcgcttacttggaggcctccagaaaatgggccaaaaaatcccacatgacttgggcccatgcgaggctgtgctttctgctcggtcgtctgagcatcagaaaagtgaagcttagccaggcaagagtctatttcgaggaggccattcatatcctaaatggagcattcgaggacctcagcctcgtcgctacactttacatcaatctggcagctatttatctgaaacagcggctgcggcataaaggaagcgcgctgctcgaaaaggccggagctcttctggcttgcctgcctgatcgggaatcttcagcaaagcatgagttggatgtagttgcatacgtgcttagacaggggattgtcgtcggctcttcgccgttagaagccagagcgtgctttctggccattcgtctgctcttatctcttggtcgacacgaggaagtcctgcccttcgccgaaaggctgcagctattatctggtcacccgcctgcctctgaggctgttgcctcagtgctgtccttcctgtacgacaaaaagtatcttccacacttggcggtggcctccgtccagcagcatggtattcagagcgctcagggaatgtctctgcctatctggcaagtccacttggtgctgcagaacaccacaaagttactcggatttccatccccaggctggggggaagtgtccgccctcgcctgtcctatgcttaggcaggccctggccgcttgtgaggaattagccgatcgaagcacccagcgggcactatgtctgatactctctaaggtgtatttagagcaccgcagcccagacggagctatccattatttaagccaagccctggtactgggccaactgctgggtgaacaagagagctttgaaagcagtctttgtctggcatgggcttacctgctggccagccaggccaaaaaggctctcgatgtgctggagccactgctctgttccctaaaggagactgagtccctcactcaacgcggagttatctacaatttgctggggctcgccttacagggcgaaggtagagtgaaccgggcagctaagagttacttaagagctctaaacagggctcaagaagtgggagacgttcacaaccaggccgttgcgatggctaatctgggccacctttcacttaaatcctgggcacaacaccccgcacggaactatctcctccaggccgtcaggctgtactgcgaattgcaggcttcaaaggaaacagatatggaattggtacaggtctttctgtggcttgcccaagtcctggtgtccggccatcagctgacacacggcctactttgttacgagatggctctattgtttggactgagacatcgacacctgaaatcacagctgcaagccaccaagagcctctgtcatttttatagcagcgtgtcacctaaccctgaagcatgtataacttaccatgaacactggttagccctagcccagcaattgcgcgatcgggaaatggaggggagactgcttgagtcattaggtcagctgtataggaacttaaataccgcccgatccctgcgcaggtctctcacctgtattaaggagagccttaggatcttcattgacttgggcgagacagacaaggcggctgaggcctggttaggtgcgggtcgattgcactacctgatgcaggaagacgagttagtggaactgtgcctgcaggccgcaattcagacggctctcaagtcagaggagcccctgctagccctaaagttatatgaagaagctggtgatgtcttcttcaacggcacccgtcaccgccaccacgccgtcgagtattaccgtgcgggagcagtgcccttggccaggcgcttaaaggctgtacggacagaacttaggatctttaataagctgaccgaactgcagatttctttggaagggtacgagaaggccctggagttcgccaccctcgccgcaagattaagcaccgtcactggggatcagaggcaggaactggtggccttccatcggctggcgactgtgtactatagcttacacatgtacgaaatggctgaagattgttacctgaaaactctaagcctttgcccaccgtggctacaatcacccaaagaggctctctactacgcaaaggtctactacaggctgggccgtttgacattttgccagctcaaggacgctcacgatgcaaccgaatacttcctactggcactggcagccgctgtgctgcttggtgacgaggagctgcaagacaccatccgttctcggttggacaatatttgtcagtcgccattgtggcacagccgaccgtccggctgttcttccgaacgcgctcggtggctgtccggagggggtctggctctctag

SEQ ID NO: 240352 - DNA, 2181 bp, synthetic construct
  misc_feature 1..2181: note = Description of Artificial Sequence: Synthetic coding sequence
  source 1..2181: mol_type = other DNA
atggacctgagtacgggtcaggaggaggaagccgaaaatttcgctcctatcctcgctttcctggaccacgagggctatgcagaccacttcaagtccttatatgatttcagtttctccttcctcacctcctcgttctactcgttttcagaggaggacgaatttgtcgcctaccttgaggcgagccggaagtgggctaagaagtcccatatgacctgggcacacgccagactgtgttttctgcttggtcgtttgtcaattcgcaaggtgaagttgagccaggccagggtatactttgaagaagccattcatattcttaatggcgctttcgaggacttgagccttgtggcgaccctatacatcaacctggccgcaatctatctgaaacagcgactgcgccacaaagggtcagctctgctcgaaaaagccggtgctctcctggcttgccttccagatagggagtcctcagccaagcacgaattggacgtcgtggcctacgtattgcgccaaggcatcgttgtcggttccagccctctcgaagctagagcgtgctttctagcaatcaggctcttgctgtctctcggaagacacgaagaggtgcttcccttcgctgagcgccttcagctactctccgggcacccaccagcctcggaggccgtggcatccgtgctcagcttcttgtatgataagaagtaccttccccatctggccgtggcaagcgttcaacaacacggcattcaatctgcccaggggatgagtctgcctatatggcaggtgcacctggtcctccagaacaccactaaactactcggattccccagccctggttggggcgaggtctccgcacttgcctgccctatgctcagacaggctctggcggcatgtgaagagctcgccgaccggtctacacaacgagccctgtgcttaatcttaagtaaggtttaccttgagcacaggagtccagatggcgcaatccactacctatctcaggcgttagttctgggccaactcttgggggagcaggagtctttcgaatcatcactgtgtctggcctgggcctacctgctcgcatctcaagcaaagaaggccctggacgtactcgagccactgctgtgctccttgaaggagacagaaagccttacacagcggggagttatctataacctacttggcctcgccctccagggggagggacgtgttaaccgggctgcaaaaagttatttgagggctctgaatagggctcaagaggtaggcgacgttcataatcaagcggtggcgatggctaacttagggcatttaagtctaaagagctgggctcaacaccccgctcgcaattatctgctgcaggctgtccgattgtactgtgaacttcaagcgagcaaagaaactgacatggaactggtgcaggtgttcctgtggttggcccaagtccttgtcagtgggcatcaactcacacatggtctgctctgctacgagatggccctcctgtttgggcttagacatagacaccttaaaagccaattgcaggctacaaagagtttgtgtcatttctattcgtctgtgagtcctaatccggaggcctgcattacataccatgaacattggctcgctcttgctcagcagctccgcgaccgggaaatggaaggaagactcttagagtcactaggtcagctgtaccgcaatctgaatacggccagatctcttcggagatcactaacctgtattaaagaaagcctgcgcatcttcatcgatttaggcgagactgacaaagccgcagaggcttggctaggcgcaggcagactgcattacttgatgcaagaggacgaactcgtcgagctctgcctgcaggccgcaattcagaccgccctgaagtctgaggaacccctcctcgctctcaagctgtacgaggaggccggagatgtattcttcaacggcacccgtcatagacaccatgcagtagaatactatcgcgctggtgccgtacccctcgccagaagactgaaagcagtacgaaccgaacttaggattttcaacaaactgacagagctacagattagtttagagggctatgaaaaggccctagagtttgcaacgctcgccgcaagacttagcactgtgacagaggcccgagccggaggcctatcacctcccggatacagcgtcctgctgcctgctcacgtgtag

SEQ ID NO: 240353 - DNA, 720 bp, synthetic construct
  misc_feature 1..720: note = Description of Artificial Sequence: Synthetic coding sequence
  source 1..720: mol_type = other DNA
atgccactcctccttctcggggagacagagccccttaagttagagagggattgcaggagtcccgtggacccctgggccgcagccagccccgacctggccctggcctgcctctgccattgccaggacctcagctctggggctttccccgataggggcgttttgggtggcgtgctgtttcctaccgtcgagatggtcataaaggtgttcgttgccacgtcctctgggtccattgccatacgcaagaagcaacaggaggtggtgggcttcctggaagcaaacaagatcgattttaaggagcttgacatagcgggtgatgaggataatagaagatggatgcgagagaatgtgcccggagagaagaagccacagaacgggatacccctgccaccccagatctttaatgaggaacagtattgtggcgatttcgatagctttttctcagccaaggaagagaatatcatatattcctttcttgggctggcccctccccctgatagtaagggtagcgagaaggccgaggagggaggtgagacggaagcccagaaagagggctcagaagatgttggtaacctgcctgaggcccaagagaaaaacgaggaggagggagaaaccgctaccgaggagacagaggaaatcgccatggagggggctgaaggcgaggccgaagaggaagaggagacagccgaaggggaggagccgggtgaagatgaagatagttag

SEQ ID NO: 240354 - DNA, 387 bp, synthetic construct
  misc_feature 1..387: note = Description of Artificial Sequence: Synthetic coding sequence
  source 1..387: mol_type = other DNA
atgcgtgagaacgttcccggtgaaaaaaaaccacagaacggaattcccttgccccctcagatcttcaatgaggaacaatactgcggggacttcgattcattcttcagtgcaaaagaagagaacattatttacagctttttggggctcgccccaccacctgattccaaaggttctgaaaaggctgaggagggcggagaaacagaagcccaaaaagagggaagcgaggacgtcgggaatctccctgaagcccaggagaagaatgaggaggaaggcgaaaccgccacagaggaaacggaagagatcgcaatggagggcgctgaaggcgaggctgaggaggaggaggagacagccgaaggcgaagagcctggagaggatgaagattcctag

SEQ ID NO: 240355 - DNA, 387 bp, synthetic construct
  misc_feature 1..387: note = Description of Artificial Sequence: Synthetic coding sequence
  source 1..387: mol_type = other DNA
atgagagagaatgtgccgggtgagaagaaacctcaaaacggtatcccgctgccacctcagatctttaatgaggaacagtattgtggggatttcgacagttttttcagtgctaaagaggaaaacattatttactcttttctaggattggcccctccccctgattccaaaggcagtgagaaagccgaggagggaggcgaaactgaggctcagaaagaaggttcggaggatgtgggaaacctgcctgaagcccaggagaaaaatgaggaggaaggagagacagccaccgaggaaacagaagagatagccatggagggcgctgagggtgaggccgaagaggaagaggagacggctgaaggtgaagagcctggcgaggacgaggacagctag

SEQ ID NO: 240356 - DNA, 387 bp, synthetic construct
  misc_feature 1..387: note = Description of Artificial Sequence: Synthetic coding sequence
  source 1..387: mol_type = other DNA
atgagggaaaacgtcccaggagagaagaaaccacagaacggcatacctctgcctccgcagatctttaacgaggaacagtattgtggcgactttgatagcttcttttcggctaaagaagagaatatcatctattcctttctgggattagcccctccccctgactcgaaagggtctgagaaagctgaagaaggaggggagactgaggcacagaaagagggcagtgaggatgtgggaaacctgccagaagcccaggaaaaaaatgaagaagagggagaaactgcgacagaggagacagaggagatcgctatggagggtgctgagggtgaggctgaagaggaggaggagaccgctgaaggcgaagagcctggcgaggatgaagattcttag

SEQ ID NO: 240357 - DNA, 321 bp, synthetic construct
  misc_feature 1..321: note = Description of Artificial Sequence: Synthetic coding sequence
  source 1..321: mol_type = other DNA
atgcgcgaaaacgttccaggcgaaaagaaaccacagaatggtattccacttccaccgcagatctttaatgaggagcaatattgcggcgactttgactcctttttttctgcgaaagaagagaacataatctatagcttccttgggcttgcacctcccccagattccaaggggtcggaaaaggccgaggaaggcggagagaccgaggcccagaaagaaggaagtgaggacgtcggtaacctgcccgaggcccaggaaaaaaatgaggaagagggcgagacggcaaccgaagaaaccgaagaaattgccatggagggagcttag

SEQ ID NO: 240358 - DNA, 2373 bp, synthetic construct
  misc_feature 1..2373: note = Description of Artificial Sequence: Synthetic coding sequence
  source 1..2373: mol_type = other DNA
atgaacataatgaatacagaacaaagtcagaacagtatcgtttccaggattaaagtgtttgagggccagacaaacatcgaaacatctgggttacctaagaaaccagaaataactccccgatcactgccccctaagccaacagtctcaagtggaaagccctccgtggcccctaaacctgccgcaaatagggcgtcaggagagtgggacagcgggaccgaaaaccgactgaaagttacatcaaaggagggactcacaccctatcctccacttcaggaagcaggctcgataccggtgaccaagccagagctgccgaagaaacccaatcctggtctcattcgctcagttaatccagagatccccggacgaggtcccctagccgagagctccgatagcgggaagaaagtccctacccccgcaccacggcctttgctcctgaagaagtctgtctcctcggagaaccccacctatccgtcggctccgctgaagccagtcaccgtgcccccacgattagctggcgctagccaagcaaaggcctacaaatcactgggagagggtcctcccgctaaccctccggtccctgttctccagtcaaagcccctggtggatatcgacttgatctctttcgatgatgacgtgctgcccactcctagtgggaacctggctgaagagtccgttggcagcgagatggtgctggacccatttcagctacctgctaagaccgaaccaatcaaagaacgtgcagtccagcctgcgccaacgaggaaacccacagtgattaggattccagccaagcctggcaaatgtcttcacgaagacccacagagtcccccacccctgccagcggaaaaacctatcgggaacaccttttcaacagtgagcgggaagctgtcaaacgtggagcgtacaaggaatctcgaatcaaatcatccaggtcagactggaggattcgtccgggtcccgcctcgtctgccaccacggccagtgaacggtaagaccatccccacccagcagcctcctacgaaggtgccacctgagaggcccccacccccaaagctttctgccaccagacgatctaacaagaaattgcccttcaataggagctctagcgacatggacctgcagaaaaagcaaagcaatttagccacaggtctatccaaggcgaagtcccaagttttcaagaaccaagatcctgttctgccaccacggccaaaacctggccatccattatattcaaaatacatgctgagcgtaccacatggaatagctaatgaggacatcgtaagtcagaatccaggggagctgagctgtaagcgtggggatgtgctggtgatgcttaagcaaacggagaacaattatctggagtgtcagaagggagaggacacaggcagagtgcacctgtcacaaatgaaaattattacacccctggacgagcatttgagaagccgtccaaatgacccctcacatgcccagaagccggttgactccggtgctccccacgcagttgttctgcatgatttcccagcagagcaggtagacgaccttaacctcacgagcggggaaatcgtgtatctcctggaaaagatcgacaccgactggtacaggggtaattgtagaaatcagatcggaatctttcctgctaactacgtcaaagtcataatcgatatcccagagggcggaaacggaaagagggagtgcgtttcttcccattgtgtcaaggggtcccggtgcgtggcccgatttgagtatatcggggagcagaaggacgagctctccttttccgagggggagataatcatcctgaaggaatacgtcaacgaggaatgggctcggggtgaggtccgcggaaggaccggcatttttccgctcaacttcgtcgaacccgtggaagattatccaacatcaggagctaacgtactaagtaccaaagtgcccctcaagaccaagaaggaagactccggcagcaactctcaggtgaacagcctccctgccgagtggtgtgaagctctgcactccttcactgccgagacatccgatgacctttccttcaagcggggagatagaatacagatcctcgaaagactggactcagactggtgtcggggacggcttcaggatcgggagggaatatttccggcagtgtttgtgaggccttgccccgcagaggccaagtccatgcttgcaatcgtgccgaaaggtcgcaaggctaaagccctgtatgacttccgaggggaaaacgaggacgagctctccttcaaagctggggacatcattaccgagcttgaatccgtcgacgatgactggatgtccggcgagcttatgggcaaatccggcatcttccctaaaaactacattcagttcctgcagataagctag

SEQ ID NO: 240359 - DNA, 2373 bp, synthetic construct
  misc_feature 1..2373: note = Description of Artificial Sequence: Synthetic coding sequence
  source 1..2373: mol_type = other DNA
atgaatataatgaacactgagcaaagtcagaattcgattgttagtcggattaaagttttcgaggggcagactaatatcgagacaagcggccttccgaagaaacccgaaatcaccccgagatcactcccaccaaaacccacagtgagtagcggaaagccttccgtggcacccaaacccgcagctaaccgggcttctggtgaatgggattctgggacagagaatcgcttaaaagttacgtcaaaggagggattgactccttacccccctcttcaggaggcgggaagcattcctgtgacaaaaccggagttgccaaagaagcctaacccaggccttatccgaagtgttaaccctgaaatccccggacggggacctctggccgagagctccgatagtggcaaaaaggtgcccacacccgcacctcgccctcttctgttgaagaagtctgtttcctcggaaaatccgacctaccccagcgcgccattgaaaccagtgacagtgcccccacgcctggcaggagcttcgcaggccaaagcgtacaaaagcctcggcgaggggcctcccgctaaccctccggtgccagttcttcaaagcaaacctctggtggatattgatttaatcagcttcgacgatgacgtacttccgactcctagtggaaatctggcagaggaaagtgtcggaagcgagatggtgctggatccattccaattgcccgctaaaactgagcccatcaaagaacgtgccgttcaacccgctccgactcggaagcctaccgtgatccgaatccccgctaagcctggtaaatgtctgcatgaagaccctcagtcacccccacccttgcctgcggaaaaacctataggaaataccttttccaccgtttccggcaagctgagtaacgttgagcggaccaggaacctcgagtccaatcaccctggccagactgggggattcgtgcgcgtccctccacgactaccccctagaccagttaatgggaaaacgattccaacacagcaacctccaaccaaagtgccgccagaaaggccccctcctcctaagttgtctgctacgagaaggagtaacaaaaaattgcccttcaaccgatcaagctccgatatggacttgcagaagaaacagtcaaaccttgccacagggctgtcaaaggctaaatcccaagttttcaagaatcaggaccccgtcctgccacccagacccaaacccggacatcccctttatagcaagtacatgctaagcgtgcctcacggtatcgccaacgaggatatcgtttcacagaacccaggggaactatcctgcaagaggggggatgttcttgtgatgctgaaacagacagaaaacaactacctggagtgccagaaaggtgaggatactgggagggtccacctgtctcaaatgaagattatcacacctttagacgagcatctgagatcccggcctaatgatccctcccacgctcagaagccagtcgatagtggggctccccacgccgttgtcctccatgactttccagccgaacaggtggacgaccttaatctgaccagcggagaaattgtgtacttactggaaaagatcgacaccgactggtacagaggcaactgtaggaaccagattggaatcttccccgctaattacgtcaaggttataatcgatatccccgaaggcggtaacggaaagagggagtgcgtgagctctcattgcgtaaaaggaagccgctgcgtggcgaggttcgagtatatcggcgaacaaaaggacgaactgtccttctccgagggcgaaattattattctgaaagagtatgtaaacgaagaatgggctaggggagaggtgcgcggaagaacgggaatctttccgctgaactttgttgaaccagttgaagactaccctacctctggtgccaatgtactctccaccaaggttcctttgaagaccaaaaaggaagactctggttcgaacagccaggtcaacagtcttccagccgaatggtgtgaagcgttgcattctttcacagccgagactagcgacgatctctccttcaaaagaggtgaccgaattcagattctagagcgactggattccgactggtgtaggggacgactgcaggatagggagggcatcttcccagccgttttcgtcagaccttgccctgccgaggcaaagagtatgttggccattgtccctaagggccgtaaagccaaagccttatatgactttagaggggagaatgaggatgaactcagcttcaaagcgggagatattataacagagctggaatctgtggacgatgactggatgtccggggagctcatgggtaagtctggcatttttccaaaaaactatatccagtttttgcaaattagctag

SEQ ID NO: 240360 - DNA, 2304 bp, synthetic construct
  misc_feature 1..2304: note = Description of Artificial Sequence: Synthetic coding sequence
  source 1..2304: mol_type = other DNA
atgaatattatgaacactgagcagtcccagaattccatcgtgtcccgaatcaaagtgttcgaaggccagactaacatagagacatcgggccttcccaagaagcccgagattacaccaaggtcgctccctccaaaaccgacagtgtcaagtggcaagccttcagtggctccaaagccagccgctaatagagcgagtggagagtgggacagcgggactgaaaaccggttgaaggtgacatccaaagaaggactgacaccttacccccctttgcaggaggccggatctatacccgtgaccaaaccagaacttcctaagaagcccaatcctgggttgatacgtagcgttaatcccgagatccctggacgtggccctctagccgaatcttctgactctggtaagaaggtacccacccccgctccgagacctctgctgctgaagaagtccgtgtcgagcgaaaacccaacgtacccttcagctcccctgaaacccgtcacagtccctcctcgactagccggagctagccaggctaaggcttataagtctctgggtgagggcccaccagctaacccacctgtgccagtcctccagagtaaacctctagtcgatattgacctgatcagcttcgacgacgatgttctccccaccccaagcggcaacctggcagaggagtctgtagggtcagagatggttctggacccattccaactaccagcaaaaacagagcctataaaagaaagggcagtgcagccagcaccaacccgcaagcccacggtgatccgcattccagccaagccaggcaagtgccttcacgaagacccgcagtccccacctcccctgcctgccgaaaagcctattgggaataccttcagtacggtgtctgggaagctgtctaacgttgagcgcacgagaaacctggaatcaaatcaccccggtcagacgggtggcttcgtcagagtcccacccaggctccctcccaggcccgtgaacggcaaaaccatcccaacacagcagccgccaaccaaggttccaccagaacggcctccaccacctaagctgtccgccactcgtcggtccaacaagaaactcccttttaacaggtcaagttctgacatggatcttcagaagaaacaaagcaatctcgcaaccggtctgtcaaaggccaagagccaggtttttaaaaaccaggaccccgtgctgccacctcggccaaagcctggccacccactctactccaagtatatgaggggcgatgtcttagttatgcttaagcagacggaaaataattacttagaatgccagaagggggaagataccggccgagtccatttatcgcaaatgaaaattattacgccactggatgagcacctgcgctctagaccaaatgacccctcacatgcccagaagccagtagattccggcgctcctcacgccgtagtgctccacgatttcccagcggagcaagtggatgacctcaatctgacttcaggggagatcgtgtacttactagagaagatcgatacagactggtaccgagggaactgtcggaatcagattggaatctttccagcaaattacgttaaggttatcattgatatccccgaaggtggcaatggcaaacgggagtgcgtgtctagtcattgcgtgaagggctctcgttgcgtggcacgtttcgaatatatcggcgagcagaaggacgagctatctttctcagagggggagataatcatcctgaaggagtacgtcaatgaggagtgggcgcgaggcgaggtgcgcggaaggactggaatttttcctctaaactttgtggagcctgtggaagattatccaaccagtggcgctaatgtactctcaaccaaggtgccattaaagaccaaaaaagaggattcaggttctaattcacaggttaatagcctgcccgctgaatggtgtgaggccctgcactccttcacggccgagacaagcgatgatctatcattcaaaaggggagaccggatacagatcctggagcgcttggattccgactggtgccggggacggttgcaagacagagaaggaatcttccccgctgtgtttgttcgcccatgtcccgctgaggccaagtcaatgctggccatcgtgccaaaaggtagaaaggccaaagctttgtacgacttccgcggtgaaaacgaggacgaattatcatttaaagccggtgacataataacagaacttgaatccgtcgatgatgattggatgtcaggcgagttgatgggaaagagcgggatcttccccaaaaattacatccagtttctccaaattagctag

SEQ ID NO: 240361 - DNA, 2196 bp, synthetic construct
  misc_feature 1..2196: note = Description of Artificial Sequence: Synthetic coding sequence
  source 1..2196: mol_type = other DNA
atgaacattatgaatacagagcaaagccagaactcaattgtatctcgcattaaagtgttcgaggggcaaacaaatatagaaacttccggccttcctaagaaacccgagatcacacctaggagcttgccacccaaacctactgtttcatccgggaaaccatctgtagctcccaagcccgctgcaaacagggcctcaggagaatgggactccgggaccgaaaacaggttgaaggttacaagtaaggagggactgacgccataccctcccctccaggaagcaggaagcatcccagtcacaaaacccgaactgccaaagaaacctaatccaggacttatcagatctgtgaatccagagattccaggtagagggccactggccgagagttcagattcagggaaaaaagtccccacccccgcacctcgtcccctgctgctgaagaagtccgtgagcagcgagaatccaacctatccttcagctcctctgaaacccgtaacggtacctcctaggctggccggagcttcacaagctaaggcctataaaagccttggcgaggggcctcccgcaaacccccctgtgccagtgctccagtctaagccccttgtcgatatcgacttgatatcttttgatgacgatgtcctacctaccccaagtggtaacttagccgaggagagtgtaggtagcgaaatggtcctcggactgcacgaggacccacaaagcccaccacccctgcctgccgagaagcctattggcaacacatttagcacagtgtcaggcaagcttagcaatgtggagagaacgagaaacctcgagagcaaccacccaggccagactggcggttttgtgcgagtgccccctcggcttcccccacgacctgtgaacgggaagactatcccaacacaacaaccccctaccaaagtgcccccagagcgccctccccctccgaagctctccgcaacccggaggtctaacaagaagttaccctttaataggtcatcctccgacatggatctgcagaagaaacagtcaaacctggcgaccgggctatcaaaggccaagtcccaggtgttcaaaaaccaggaccctgtgttaccaccaaggcctaaaccaggccatccattatactcaaagtacatgcgaggggatgttctcgtcatgctgaagcagactgagaacaattatctggagtgtcagaaaggggaagacacaggcagggtgcacctctctcaaatgaagatcatcacgccgctggacgagcatctgcgcagtcggcctaacgatcccagtcatgcgcagaagcccgtggactcaggggctccccacgctgtcgtgctgcatgatttccctgcagaacaggtggatgacctcaatctgacttccggtgagatagtgtatctgctggagaaaatcgacacagactggtatcggggaaactgtaggaatcagattggcatctttcccgctaactacgtgaaagtcattatagatatccccgaaggcggaaatggtaaacgcgagtgcgtttctagtcattgtgtgaagggatcccgctgtgtggcaagattcgagtacatcggagagcaaaaagacgaactgagcttttccgaaggggagatcatcatcctgaaagagtacgtaaatgaggagtgggcccgaggtgaggttcggggacgaacaggaatctttccgctgaattttgtggagccggttgaggattatcctacatcaggggcaaatgtcctgagtactaaagtgccattaaagacaaagaaggaggattcaggaagcaactcacaggttaacagcttacctgcagaatggtgcgaggcactgcatagctttacagcagagacttcagatgacctgagtttcaaacggggagatcggatacagatcctggagagactggattccgactggtgtagaggaagactccaggaccgcgagggaatcttcccagccgtgttcgtcagaccctgtccagcggaggccaaatcaatgcttgcaatcgtgccaaagggacggaaagccaaagctctgtacgattttcgaggtgagaacgaggacgaactctcctttaaggctggcgacattatcactgaacttgagtctgtggacgacgattggatgtcaggagagctgatgggaaaatcaggaatttttcccaagaactacattcagtttctccagatatcctag

SEQ ID NO: 240362 - DNA, 2196 bp, synthetic construct
  misc_feature 1..2196: note = Description of Artificial Sequence: Synthetic coding sequence
  source 1..2196: mol_type = other DNA
atgaatatcatgaatacagagcagagtcagaatagcatagttagtagaatcaaggtgtttgaggggcagacaaatattgaaacatctggtctgccgaagaagccggaaatcaccccccgttctcttcccccaaagcccaccgtgtcctctggaaaaccgtctgtggctccgaagccagcagcaaatagggccagcggcgaatgggactctgggacagagaatcgcctcaaggtcacttctaaggagggactgacgccgtaccctccgttgcaggaagcgggaagtataccagtcactaaaccggagttacctaagaagccaaatcctggtctcatcaggtcggtcaatccagaaattcctggaagggggccactggctgagagttcagacagtgggaagaaagtgcccactcccgctccaagaccgctgctcctaaaaaaaagcgtgtcaagtgaaaaccccacctacccttcggcgccactgaagcccgttacggtgcccccacgtctcgccggtgcctcccaggccaaagcttacaaaagcctgggcgaaggccctccggctaaccctcctgtcccagtgctgcagagcaaaccgctggtcgatattgacctcatcagcttcgacgacgacgtgcttcctacaccatctggcaacctggctgaggagagcgtgggatcggagatggtactcggactgcatgaggacccgcaatcacccccaccactgcctgccgaaaagcctattggtaacaccttctccaccgtttccgggaaactctccaatgtggagagaacacggaacctggagtccaatcacccaggccaaacaggcggattcgtccgggttcccccaaggttgcccccacgcccagtcaatggaaagaccatacctacacagcagccccctacaaaagtgccacccgagcgaccaccgcctccaaaattatcggccacaagacgaagtaataaaaagctcccattcaaccggagttcctctgacatggatctacagaagaagcaatcgaacttggccaccgggctgagcaaggccaaatctcaggtgtttaagaaccaggacccggtgcttcccccaaggccaaagcccggtcaccccctgtactccaagtacatgaggggggacgtgctggtaatgctgaagcagaccgagaataattaccttgagtgccaaaaaggcgaggacaccggtagagttcacctgagtcagatgaagatcatcactccactcgatgaacatttgagaagcagacccaacgatccctcccacgcccaaaaacctgtggactcaggtgcaccccatgctgtcgttctgcatgatttcccggctgaacaggttgacgacctgaacctgacttcaggtgagatcgtctatctactggagaaaatagacactgattggtacagagggaactgccggaaccagattggaattttccccgctaactacgtgaaagtcatcatcgatatcccggaggggggtaatggtaagcgcgaatgcgtgtcctcgcactgcgttaaaggttccagatgcgtcgccaggtttgaatatatcggtgagcagaaggacgagctgagcttttcggaaggagagattattatcctgaaagagtatgtcaacgaagagtgggcccgaggcgaggtcagaggacgtaccggcatcttcccactgaactttgttgaaccagtggaggattatccaacgtccggggctaacgtgttgagcacgaaagttcccctcaaaacaaaaaaggaggacagcggctccaatagtcaagtgaactcattgcccgctgagtggtgcgaggcacttcattctttcacagcagaaaccagcgacgatttgtctttcaaacgcggtgatagaatccaaatactcgagcgcctcgactccgactggtgtcgtgggagattacaggatcgggaggggatcttcccagccgtgttcgtacgcccttgtcccgcagaggccaagtctatgttggcaatcgttccgaagggtaggaaagccaaggccctatacgattttcgtggggaaaacgaggacgagctgtcctttaaggcgggtgatatcatcactgagctcgagagcgtggacgatgattggatgagtggagaactgatgggaaaaagtggcatatttcccaaaaattacatacaatttctacaaattagctag

SEQ ID NO: 240363 - DNA, 2304 bp, synthetic construct
  misc_feature 1..2304: note = Description of Artificial Sequence: Synthetic coding sequence
  source 1..2304: mol_type = other DNA
atgaacatcatgaacactgaacagagtcagaattctatcgtctccaggatcaaagtcttcgagggccagactaatatcgaaacaagcggactgcctaagaaacccgagatcacgcccagatctcttcccccaaagcccactgtgagctctggaaaaccatccgtggctccaaagcccgctgccaatagggcctctggggaatgggatagcggcaccgagaatagattgaaagtcacgtccaaggaaggtctgaccccctatcctccgctgcaggaggctgggtccattccagttaccaagccagagttgcccaaaaaaccaaatcccggattgatccgttcagtgaaccctgagattccaggaagaggccctctggccgagtcttcggatagcgggaaaaaagtgccaacgcctgccccacgacccctgctgttgaagaagagcgtctcttccgaaaatcctacttacccttctgctcctttaaaacccgtaaccgtgccaccaagacttgccggagctagtcaagcgaaggcctacaaatcattgggggagggtcctccagctaatcctcctgtgcccgtgctgcaatccaaaccccttgtggacatcgacctaatttcctttgacgacgatgtattgcctactcctagcgggaacctagctgaggagtcagtggggtctgaaatggtcctggatccatttcaactgcccgcaaaaaccgagcctattaaggaacgagccgtgcagcccgctcctacaagaaagcccacagtgatacgaatccctgcaaagcctgggaagtgtctgcacgaggatcctcagagcccgcctcctcttccggctgagaagcccattgggaacactttctctaccgtctcaggtaagctgagtaatgtggagagaacacgaaacctggaatccaaccaccccggacagaccggaggctttgtgcgcgtgcctcctagactcccccctagacctgtaaatggaaaaacaatccctacacagcaaccacccacaaaagtccctccagagagaccccctccacctaagctgagtgctacaaggcgcagtaacaaaaagttgcccttcaacaggtcctcatccgacatggatttacagaaaaagcaaagcaaccttgcaacaggattatccaaggcaaagagccaagtgtttaaaaaccaagatccagtcctgcctccaaggccaaagcccggtcacccactgtattccaaatatatgcggggagacgtgctggtcatgctaaagcagacagaaaacaactatctggaatgtcaaaagggagaggacactgggcgagtacatctgagtcagatgaagatcatcaccccactcgacgagcaccttcggtcacgcccaaatgatccttctcacgcccagaaacccgtggatagcggggcaccacacgccgtagtacttcacgatttccctgccgagcaggttgacgaccttaacttgacctctggtgaaatagtctacctcctcgagaaaattgatactgattggtatcggggtaattgtcgaaatcaaataggaatattccctgccaattacgtgaaagttattatcgatatccctgaggggggaaatggtaagagagagtgcgtgtcatcgcactgcgttaaggggtctcggtgcgtagcgaggtttgagtacatcggggaacagaaggatgagctctcttttagcgaaggcgaaataattatcttaaaggagtacgtcaacgaagaatgggcaaggggggaagtacgaggcagaacgggaatctttccactgaattttgtggaaccggtggaagattatcctacttccggggctaacgtactgtcaaccaaggtccccctgaaaacgaagaaggaagatagcgggagcaacagccaagtgaatagtctccctgccgagtggtgcgaagcgttgcactcttttaccgccgagacttccgatgacttgtcattcaaacggggtgaccgaatccaaatcttagaacgccttgattcggattggtgccgcggtcgcctgcaggatcgggagggaatctttccggctgtgtttgtgcgcccatgtccggctgaagccaaaagcatgttggcaattgtgcccaagggacgcaaggcgaaggccctttatgactttcgcggagagaacgaggacgaattgtcgttcaaagccggagatataatcaccgagttggaatccgttgatgacgactggatgtcaggggagcttatgggcaaatccgggatctttccaaagaactatatccagttcctacagatttcctag

SEQ ID NO: 240364 - DNA, 2304 bp, synthetic construct
  misc_feature 1..2304: note = Description of Artificial Sequence: Synthetic coding sequence
  source 1..2304: mol_type = other DNA
atgaacatcatgaacaccgaacaaagccagaactccatcgtgtccaggatcaaggtttttgaaggccagacgaatatcgaaacttctggcctcccaaagaagccggagatcactcccagaagcctcccaccgaaacctaccgttagcagcggaaaaccttctgtggctccaaagcccgctgccaacagggccagcggagaatgggactcaggcacagaaaaccgactaaaagtcactagtaaagagggcttaactccctaccctcccctgcaggaagcgggaagcattccggtcacgaagcccgagctacctaagaagcctaaccctggactcattaggagcgtcaatccggaaatccccggaagagggcctctggccgagtcatccgatagcggcaagaaagtcccaaccccggctcctcgtccgctgcttctgaagaaatccgtgtcttccgagaaccccacatacccttccgcgccactgaagcccgtcaccgttcctcctagactggctggcgcttcacaggctaaggcctataagtctcttggagaaggccctcccgcaaatccacccgttccagtgctgcagagcaaacccctagtcgatatagatctgatctccttcgacgatgacgttctgccgacaccctcaggtaacctcgccgaggagtctgtcggctctgaaatggtgctcgatcccttccaactgcctgctaagacggaacctatcaaagaaagagcagtacagcctgcccctacccggaaacccacagtgattagaatcccggctaagccgggaaaatgcctccatgaagatccacagtcgcctccaccgctgcctgcagagaaacctattggcaacactttttccacagtctccggtaagttgagtaatgtggagagaactcgtaatcttgaatccaaccatccaggacagacgggtggctttgtccgagtacctccccgactgcctcctaggccagtaaatggaaaaaccatcccaactcagcagccccctacaaaagtcccccctgagcggccaccgcctccgaaactaagtgccacacggaggagcaataagaagctaccttttaatagaagttcatctgacatggacctccaaaaaaagcagtctaatctcgccactggcctgtctaaggccaaatcccaagtgttcaaaaatcaggaccccgtgttgcccccacggcctaaaccgggacaccccctgtactcaaaatacatgcgaggagatgttctggttatgctgaaacagacagagaataattatcttgaatgtcagaaaggggaagatacaggacgcgttcacttgtcccagatgaaaatcattacccccctggacgagcacctcaggagccgccctaatgacccgtctcacgctcagaaaccagtggactctggcgcaccacatgcagtggtactgcacgactttccagcggaacaggtggacgacctgaacctgacttccggtgagattgtatacctcctggagaaaatcgatactgactggtacaggggcaattgtaggaaccaaatagggatctttcccgcaaactacgttaaagtgatcatcgatatcccagagggaggaaatggcaagcgtgagtgcgtgtcctcccattgcgtaaagggttctcgctgtgtcgcccgtttcgagtatataggggaacagaaagacgagctctccttcagcgagggcgagattattatactaaaggagtacgtgaatgaggagtgggctcgaggtgaggtgcggggtagaactggaatcttccccctgaattttgtcgagccagtcgaggattaccccacttccggggctaatgtgctgagcactaaagtcccattgaaaacaaagaaagaggacagtggaagcaactcacaggtaaactcactgccagctgaatggtgtgaagcgctacatagcttcaccgccgaaacctccgacgacctttccttcaagcgtggcgacagaattcagatactggaacgtctcgatagcgactggtgtcgcggacggctgcaggatcgggagggcatctttccagctgtattcgtccggccttgtccggctgaggcgaagagtatgctggcgatcgtcccgaagggcagaaaggccaaggctctttatgattttcggggtgagaatgaggacgaactgtcatttaaggccggtgacatcattacggagctggaatccgttgatgacgattggatgagtggagaactgatgggtaagagtgggatttttccaaaaaattacatccagttcctgcagatcagttag

SEQ ID NO: 240365 - DNA, 2190 bp, synthetic construct
  misc_feature 1..2190: note = Description of Artificial Sequence: Synthetic coding sequence
  source 1..2190: mol_type = other DNA
atggacgatctgaccctgctggacttgctggagtgtcctgtctgctttgagaagctagacgtgacagccaaagtcctgccttgtcagcatacattctgtaaaccctgcctgcagcgggtgtttaaggcccacaaagagttgagatgtcccgaatgtcggacccctgtcttcagcaacattgaagctctccctgccaaccttttactcgttcggttgctggatggggtcagatcagggcagtcttcaggacgcggaggctcatttcggagacctggcaccatgacgctgcaggatggcaggaaatctagaacaaacccgagacgcctccaggcgtccccatttcgccttgtgccaaacgtgcggatccacatggacggagtgcctagagccaaagcactgtgtaactacagaggacagaacccgggagacctgcgattcaataagggtgatataattctgctcaggcgacaactggatgagaactggtaccagggcgaaattaacgggatttcgggcaacttccccgcatcctcggttgaagtaatcaagcaactgcctcagccgccaccgctatgtagggccctctataattttgacctgcgtggtaaagacaagtccgaaaaccaagattgtctcacatttctcaaagacgacattatcactgtcatctcgcgtgtcgatgaaaactgggccgaaggtaagttgggcgacaaggttggcatatttccaatcctttttgtggaacccaatttgaccgctcgtcacctcctggaaaagaacaaaggcaggcagagcagccgcactaagaatctctcattggtatcctccagctcccgcggtaacaccagcaccctgaggagaggccctggcagccgtcggaaagtgccgggacagttctcaatcacaaccgccctgaacacattgaacagaatggtgcacagcccctctgggagacacatggtggagatatccacccccgtgttaatttcttcctccaaccctagcgtgatcacccaacctatggaaaaagcagatgtgccttctagctgtgtgggacaagtctcgacttaccacccagccccagtgagtcctggtcacagcaccgccgtcgtctccctgcccggaagccagcagcacctgtctgctaatatgttcgtggccttacacagttactcagctcacgggccagacgagctggacctgcaaaaaggcgagggagtccgagtgcttggaaaatgtcaagatggatggctgagaggtgtttctctggtcacaggacgggtggggatcttccctaataactatgttatccccatttttcgtaagacctcatctttcccagattcacgcagcccagggctgtatacgacctggaccctgtcaacgtcgagtgtctcgagccagggcagcataagtgaaggtgatccacgacagtcccggcctttcaagtccgtgtttgttcctactgccattgtcaatccagttcgttcaacagccggacccggtacacttggccaggggtctctccgaaaggggaggagctccatgagaaagaacggatccctgcagcgcccacttcagtccgggatccccacgttagtagtgggatccctccggcgttcccctactatggtactgcggccacaacagtttcagttctatcagcctcagggcattccctcctctccttccgccgtcgttgtagagatgggctctaaacctgctttgaccggagagccagctcttacgtgtatcagccggggaagcgaagcctggatccacagtgctgcctcctcgctgattatggaggacaaagaaattcccatcaaatcagagccactgccgaagccacccgcttccgccccaccttccatactggtcaaacccgagaactctcgaaatggcatcgagaaacaggtgaagactgtccgctttcagaactacagcccccctcccactaagcactacacatcgcacccaacaagtggtaagcctgaacagcccgcaactctgaaggcaagccagcctgaagcagcctctctagggccagaaatgacagttctcttcgcccacagatctggctgccacagtggtcagcaaaccgatcttcggaggaagtccgctttgggcaaggccacaactctcgtgtccacggcttccgggacccaaacagtgtttccatctaagtag

SEQ ID NO: 240366 - DNA, 2190 bp, synthetic construct
  misc_feature 1..2190: note = Description of Artificial Sequence: Synthetic coding sequence
  source 1..2190: mol_type = other DNA
atggacgacctcactctgctggatctgctcgagtgcccagtgtgcttcgagaagctcgacgtgacggccaaggtgcttccttgccaacatacattctgcaagccctgtcttcagcgggtgtttaaagcccacaaagagttacgttgcccagagtgccgtacacccgtcttctcgaatattgaggctttgccggcaaatttgctgctggtgaggctgctggacggagtgaggtccggacagagctcaggccgtggcggatcttttaggcgacccggaacaatgactctccaggatgggaggaagagtagaactaaccctcgaagactgcaggcatctccttttaggctggtacctaacgtgcgaatccacatggacggggtcccccgtgccaaggctctgtgtaactaccgaggacagaatccgggtgaccttagattcaataagggcgacatcatcctcctccggcgacagctcgatgaaaattggtaccaaggagaaattaacggcatctccggaaactttcccgcttcttctgtggaggtgatcaagcaactgccccagcccccaccattgtgtcgagcactttataacttcgatctgcgcggaaaggataaatctgagaaccaggactgcctgacattccttaaggacgatattattaccgtcatatctcgggttgatgagaattgggccgaggggaaattgggagataaagtgggaatcttccctatcctgtttgtcgaaccaaatctaacagccagacacctactggaaaagaataagggccgacagagctctaggaccaagaacctgagcttggtgagctcgagctcccgcggaaatacaagtactcttcgccgtgggccagggtcacggaggaaagtccccggtcagttttcaataaccactgcactgaatactctcaacagaatggtgcacagcccgagtggaagacacatggtagagatctcaacccctgtgctgatttcatccagcaacccctcggtaatcacccagccgatggagaaggccgatgtgccatcttcctgcgtgggacaggtgtctacctatcacccggctccagtttcacccggacacagtactgctgtagtgtcacttccgggatcccagcaacatctttcagctaacatgttcgtggccctgcactcctactcagcccacgggcctgatgagctcgacctgcagaagggggaaggggtcagggttctcggaaagtgccaagatggatggctgcggggagtgtcccttgtaacggggagagtcgggatctttcccaacaactacgtgatcccaatttttcggaaaacctcttcctttcccgattcccgctccccaggcctgtacacaacttggactctcagtacctctagtgtatcatcacaaggatctatttctgaaggcgacccccgacagtctcgtccttttaagagcgtgtttgtcccaaccgccattgtcaatcccgtccgctctaccgctgggccaggaaccctggggcagggcagcctccgaaaagggagatcaagcatgaggaagaacggttcccttcagcgaccgttacagtcaggtatcccaactctcgtcgtgggaagcctgcggagaagtcccactatggttttgagaccccagcagttccagttctatcaaccccaggggattccttctagcccatccgcagtggttgttgagatgggcagcaagcctgccctgacaggcgagccagcactgacctgcattagccggggatcagaagcatggatccattccgctgcgtcctccctgattatggaagataaggaaatccctatcaaaagcgaaccccttcctaagccccctgcctccgcacccccttcaatcctggtcaagcctgaaaacagccgcaatgggatcgaaaaacaggtgaaaacggttcgctttcagaactactctcctcccccaacgaagcactacacatcccacccaacatcggggaagcccgagcaaccagcaacgttaaaagcttcacagcctgaggctgcttcccttggcccagagatgactgtgctatttgcccacagaagcggctgccattccggtcagcagacagatctcagacgcaaaagcgcacttgggaaagcaactacgctggtatctactgcgtctggcactcagacagtctttccctctaagtag

SEQ ID NO: 240367 - DNA, 387 bp, synthetic construct
  misc_feature 1..387: note = Description of Artificial Sequence: Synthetic coding sequence
  source 1..387: mol_type = other DNA
atggaagacaaggagatccctatcaaatctgagcctctccccaagcctcctgcctccgccccaccctctatcctggttaagcccgagaacagcagaaacggaatagaaaaacaagtgaagactgtacgctttcagaactatagccccccaccaacaaagcattatacctcccatcccaccagcggcaaacctgagcagcctgctactctaaaagccagtcagcccgaagccgcaagtctgggacctgagatgacggtgctgtttgcccaccggtccgggtgtcactctggccaacaaactgacttgagacgtaaatctgccctcggcaaggccactactcttgtgtcgaccgcttctggtactcagactgtgttcccttccaaatag

SEQ ID NO: 240368 - DNA, 1686 bp, synthetic construct
  misc_feature 1..1686: note = Description of Artificial Sequence: Synthetic coding sequence
  source 1..1686: mol_type = other DNA
atggctgctgaagaaatgcactggccagtgcctatgaaggccatcggcgctcagaatctcctaactatgcctgggggagtggccaaggctggatacttgcacaagaagggcggaacgcagctgcaactccttaagtggcctcttcggttcgtaattatccataagcgctgtgtctactatttcaagtctagtacatcggcctcacctcaaggcgcattcagcctttcaggttacaacagggtgatgcgtgcagcggaagagactacatcaaataacgtgtttccgtttaaaatcatacatatatccaagaaacaccgtacttggttcttcagcgctagcagcgaggaggagcgtaagtcatggatggctctgctgagaagagaaatcggacacttccatgagaagaaggatctccccttggataccagtgattcgtctagcgacactgatagtttctacggcgcagtcgaacgtccagttgacatctctttgtctccttatcccactgataatgaggattatgagcatgacgatgaggacgacagctatctagagcccgacagcccagagcccggacgtctcgaagatgccctcatgcacccacctgcttatccacctccccctgtgccgacaccacggaaaccagccttttccgacatgccacgagcccattcttttaccagtaaaggcccaggtcctctgctcccccctccaccaccgaagcacggtttgcctgatgtaggactggccgcagaagatagtaagcgcgatcccctgtgtccccgaagagcggagccatgcccccgagtgccagctaccccacggaggatgtctgatcctccgttgtctacaatgcccacggcgcctggattgagaaagccgccatgctttagggaatccgcttccccctcccctgaaccatggaccccagggcatggggcttgcagtacatcttcggcagcaatcatggctaccgccactagtcgtaattgcgacaagctaaagtctttccatctgagcccaagaggtccgccaaccagcgaaccaccacccgtaccagccaataaacctaagttcctgaagatcgctgaggaagacccccctagggaggccgcaatgcctggactctttgtccctcccgtggcccctagacccccagccctcaaactgcctgttccagaagccatggctcggccagcggtgcttccacggcctgagaaaccccagctcccccatttgcagaggtcacctcccgacggacaaagttttcgaagcttttcttttgagaagcctaggcagccgtcacaagctgataccggcggagatgacagcgacgaggattatgagaaggtgccccttccaaattctgtcttcgtaaacaccaccgaaagctgcgaggtcgagagactgtttaaggctactagcccgaggggtgaaccccaggacggactgtactgcatccgcaattcttctaccaagagcggcaaggtgcttgtagtgtgggacgagacaagcaacaaagtgaggaactaccgcattttcgaaaaggattctaagttttacctggagggtgaggtactttttgttagcgtgggctcgatggttgagcactaccatacgcatgtcctaccttcccaccaatcactactcttaaggcatccatacggctacaccggacccaggtag

SEQ ID NO: 240369 - DNA, 294 bp, synthetic construct
  misc_feature 1..294: note = Description of Artificial Sequence: Synthetic coding sequence
  source 1..294: mol_type = other DNA
atggcggcagaagagatgcattggcccgtgcctatgaaggccatcggggctcagaacctgttgaccatgcccggaggggtggctaaagccggataccttcacaagaagggaggcactcagctccaacttctgaagtggcctctaaggttcgtgatcattcacaaacgatgtgtgtactacttcaagagcagcacaagcgcatcaccgcagggggcattttcattgagcggatacaaccgccagcctcgccctcaaccagcgcaagctctctcacagactgaagcgggaccctag

SEQ ID NO: 240370 - DNA, 1686 bp, synthetic construct
  misc_feature 1..1686: note = Description of Artificial Sequence: Synthetic coding sequence
  source 1..1686: mol_type = other DNA
atggctgccgaggaaatgcactggccagtgcccatgaaagctattggcgctcagaacctgctcaccatgcctggtggcgtggccaaggcgggatatctgcataagaagggtggtacgcagttacaattactcaagtggcccttacgcttcgttattattcacaagcgttgtgtgtattatttcaaaagctcaacgagtgccagtccgcagggcgcattttccttgtctggatataacagggtgatgcgcgctgcggaagagactacgagcaacaatgtgttcccttttaagattattcacatttcgaagaagcaccgcacgtggttctttagcgcgagctccgaggaggagagaaaatcatggatggccctcctccggagggagatcggacactttcacgagaagaaggatctgccattggatacatcagacagttctagcgataccgattcattctatggcgcagtggaacggcctgtggacatcagcctttccccataccctaccgacaacgaggattacgaacacgatgacgaggacgatagctatctggaaccagatagcccagagccaggacgacttgaggacgcactgatgcacccacctgcttatccgccaccaccagtccccacccccaggaaaccagcttttagcgatatgcctagggcgcactctttcacttccaagggcccagggccattactccccccaccccctccgaaacacgggttgcccgacgtgggtctagccgcagaggactcaaaaagagaccccctatgtcctaggcgggcagaaccttgccccagagtgccagccactcccagacggatgtccgacccgcctctttcaaccatgccgacagcgccagggttaagaaagccaccctgcttcagagaaagtgcgagtccgtcacccgagccgtggactcccggtcatggagcctgctccactagctccgctgccatcatggccaccgctacctccaggaattgcgacaagctgaaaagtttccatctgagcccacgaggaccgcctactagcgagcccccacctgtgccagccaacaaacctaagttcctgaagattgccgaggaagacccccctcgcgaggccgctatgcccggacttttcgtgcccccagttgccccaaggccccctgccctcaagctgccagtgccggaggcaatggcccgacctgccgtcctccccaggcctgaaaagccacagctacctcatctgcagagatctccaccagatggccagtctttccgcagtttttcatttgaaaagccacgacagcctagtcaggccgatacagggggagacgatagcgatgaggattatgaaaaggtcccacttcctaactcagtgtttgtgaacacgaccgaaagctgcgaggtggaaagattgtttaaggccacttcccccaggggggagccccaagacggattatactgtatccgaaattcatcaacaaaatcggggaaggtgctggttgtgtgggacgagacctccaacaaggttagaaactacaggatttttgaaaaggatagcaaattttatctggagggtgaggtcctgttcgtcagtgtggggtccatggtggagcattaccacactcacgtgctaccctcccaccagagcctcctgctgaggcatccctacggctataccgggcctaggtag

SEQ ID NO: 240371 - DNA, 1770 bp, synthetic construct
  misc_feature 1..1770: note = Description of Artificial Sequence: Synthetic coding sequence
  source 1..1770: mol_type = other DNA
atggctagcctcggccctcgcacacctgcgccaagcagaagtaggggaaggcgcgctatgtgttgggtaagcacgatatcgttcatggctgccgaagagatgcattggccagttcccatgaaggctattggagcgcagaaccttttaaccatgccaggcggtgtggcaaaggctggctatttgcacaagaagggaggaacacagttgcagctcttgaagtggcccctccggttcgttattattcacaaaagatgcgtgtattatttcaagtcaagtacgtccgcgagtccacaaggcgctttctccttgagcggctacaatcgtgtcatgagagcggctgaagaaaccaccagcaacaatgtgttccccttcaagattattcacattagtaagaaacataggacatggtttttctctgcctctagcgaagaggagcgtaagtcttggatggctctgctccggagagaaattggacacttccacgaaaagaaagatctgcctttagatacttcagactcttcatcagatacagattctttttatggagcagtggagagaccggtcgacattagcttgagcccctaccctacagataacgaggactacgagcacgacgacgaggacgatagctatttggaacctgacagccctgaacctgggaggttggaggacgcactcatgcacccacccgcatacccaccgcctccagtgcctacaccccgaaaacccgcattctctgatatgcccagagctcactcctttactagcaaagggcctggtccgttactgccaccaccccctcctaaacacggactgccggatgtgggcttggcagccgaggatagtaagagggacccactgtgtcctcgacgagccgagccttgcccaagagttccggctaccccacgacgtatgagtgaccctcctctgtctacaatgcccaccgctccaggactccgtaagcctccgtgcttccgggagtcagcttccccatctcccgaaccctggactccaggccacggggcttgtagtaccagctccgctgccattatggccacagcaactagtagaaactgtgacaagttaaagagctttcacttgtcccccaggggtccccctacctcggagccacccccagtcccggctaataaacctaaatttcttaagattgcggaggaggatccccctagagaagcagccatgcctggactgttcgtgcctcccgtggcccctcggcctcccgcactaaaactgccggtgcctgaggcaatggcgaggccggcagttctgccgagaccagagaaaccgcagctgccacacctccagcgttctccaccggatggccagtcatttcggagcttttcatttgagaaaccccgacagccatctcaggcagacactgggggtgacgactcagatgaggactatgagaaggtacccctaccaaatagtgtgttcgtgaatactaccgagagctgtgaagttgagcgcttgttcaaggccacctctccacgcggtgaaccgcaggacggcctctactgcattaggaacagttcaactaagagtggcaaagttctggtagtgtgggatgagacttcaaacaaggtccggaactatcggatcttcgaaaaagattcaaagttctacctcgagggcgaagtgctatttgtctcggttgggtctatggttgagcactatcacacacatgtgctgccatcccaccaaagcctcctgctgagacatccgtatggctataccggaccgagatag

SEQ ID NO: 240372 - DNA, 1686 bp, synthetic construct
  misc_feature 1..1686: note = Description of Artificial Sequence: Synthetic coding sequence
  source 1..1686: mol_type = other DNA
atggccgcagaggaaatgcactggcccgttcccatgaaggctataggggctcagaatctgctgactatgccgggtggtgttgcaaaagccggttatctccacaagaaaggcggaacgcagttgcaactcctgaaatggccattacgtttcgtgatcatccataaaaggtgcgtatactactttaaatcaagcaccagcgcctctcctcaaggggctttttcgctctccggctacaacagggttatgcgcgctgctgaggagaccacctcgaataacgtgtttccattcaaaataatacacataagcaagaagcatcggacctggtttttcagtgccagttccgaagaagaacgcaagtcctggatggctttactacggcgagagattggtcacttccacgaaaagaaggatcttccactggacaccagcgactccagctccgacactgactctttctacggcgctgtcgagcgcccagtggatataagcctgagtccttaccctaccgataatgaggactatgagcatgacgatgaggatgattcctacttagagcctgatagcccagagccgggtagattggaagacgcattgatgcatcctcctgcgtacccccctccccctgttcccactcccaggaagcccgctttttcagatatgccacgggctcacagcttcacaagtaaaggccctggaccgcttctgcctccccctccacccaaacatggcctgccagatgtgggtctggctgctgaagattcaaagagagatcccctctgtcctcgtagggcagaaccgtgtcctcgggtacccgcaacaccacggaggatgagtgaccctccattatccaccatgcctaccgcaccgggtttaagaaaaccaccatgctttagggagtccgcatcgcctagccctgaaccatggaccccagggcatggggcttgtagtacttcttctgcagccatcatggcaacagctactagcagaaactgcgataaactcaagtcatttcatctaagccctcgtgggcctcctacatcagagcctcctcccgtgcctgccaataaacccaagtttctgaagatcgcagaggaggaccctccgagggaggctgccatgccaggcttgtttgtaccccctgtcgcccctcgtcctccggctctgaagctccctgttcctgaggctatggctcgacctgcagttttacctcggcctgagaagccccagttaccccacctacagcgtagtccacccgacgggcagtcattccgttcgttttccttcgaaaagcccaggcagccctcccaggcggatacgggcggagacgatagtgacgaggactatgagaaggtgcctctccctaactccgtattcgtcaatacaaccgagagttgtgaggttgaaaggctgttcaaagccactagtcccaggggcgagccccaggacggcctatactgcattcgcaactcctcaaccaagagcggcaaggtgctcgtagtctgggatgaaacaagcaataaagtacgcaattatcggatttttgagaaggactccaaattttatctggaaggagaggtgctttttgtgtcggtcggatccatggtagaacattatcacactcatgtgctgcctagtcaccagtcacttctgttacgccacccatacggctatacaggaccaaggtag

SEQ ID NO: 240373 - DNA, 429 bp, synthetic construct
  misc_feature 1..429: note = Description of Artificial Sequence: Synthetic coding sequence
  source 1..429: mol_type = other DNA
atggccgcagaggaaatgcactggcctgtgccaatgaaagccatcggtgcacagaacctgttgactatgccaggaggtgttgctaaggctggctaccttcataaaaaaggcggtactcagctccaactgttgaaatggccgctgcgcttcgttataatccataaacgttgcgtttactacttcaaatctagcacaagtgcctcccctcagggcgcattttccctgtctggctataatcgcgttatgcgagccgcagaggagactacctctaacaacgtgtttccctttaagatcatacatatctctaaaaagcatcgtacctggttttttagcgcctctagtgaagaagagcgcaagtcatggatggctctgctgcgtcgcgagatcggccactttcatgagaagaaggatttaccgttagacacatag

SEQ ID NO: 240374 - DNA, 429 bp, synthetic construct
  misc_feature 1..429: note = Description of Artificial Sequence: Synthetic coding sequence
  source 1..429: mol_type = other DNA
atggctgcagaagagatgcactggcccgttccaatgaaagccatcggtgcacaaaacctcctgacaatgcctggaggtgtagccaaggcaggatacctgcacaagaagggaggaacgcaactccagttacttaaatggccactgagatttgtgattatacacaagagatgcgtctactacttcaagagttctacatctgcctccccccagggcgctttttcacttagcggttataatagggtgatgagagccgcagaagagaccacgtcgaacaacgtgttcccttttaagatcatacacatttcaaagaaacataggacctggtttttctccgccagctctgaggaggaaaggaagtcatggatggccttgctcaggagagaaattggacactttcacgagaaaaaagatctgccgcttgacacttag

SEQ ID NO: 240375 - DNA, 1857 bp, synthetic construct
  misc_feature 1..1857: note = Description of Artificial Sequence: Synthetic coding sequence
  source 1..1857: mol_type = other DNA
atggcaggctcaggaccacgacccagatcttggggccgaagagaggccggtgcaagggacgaagccgcagccgcaggcggtcgtggccctgggccatgtaggtgtagccaagggaggcgggcttggatcgcaccgggtaagcctgcaatgccagccgcttggacccccttcatggccgcagaggagatgcattggcccgtgcccatgaaagcgatcggcgctcaaaatttactcacaatgccaggtggagtggctaaagccggatacctccataaaaagggtggcacccagctgcagttactgaagtggccccttaggttcgtcatcatccataagcgttgcgtgtactactttaaatcttctaccagcgcatctccacagggagctttctccctgtccggttataacagagtaatgagggccgctgaggagacgaccagcaataacgttttcccttttaaaattatacacattagcaaaaaacatcgcacctggtttttttcagcttcttctgaggaagagcgaaaatcctggatggctctgttaagaagggagataggccactttcacgagaagaaggatcttcctctggatacgtctgatagctccagtgatacagattcattctacggagccgtagagcgcccagttgacatctctctgtctccatatccgacagacaatgaggactatgagcacgacgatgaagatgattcatacctggagcccgattcgccagagcccggacggctggaagacgcccttatgcacccacctgcatacccaccacctccagtgcccacccctcgcaaacctgcattttctgatatgcctagagcccattccttcaccagcaaggggcctgggccattactgcccccaccgccacctaaacacgggttacctgatgtggggcttgccgcagaagattccaagcgggatccactctgccccaggcgcgctgaaccttgcccgagggtccccgctacacccagaaggatgtctgaccccccactgagtactatgcctacggccccaggactgagaaaacctccctgcttcagagagtccgcaagtccatccccggaaccatggactcctggccacggggcttgctccacctcctcggcagctatcatggcaaccgccacgtcgcgaaattgtgataagctgaagagtttccatctctcccccagaggaccacccacaagcgaaccaccgcctgttccggcaaacaagccaaagtttctcaagattgctgaagaggaccccccaagggaggccgctatgcctggcctatttgtccctccggttgcccctcgcccaccggcactgaagttacctgtccctgaagccatggccaggccagccgtcctgcctcggccagagaaaccccagttgccacacctgcagcgtagccctcccgatggtcagtcttttaggtcattctcatttgagaaacctaggcagccaagtcaggccgacacaggaggcgatgattccgatgaggactacgaaaaagtgccattgcccaattcggtgtttgtcaacactacagaatcatgcgaagtggagcgactctttaaggccacctctcctaggggtgaaccacaggatggattgtactgcatccgcaattcttctaccaagagcggcaaggtactcgtggtctgggacgagacatcaaataaggttagaaactaccgaatttttgaaaaagatagcaaattctacctcgagggggaagttttattcgtaagcgtaggtagcatggtggagcattatcacacccatgtcttaccatcccaccagtccctcctccttcggcatccatacggctacactggtccacgttag

SEQ ID NO: 240376 - DNA, 519 bp, synthetic construct
  misc_feature 1..519: note = Description of Artificial Sequence: Synthetic coding sequence
  source 1..519: mol_type = other DNA
atggccgctgaggagatgcactggccggtacctatgaaggccatcggagcgcagaatctactcacaatgcccggaggtgttgccaaggctgggtatctccacaagaagggtggcacacagctgcagctgctgaagtggccgttgcgattcgtcatcattcataagagatgcgtctactactttaaaagttctactagtgcttctcctcagggcgctttttccctctctggatataaccgagtaatgagggccgcagaggaaaccacaagtaataatgttttcccctttaaaattatccacattagtaagaaacacagaacctggttctttagtgccagctccgaagaggaaaggaagagttggatggccctcctgcgcagagaaataggccacttccacgagaagaaggacttacctctcgacaccagtgactcttcttcagatacggattctttctacggcgctgtggagcgcccagtggatatcagcttatccccctacccaaccgacaacgagtag

SEQ ID NO: 240377 - DNA, 567 bp, synthetic construct
  misc_feature 1..567: note = Description of Artificial Sequence: Synthetic coding sequence
  source 1..567: mol_type = other DNA
atggccgcagaggagatgcactggccggtccctatgaaagccattggggctcagaatttgctgacaatgcctgggggtgtggcaaaggctggctacctgcataagaaggggggtacccagctgcagctgctgaagtggcctctgcgtttcgtgattatccataagcgatgcgtctactacttcaagagctctacctcagcctctccccagggtgccttctctctgtctggttacaaccgggtaatgagggcagccgaggagaccacttctaataatgtttttcccttcaagattatccacatcagtaagaaacatagaacctggtttttcagcgcctccagtgaagaggaacgaaagtcctggatggccctgttgcgtcgtgagattggacacttccacgaaaagaaggacctgcctctggacacatccgattctagctccgacactgattctttctatggggctgttgagagaccagttgatatttctttatcaccgtaccctaccgacaacgaggattacgagcatgatgacgaagatgactcatacttggaacccgacagctag

SEQ ID NO: 240378 - DNA, 1686 bp, synthetic construct
  misc_feature 1..1686: note = Description of Artificial Sequence: Synthetic coding sequence
  source 1..1686: mol_type = other DNA
atggccgctgaagaaatgcactggccggtgcctatgaaggcgattggtgcccagaatctcctgaccatgcctggtggggtggcaaaggcaggatacctgcacaagaagggcggaacacagctacagctgttaaaatggccccttcgctttgtcattattcacaagcgctgcgtatactacttcaaatcgagcacatctgccagcccacagggggcatttagcctgtctggctataacagggtcatgagggcggcagaggaaacgacatcgaacaatgtgtttccctttaaaattatacacatttctaagaagcatagaacctggttcttctctgctagctctgaagaggagcggaagtcatggatggccctgctacgacgcgaaatcggtcactttcatgaaaagaaggacctccctcttgatacttctgattctagttcggataccgactcgttttacggagctgtcgagaggccagtggatattagccttagcccctatcccacggacaacgaagactacgaacatgacgacgaagatgatagttatttggagcccgacagtcctgagcccggacgtctcgaggatgcgttaatgcacccccctgcctacccaccgccacccgtccctacaccaagaaaacccgctttcagtgacatgccaagagcccactcttttacaagtaaggggccaggtccccttttgcctcctcctcctcctaaacacggcctgccagacgttggactggccgctgaggatagcaagagagatccactgtgtcctaggagggcggaaccatgcccaagagtccctgcaactcctcgcaggatgagtgacccgcctttgtcgacaatgcccaccgcgccaggccttcggaagcccccatgcttccgggaaagcgccagcccctctcccgagccttggacacctgggcacggcgcatgctccacatcctccgccgctatcatggcaaccgccacgtctagaaattgcgataaactgaagtcattccatctgagtccaagaggccctcccacctctgagccacctcccgtgccggctaacaagcctaaattccttaagatagccgaggaagacccacctcgagaggcagcaatgcctggccttttcgtccccccagtcgcacccaggcccccagctctgaagctgccagttcctgaggcgatggcacggccagcggtcctgcctaggcctgagaagccccaactcccccaccttcagcgttccccgccagacgggcagtccttcagatcgttcagctttgagaaaccacgccaaccctctcaggctgatacagggggagatgatagcgatgaggattacgaaaaggttccgctgcccaactctgtgtttgttaacacaacagagagctgtgaagtggaaagattgttcaaggctacttctccgaggggcgaacctcaagacggattgtattgcatccgcaatagtagtacaaaatccgggaaagtcctggtagtgtgggacgagactagtaacaaggtgcgcaattacaggatttttgagaaggattccaagttctacttagagggagaggtgctctttgtatcagtcggatcaatggtcgagcactaccacacgcatgtactgccctcacatcagtcccttttactacggcacccgtatggatacacagggccacgatag

SEQ ID NO: 240379 - DNA, 585 bp, synthetic construct
  misc_feature 1..585: note = Description of Artificial Sequence: Synthetic coding sequence
  source 1..585: mol_type = other DNA
atggcagcagaggaaatgcactggccggtacctatgaaagctatcggggctcagaatctgctcacaatgcctggtggggtagccaaagctggttaccttcataagaaaggaggtacacagctgcagttgctgaaatggccactgcggttcgtcattatccacaaaaggtgcgtctactactttaaaagttccacctcagcatcaccacagggcgctttcagcctgagcggttacaatcgggtgatgcgtgccgctgaagagactacttcgaacaatgtattccccttcaagatcattcacatttccaagaagcacagaacctggttcttctccgcttccagcgaagaggagcgaaagtcctggatggccctgctgcgcagggagattggtcacttccatgaaaagaaagacctgcctttggacacgtccgacagttcctcggataccgacagtttttacggcgctgtggagcgaccagtcgatatttctctgtctccctaccccactgataatgaggactacgagcatgatgatgaggatgactcttatcttgagccagacagccctgaaccaggtcgcctgtag

SEQ ID NO: 240380 - DNA, 411 bp, synthetic construct
  misc_feature 1..411: note = Description of Artificial Sequence: Synthetic coding sequence
  source 1..411: mol_type = other DNA
atggcagctgaggaaatgcactggccggtgccgatgaaggccatcggggctcagaacttgttgactatgccgggaggggtagctaaggcagggtatctgcacaagaaggggggaacacagcttcaactgctgaagtggcctctgcggttcgtgatcattcacaagagatgcgtttattacttcaagtcatcaactagtgcatcaccacaaggggctttcagcctgagtggatataaccgcgtgatgagagctgccgaggaaaccacgtcaaataatgtttttccgtttaagatcattcacataagcaaaaagcaccgcacatggttctttagtgctagcagcgaagaagaacgtaagagctggatggccctcctacggagggaaataggccacttccatgagaaaaagtag

SEQ ID NO: 240381 - DNA, 2892 bp, synthetic construct
  misc_feature 1..2892: note = Description of Artificial Sequence: Synthetic coding sequence
  source 1..2892: mol_type = other DNA
atggccgctcagcggattagagctgccaatagtaacggtctacccagatgcaagtcagaaggaaccctcatcgacctgagcgagggcttctcagagacgtcctttaacgacatcaaagtgccatctcctagcgctctgctcgtcgacaaccctacgccattcggcaacgccaaagaggtaatcgctattaaggattattgcccaacaaacttcacaacactcaagttttccaaaggcgaccacctgtacgtcttggacacttccgggggtgagtggtggtacgcccacaacaccactgaaatgggatacatcccttcctcatacgttcagccactgaattaccgcaactccaccctctccgactcaggtatgattgataatctgcccgattcccctgatgaagtggctaaggaactggaactcctgggagggtggacggacgacaaaaaggttcccggacggatgtactctaataacccgttttggaacggagtccaaaccaatccctttttaaacggaaacgtacccgtgatgccctctttggacgagttaaatcccaaatctacggtggacctgcttttgttcgatgccggtacttcttcattcactgaatcttcttccgcaaccaccaacagcactggcaatatctttgacgaactgccggttacgaacggattacacgctgaacctcctgtgcgtcgcgacaatccctttttccgttctaagcgctcgtactcgttatccgaactgagcgtgcttcaggccaagtctgacgcacctacaagctcatccttcttcaccgggctgaagtccccagcgccagaacagttccagtcgagggaggactttcggaccgcgtggttgaatcacaggaaactcgctagaagctgtcacgacctcgatctgttgggacagtcccctggctggggccaaacgcaagctgtggagactaatatcgtatgtaaattagatagctccggtggggctgtacaactgcctgataccagcatttccatccatgtgcccgagggccacgtggcacccggtgagacacaacagatctctatgaaggccttactggaccccccacttgagcttaactctgacaggtcctgtagtatcagtccggtgctcgaagtaaagttgtcaaatctagaggtgaagacttcaatcatactggaaatgaaggtcagcgcggagattaaaaatgacctgttctccaaaagcacggtgggccttcagtgtctgcgatccgactcaaaggaaggcccttatgtgtctgttcctctgaattgttcatgcggcgacacagtgcaggcccagttgcataacctcgagccctgtatgtacgtcgcagtggtggcccacggcccaagcatcctgtacccttccaccgtgtgggattttatcaataaaaaagtgacagttggactgtatggacccaaacacatccaccctagcttcaaaacggtagttaccatctttggtcacgactgcgcaccgaagactttgctggtgtcagaggtaacccgccaggccccaaaccctgcgccagtggccctacagctttggggtaaacaccagttcgtcttatccagaccacaggatcttaaggtttgcatgttctcaaacatgaccaactacgaggtgaaggcaagcgagcaagcgaaagtcgtgaggggatttcagcttaagttagggaaggtctcccggctgattttccctataacaagccaaaaccctaacgaactttcagacttcaccctgcgagttcaggtaaaggacgaccaggaggcgatcctcacccagttctgtgtgcagactccccagcctcctcctaaaagtgcaataaagcccagcgggcagaggaggtttctcaagaagaatgaagtgggaaaaattatcctttccccttttgcaaccacaaccaagtaccctacatttcaggaccggcctgtgtccagtctcaaattcgggaagcttctaaagaccgtggtgcgtcagaacaagaatcattatctattggaatacaagaaaggggacggtatcgcactgctcagcgaggaacgagtgcgcctgagggggcagttatggacgaaggagtggtatatcggctattatcagggcagggtggggcttgtgcataccaaaaacgtgctggtggtcgggcgagccaggcccagtctttgctcaggacctgagttgtccactagcgtgcttttggagcagattttgcggccttgtaagtttcttacatatatctatgcctctgtccgtaccctcctcatggagaacatctctagttggcggtcatttgctgacgctctcggctatgtcaatctgcccttgacattcttctgtagggccgagctggactccgaacctgagagggtcgcctcggtgcttgagaagctcaaagaggattgtaataatacggagaacaaggagcggaagtcttttcagaaagagttggtcatggccctcctgaagatggattgtcaaggcctcgttgtgcggctgatccaggactttgtacttttgaccacggccgtggaggtcgcccagcgatggagagagcttgccgaaaagctggctaaagtaagcaagcagcaaatggatgcctatgagtcaccccacagggacaggaatggggtagtggattccgaagctatgtggaaaccagcttacgacttcctgctgacctggagtcaccagattggggacagctacagagatgtaatacaagaactccacctgggattagacaaaatgaaaaaccctattacaaagcgatggaaacacctgaccgggactctcattttggtaaactccctggatgtgctcagagccgcagctttctcacctgccgaccaggacgatttcgtaatttag

SEQ ID NO: 240382 - DNA, 2892 bp, synthetic construct
  misc_feature 1..2892: note = Description of Artificial Sequence: Synthetic coding sequence
  source 1..2892: mol_type = other DNA
atggccgctcagagaatccgcgctgcaaactccaatggtctccctagatgtaagtctgaagggacactcatcgatctttccgaggggttctcagagacttcctttaatgatattaaggtcccctcccccagtgcgctgctggtagacaatcccacgcccttcggcaatgctaaagaggtcatcgccataaaggactactgccctactaactttaccactctgaagttttccaagggagatcatttgtacgttcttgatacgtcgggaggagagtggtggtatgctcataacactaccgagatgggatatataccatcttcttacgttcagcctctgaattaccggaattccacactaagcgatagcggcatgattgacaacctccccgattctccggacgaggtggcaaaggagctcgaactgctgggaggctggactgacgataagaaggtacctggacggatgtactctaataatccattctggaacggtgtgcagactaacccattcctgaatggaaatgttccagtgatgccttcgctggatgaactcaatcccaagtccacagttgatttgctgcttttcgatgctggcacatcctcctttactgaatcttcgtctgccacgaccaactctacgggcaatatttttgacgagctccccgtgacgaatggtttacatgctgagccccctgttcgcagagataatccgttctttcggtccaaacgcagctactcattgagcgaactgtctgtgctccaggctaaatccgatgcaccgacatcatctagctttttcactgggctgaagagtccggcacccgagcagttccagtcaagggaagattttcgtactgcatggctgaatcataggaagttggccagaagctgccacgacctggaccttctggggcagagtccaggttggggacagactcaagcggtggagaccaacatcgtgtgcaagctagactcaagtggaggcgctgttcagctgccggatactagcatcagcatccatgtgcccgagggacatgtggcacccggtgagactcagcagatatcaatgaaggctctgctggaccctccccttgaacttaactccgaccgatcatgttcaattagtccagtgctggaggtgaaactgagcaatctggaagtcaaaacctcgataattctggaaatgaaagtttccgcagagatcaagaacgacttgttttcaaagtcaaccgtcggactacaatgtctgcgctcagactccaaggaaggtccgtacgtttcagtgccactgaattgctcctgcggcgatacggtgcaggcacaactgcataacctggagccgtgtatgtacgtggctgtggtcgctcacggcccatcaatcctgtacccctctacggtgtgggactttattaacaagaaggtgactgtagggctctatggcccaaagcacatacatccctccttcaagactgtggtgacaatttttggacatgattgcgcacctaaaactctgttggtgtctgaagtgacaaggcaggccccaaatcccgcaccggtagcactgcaactgtggggcaagcaccagttcgtgttatctcgaccacaggacctcaaagtttgtatgtttagtaatatgaccaattatgaggtgaaagccagtgaacaggccaaagttgtgcgtggcttccagctgaagctggggaaggtctcgcgcctgatcttccccattacaagccagaacccaaatgagctttccgatttcaccctgagagtccaggtaaaagatgaccaggaggcaatccttacccagttctgcgtgcagacaccccaaccacccccaaaaagtgccataaaaccctccggacagcgcagattcctgaaaaagaacgaagttggtaagatcatcctaagcccattcgccactactactaaatatccaacattccaagataggcctgtgtcgtcattgaaatttggaaagctgctcaagactgtcgtacggcagaacaagaaccattacctgttggaatataaaaagggtgatgggatagccttactctctgaggaacgtgtccgcctgcgcggacagctctggaccaaagaatggtacataggctactaccagggccgagtgggtctggttcacaccaagaacgtcctggtcgtggggagagctcggccttcactgtgtagcggacccgagttgagtacatctgtgctgctggagcagattctgaggccttgtaaatttttgacatatatctacgcaagcgtgcgcacccttctgatggaaaatattagttcttggaggagctttgctgatgcgctgggctacgtgaacctccctctgaccttcttctgccgggcagagctggattccgaacctgagagggtcgcctctgtgttggaaaaactcaaagaggactgcaataataccgaaaacaaggagcggaaatccttccagaaagaattggttatggccttactgaagatggattgtcaagggcttgtcgttcgcctcattcaggactttgtcttgctgacgacggccgtcgaagtggcccaaagatggcgtgagctggcagaaaagcttgccaaagtgtccaaacagcagatggatgcctatgaatctcctcacagggacagaaacggcgtagtggactctgaggccatgtggaagccagcatacgacttcctgctgacatggagccatcagattggagatagttacagggacgtgatccaggaactccatcttggtctggataagatgaaaaatcctatcacaaagcgctggaaacatctaaccggcaccctgatcctcgtgaattccctggatgtgctgcgagctgccgcattctctcccgcagaccaagacgatttcgtgatttag

SEQ ID NO: 240383 - DNA, 2892 bp, synthetic construct
  misc_feature 1..2892: note = Description of Artificial Sequence: Synthetic coding sequence
  source 1..2892: mol_type = other DNA
atggcagcccagcggatcagagccgcaaatagcaacggactgcctcggtgtaagagtgaagggacactgatagatctgagtgagggcttctccgaaacctccttcaatgacataaaagttccctccccgagcgctctcttagtggataatcccactcctttcggaaacgccaaagaggtgatcgcaataaaggattactgccctaccaactttaccacgctaaaatttagcaagggggaccatttatacgtcttggataccagcggtggtgagtggtggtacgctcataacacgaccgaaatgggttatatcccctcctcttatgtccaaccattgaactaccggaatagtaccctgagcgatagcggaatgattgacaatttgcccgacagtcctgatgaggtggccaaggagttagaactgcttggcggatggaccgacgataagaaagtaccaggacgtatgtatagtaataatccattctggaatggcgtccagaccaaccccttcctaaacgggaatgtccccgtgatgccctcgcttgacgagctgaaccccaagagtactgttgatttattgctgtttgacgctggtacctcctcctttaccgagtcaagcagtgcaacaaccaatagcacaggaaatatctttgatgagctgcccgtaaccaatggattgcatgctgaaccaccggtaaggcgggataacccatttttcaggagcaagagaagctattctctcagcgaattgagcgtcctgcaggcaaaaagcgacgctccaacaagttcctcattttttaccggacttaagtccccggctcctgagcagtttcagtccagggaggattttaggacagcgtggctcaaccaccgaaagctggctcgctcatgccacgacctcgatctgctcggacagtcccctggctggggacagacacaggctgtggaaactaatattgtgtgtaaactggattcctctggaggcgctgtacaactccctgatacgtcaatctcaattcatgtgccagagggacacgttgcccctggtgaaacccagcagattagcatgaaggccctccttgatcccccacttgaactgaattcagatcgcagctgctcaatttctcctgtgcttgaagtgaagctcagtaatctggaggtgaagactagcatcatactcgagatgaaagtatcagcagagataaagaacgatctcttcagcaaatcaactgttggtctccagtgccttaggagcgacagcaaggaagggccttatgttagcgtgccgctgaactgctcgtgtggagatactgtacaagcgcaacttcacaacctggagccatgtatgtatgtggcagtagttgcccacggaccctccatcctgtatcccagcacagtatgggatttcatcaataagaaagtgaccgtgggactgtatggccctaagcatatccatcctagctttaagaccgtggtgaccatttttggacacgactgcgcccctaaaactttactcgtgtccgaagtcacacgacaggccccaaatccagctcccgtggctctacagctgtggggaaagcaccagtttgtgttatcacgcccacaggatctgaaagtgtgtatgttttcgaatatgacaaattatgaggtgaaagcaagtgagcaagctaaagtcgttaggggtttccagctgaagctcggtaaagtttcacgtctcatattccccatcactagtcagaatcctaacgaactgtctgatttcacactgcgggttcaggtgaaggacgaccaggaagccatactgacgcagttttgtgtgcaaacaccccagccaccccctaaatcagcgatcaaaccgtctgggcaaaggcggtttctgaagaagaacgaagtgggtaaaattatcctctcccctttcgcaactaccacaaaatatccgacctttcaggaccgtcccgtgtcaagcctaaaatttggcaaacttcttaagaccgtggtgagacagaacaagaaccactatctccttgagtataaaaagggtgacgggatagcactgctctcagaggagcgggtgcggttacgcggtcagctctggacaaaggagtggtatattggatactatcagggacgagttggccttgtccatacaaaaaatgtgctagtggtcggcagagctagaccttctctgtgctccggtcccgaactttctactagtgtactattggagcagatcctgcggccatgcaaattcttgacctatatatatgcctctgtgaggacactgctgatggaaaatatctcatcatggcggagcttcgccgatgcactcggctacgtaaacctgcctctgacttttttttgccgtgccgagcttgattcggagcccgaacgagttgcaagtgtgttggagaagctgaaagaggattgtaataatactgagaataaagaacggaaaagcttccaaaaggagctggtaatggcccttcttaagatggactgtcagggtctggttgtgcgcctgatccaagactttgtgctcctgacaaccgcggtggaagtcgcccagagatggcgtgaattggctgaaaagctcgccaaggtttccaagcagcagatggatgcgtacgagagtccccatcgcgacagaaatggagtcgtcgattcagaggctatgtggaaacctgcgtatgactttctcctcacctggagccatcagatcggtgactcatacagagacgtgatccaggagctgcatctgggcttagacaaaatgaagaatccaatcactaaacgctggaagcacctgacagggactctgatccttgtaaattctcttgatgtccttcgcgctgcagcattctctcccgctgaccaggatgatttcgttatttag

SEQ ID NO: 240384 - DNA, 369 bp, synthetic construct
  misc_feature 1..369: note = Description of Artificial Sequence: Synthetic coding sequence
  source 1..369: mol_type = other DNA
atggctgcgcagcgcatccgggctgcaaactcaaacgggctgccacgctgtaaaagtgagggcactctgattgatctctccgaggggttctcagagaccagtttcaatgacatcaaggtgcccagcccatcggcacttctggttgataatccaacgccgtttggcaatgcaaaggaggtgatagcaataaaagactactgccccaccaacttcaccacactaaagttcagtaaaggcgaccacctctacgttctggacacatccgggggtgaatggtggtatgcccacaacaccactgaaatggggtacataccaagctcatacgtccagccattaaattataggaactctacactgtcggattcatag

SEQ ID NO: 240385 - DNA, 1662 bp, synthetic construct
  misc_feature 1..1662: note = Description of Artificial Sequence: Synthetic coding sequence
  source 1..1662: mol_type = other DNA
atggctgctcaaaggatccgagccgctaattctaatgggctgcccaggtgcaagtcagaaggaactttgattgacctgtcagaaggcttctctgaaacatcctttaatgacattaaggtaccctccccgtccgccctgctggtggataatccgacacctttcgggaatgcgaaagaggtcattgcaataaaggattactgtcctacaaattttaccaccctcaaattttccaaaggagatcacttgtacgtccttgacacttccggtggcgaatggtggtacgcccataacaccaccgaaatggggtacatcccctcatcttacgtacagcctctgaactatcggaattctacgttgagtgatagcggcatgattgacaacttgccggactccccggacgaagtggccaaagaactagaactgctgggtggttggaccgacgacaagaaagttccaggccgaatgtatagtaacaatcctttctggaatggtgttcagactaatcctttccttaatgggaacgtccccgttatgccatctctggacgagttgaacccaaagtcgacagtcgacttgctgttatttgatgccggtactagcagcttcacagagtcttcgtccgcaaccactaacagtacagggaacatttttgacgagttgcctgtgactaacggcttacatgcagagcccccagtgagacgtgacaaccccttttttcggtccaaaagatcttactccctctccgaactgagtgtgctccaggctaagagtgacgctcccacttcctccagcttctttaccggtctaaaaagccctgcgcctgaacagtttcagtctcgcgaagactttcgcactgcttggctgaatcaccgcaaactcgccagaagctgtcacgacctagatctgctggggcagagtcccggatggggccagacccaagccgtggaaacgaacatcgtctgcaaattggactcctccgggggagcagttcagctgccagatacaagcatcagtatccacgttccagaaggacatgtagcacctggtgaaacccagcagatttccatgaaagctttgctggaccctcccctggagctgaatagtgaccgcagctgctcgatcagccccgtgctggaggtgaagctgagtaatctggaagttaagacatctattattcttgaaatgaaggtctccgccgaaattaagaatgatctgttttcgaagtctactgtgggtttgcagtgtctgcggtcagactcaaaggaaggaccctacgtgagcgtccctctgaattgttcttgcggggatactgtacaggcccagcttcacaatctggagccatgtatgtacgtcgccgtggtggctcatggcccaagcattctgtacccttcaaccgtttgggacttcatcaacaaaaaggtcaccgtggggctgtacggtcctaagcatatccatccttcatttaagacagttgttacaatctttggtcacgactgtgcaccaaaaacgttactagttagcgaggtgacgcgccaggccccaaacccgcctattaccaaacgatggaaacacctgaccggcacactgatcctcgtaaattcactggacgtcctgcgggctgcggcttttagccctgcggaccaggatgattttgtgatatag

SEQ ID NO: 240386 - DNA, 171 bp, synthetic construct
  misc_feature 1..171: note = Description of Artificial Sequence: Synthetic coding sequence
  source 1..171: mol_type = other DNA
atggccgctcaaaggattcgggcagcgaactccaacggccttccgagatgcaagtctgaggggactctgatagacttatctgagggcttttcagagacttccttcaacgacattaaggtgccatctccttctgcgcttttggttgacaatccgacacccttcgggaactag

SEQ ID NO: 240387 - DNA, 522 bp, synthetic construct
  misc_feature 1..522: note = Description of Artificial Sequence: Synthetic coding sequence
  source 1..522: mol_type = other DNA
atggccgcacaacgaatcagagctgcaaattctaatggcctgccacgctgcaaatcagaaggcacccttatcgatttatctgagggtttcagtgagacatcattcaacgatatcaaggtgcccagccccagcgcgctccttgtagataaccctactccatttggaaatgccaaagaggtaatcgccatcaaggactactgcccgaccaacttcacgacactcaagttttcaaagggcgatcacctgtacgtgctagacacttcggggggtgagtggtggtacgcccacaatacaaccgagatgggctatatcccgtctagttacgtgcagccacttaactatcgcaatagcaccctgtcagactccggaatgatcgataacctccctgacagcccggatgaagtggcgaaggagttagagctgctaggaggatggaccgacgataagaaggtcccaggtagaatgtactcgaataacccattctggaatggcgttcaaacaaaccctttcttaaacggatag

SEQ ID NO: 240388 - DNA, 174 bp, synthetic construct
  misc_feature 1..174: note = Description of Artificial Sequence: Synthetic coding sequence
  source 1..174: mol_type = other DNA
atggctgcccagcgcattcgcgctgcaaatagcaacgggctgccacggtgtaagagtgaggggacgctgattgatctgtcagaggggtttagcgaaacaagcttcaacgacattaaggttcccagcccaagcgctctgctggtcgacaatccaacgccatttgggaacgcctag

SEQ ID NO: 240389 - DNA, 606 bp, synthetic construct
  misc_feature 1..606: note = Description of Artificial Sequence: Synthetic coding sequence
  source 1..606: mol_type = other DNA
atggagaatatcagcagctggaggtcattcgctgacgccctgggttacgtcaatctacctctgacttttttctgtcgagctgagctggattcagagcccgagcgagtcgcttccgtgctggagaagctgaaggaggactgcaataacaccgagaataaagagcggaagtcattccagaaggagctcgtgatggctctgcttaaaatggactgtcagggccttgtggtgagattgattcaggatttcgtgcttttaactacagccgtcgaggttgcccagaggtggagagaactggcagagaagctcgccaaagtgtcgaagcagcaaatggatgcttacgagagccctcatagagacagaaatggcgtcgtcgacagcgaggctatgtggaagcccgcttacgattttcttctgacctggtcgcatcagatcggagactcctatagggacgtcatccaggagctccatctgggcttggacaaaatgaagaaccctataaccaagagatggaaacacctcaccgggactttgattctggtgaatagcctggacgtgctgcgggctgccgcattctcaccagcagatcaggacgattttgtcatctag

SEQ ID NO: 240390 - DNA, 897 bp, synthetic construct
  misc_feature 1..897: note = Description of Artificial Sequence: Synthetic coding sequence
  source 1..897: mol_type = other DNA
atgctgaaccacgccactcagcgcgtgatggaggccgaacaaactaagacccgcagcgaactggtgcataaggagaccgcagccagatataacgccgcaatgggacggatgagacaactcgagaagaagttgaagagagcaataaataagtccaagccatacttcgaattaaaagcaaagtactacgtgcagctcgagcagctgaaaaagactgtggatgatctgcaggcgaaactcactttggctaagggagagtacaagatggctcttaagaacctcgagatgatctcagatgaaattcacgaacgtaggcggtcctctgctatgggccctagaggctgcggtgttggggcagaaggatctagtacctccgtggaggacctacccggttccaagcctgaaccagatgcaatcagcgtcgcgagcgaggctttcgaagatgactcatgcagcaatttcgtatccgaagacgatagtgagacccaaagcgtgtccagtttctccagcggacccacaagcccgtctgaaatgccggaccagtttccagctgtggtccgcccaggcagcctcgatcttcccagtccggtttctctctccgagtttggtatgatgttccccgtgctcggcccacgcagcgaatgctcgggagcaagctctcccgagtgtgaggtagaaagaggggaccgggcagagggagctgagaacaaaacgtcagacaaagctaataataatagaggcctgagttccagcagtggttccggcggttcctcgaagtcacaatccagcacgtctcctgaggggcaggcgctggagaacagaatgaagcagcttagtctgcagtgcagtaaaggcagagacggcatcatcgccgatattaaaatggtgcaaatcggctag

SEQ ID NO: 240391 - DNA, 387 bp, synthetic construct
  misc_feature 1..387: note = Description of Artificial Sequence: Synthetic coding sequence
  source 1..387: mol_type = other DNA
atgctgaaccatgcgactcagcgcgtgatggaagccgagcagacaaagacaagatcggagctggtgcacaaggaaactgctgctcggtacaacgccgcaatgggacggatgagacagctcgagaaaaaacttaaacgggcaatcaataaatctaagccttactttgagctgaaggctaaatactacgtccagctggagcagctcaagaaaacggtagacgatctccaagctaaattgactcttgccaagggagaatataagatggcactaaaaaaccttgagatgatcagcgacgagattcatgagaggcgccgatcaagtgctatggggccacggggatgcggtgtgggtgcagagggtagcagtacttccgtcgaggatctgtag

SEQ ID NO: 240392 - DNA, 1368 bp, synthetic construct
  misc_feature 1..1368: note = Description of Artificial Sequence: Synthetic coding sequence
  source 1..1368: mol_type = other DNA
atggatgccgctctaaagcgatcccgttctgaagaaccagcagagatcctcccccctgctagagatgaggaagaggaagaagaagagggaatggaacagggcctggaggaggaggaggaagtggaccctagaatccagggcgaattggagaaactcaatcagtcaactgacgacattaatcgtagagagacagagctcgaggacgcaaggcagaagtttcgcagcgtgttggtggaggcaacagtcaaacttgatgagctagtcaagaagatcggcaaggctgtggaagacagcaaaccatactgggaggcacgaagagttgctaggcaggctcagctcgaggctcaaaaagccacccaagatttccaaagagctaccgaagtgctacgagcagccaaggagacaattagcctggcagagcagcgactgcttgaggacgataaacgacagttcgactcagcatggcaggaaatgctcaaccatgcgacacagcgagtgatggaggctgagcagaccaaaacacgttcggagctcgttcacaaagaaaccgccgcacgctacaatgccgcaatgggtcgaatgcggcaactagagaaaaagctgaaacgggctatcaacaaatctaaaccttattttgaacttaaggctaaatattatgttcagctcgaacagcttaaaaaaaccgtggacgatctgcaggccaagttgacattggctaaaggcgagtataagatggctcttaagaatttagagatgatctccgacgagatccatgagagacgaaggtctagtgccatgggtccacgcggttgcggagtcggagccgaaggttcttccacgtcggtggaggacctgcccggaagcaaacctgaacctgacgccatttcggtggcatcagaggcctttgaagacgactcgtgttctaacttcgtgtctgaggacgactctgagacacagagcgtgagcagcttttctagcggtccaacctcaccttcagagatgcctgatcagtttcctgccgtggtccggcctgggtccttggacctgccatcacccgtgtcactaagtgagttcggcatgatgtttcccgttctaggtcccaggtcagaatgcagcggagcttctagcccggagtgcgaggtcgaaagaggagaccgggctgagggtgcagagaacaaaacatcagataaggcaaataacaatagaggactgtcttccagtagcggttcaggtggctcgtctaaaagccaatccagcacatcccccgaaggacaagccctggaaaaccggatgaaacaactgtcactgcagtgcagcaaaggaagggatgggatcatcgccgacattaagatggttcagatcggatag

SEQ ID NO: 240393 - DNA, 897 bp, synthetic construct
  misc_feature 1..897: note = Description of Artificial Sequence: Synthetic coding sequence
  source 1..897: mol_type = other DNA
atgcttaaccacgccacccagcgtgttatggaggcagaacaaactaaaacacgcagtgagttagttcacaaggaaactgctgcgagatacaatgccgctatggggaggatgcgtcagcttgaaaaaaaactaaaaagggccatcaacaaatcaaaaccctacttcgagctcaaggccaaatactacgtgcaattagagcagctcaaaaagacggtggacgatctacaggccaaacttacactggccaagggagagtacaagatggctctgaagaatctagagatgataagtgacgagatccatgagaggcgtcggtccagcgctatgggcccacgcggatgtggtgtcggggctgagggctcatctacctctgtcgaggacctgcccggatccaagcctgaacccgacgccatctcggtggccagcgaggcatttgaggatgattcttgttcgaatttcgtgagtgaggacgatagcgaaacacagtctgtgagctctttttcctctggaccaacgagcccgtcggagatgcccgaccagttcccagctgtcgtacggccaggcagcctggatctaccaagtcctgttagcctcagtgaatttggaatgatgtttccagtgttgggtccaagatccgaatgttccggagcgtcctcgcccgagtgtgaggtcgaacgcggagacagagctgaaggagccgaaaataagacttcagacaaagccaataacaacaggggactgagctcatcgtccggttccggtgggtcttctaaatcacagagcagtacatctcctgaggggcaggccctagagaatcgaatgaagcagttgtctctccagtgtagcaagggccgagacgggattatcgctgatattaaaatggtacagatcggatag

SEQ ID NO: 240394 - DNA, 156 bp, synthetic construct
  misc_feature 1..156: note = Description of Artificial Sequence: Synthetic coding sequence
  source 1..156: mol_type = other DNA
atgctaaatcatgcgacgcagagagtcatggaggctgagcagaccaagacacggtcggagctggtgcataaagaaacagcagctcggtacaacgctgcaatgggaagaatgcgacagcttgaaaagaaactgaaaagggccatcaataaatcttag

SEQ ID NO: 240395 - DNA, 897 bp, synthetic construct
  misc_feature 1..897: note = Description of Artificial Sequence: Synthetic coding sequence
  source 1..897: mol_type = other DNA
atgctcaatcatgctacacaacgggtcatggaggccgaacagaccaaaacacgttcagaactggtgcacaaggagaccgccgcaaggtataatgctgcaatgggcaggatgagacaattggagaagaagctgaaaagggctattaacaaatctaagccatacttcgaactcaaagcgaaatactatgtccagttagaacaattgaagaaaacagtcgacgacctccaggccaaactgacccttgctaagggagaatacaagatggcactgaaaaacctagagatgatttctgacgagattcacgagaggcgacggagcagcgccatgggtccacgagggtgcggagtgggtgcagagggatccagtacatcagtggaggatctgccaggatccaaacccgagccagatgcgatctctgtggcctccgaggcatttgaggacgactcatgcagtaactttgtctccgaagatgactcagagacacagagtgtcagcagtttttcatctggccctacatctccctccgaaatgcctgaccagtttccagctgtggttagacctggctcactggacctcccgtcacccgtgtctctgagtgaatttggcatgatgtttcctgtgctgggccctcggtctgagtgtagcggagcgagctccccagaatgcgaggttgaacggggtgaccgggcagaaggagcagaaaacaagacctccgataaggcaaataacaaccggggacttagcagttcatccggcagcggtggcagttctaagtctcagagctcaacgtcccctgaggggcaggccctggaaaatcggatgaagcaactgtcactccagtgctcgaaaggacgggatggcattatcgcagatattaaaatggtccagatagggtag

SEQ ID NO: 240396 - DNA, 2580 bp, synthetic construct
  misc_feature 1..2580: note = Description of Artificial Sequence: Synthetic coding sequence
  source 1..2580: mol_type = other DNA
atgatggaaggcctcaaaaaacgaactcgcaaggcctttggaatacgaaaaaaggaaaaagacaccgacagtaccggctcccctgaccgcgatggtatccaggggaaaaagaagactcagaagacacaacttctgctaacctcttgcttctggctgagggctctttctcttaccctctctcaaaaaaagagcaatggcgctccgaatggattttacgcagagatcgactgggaacggtataactccccagagctggatgaggagggatacagcatcaggcccgaggagcccggatctaccaaaggaaaacatttctactctagctctgaaagcgaggaggaagaagaatctcacaagaaatttaatatcaaaattaagccactgcagagcaaggacatcttgaaaaacgccgcaacagtggatgagctcaaggcttctatcgggaacatcgccctcagcccctctccggttcgcaaaagtccccgaaggtcacccggagccatcaagcggaacctgtcaagtgaggaggtggcaaggcctcgtaggagtacccccacccccgaactcatctccaaaaagcctcccgacgataccactgcgctagctccactgtttggccctcctctggagagcgccttcgacgagcagaagaccgaggtcctgcttgatcaacctgagatttggggatccggtcagcccatcaatccgtcaatggagtctcccaagctcaccagacccttcccaaccggcacgccacccccactcccacccaagaatgtgcccgcaacaccacccaggacgggatccccacttacgatagggcctgggaacgaccaatcggcaaccgaggtcaaaatcgagaagctccccagcatcaacgatctggacagtatcttcggacctgtgctgagcccgaagagcgttgccgtgaacgctgaagagaaatgggtccactttagcgatactagcccagagcacgtcacccctgagctgactccaagggaaaaggttgtatcgccccctgctacccctgataaccccgctgattctccggcaccgggtccactcggtccgcctggtccaacagggcctcctggaccacccggaccaccccgtaacgtcctctctcccctcaatcttgaagaggtgcagaagaaggttgccgagcagacctttatcaaggacgactacttggagacaatttccagccctaaggatttcgggctcggccagcgggcaacaccacctcctccccctcctccgacttaccggacagtagtcagtagccccggacccggatccggaccaggtcctggaaccacctccgatggaaaaaccgaggcccagcgatatcaagtcatctgtccaagcttgcaggcagggggtaacgagctcgattcatacagtggcgcatcctcccccgctcgacctgcgacaccccttgtaccctgtcggtctacaactcctcctccgcctccccctaggcccccatctcgaccaaaactgcctccaggcaagccaggggtaggggatgtgtctaggccattctcccctcctatccacagtagctcccctccaccaatcgctcccctggctcgcgctgagtccacaagttccatatcttcaacaaattctctgtcagcggcaacaacccccactgtggaaaatgagcagccatccctcgtgtggttcgatagaggaaagttctatcttacgttcgaaggctcctcccgaggtccaagccccctcactatgggcgcacaggatacactacccgtggccgcagcatttaccgaaactgtgaacgcctattttaaaggggctgacccttctaagtgtatcgtgaagattaccggcgagatggtactgagctttcctgcaggcattacccggcactttgccaataatccatctcccgcagctttaaccttccgggtcattaatttttctaggctcgagcacgtcctgcctaaccctcaattgctgtgctgcgacaacacacagaacgatgccaacacaaaggagttttgggtcaacatgccaaatctaatgacccacctcaagaaagttagtgagcagaagccacaggctacctattataatgtcgatatgctgaagtaccaggtgtctgctcaaggaatccaaagcacgcctttaaatctcgcagttaattggagatgtgaaccctcttccaccgaccttcgcatagattacaagtacaacaccgacgcgatgaccaccgccgtggcactgaataatgtccagtttcttgttcctattgacggaggagtgactaaactccaggcagttctgcctccagccgtgtggaacgcagaacagcagaggattctatggaagatccctgacataagccagaagtctgagaatggaggcgttggatcactcctcgcacggtttcagctgtccgaaggcccttctaagccttctcctcttgttgtgcaatttacaagcgaggggagcacactttctggctgtgatattgagctggtgggtgctggttaccgcttctccctcataaaaaaaagattcgcagcgggaaagtacttggccgacaattag

SEQ ID NO: 240397 - DNA, 1857 bp, synthetic construct
  misc_feature 1..1857: note = Description of Artificial Sequence: Synthetic coding sequence
  source 1..1857: mol_type = other DNA
atgatggagggtcttaaaaagcgaactcgtaaggcatttgggatccggaagaaggaaaaggatacagacagcacgggctctcctgacagagacggcattaattctcccgaactcgacgaagaggggtactctattaggccagaagagcccggatccacgaagggaaaacatttctactctagctccgaatcagaggaagaggaggaaagtcataaaaagtttaatattaaaattaagccgctgcagagtaaggacattctgaagaacgctgcaacggtggacgagctcaaggcaagcataggtaacattgcgctgagccctagtcccgtgcgcaagtccccacgccgttcgccgggtgccataaaacgaaatctgtcctccgaggaagtggcacgtcctaggcgctccactccaactcccgagctcatctccaagaaacctcccgacgatactaccgcattggcaccactttttgggcctccactagagtccgccttcgatgaacagaagaccgaggtcctgctggatcagcctgaaatttggggatccggacagcccattaacccatcaatggaatcaccaaaattgacacggcctttcccaaccggcactcctccaccgctgccccctaagaacgtcccggcaactcccccacggacaggatcccctctgactatcggccctggtgctagcagcccagcacgtccagccacgccacttgtgccctgccggagtactactcctcccccaccgccacccagaccaccaagcaggcccaagctgccccctgggaaacccggagtcggggacgtttccagacccttttctccccctatacattccagctctccaccgcctatcgccccactggcgagagcggagtcaacgagctctatatcctctaccaactcactgtccgcagcaacgactcccacagtggagaatgagcaaccttcgttggtctggtttgaccggggaaagttttacttgaccttcgagggttcttcacggggaccatctcctctcactatgggagctcaggacactctcccagtcgcagcagctttcactgagacagtcaatgcctatttcaaaggggcagatcctagcaagtgtatcgtcaagatcacgggcgaaatggtcctgagctttcctgcaggcatcactaggcactttgccaataatccctccccggcagcactgacttttcgcgtgattaacttctcccgacttgaacatgtgttgcctaacccgcagttgctgtgctgtgataacacccagaatgatgccaacactaaggagttctgggtgaatatgccaaacctaatgacccacctaaagaaggtgagcgagcagaagccccaggctacatactacaatgtggacatgctgaagtatcaggtgtctgcccagggaatacagtctacacctctgaacctcgcagtaaactggcgatgtgaaccatctagcacagacctgcggatcgactacaagtataataccgacgccatgaccacagcagtggctcttaataacgttcagttcctagtgccaattgacgggggagtgactaagcttcaagcggtcctcccacccgcagtgtggaatgccgagcaacagcgtattctgtggaaaatccccgatataagtcaaaagagcgaaaatgggggtgtgggatccctcctggctcgcttccaactgtctgaaggcccaagtaaaccaagtccactcgtcgtgcagttcacctcagagggcagcactttgtctggatgcgacattgaactcgtcggagctggttatcgcttttccctgataaagaaaaggtttgctgcgggaaagtacctcgcagataattag

SEQ ID NO: 240398 - DNA, 1893 bp, synthetic construct
  misc_feature 1..1893: note = Description of Artificial Sequence: Synthetic coding sequence
  source 1..1893: mol_type = other DNA
atggagggtctcaagaagaggactcggaaggcttttggaatacgaaaaaaggagaaagacactgactcaaccggatcccccgatagggatgggattaaaaagtccaacggggctccaaacggcttttacgccgaaattgactgggaaagatacaatagccctgagttagatgaggagggttatagtattcggcctgaggaacccggaagcacaaaggggaaacacttttatagcagttctgagagtgaggaggaagaggaatcacacaaaaagttcaacattaaaataaaacctcttcagtccaaggatattcttaaaaacgccgctaccgttgacgagctgaaggcatctattggtaatatagcgctttctccatctcctgtgggagccattaaacgaaacctaagctctgaagaggtcgcaaggcctaggcgctcgacccctaccccagaattgatctcaaaaaagccgcctgacgacaccactgcactcgcacctctgtttgggccacccctggagagcgcctttgacgaacaaaagaccgaagtgttgctcgatcagcctgagatctgggggagcggccagccgattaatcctagtatggaaagtccaaagctcacccggccattcccgaccgggacgcctcccccactccccccaaagaatgtgcctgccaccccgcctcgaaccggttcccctctgaccatcggtcctggtgctagttcccccgctcggcctgctaccccactcgttccgtgtcgctcaaccaccccgccacctccccctccaaggccacctagtagaccaaagcttccaccagggaagcccggagtgggtgacgttagcagaccctttagccccccaattcactccagctctcctccacctattgcccctcttgcccgagctgagtccacgagttctatcagctccacaaactctctgtctgctgctaccacacccaccgttgtctccgaggatgacgtattttatgataaattaccatccttcgagagacggtgtgagactcccgcaggttcttctcgcggtccaagtccactgaccatgggtgcccaagacactctgcccgttgcagccgctttcaccgaaacagtgaatgcatatttcaagggcgcagacccctctaagtgtattgtcaagattacaggtgaaatggtcctgtcatttccggctgggatcacacggcactttgcaaacaacccatcccccgctgctctcaccttccgcgttatcaatttcagtaggctcgagcacgtgttacctaatccccagttgctatgctgtgacaacactcagaacgatgccaacaccaaggagttctgggtgaacatgcccaaccttatgactcacctcaagaaagtgagtgaacagaaaccccaggccacttactacaatgtagacatgctgaaatatcaggtgtccgcccagggcatccaatctactcccctaaacttggcggtgaattggcgttgcgagccttccagcaccgacctcaggatcgattacaagtataacaccgatgctatgacgacagccgtagctctcaataacgtgcagttccttgtccctatcgatggaggcgtaaccaagttgcaggctgtgctgcctcccgcagtttggaacgctgaacagcagaggattctctggaagatccccgatatcagtcagaagagcgaaaacggcggtgtcggtagtctcttggcccgtttccaactctccgaggggccatccaaaccatcccccctcgtggtccagtttaccagcgaggggagtaccctctcagggtgcgacatcgaactggtgggcgctggataccgcttctcactgatcaaaaagcgattcgctgccggaaagtacctggccgataactag

SEQ ID NO: 240399 - DNA, 2487 bp, synthetic construct
  misc_feature 1..2487: note = Description of Artificial Sequence: Synthetic coding sequence
  source 1..2487: mol_type = other DNA
atgatggagggccttaaaaagaggacaagaaaggcctttggcatccggaagaaagagaaggacacagattccacgggctcccccgatagagatggaatccaaccctccccacacgaaccaccatataatagcaaggcagagtgcgctcgtgagggcggaaagaaagtgagcaagaaatcaaatggcgctcctaacggcttttatgccgaaatagactgggagcggtacaacagtccagagctggacgaggagggttacagtataaggcccgaggagcccggatctaccaaggggaagcatttctactcgagctcggaaagcgaagaggaggaagagagccacaagaaattcaacatcaaaatcaaaccccttcagtctaaggatatcctgaagaacgcagcgactgtggatgagcttaaagcatcaattggcaatatagccctttccccttctcccgttcgcaagtctcccaggagaagccctggagccatcaaaagaaacctgtccagcgaggaggtggctcgccctcgcaggtccacccccacaccggaattaatctccaaaaaaccccctgacgacacaactgcactggcgcctttattcggacctcccctggaatctgcattcgacgagcagaaaaccgaggttctcctcgaccagcccgaaatctgggggtctggacagcccatcaacccttccatggagtctccgaaattgactaggcctttccccaccggaacaccccctccactgccgcctaaaaatgttcctgccacccctcctaggaccggctcccctctgacaattgggccaggaaatgaccaatcagcaaccgaagtgaaaatcgaaaaactaccttcaattaacgatctggactcaatctttgggcctgtactgagccctaaatctgttgccgttaatgctgaggagaagtgggtgcatttcagcgatacctctcctgagcacgtgacacccgaactgacccctcgggagaaggtggtttcaccaccagccactcccgacaaccccgcagattcgcccgcaccgggaccccttggccctccaggcccaacggggccaccagggccaccagggccaccgcgaaacgtcctctctcccctgaatttggaggaggttcaaaagaaggtggcagagcagacattcataaaagatgactatttagagacgatcagctccccgaaggactttggactgggccaacgtgccacgcccccacccccacctccccctacatatagaacagtggtgagcagccccggacccggaagtggtcccggacccggtaccacttccggagcgtccagtcccgcacgacctgctacaccccttgtgccttgccgtagcacaacccctccccctccccctccgaggccaccgagccgccctaaactgccaccagggaagccaggtgtgggcgatgtgagccggccattttcaccccctattcacagcagctccccacctccaatcgcacctttagctcgcgctgaatccacaagctccatctctagtaccaacagcctgagtgctgctacgacaccgacagtggagaatgaacagcctagtctggtatggttcgatagaggcaagttttatttaacattcgaagggtcttcccgaggtccttctccactcactatgggagcacaagacacactcccagtcgccgcagctttcaccgagacagtgaatgcttacttcaagggtgccgatcccagcaagtgtattgtgaagatcaccggtgagatggtactcagttttcctgctggcataacccggcacttcgctaacaatccctcccccgctgcccttacattcagggtgatcaacttttctaggttggagcatgtgcttccaaatcctcagcttctgtgctgcgataatacacagaacgatgctaataccaaggagttctgggtgaatatgcctaacctgatgacacaccttaagaaggtgagcgagcagaagcctcaagccacatactataatgttgatatgctgaaataccaagtgagtgcccaaggaattcagagtacacctctgaatttggcagtcaattggcgatgcgaaccaagttctaccgacctacgcattgactacaaatacaacaccgacgccatgactaccgctgtcgccctgaacaacgtacagtttctggtccctatcgatggaggtgtgaccaaacttcaggctgtgctgcctccagctgtctggaacgccgaacagcagcgtattttgtggaagataccagacatttctcagaagagcgagaacggcggtgtcgggtctctcctggccagatttcagctgtcagaaggtccttcgaagccttcccctctcgtggtccagtttacctcggaagggagcaccttgagcgggtgtgacattgaactggttggagctggttacagattctcactcattaaaaaacgctttgccgctggaaagtacctcgccgataattag

SEQ ID NO: 240400 - DNA, 2577 bp, synthetic construct
  misc_feature 1..2577: note = Description of Artificial Sequence: Synthetic coding sequence
  source 1..2577: mol_type = other DNA
atggagggtctcaaaaagcgcactagaaaggctttcggaatcaggaagaaggagaaagatacagactctacgggttcccccgatcgggacggaattcagggcaagaagaaaacacagaaaacccagctccttctgacttcatgcttctggctgcgggcactaagtctgacactcagccagaagaagagtaatggcgctcctaatggcttttacgcggagattgattgggaaaggtacaattctccggagttagatgaagagggctatagtatcagacctgaagagcctggctctacaaagggcaagcatttttatagttctagtgagagcgaggaggaagaggaaagccataaaaaatttaacatcaagattaaaccactccaaagtaaagatatccttaaaaacgcggctacagtagatgagctaaaggcgagcatcgggaacatagccctgtcaccttccccagtgagaaaaaaggaacgccgtgagaagggagctattaagcggaaccttagtagtgaagaagttgcgaggcctaggcgttctacacctacccccgaactcattagcaaaaagccccctgacgacactacagcgttggctccgcttttcggtccacccctcgaatctgctttcgacgagcagaagaccgaggtgctgctggaccaaccagagatttggggctctggtcagccaatcaacccgtccatggaaagcccaaagctgaccaggcccttccccacaggaactccccctccactacctcccaagaacgtgcccgcaacccctccgaggaccgggtcgcctttgacaattggccctggcaacgatcagagcgcgactgaggtgaagattgagaagctcccatccatcaatgacctggattccatcttcggaccggtcctgtccccaaagtccgtggcggtcaatgctgaggagaagtgggtgcatttcagcgacacctcccctgaacacgtcaccccggagctgacccctcgggagaaggtcgtctcccccccagcaacacctgacaatcccgctgattcacccgctcccggacccttaggcccaccaggtcctaccggcccacctggtccaccaggcccacctaggaatgtgcttagtccactgaacctggaagaggtgcaaaagaaagtggctgaacagacattcataaaggacgattatctcgagacaatctctagccctaaagacttcggattaggacagcgcgcaacaccgcctcctcctcccccacctacttatcggaccgtcgtttcttctcccggaccgggaagcggcccagggccaggtacaacatctgatggaaaaacggaagcccagcggtaccaggttatctgtccatcccttcaagcagggggaaatgaactggattcttattcaggtgcctccagccccgcaaggccagccacccccctcgtcccttgccggagcaccaccccgcctccccctccaccacggccaccgtccagaccaaagctgccgcctgggaaacctggagtgggagatgtaagccgcccattctccccacccattcactcaagttctcctccaccaattgcccctctagcaagggctgaatccacttcctcaataagttcgaccaattcgctcagcgccgctactacgccaacggttgaaaacgaacaacccagtttagtttggtttgaccggggaaaattttacctgacattcgagggttccagccggggacccagtcccttaactatgggcgcacaagatactctgcccgtagccgctgccttcacagaaacggttaacgcatacttcaaaggggctgatccctccaagtgcatagtcaagattaccggggaaatggtgctaagctttcctgcaggtattacaagacacttcgccaataacccatctcccgcagccctgaccttcagggtgattaacttcagtaggttggaacatgtgctacccaacccacagcttctgtgttgcgacaacacgcagaacgacgccaacacaaaggagttttgggtcaacatgcctaacctgatgacccatctgaaaaaagtgagtgaacagaaaccgcaggccacatattacaatgtggatatgctcaaataccaggttagtgcccagggtatccagagcacacctctcaacctcgcagtcaattggagatgcgagcctagctcaaccgatctgcgtatagactacaaatacaacaccgacgcaatgactaccgccgtggcactcaataatgtacaattcctcgtgccaatcgatgggggtgtcacaaaactgcaggctgtcctgcctcccgcagtctggaatgcagaacagcaacggatcctttggaagatcccagacatcagccagaagtctgagaatgggggtgtgggctcattgctggcgcgttttcagttaagtgagggcccatcaaaaccttctcctctggtggttcaattcacatccgagggctccactcttagcgggtgcgacatcgagctggttggggctgggtatagattctcattgattaagaaaaggttcgctgctggcaagtacctggccgacaactag

SEQ ID NO: 240401 - DNA, 1896 bp, synthetic construct
  misc_feature 1..1896: note = Description of Artificial Sequence: Synthetic coding sequence
  source 1..1896: mol_type = other DNA
atgatggagggcctgaaaaagcgtacacgcaaggccttcgggattcgcaagaaggaaaaagacacggattccaccggatccccagacagggacggtatcaaaaagtccaatggtgcccctaatggcttctatgctgagatagactgggaaagatacaactcccctgaactggacgaagaagggtactctattcgtcccgaagagcccggaagcacaaagggtaaacacttctattcttctagtgaaagcgaagaagaagaggagagccataaaaaatttaacattaagatcaagcctctgcagagcaaggatattctaaagaatgccgcaaccgttgacgaactgaaggccagcatcgggaatattgcactgtcgccttctccagtgggcgcaattaagagaaacctgtcatctgaagaagtggcgaggcctagaagaagcacgccaacccccgagctaatctctaaaaaacctcccgatgatacgacagccctggctcctctgtttggacctccccttgagtctgcctttgacgaacaaaagactgaggtgctcctggaccagcctgaaatttggggatcgggccagcctattaacccatccatggaatcacctaagctcaccagaccgttcccgactggcactccccctcccctgccgcctaagaatgtacctgctacgcctccaagaacaggtagccctctgaccattggacccggagccagctccccagccaggcccgcaacacctctcgtgccatgtaggtccactaccccacccccaccccctccaagacctccctcccggcctaaattgcccccaggaaagcctggcgtgggcgacgtctccaggcccttcagtcccccaattcactcttcctctcctccacccatagcccctctggcacgggctgaatccacgtccagcatctcctccaccaactccctgtccgccgctaccacacccactgttgtcagcgaagacgacgtgttctatgacaaactgccttcattcgaaaggcgctgtgagacacctgccggttccagccgcggtccaagtcccctgaccatgggagcgcaggatacattgcctgtcgcagccgcattcactgaaacagtgaatgcatatttcaagggggcagacccatctaagtgtatcgtgaagattactggtgagatggtgctgtcgttccctgccggtatcaccaggcattttgcaaacaaccctagcccagccgctctgacattcagggttattaatttctcacggctggagcacgtcctgccaaatccacagctgctgtgttgcgacaatactcaaaatgatgcaaacaccaaagaattttgggtcaacatgcctaacctaatgacgcacctgaaaaaagtgtctgagcagaaacctcaggctacatactacaacgttgatatgctgaagtatcaagtatccgcacaggggatccagtccacacccctgaatctggcagtaaactggagatgcgagccaagttctactgatctgcgaatcgattataaatacaacactgacgccatgaccaccgccgttgcactcaataacgtacaattcctggtgccaattgacggcggagttactaaactgcaggccgtgctgccccctgctgtgtggaacgccgagcagcaacggattctgtggaagatcccagacataagccagaagtcagagaatgggggagtaggatctctgctggcacggtttcaactgagtgagggcccatctaagcccagtcctttggtggtgcaattcaccagtgagggcagcactctttctggatgcgacattgagctggttggcgcaggctaccggttttcgctgattaaaaaacgctttgcggctggtaagtaccttgcagataactag

SEQ ID NO: 240402 - DNA, 2496 bp, synthetic construct
  misc_feature 1..2496: note = Description of Artificial Sequence: Synthetic coding sequence
  source 1..2496: mol_type = other DNA
atggaaggcctgaagaaaagaacgcggaaggcctttggaatccgaaagaaagaaaaggacacagactccactggctcacctgatcgtgacgggattcagggaaaaaagaaaacccaaaaaactcagctgctcctgacaagttgcttttggcttagggcactaagtctcaccctcagccaaaaaaagtccaacggcgcacccaacggattttacgccgagattgactgggagaggtacaattcgccagaactggacgaggaggggtatagcatacggccagaagagcctggcagtactaaggggaaacatttttactcaagttctgaatccgaagaggaggaagaaagtcataagaagtttaatataaaaattaagccgttacagagcaaagatatcctgaaaaacgccgcaaccgtcgacgaactgaaagctagcatcgggaatattgcgctgtctccatcacccgtcagaaaaaaagaacggagggaaaaaggtgctattaaacgcaatcttagttctgaggaagtcgccagacccaggaggagcactcctacacccgaactaatttcaaagaaaccccctgacgacactaccgcccttgcgccactattcggccctccacttgagagtgcattcgacgagcagaagacagaggtgctgttagaccagccggagatctgggggagcggacaaccaatcaatccctctatggaaagtcctaaactcaccaggccctttcccaccggcaccccccctcccctcccgcctaaaaatgtgccagctaccccgcctaggactgggtctccattgactatcggccctggcaatgatcagtccgccactgaggtgaaaatcgaaaaattgccctcaatcaacgatcttgactctatcttcgggcctgttctgagccctaagtctgtcgctgttaacgccgaagagaagtgggtgcacttcagtgatacgtcccctgagcacgttaccccagaattaaccccgagggaaaaagttgtcagtcccccagctacacctgataacccagcggacagccctgcgcctgggccactagggcctccgggaccaacaggccctcccggtcctccagggcctcctcggaatgttctctctcctcttaatctcgaagaggttcaaaagaaggtagctgaacagaccttcattaaggacgactatctcgaaactatttctagtcctaaagattttgggttgggccagcgagctaccccaccccctccaccaccccctacttatagaactgttgtgtcaagtcctggcccagggtccgggcctggaccaggcaccacatcaggtgcttcttcaccagctcgccctgctactcccctagtcccctgccggtctactacgccacctcccccacctcccagaccaccctctcgacctaagttgcccccaggcaaaccaggagtgggtgacgtgtcgcggcctttctcccctcctatccattcctcttccccaccacctattgcccctttggcccgagccgagtccacctccagcatatcgtcaacaaactctctcagtgctgcgaccacccccaccgtcgaaaacgaacagccatcgcttgtctggtttgaccgagggaaattttacctcaccttcgaaggatcgtccagagggccttcaccattaactatgggtgctcaagacaccttgcctgtggcagccgctttcacagagacagtaaatgcatattttaaaggggctgacccaagcaagtgcattgtcaagatcactggcgagatggttctgtcttttcccgcagggatcacacgccacttcgcaaacaacccatcccccgcagccctgacgtttagggtcattaatttttcaaggcttgaacacgttctgcctaatccgcagcttctgtgttgcgataacacacagaacgacgctaataccaaggaattctgggtcaacatgccaaacctaatgacacacctcaagaaagtctcggaacagaaaccccaggccacatattataatgttgatatgctgaaataccaggtttctgcacagggcatacagagtacgccgctgaatttagctgtgaactggcggtgcgagcccagcagtactgacttgagaatcgactataagtataacacagacgctatgacaacggccgtcgccctgaacaacgttcagttcttggtgccgatagatggaggcgtaactaagcttcaggcagtcttgcccccagcggtgtggaatgccgaacaacagcggatcctatggaagatcccggacatttctcagaaatctgagaatggtggcgtggggtctctcttagcacgattccagcttagcgaagggccttctaaaccatcccctctcgttgtccagttcacttccgaaggcagcactttgtctggttgcgatattgagctggtgggcgctggctacagattttcacttatcaaaaagcgctttgccgcaggcaagtatttagctgacaattag

SEQ ID NO: 240403 - DNA, 783 bp, synthetic construct
  misc_feature 1..783: note = Description of Artificial Sequence: Synthetic coding sequence
  source 1..783: mol_type = other DNA
atgatggagggcctgaaaaagaggacccgcaaagctttcgggatcaggaaaaaggagaaagacaccgactctacgggttcccccgacagagacggcatccagccctccccacatgagcccccttacaacagcaaggccgagtgcgcacgggaggggggtaagaaagtgtcgaagaagtctaatggtgcgcctaatgggttctatgccgaaatcgattgggagagatacaatagccctgaactggacgaagagggctatagtattcgtccagaggaacccggttcaacaaagggcaagcacttctattccagtagtgaatctgaagaggaggaggaaagtcataagaagttcaatatcaagattaaacccttacagagtaaggatatactgaaaaacgccgctaccgttgatgagctgaaagcctcaatcggaaacattgccctgtcacccagtcccgtcggcgctataaagaggaatcttagcagtgaggaggtggccagaccacggagatctacaccaaccccggaactgatctcaaaaaagccacctgacgatactaccgccctggcaccacttttcggcccacccctggaaagtgccttcgatgagcagaagaccgaggtcctactcgatcagccagaaatctggggctccggccagccaatcaatccaagcatggagtctcctaagctgacccgccctttccccacaggcactccgcctcctctgcccccaaagaacgtgcccgcaacaccccctcgtactggatctccacttacatag

SEQ ID NO: 240404 - DNA, 1002 bp, synthetic construct
  misc_feature 1..1002: note = Description of Artificial Sequence: Synthetic coding sequence
  source 1..1002: mol_type = other DNA
atgacctgtagcgtgacccacatcgtcagttttagtctaccttttctgaatccatcgcatcccgcatctactcctggccacacggaaaatgaacagccgtctttggtctggttcgacagaggtaagttctatttgacatttgaggggagtagtcgcggaccttctccattgactatgggggcacaggataccctgcctgttgcggcagcgtttaccgagacagtgaatgcctacttcaaaggagccgatccctcaaaatgtatcgtcaaaatcacaggcgaaatggtcctcagcttccccgctggcattaccagacactttgccaataatccaagccctgccgcactgacctttcgtgtgatcaactttagccgactagagcatgtgcttcctaatcctcagttactgtgctgcgacaacacacaaaacgacgcaaatactaaagaattttgggtcaatatgcctaacctaatgacacacctgaagaaggtgtccgagcagaagccccaggcgacatattataatgttgatatgttaaaataccaggtgtccgctcagggaatccagagcaccccactcaacctggcggtgaactggagatgcgagccatccagcaccgacctgaggattgattataaatataatacggatgccatgactacagcagtggccttaaacaatgtgcagtttcttgtgcccatcgatggaggggtgactaaattgcaggccgtcctgcctcctgccgtgtggaatgctgaacaacaaagaatactttggaaaatccccgatatctctcaaaagagcgagaacggtggggtggggagtctgctggctcgatttcagctgtctgaagggccttctaaaccttcccccctggttgtgcaatttacttctgagggctctactctgtccgggtgcgacattgaattggtcggcgcaggttatagattctctttgatcaaaaaacgatttgccgcagggaaatacttagcagataactag

SEQ ID NO: 240405 - DNA, 1107 bp, synthetic construct
  misc_feature 1..1107: note = Description of Artificial Sequence: Synthetic coding sequence
  source 1..1107: mol_type = other DNA
atgagtgtcgccggattgaaaaagcaattttacaaggctagtcagctcgtgtcggagaaagtcggcggtgcggagggcaccaaattagatgatgactttaaggagatggaaaaaaaagtagatgtgacaagcaaagcagttaccgaggtgctagccagaaccatcgagtacctgcagcctaatcccgctagccgcgcaaagcttacaatgctgaatactgtgagcaagatccgaggtcaggttaaaaacccaggttatccccagtcggagggacttctgggtgaatgcatgatccggcatgggaaagaactaggtggcgagagcaattttggagatgcgctgctggatgctggtgagagtatgaagagactggcggaagtgaaggacagcctcgatattgaagtcaagcagaacttcatcgatccactccagaatctgtgcgaaaaggacctgaaggaaatccagcaccatctgaaaaagctcgagggaaggagactggattttgactacaaaaaaaaaaggcaagggaagattcctgacgaagagctccgccaagccctggagaaattcgaggaatccaaggaggtagcagagacttctatgcataatctgcttgagactgacatagaacaagtcagccagttatctgccctcgtcgacgcccagctcgattatcaccggcaggccgtccagattttagacgagttggccgagaaactgaaaagaaggatgagagaggcaagttcgagacccaagcgcgagtacaagccaaagcctcgggaacctttcgatctgggagaacctgaacagtcaaacggcggatttccatgcacaacagcgccaaaaatcgccgctagctcatcctttaggagttccgacaaacccatccgaaccccatcacgaagtatgccaccactcgatcagcccagctgcaaggcgctctacgatttcgagcccgaaaacgacggtgaattgggcttccacgaaggtgacgtaattacgctcaccaaccagattgacgaaaattggtacgaggggatgctggacggccaatcaggcttttttccactgagctacgtggaggtcctggtcccattacctcagtag

SEQ ID NO: 240406 - DNA, 963 bp, synthetic construct
  misc_feature 1..963: note = Description of Artificial Sequence: Synthetic coding sequence
  source 1..963: mol_type = other DNA
atgagtgtggctggccttaagaaacaattttacaaagcgagtcaattagtgagcgagaaagtcgggggagccgagggaactaagctggatgacgactttaaagagatggaaaaaaaggtggatgttacttctaaggccgtcacggaggtgcttgcacggactatcgagtatctccaacccaacccaggagatgcactgcttgacgccggagagtctatgaagcggctggctgaggtgaaggatagtctggatattgaggtgaaacagaacttcatagaccctctgcagaacttgtgtgaaaaggacctgaaagaaatccagcatcatctaaaaaagcttgaaggtcgtaggttggacttcgattacaaaaagaagaggcagggtaagattcctgatgaagaactgcggcaggctctggaaaaatttgaagagtccaaggaagttgccgaaacttctatgcataacctactggagaccgacattgaacaggtctctcagttgtctgcgcttgtggatgcccagctcgattaccatagacaggctgtccagattcttgatgagctggccgagaagttgaagagacgaatgcgggaggcatcctcaaggccaaagcgcgagtataagccgaaaccacgtgaacccttcgacctgggcgaaccagagcagagcaacggcggattcccctgcacaaccgcacccaagatcgctgcgagcagcagcttccgaagcagcgataagccaatcaggacccccagcaggagtatgcctcctttggatcaaccctcatgcaaagccctctacgacttcgagcctgagaacgacggcgagctcggatttcacgagggagacgtgatcacactgactaatcagatagatgagaactggtatgaaggaatgcttgacggacagagcggcttttttccactgagttacgtagaagtcctggtgccgctacctcagtag

SEQ ID NO: 240407 - DNA, 915 bp, synthetic construct
  misc_feature 1..915: note = Description of Artificial Sequence: Synthetic coding sequence
  source 1..915: mol_type = other DNA
atgagcgtggctggccttaaaaagcagttttataaagcttctcagttagtctcagaaaaggtgggcggtgccgagggaaccaagcttgatgatgactttaaggagatggagaaaaaagtcgacgtgacgtctaaagcagtgacagaggtcctggccagaacaatagagtatctgcagccaaatcctgcttcccgcgcaaaacttaccatgctgaataccgtgtctaaaattcggggacagaatctgtgcgagaaagaccttaaagaaatacagcaccatcttaagaaactggaaggacgtagactggactttgactacaagaaaaagaggcagggcaaaatccctgatgaggagctgcgacaagctctagagaaattcgaagaatctaaggaggttgccgagacttccatgcacaacctgctcgaaacagatatcgagcaggtgagccaactgtctgcattagtagatgctcagctggactaccaccggcaagcagtacagatcctagacgaactggcggaaaagcttaaaaggcgcatgagagaagccagttctcggccaaagagggagtacaagcctaagcccagagaaccattcgatctcggagagccagagcagagcaacggcggtttcccatgcacaactgctcctaagatcgctgcaagttcatccttcagatctagcgacaaaccaatcagaactccaagccgcagtatgccccctctggatcagccttcttgtaaagccctgtacgatttcgaacctgagaatgatggggagctgggctttcacgagggtgacgtgattacactaaccaaccagatcgacgagaattggtacgagggcatgctggatggtcagagcggcttctttccattgtcttacgtagaagtgttggtgcctcttccccagtag

SEQ ID NO: 240408 - DNA, 1059 bp, synthetic construct
  misc_feature 1..1059: note = Description of Artificial Sequence: Synthetic coding sequence
  source 1..1059: mol_type = other DNA
atgtccgtcgccggattaaaaaagcagttccataaggccactcagaaggttagcgagaaagtgggcggagccgagggcacaaagttggatgatgattttaaagaaatggagcggaaggtggatgtcacaagtagagccgtgatggagatcatgactaagactattgagtacctccagcctaatccagcaagtagggcgaagctctctatgatcaatactatgtctaagattcggggtcaagaaaagggtccaggctatccacaggcagaagccttgctggccgaggctatgttgaaatttggtcgggagcttggtgatgattgcaacttcggtcccgctctgggagaggtgggtgaggcgatgcgggaactgtccgaagtgaaagatagtcttgacatagaagtcaagcagaatttcatcgacccacttcagaacttgcacgataaagatctcagagaaatccaacaccatctcaagaaattagaggggcgacgcctggactttgactacaaaaaaaagcgtcaggggaaaatccccgatgaagaattaaggcaggctcttgagaaatttgatgaatctaaggagattgccgaatcttctatgtttaatctgttggagatggacattgagcaagtgagccagttatctgccctggtgcaggctcagcttgaataccacaaacaagctgtccagattttgcagcaggtgactgtgcgcttagaggaacgcatccgccaggcttccagtcaacccagacgggagtaccagccaaaaccccgaatgtcactggagttccctactggggactccactcaacccaacggcggactctctcatacagggacacctaaaccatcaggagtccagatggatcagccttgttgcagagctttatatgacttcgaacctgaaaatgaaggcgaacttggcttcaaagagggggatattatcacccttaccaaccaaatagacgaaaattggtatgaaggtatgctgcacggccattctggtttctttcctattaattacgtggagattctggtggcattaccccactag

SEQ ID NO: 240409 - DNA, 678 bp, synthetic construct
  misc_feature 1..678: note = Description of Artificial Sequence: Synthetic coding sequence
  source 1..678: mol_type = other DNA
atgtctgttgctggcctgaaaaaacagttccacaaggccactcagaaagtgagcgagaaagtcggcggagcagaggggaccaaactggatgacgatttcaaggaaatggaaagaaaggtggatgttacgtccagagcagttatggagattatgacgaaaaccatcgaatacttgcaaccaaatcccggatctctggaggcagaggccctattggccgaagccatgctcaaattcgggagggagttaggcgatgactgtaactttggccctgctcttggtgaggtcggtgaagcaatgagagaattgtctgaagtaaaagacagtctagacatcgaagtgaaacagaatttcattgatcccctccaaaacctacacgataaggacctgcgggaaattcagcaccacctcaaaaaactcgaaggcagaagacttgacttcgattataagaagaagcgacagggaaagattccagacgaggagctgaggcaagccctggaaaagttcgacgagtccaaggaaatcgctgagagctctatgttcaatctgcttgagatggacatcgaacaggtgtctcagctctcagccctggtacaggctcaactggaataccacaagcaggccgttcagattttgcagcaagttacagtgagactggaagagcggatccgacaggcgtag

SEQ ID NO: 240410 - DNA, 918 bp, synthetic construct
  misc_feature 1..918: note = Description of Artificial Sequence: Synthetic coding sequence
  source 1..918: mol_type = other DNA
atggagatcatgacgaagacgattgagtatctgcagcctaatcccgcttcccgggctaagctgtccatgatcaataccatgtcaaagatcagaggacaagagaagggccctggttatccccaagcagaggccctgctggccgaggctatgttaaagtttggacgagaacttggcgacgattgtaatttcgggccagcactcggagaggtcggtgaagctatgcgcgaactgagcgaggtaaaggactcgctagatatcgaggtgaagcagaatttcatcgatcccctccaaaatctgcatgataaagacttgcgagagattcagcaccacctaaaaaaattggaaggaaggaggttggatttcgattataagaaaaagagacagggcaagatccccgacgaggagctccgccaggccctcgaaaagttcgacgagagtaaagagatagcagagtccagtatgttcaatctcctggaaatggacatagagcaggtgtcgcaattgagcgctctcgtgcaggcccagctggagtatcacaaacaggctgtccagattctccagcaggtgactgttagactagaagaacgcatccggcaggcgtcaagtcagccaaggagggagtaccaacccaagccacgtatgagcttggagtttccgactggggatagtacccaacctaacgggggactgtcacacaccggcaccccaaaaccatccggtgtccaaatggaccagccttgctgccgggcattgtacgacttcgaacccgagaatgagggcgaactaggatttaaggaaggggacatcatcaccctgaccaatcagatcgacgagaattggtacgaaggaatgctgcatggacatagtggcttttttcctattaattatgtggaaattttggttgccctcccacactag

SEQ ID NO: 240411 - DNA, 546 bp, synthetic construct
  misc_feature 1..546: note = Description of Artificial Sequence: Synthetic coding sequence
  source 1..546: mol_type = other DNA
atgagcgtggctgggctgaaaaagcaattccacaaagccactcaaaaagtgtccgaaaaggtaggaggcgcagaggggacgaaactggatgatgatttcaaggaaatggagatcgaacaggtgtcacaactgagtgcactggtccaagcacagctagagtatcacaagcaagctgttcagattctgcagcaggtcaccgttagacttgaggaaaggatcaggcaggcctcgagtcaaccacgccgagaataccagccaaaacctcgcatgtccttggaatttccaacaggcgacagtactcagcccaatgggggtttgagccacacaggaacccccaagcctagtggggttcagatggatcagccttgttgccgggctctgtacgactttgagcccgaaaacgagggcgagctagggtttaaggaaggcgatataattacccttaccaaccagattgatgagaactggtatgagggcatgctgcacggacattctggattctttccaatcaactacgtcgagatactcgtggcactccctcactag

SEQ ID NO: 240412 - DNA, 1068 bp, synthetic construct
  misc_feature 1..1068: note = Description of Artificial Sequence: Synthetic coding sequence
  source 1..1068: mol_type = other DNA
atggatggaatttttgccggtatcatctgtaatcaggcgaatcggtgcctgacatggacaagccagcagctatttagcgaaaagatcagtggtgccgaagggacaaagctggacgatgaattcctcgatatggaacggaagatagacgtcaccaacaaggtcgtcgccgagatcctctcaaagactaccgagtatctgcagcccaatccagcttacagggcgaagttaggcatgctcaatacagtgagcaagatcagaggtcaggtgaagaccacaggatatccccagactgagggcttgttgggagattgcatgctgaagtacggcaaggagcttggcgaggactcaacgttcggcaacgcccttattgaggtgggcgaaagcatgaaactcatggcagaggtgaaagacagcctggatattaatgtgaaacaaacctttatcgatcccctgcaactgctgcaagataaggatctgaaagaaatcggacatcacttgaagaagctggaggggaggaggttggattacgactacaaaaaaaaacgtgtcggtaagattccagatgaagaagtcagacaagctgtagaaaagttcgaagagtctaaggagctggccgaacggtctatgtttaattttcttgagaacgacgtcgagcaagtttcgcaactggcagtgttcattgaagccgctctggattatcatcgacagagcactgagattctccaggaactgcaatcaaaattacagatgaggatctcagcagcttcttccgtgcctagaagagagtacaaaccacggcctgtgaaacggagtagttctgagcttaatggggtctccactacttcagtggtgaagacaaccggcagtaacatccccatggatcagccatgctgtaggggcttatatgattttgagcccgagaatcagggtgagctgggtttcaaagaaggggacatcataactcttacaaaccagatcgacgagaactggtacgaggggatgatccatggggagtcagggttttttcctatcaattatgtggaggtcattgttcctttaccacagtag

SEQ ID NO: 240413 - DNA, 1044 bp, synthetic construct
  misc_feature 1..1044: note = Description of Artificial Sequence: Synthetic coding sequence
  source 1..1044: mol_type = other DNA
atgtccgtagccggactgaaaaaacagttccataaagcctcacagttatttagcgaaaagatttcgggggctgagggcacaaaactggacgacgagtttctagatatggaacgcaaaattgacgtgacaaacaaggtcgtcgccgagatattgagcaaaaccaccgaatacctgcagcctaacccagcgtacagagctaagctgggaatgctaaataccgtttcaaaaatccgcggtcaggtgaaaaccacgggctatccccagacagaaggcttacttggagactgtatgctgaagtacggaaaggagcttggggaggactctaccttcggcaacgcgcttatagaggtgggtgaaagcatgaaattgatggccgaagtaaaagactctctcgacataaacgttaaacagacatttattgaccctcttcaattacttcaggacaaggacctaaaagaaatcggccaccacctgaaaaagttggagggacggaggctcgattatgattataagaagaagcgggtcggcaagatcccagacgaagaagtaagacaggctgtggagaaattcgaggagtccaaggagctcgccgagcgtagcatgttcaatttcctcgagaacgatgtggagcaggtcagccaattggccgtgttcatcgaggccgcactggattaccaccgtcaatctaccgaaattctgcaggagctgcaatctaaactgcaaatgaggattagtgcagcctcctccgttcccaggagagaatacaagcctcgacctgtaaagcgttcaagctctgagcttaacggtgtttcaaccacaagcgtggttaagaccaccgggtcaaatatcccaatggaccaaccgtgttgcagaggtctgtatgacttcgagccagaaaatcagggagagctgggtttcaaagagggcgatattatcacattgaccaaccagatcgatgaaaactggtacgagggcatgattcatggcgagtctgggttttttcctatcaattacgtggaggtgattgtgccccttccacagtag

SEQ ID NO: 240414 - DNA, 1068 bp, synthetic construct
  misc_feature 1..1068: note = Description of Artificial Sequence: Synthetic coding sequence
  source 1..1068: mol_type = other DNA
atggacggcattttcgccggaatcatctgcaaccaggcaaacagatgcctcacatggacatcacagcagctgttttccgagaaaatcagtggcgcagagggtacaaaactggatgatgagttcctggatatggaaagaaagatagacgtcaccaacaaagttgttgcagagatcctgtctaagactaccgaatatctacagcctaaccccgcttaccgggctaaactggggatgttgaacacagtatctaagattcgagggcaggtgaaaaccacgggttatccccagaccgaaggactcctgggagactgcatgctcaagtatggcaaagagttgggggaagattccacattcggaaatgccctaatagaggtgggcgagagtatgaaattaatggccgaggtgaaggactccctcgacatcaatgtgaagcagacctttatagaccccctacaactgctgcaggacaaagatctcaaagagatcggacaccatctgaagaaacttgagggacggagactggactacgactataagaaaaaaagggtgggcaaaatcccagacgaggaggtgagacaggccgtggagaagtttgaggagtccaaggagctggcggagcgctctatgttcaatttcttagagaacgatgtcgaacaggtcagtcagctcgctgtcttcatcgaagccgcattggactatcaccgccagtctactgagattcttcaagagctgcagagcaaattgcaaatgcggatttcggcagcttccagcgttccacgaagggagtacaagccgcgtcccgttaagagatctagctccgagcttaatggagtgtccacaacctctgtcgtaaaaaccactggcagcaacatccctatggaccaaccctgttgtcgcggtctttacgattttgaacctgagaatcagggagagcttgggttcaaggagggcgacatcattaccttgactaaccagatagacgagaactggtacgagggcatgatccacggtgagagtgggttcttccctatcaactatgtggaggtcatcgtcccactgcctcagtag

SEQ ID NO: 240415 - DNA, 867 bp, synthetic construct
  misc_feature 1..867: note = Description of Artificial Sequence: Synthetic coding sequence
  source 1..867: mol_type = other DNA
atgagcgttgctggacttaagaaacagttccataaagcaagccaacttttttctgagaagatttcaggcgctgaaggcacaaagctggacgatgaatttctggacatggaacgcaagatcgacgttactaataaagtggttgccgagattctttcaaagacaacagagtacctacaacctaaccctgcataccgagctaagctcggtatgttgaatacagtgtcaaaaatcaggggacaagtgaagacaacaggatacccccagaccgaaggactgcttggggattgtatgctcaagtatgggaaagagttaggggaggacagcacttttggtaatgctcttatcgaagttggggagtcgatgaaactcatggcagaggtcaaagattccttggatatcaatgtcaaacagacttttatcgatcccctgcaacttttgcaggacaaagatctgaaggagatcggtcaccacctgaagaagcttgaggggcgtagactggactacgactacaaaaaaaagagggttggaaaaatccccgatgaagaggtgcgacaggccgtggaaaagttcgaggaatcgaaagagctcgccgagagaagtatgttcaatttccttgaaaacgatgttgagcaggtctctcagttagccgttttcattgaggctgcactggactaccaccgacaaagtaccgagattctccaggagctacagtctaaactccagatgagaatcagtgcggcatcttctgtgccaagacgcgagtataagcccagacctgtgaagcgaagctcttctgagttgaatggcgtaagtactacttccgtggtgaagaccacagcgtattctcgattagagcctgctgactag

SEQ ID NO: 240416 - DNA, 1662 bp, synthetic construct
  misc_feature 1..1662: note = Description of Artificial Sequence: Synthetic coding sequence
  source 1..1662: mol_type = other DNA
atggtggaggcgatcgtggaattcgactaccaggcacagcacgatgacgagctcactattagcgtaggtgagatcattacgaacataagaaaagaggacggcggttggtgggagggacagattaatggacgcaggggactctttccagacaattttgttcgggagattaaaaaagagatgaagaaggatcctctgactaataaggccccagaaaagcccctgcacgaggtgccctccggaaattccttgctcagctccgaaaccattttacgcacaaataaacggggagaaagaagacggagacgatgtcaggttgccttttcctacctcccccaaaatgatgatgaactggagctcaaagtaggggatatcatagaggtggtcggggaggtggaggaggggtggtgggaaggagtgctgaatggcaagactgggatgttccccagcaactttatcaaggaattatccggtgaatccgacgagctgggaattagccaggatgaacagctgagtaaaagccggccagagggcctgccccctgcgtctctgcttccatttccagcgcacggggcaaagggcaaaaccaccttcgagggcaccattctctacagggcagcacccggtaagactgaaggacatcgccgttactatagtctgcgcgagaccacggggtccgagagtgacggaggggatagctcaagcactaagagcgagggggcaaatgggacagtggccaccgccgctatacagcccaaaaaggtgaagggggtgggttttggcgatatcttcaaggataagcccatcaagctgcgaccgagatccattgaggttgagaacgactttttgcctgtggaaaagaccataggaaaaaagctccccgcaacaacggccactcctgattcaagcaagactgaaatggactcacggacaaagtcgaaggactactgtaaggtcatctttccgtatgaggcccagaatgacgacgagttaaccatcaaagaaggtgacatcgtgacactgatcaataaggactgtatcgacgtgggctggtgggaaggagaactcaacggtcggaggggcgtgttccctgacaacttcgtgaagctgctcccaccagacttcgaaaaagagggcaaccgcccaaagaaacctcctccaccttctgcgcctgtgatcaaacagggcgcaggtacgaccgaacgcaaacatgagatcaaaaaaatccccccagaaaggccagaaatgctgccaaaccgcactgaagagaaggaacggccagagcgggagcctaaactggatcttcaaaagccttccgttcccgctataccccctaaaaagcctcgcccaccgaagactaactctctcagtagacctggagccttaccccctcgaagaccagagcggccagtcggccctctgacacacacccgctactgttgcgccctcacttctggcgctggggtgggttggctgtggaaggagcaccgtagaggtaccgattgccacagaccgtgggaggaggggcgaggcgaggggggtgctcaggcgtcgcttctacatccaccagcgaaactctctgaggatacaggtcacttctgtccgtgctcttgtacccaggcaggggtcagcgtccgcctgagaggagcagtgtgggttagctag

SEQ ID NO: 240417 - DNA, 1887 bp, synthetic construct
  misc_feature 1..1887: note = Description of Artificial Sequence: Synthetic coding sequence
  source 1..1887: mol_type = other DNA
atggaagtgagtgcagccaaggcaccttccgcagccgatctttctgagatcgagatcaaaaaagaaatgaagaaggacccattgaccaacaaggcacccgaaaagccccttcacgaggtgcccagcggcaactcattactttcttccgagacaattttgagaacaaataagaggggggagcgcaggaggcgccgatgccaggtcgccttctcgtatctccctcagaacgacgatgaactggaactgaaggtaggtgatatcattgaagtcgtcggagaagttgaggaaggctggtgggagggggtcttaaatgggaaaactgggatgtttccgagcaacttcatcaaggagctttctggggagtctgacgagctgggtatcagtcaggatgaacagctaagtaagagctctctgagagaaacgaccggatctgagtccgacggaggggattccagtagcacgaaatctgagggcgctaatggcactgtggctacagcggctattcagccgaagaaggtgaaaggggtcgggttcggcgacatcttcaaggacaagcccattaaactacggcctcgcagcattgaagtcgagaatgacttcctccctgtggagaaaaccataggtaaaaagctgcctgccaccacagcgacacctgattccagtaagaccgaaatggacagccggacaaaatcaaaggactactgtaaggtgattttcccatatgaagcacagaacgacgatgaattgacgatcaaagaaggagacatagtaactctcatcaacaaggactgcatcgacgtggggtggtgggaaggggagcttaacggaagaaggggcgtcttcccggataactttgtaaagctcctgcctccagactttgaaaaggaggggaatagacccaaaaaacctcctccgccaagcgcccctgtaatcaagcagggcgctggcacgacagaaagaaagcacgagattaagaaaatcccacccgaaaggccggagatgctgcccaatcgcacagaagagaaggagagacccgaacgggaacccaagctggaccttcagaagccgtcagtgcctgctatacccccaaagaagcccaggccaccaaagactaactccctgtctaggcccggtgcgctgccacctcggaggcctgagagacccgtcggcccactcacacatacccgcggtgactccccaaagatcgacctggccggatcctccttgtccggtatccttgataaggatctttcggaccgctccaatgatatcgatctagaggggtttgatagcgtcgtctcatcaacggagaaactgagtcatcccactacctctcgacctaaagcaacgggtcgaaggccaccatcccagagtttgacatcttctagtctgagtagccccgacattttcgactcccccagccccgaggaggacaaggaggagcatatcagtctggcccaccggggagtcgatgcatcaaagaaaacatccaagaccgtgaccatttcgcaagtgtcggacaacaaagcctcattgcctccgaagcccggtacaatggccgctggaggagggggaccagccccactctctagcgccgctcctagcccgctatcttcaagtttaggcacagccggacatagggccaattctccatcattgttcggcacagaggggaagcccaagatggaaccagctgcctcttctcaagcggctgttgaggagctacggacacaagttcgagagctccgtagtatcatcgaaacgatgaaggatcagcaaaagagagagatcaaacaactgctctcagagttagacgaagagaagaagatacggctgcggctacagatggaggtgaatgacattaaaaaggctctccagagcaaatag

SEQ ID NO: 240418 - DNA, 1953 bp, synthetic construct
  misc_feature 1..1953: note = Description of Artificial Sequence: Synthetic coding sequence
  source 1..1953: mol_type = other DNA
atgaagaaagacccccttacaaataaggcccctgagaaaccccttcatgaggtgccctctgggaactctctgttgtcgagtgagactattttgcgcacaaacaaacgcggagagagaaggcgacgccgttgtcaagttgccttctcctatctgcctcaaaacgacgatgaactggaactgaaggtgggagacattatcgaggttgttggagaggtagaggaaggctggtgggaaggcgtcttgaatggcaaaaccggaatgttcccctctaactttataaaggagctgagtggtgagtccgacgaactgggcatctctcaggatgagcagctgtccaagagccgcccagaggggctgccacctgcatccctcctcccatttccagcacatggagccaagggcaagacaacattcgagggcacaattctgtatagagccgcaccaggaaagaccgaaggccataggagatactacagtctcagagagaccactggatccgaatccgatggcggagattccagctcaacgaaaagcgagggcgctaacggcacggtcgctactgctgctatacaacccaagaaggttaagggggtgggtttcggcgatatttttaaggacaagcctattaagcttagaccccgatctatagaggtggaaaacgacttcctgcctgtggagaagacgatcggcaaaaagctgccagcgaccaccgcaacgcccgattcatccaaaaccgaaatggatagccgtacaaagtccaaggactattgtaaggtcatcttcccatacgaagcgcaaaatgatgacgagctcactattaaagagggggacatcgtgacactgatcaataaagactgtattgacgtcgggtggtgggaaggcgaactcaacggcaggcgcggtgtgttcccggacaactttgttaagttactgccacccgactttgagaaggagggcaaccggccaaagaagcccccacctccttccgccccagtgattaagcagggtgccggaaccacagaaaggaagcacgagatcaaaaaaattcctccagaacggccagaaatgctgcccaaccgaactgaggaaaaggagagaccagagcgcgaaccaaaactcgacttgcagaagccctctgttcccgctatccccccaaaaaaaccccgtccaccaaaaaccaactctttgtccaggcctggagcactaccgccacggagacctgaaagacccgtgggcccactcacacacacccggggagattctcctaagattgacctggcgggttcttctttgagcgggattctggacaaggacctgtcggaccggtccaatgacattgatctggaaggattcgactcagtagtgtcttcaaccgaaaagctgtcacatcccacaacatccagacctaaagctacaggtcggagaccaccgtcccagagtctaacatcttcttcactgagctctcccgatatctttgacagccctagtcctgaggaggataaagaggaacacatcagcctggcacatcggggagttgatgccagcaagaagacttccaagactgtaactatttcacaggtctcagataacaaagctagtttgcctccaaaaccgggaacaatggccgctggcggaggagggcctgccccactgtcatccgcagcgccatcgccactgtccagctccctcggcaccgcagggcaccgtgctaattcgccttctcttttcggcactgaaggcaaaccaaagatggagcctgctgccagcagccaagccgctgtagaggagcttcggactcaggtccgagaactgagatccattatcgaaactatgaaagatcagcagaagcgagagattaagcaactgttatcggaactcgacgaggaaaagaaaatccgattaaggctgcagatggaggttaacgatattaaaaaagctctccagtctaaatag

SEQ ID NO: 240419 - DNA, 1284 bp, synthetic construct
  misc_feature 1..1284: note = Description of Artificial Sequence: Synthetic coding sequence
  source 1..1284: mol_type = other DNA
atgggtgaggagacaatcggcaaaaaattaccagctaccacagcaacaccggactcttctaaaaccgagatggatagtcggactaaatcaaaggattactgcaaagtgattttcccatatgaagcccagaacgacgacgaactcaccataaaggagggggacatcgtgacccttattaacaaggactgtattgatgtagggtggtgggaaggggaactgaacgggaggcggggtgttttccccgacaacttcgtgaagctcctgcctcccgattttgaaaaggagggaaaccgcccaaaaaagcctccgcctccaagcgctcctgtgattaaacagggcgctggaactacggagaggaaacacgagataaagaaaatcccacctgaacgccctgagatgctacctaaccgcaccgaagagaaagagaggccagaacgcgagcccaaactcgatcttcaaaagccatccgtgcctgctatccctcctaaaaagccccgaccccctaaaactaactcactaagcagacctggagctctccctccacgcaggcccgagagaccagttggcccattgactcatacacgcggagacagcccaaagatcgacctggccggatcgtcgcttagcggaattttggataaagaccttagcgacaggtcaaacgacatcgatctggaggggttcgatagcgtcgtgagctccactgagaagctgtcccacccgactaccagcagaccgaaagccactgggcgtaggcccccaagtcagagcctaacgtctagctcgctgagcagtccggacatttttgacagtcctagccccgaagaggacaaggaggagcatatttctcttgcgcatagaggagtggacgccagtaaaaagacatccaagaccgtcactatttctcaggttagcgataataaagcctcactgcccccaaagcccggaactatggctgcgggagggggtgggccagctccattatcgtctgctgcaccatcacccttatcttcttccctggggaccgctgggcatcgcgctaattcccctagtttattcggcaccgaggggaagccaaagatggaaccagctgcgagcagtcaggccgcagtggaagaactgcgtacacaggtgcgcgagctccgatctatcattgaaactatgaaggaccagcaaaagcgagagattaaacaattgctcagtgagctggatgaggagaaaaaaatccgtctgcggctgcagatggaagtgaacgatataaaaaaagccctacagtctaagtag

SEQ ID NO: 240420 - DNA, 1938 bp, synthetic construct
  misc_feature 1..1938: note = Description of Artificial Sequence: Synthetic coding sequence
  source 1..1938: mol_type = other DNA
ctaacaaataaggctccagaaaagcccctgcatgaggtccctagcggtaacagcctgttgagttcggagacgatcctgcgaacaaacaagcgaggcgagcgcaggagacggaggtgccaagttgcttttagctacctaccccagaacgatgatgagttagaactgaaagttggggatattattgaagtggtaggggaagtagaagagggatggtgggaaggagtcctgaatggcaagacaggaatgttcccatcgaattttatcaaggaactgtccggcgaaagcgatgagctggggattagccaggatgagcaactgagcaaaagccggcctgagggcctcccccctgcatccctactgccgttcccagctcacggggctaaaggaaaaaccaccttcgagggcacgattttgtatagggccgctccgggtaagaccgagggtcataggcgatattacagtctccgcgaaaccacaggttctgagtctgatgggggtgacagttcatcaacaaagtcggaaggggcaaatggaacggtcgctaccgccgctattcagccgaagaaggtgaagggcgtcggatttggggatatcttcaaggacaagccaatcaaactccgtcccagatctattgaggtggagaatgattttttgcctgtggagaaaactatcggtaaaaaactgcccgcaactacggccacccctgatagttctaaaacagaaatggactcccgcactaaatccaaagactattgtaaggtaatttttccgtatgaagcccagaatgacgatgagctgaccataaaggagggggacatcgtgacactgatcaataaagactgcattgatgttggatggtgggaaggggagcttaacggtaggcggggagtgtttccggacaatttcgtcaagctgttgcctccggattttgagaaagaaggcaatcgcccaaagaaaccaccgcctccttctgcaccagttatcaagcagggggcagggaccactgagcgcaagcatgaaattaaaaaaattccccctgaacgccctgaaatgttaccgaatcggaccgaggagaaagaacggccagagagagaacccaaattagatttgcagaaaccctctgtccccgctatccctcccaagaagccgcgtcctccaaaaacaaacagtttgtctcggcctggggcactgccacccaggaggccagagcgaccggtgggccctctgacccatacaaggggagattcgcccaagatcgacctggcaggttcatccttatcaggtatcctggacaaggaccttagcgaccgctccaatgatatagacctagaaggcttcgactccgtggtttcttcaacggaaaagctgtcccacccaaccacttctagaccaaaggctacagggcgacgcccaccatcgcaatcactaactagcagttccctgtcaagccctgacattttcgattccccatcccccgaagaggataaggaggaacatatcagcctggctcaccggggagtggatgcttccaagaagacgtccaagacagtaacaatttcacaggtgtctgacaacaaggccagcctcccgcctaagccaggaacaatggccgcaggaggcggaggaccagctcctctgtcatctgccgctccttccccacttagctcctccttggggactgctggccatcgtgcgaattcaccgagtctctttggcaccgaggggaagcccaaaatggaacccgctgcatcctctcaggcagccgtggaggaactgaggacccaggtgcgggagctgaggagcatcatcgagactatgaaggatcagcagaagagggagatcaagcagttactgtccgagctggatgaggaaaaaaagattcgcctgcgcctgcagatggaagtgaacgacattaaaaaggccctgcagtccaaatag

SEQ ID NO: 240421 - DNA, 450 bp, synthetic construct
  misc_feature 1..450: note = Description of Artificial Sequence: Synthetic coding sequence
  source 1..450: mol_type = other DNA
tttgagacatcagagagacgtaggagacggtgtcaggtggcttttagctacctgcctcagaatgacgatgaactggagctcaaggtaggcgacataatcgaggttgtcggagaagtcgaagaggggtggtgggagggcgtgctgaatgggaaaaccggaatgttccccagtaacttcattaaagaactgagcggggagtccgacgagctgggtatttcacaggatgaacagttaagtaaaagctccttgagagaaaccacaggatcagagagcgatgggggtgattcctcctccactaagtccgaaggtgcgaacggcaccgtcgccacagcagcaattcaacctaagaaggtcaaaggcgtcgggttcggcgatattttcaaggataagcctataaagctgcgtccaagaagtatagaagttgagaatgatttcctcccggtagagtag

SEQ ID NO: 240422 - DNA, 1998 bp, synthetic construct
  misc_feature 1..1998: note = Description of Artificial Sequence: Synthetic coding sequence
  source 1..1998: mol_type = other DNA
atggtggaagccattgtggaatttgattatcaggcccagcatgacgatgagctgaccattagcgtgggggagattatcactaacattagaaaagaggatggtgggtggtgggagggacaaatcaacgggaggcgcggactgttccctgataattttgtgagagagatcaagaaggaaatgaaaaaggatccgctcacgaacaaagccccagaaaagcccctccacgaggtaccctcaggcaattcacttttatctagtgagacaatcctccggaccaacaaacggggagaaagacgaagacgccgatgccaggtagccttctcttacctgcctcagaatgacgatgagctggaactcaaggtcggagatatcatcgaggtggtgggagaagtggaggagggctggtgggaaggagtactgaacggcaagacggggatgttccctagtaatttcatcaaagagctatccggggagagtgatgaactgggaatcagccaggacgagcagcttagcaagtcatcacttcgagaaactaccggctccgagagtgatggaggcgacagttcctccacgaagtctgaaggcgcaaatggcacagtcgccacagcagctattcagcccaagaaggtaaagggagttggcttcggtgacatatttaaagacaagccaatcaaactgagacctaggagcattgaggtggagaatgactttctgcctgtcgagaaaacaattggcaagaagttaccagccacaactgcaacaccggactcgagcaagactgagatggacagccggacgaaatccaaagactactgtaaggtgatcttcccgtatgaagctcagaacgatgacgaactcactattaaggaaggagacatcgtgacgctgatcaacaaggactgtatagacgtgggctggtgggaaggcgaactcaacggaaggcgcggtgtgtttcctgataatttcgtgaagctgctgcccccagactttgaaaaggaaggaaaccggccaaagaaacctccacctccgagtgctcccgttataaagcagggtgcaggaactaccgagaggaagcacgagatcaagaagatccctcccgaaaggcctgagatgttgcctaaccgcaccgaggagaaggaaagacctgaacgagaacctaaactggacctgcagaagccatcagtgccagctatcccgcctaaaaagccaaggccccctaaaactaacagcctgtctcgcccaggcgcactccctccaagacggccagaaagaccagtcggaccccttacccacacacgtggggactctcccaaaatcgaccttgccggttctagcctgagtgggatcttggataaggacctctcagaccgttccaacgacatagatctggagggtttcgatagcgtcgtttcatccaccgagaaactgagccatccaactacctcgcgacccaaggctaccggtcgcaggccccctagccaatctctgacctccagttccctgtcgagcccagatatctttgacagtccatctcccgaagaggacaaggaggagcatatttccctggcacatcgcggagtggacgctagcaagaaaacttcaaagaccgtcacgatttcccaggttagcgataataaagcgtctctgcctcctaaacccggtaccatggcggcagggggaggtggcccagcccctctgagcagcgcagctcctagccctttaagcagtagcttgggcacagccggtcacagggcaaatagcccatcgctgttcggtacagagggcaagccaaaaatggaacctgccgcaagcagccaggccgctgtcgaggaactgcgaacgcaagtgagagagcttcgatctatcatcgagaccatgaaagaccagcagaagcgggaaatcaaacagttgctgagcgagctggatgaagagaagaagattagactgcggctacagatggaagtgaatgatattaagaaagctctgcagtccaagtag

SEQ ID NO: 240423 - DNA, 450 bp, synthetic construct
  misc_feature 1..450: note = Description of Artificial Sequence: Synthetic coding sequence
  source 1..450: mol_type = other DNA
atggagcggagcgaaaggaggcggagacggtgccaggtggcattcagctatctgccccagaacgatgatgagctcgaattgaaagtcggggatattatcgaagtcgtcggggaagtcgaggaaggatggtgggagggcgtgcttaacggaaagactggaatgtttccttctaacttcattaaagagctgtcaggtgagtccgatgagctggggatatcacaggacgagcagctaagtaaatcttccctcagggagactactgggtccgaatccgacggaggagactcatcatccacaaaatccgagggggcaaacggcaccgtggccacagctgccattcagcccaagaaggtcaagggcgtgggatttggtgatattttcaaagataaacctataaagctcaggcctaggtccatcgaggtggagaacgacttcctgcctgttgagtag

SEQ ID NO: 240424 - DNA, 627 bp, synthetic construct
  misc_feature 1..627: note = Description of Artificial Sequence: Synthetic coding sequence
  source 1..627: mol_type = other DNA
atggagattaaaaaagaaatgaaaaaggatcccctgacaaataaagctccagagaaacctcttcatgaggtgcctagcggcaattccctgttgtcctctgagactatcctgcgcacaaataaaaggggtgaacgtcggaggcgcaggtgtcaagtcgccttttcgtacttaccgcaaaacgacgacgagttggaattgaaggtgggtgatataattgaagtggtaggcgaagtggaggaaggctggtgggaaggggtgctgaatggaaagaccggcatgttcccttccaacttcatcaaagaattgtccggggagtctgatgagctggggatcagccaggatgagcagttgtctaagtcttcgttgcgggagacaaccggaagcgaaagtgatggcggtgactcctcttcaaccaaaagtgagggcgctaacgggaccgtcgccacggccgctatacagcctaagaaagtgaagggcgtgggtttcggcgatatattcaaggataaaccaatcaagctacgtccgagatccattgaggtggagaatgactttctccctgtggaaaaaacgatcggtaagaagctccctgcaaccaccgctacaccagactcctcaaaaactgaatag

SEQ ID NO: 240425 - DNA, 1215 bp, synthetic construct
  misc_feature 1..1215: note = Description of Artificial Sequence: Synthetic coding sequence
  source 1..1215: mol_type = other DNA
atggacagtcgcacaaaatctaaggactactgtaaggtgatatttccttacgaggcgcagaatgacgatgagctgacaatcaaggagggcgacatagttaccttgataaataaagattgtattgacgtcgggtggtgggaaggggaacttaacgggagaaggggcgtattcccagacaatttcgttaaactactgcctcccgacttcgagaaggaaggcaataggccgaagaaacccccaccgccttcagccccagttatcaagcagggagccggaaccaccgaaagaaagcacgagattaagaagatcccccctgagaggccagagatgcttcccaataggactgaagaaaaagaaagaccagagcgggaaccgaaacttgacctccagaagccatctgtgcctgcgataccacccaagaagcctcggcctcctaaaacaaatagccttagccgaccgggagccttgccccctcgaaggcccgagcgcccagttggccctctgacgcataccaggggcgacagtcctaaaatcgacctggccggttccagcctctccggcattcttgacaaagatctatcagaccgcagcaacgatatcgacctggagggattcgacagcgtggtgtcgtctacagagaaactttcgcaccctacaaccagtagacctaaagctaccgggcgaagaccgccttcccagagcctgacaagctccagcttgtccagtcctgatatattcgatagtccatcacctgaagaggataaagaggagcacatatcgttagctcaccgtggagtggacgcctccaaaaagacgtccaagaccgtgacaatcagtcaagtctcagataacaaagcctcgcttccccctaagcccggtacgatggctgccggtggcggagggcctgcccctctgtcgtctgctgccccatccccacttagttcgagcttgggtacagcagggcatcgtgccaacagtcctagtttatttggaaccgaagggaaaccaaagatggaacctgctgccagttctcaggcagcggtcgaggagctcagaactcaggtccgcgaactccgctcaattatcgaaaccatgaaagaccagcagaaacgagagattaaacaactcttgagcgagctcgacgaggagaaaaagatccgattgagattacagatggaagtgaatgacattaagaaagcgctacaatccaaatag

SEQ ID NO: 240426 - DNA, 456 bp, synthetic construct
  misc_feature 1..456: note = Description of Artificial Sequence: Synthetic coding sequence
  source 1..456: mol_type = other DNA
atgaattgggcaccggctacctgctgggcgctgcttctggctgctgctttcctgtgcgattccggagccgcaaagggtgggagaggcggagctcggggtagcgcaagggggggagtacggggtggggctagaggggcaagccgcgtgagggtcaggcctgcccaaaggtacggcgcaccaggatcctccctgcgcgtggcagcagcgggtgccgcagccggagcagctgccggagccgcagccggactagctgcaggcagtggctggcgcagagcagcaggccctggggagagggggctggaagacgaggaggacggggtgccaggtggcaacgggaccggcccaggtatctattcatatagggcttggacaagtggggcaggacccacccgcggtcccaggctttgtctggtgctgggcggagcactcggggcactgggcttattaagaccatag

SEQ ID NO: 240427 - DNA, 456 bp, synthetic construct
  misc_feature 1..456: note = Description of Artificial Sequence: Synthetic coding sequence
  source 1..456: mol_type = other DNA
atgaattgggcacctgccacctgctgggcactgctgctggctgcagccttcctgtgcgactcaggagccgcaaaaggaggtcggggaggcgcacgcggatcagctcgaggcggagtgcgcggtggggcacgtggagcctcacgggttcgtgttagacccgcacaacgttacggggctcccggatctagtctgcgggttgccgcagccggtgccgctgcgggagcagcggcaggagcggctgccggactagccgctggcagcgggtggcggagggcagctggccctggagagcgtgggctggaggacgaagaagacggtgtccctggcggaaatggtactgggcctggaatctactcttaccgggcttggactagtggggcaggacccacacgcggacctcgactgtgtctcgtcctaggcggagctctgggcgctttaggcttgctcagaccttag

SEQ ID NO: 240428 - DNA, 981 bp, synthetic construct
  misc_feature 1..981: note = Description of Artificial Sequence: Synthetic coding sequence
  source 1..981: mol_type = other DNA
atggccccacccgctggaggggctgccgctgccgcttccgaccttggtagcgccgctgtacttttagccgtgcacgccgctgtaagaccgttaggtgcgggaccggacgccgaggcacagctgaggagattgcaattatctgctgaccctgagcggcctggtaggtttaggctggaattattgggggcaggccctggagcagtcaatctggaatggcctttggaatctgtatcatatacgattagaggcccaacccaacacgagcttcagcccccacctggaggcccaggaacactgagcctccactttctgaatccacaggaggcacagaggtgggccgtgctggtcaggggggcaaccgtggaaggccaaaatggctccaaaagtaactcgccaccagcccttggcccagaggcctgccccgtgagtctaccaagcccgccagaagcttctactctcaagggtccccctccggaagccgacttaccgaggagcccaggcaatctgacagagcgtgaggagctggccggaagtctagcgcgagcaatcgcaggcggtgacgagaagggggcagcccaggtcgccgctgtgctggcccagcacagggtcgctctctcagtgcagcttcaggaagcttgcttccccccaggccctatcaggctgcaggtgactctggaggatgctgcgtccgccgctagtgccgcaagttctgctcacgtggctctgcaggtccatcctcactgtactgtggctgccctccaggagcaggtgttctcagagctaggcttcccgcctgccgtgcagcggtgggtcatcggacgatgcctgtgtgtgcccgagagatctctggccagttacggagtgcggcaggacggcgaccctgcttttctttatctgctttcagccccaagggaggcccctgctcaactggtgctctctttcctccatttacatcaatgtccgcgacccccatggctctag

SEQ ID NO: 240429 - DNA, 1164 bp, synthetic construct
  misc_feature 1..1164: note = Description of Artificial Sequence: Synthetic coding sequence
  source 1..1164: mol_type = other DNA
atggcacctccagctggtggggcagctgccgcagctagcgaccttggctccgccgctgtgctgctcgctgtgcacgccgcagtgcggcctctcggcgcaggtcctgacgccgaggctcagctgagaaggcttcagcttagtgctgaccccgagcggccaggtcggtttcggctggagttactgggggctggccctggagcagtgaacctagaatggccattagagagcgtcagctacacgatcagagggccaactcagcacgagctccaaccacctccgggagggccaggaaccctttctcttcatttcctgaatcctcaggaagcacagcgctgggctgtactcgtgcggggtgcgacagtggaaggccagaatggttcaaaaagcaatagcccaccggctttgggacctgaagcatgccctgtgagtctgcctagtccacccgaggcatccaccttgaagggtccccctcccgaagcggacctgcccagatcacccggtaaccttacggaaagagaagagctggctggcagtctggccagggccatagcgggaggagacgagaagggggcagcacaggtggcagccgtactcgctcagcacagggttgccctgagcgtacaacttcaggaggcatgcttccctccgggtcccatccggctgcaggttactctagaggatgctgcctccgctgcatccgctgcttcatctgctcatgtggcactgcaggttcacccccattgcacggtcgccgctctgcaggaacaggttttctccgagctcggttttcctcccgctgttcagcgctgggtgatagggcgatgcctctgtgtacctgagcgttctctcgcgtcatacggggtgcgtcaggatggggacccagcgtttctttatctgctcagcgccccaagggaggctcctgctaccgggccttctccacagcaccctcaaaagatggacggcgagttgggcagactttttccgccttctcttgggcttccgccagggcctcagccagccgcttcttcgctacccagcccattgcaacctagctggtcctgtccttcatgtaccttcattaacgcacctgatcggcctggctgcgagatgtgcagcacacaacgaccgtgtacctgggatcctctggccgcagccagcacatag

SEQ ID NO: 240430 - DNA, 2019 bp, synthetic construct
  misc_feature 1..2019: note = Description of Artificial Sequence: Synthetic coding sequence
  source 1..2019: mol_type = other DNA
atggccgacgggtcccttaccggcggtggactcgaggccgcagccatggcgccagagcgtatggggtgggcagtcgagcaggagctggcctccctggaaaaggggctgttccaagacgaggacagctgcagcgattgtagctatagagataagcccggttccagtctgcagtcttttatgcctgagggaaagacctttttcccagaaatttttcagaccaatcagctgctgttctacgagcgatttagggcgtaccaggactatatcctagctgattgtaaagctagtgaagtgcaagagttcactgccgagtttctcgagaaagtgctggagccctcgggatggcgggctgtctggcacacgaatgtcttcaaagtgttggtggagatcaccgatgtggatttcgcagcactaaaggcggtcgttagactcgcagagccctacttgtgtgattctcaagtatctacgttcaccatggagtgtatgaaggagctcctcgacctcaaagaacatagacttcccttgcaggaattgtgggttgtgttcgatgatagtggagttttcgaccagactgcactggccatcgagcacgtgcgattcttctaccagaacatctggaggtcctgggatgaggaggaagaagatgagtacgactattttgtgaggtgtgtggagccacgccttcgccttcactacgacatcctggaagatagagttccttccggcctgatcgtggattaccacaatctgttgagtcagtgtgaggagagttataggaagtttctgaacctgcgatcctccttaagtaattgtaacagtgatagtgagcaggagaatatttctatggtggagggattaaaactgtacagcgaaatggagcagctaaagcagaagctcaagctcattgagaatcccctcctgcggtatgtctttgggtaccaaaaaaacagcaacatccaggcaaaaggcgtcagaagttccgggcagaagattacccatgtggtgtcatccacaatgatggccggtctgctgcgctcattgctcactgaccgactttgccaggagcccggagaagaggaacgagagattcagttccattctgaccccctcagcgcgatcaacgcatgctttgaaggggacaccgtcattgtgtgtccagggcactatgttgtccatggcactttcagtatcgcagatagtatcgagctcgagggctacgggcttcctgacgacatcgtgatcgaaaagagagggaaaggcgacacattcgtggactgtaccggtgctgacattaagatctcagggatcaagtttgttcagcacgatgctgttgagggcatactcatcgtccacagaggcaagaccactctggaaaattgcgtactgcagtgtgagaccaccggggtcactgtccgtacctccgccgagttcttgatgaaaaactccgatctgtatggggctaagggcgctgggattgagatttatcccggaagccaatgtacgctgagcgacaatgggatccatcattgcaaagaagggattctaattaaggatttcctcgatgagcattatgacatcccaaagatcagcatggtgaataacattattcacaataatgagggttatggtgtggtactagttaagccgacgatctttagtgacctgcaggaaaacgctgaggacggcaccgaggaaaataaggccctgaagatccagacaagtggcgaacccgacgttgcagagcgcgttgatctcgaggagctcattgaatgcgcgaccgggaaaatggaattgtgtgccagaactgatccgtcagaacaggtggagggtaattgcgagatcgttaacgagctaatcgcagctagcacccaaaaggggcagattaagaaaaaaagactgtcggagctggggatcacccaagctgacgataatcttatgagtcaggagatgttcgtcggaatcgtgggcaaccagttcaaatggaatgggaagggtagttttggtacatttctgttctag

SEQ ID NO: 240431 - DNA, 723 bp, synthetic construct
  misc_feature 1..723: note = Description of Artificial Sequence: Synthetic coding sequence
  source 1..723: mol_type = other DNA
atgaccgcacctgtgccagcaccaaggatcttgcttccgctgctactgttacttttgctgacccccccacccggagctcgaggcgaagtctgcatggcgtctcgcggactgtccctctttccagagagttgccccgatttctgctgtgggacgtgcgacgatcagtactgctgctcagatgtgcttaagaaatttgtttggagcgaggaacgctgtgcagtccctgaagccagcgtgccggcttcagtggaaccagtggagcagctgggtagcgccttacgcttccgccctgggtacaatgatcctatgagcgggtttggcgctaccttggctgtcggcctaactatctttgtgctatcagtggtgactataattatatgtttcacctgctcctgctgttgcttgtataagacctgcagaaggccccgacccgtcgtcacaaccactacctccacgactgtggtccatgcaccctaccctcagcccccttccgtacccccaagctacccaggaccatcataccagggataccataccatgccaccgcaacctggaatgccagctgcgccttacccgatgcaatatcctccaccgtatcctgcacagccaatggggcctcccgcttatcatgagaccctagctgggggagctgcagccccatatcccgcttcgcaaccaccttacaaccccgcttacatggacgccccaaaggccgctctgtag

SEQ ID NO: 240432 - DNA, 339 bp, synthetic construct
  misc_feature 1..339: note = Description of Artificial Sequence: Synthetic coding sequence
  source 1..339: mol_type = other DNA
atggctagtcgcggactgtctctgttccccgaatcatgccctgacttctgttgcgggacttgcgacgaccagtattgctgtagcgatgtcctaaaaaaattcgtgtggtcagaagaaagatgcgccgtccctgaagcttccgtcccagcatcagtagagcctgtcgaacaactagggtcggcccttagatttcgccctggctataacgacccaatgagcggattcggcgctactctagctgtggggctgaccatttttgtcctctccgtagtgaccattatcatatgctttacttgctcctgttgctgcctatacaagacctgcagaaggccaaggtag

SEQ ID NO: 240433 - DNA, 414 bp, synthetic construct
  misc_feature 1..414: note = Description of Artificial Sequence: Synthetic coding sequence
  source 1..414: mol_type = other DNA
atgggcttcggggcaacactggccgtgggattaacaattttcgtgctgagcgtagtgaccatcattatttgctttacctgttcctgttgctgcctgtataaaacatgcagaaggcctaggcctgtcgtcactaccacgacttccactacggttgtccacgccccttatccacagcctcccagcgtgcccccttcttaccccggaccatcgtaccaaggttaccacactatgccccctcagcctggaatgccagctgcaccttaccccatgcagtacccaccgccttacccggcacaaccgatgggtccccctgcctaccacgagacactggcgggaggggctgctgccccttatccagccagtcagcctccttacaaccctgcctacatggatgcccctaaagctgccctttag

SEQ ID NO: 240434 - DNA, 630 bp, synthetic construct
  misc_feature 1..630: note = Description of Artificial Sequence: Synthetic coding sequence
  source 1..630: mol_type = other DNA
atggcctcaaggggactgtccctgttccccgaatcttgccctgacttttgctgcgggacttgcgatgatcaatactgttgctcagacgtgttgaagaaattcgtgtggtccgaggagcgctgcgccgtaccggaagcaagtgtgccggcatccgtggagccagttgagcagttgggctcagctcttaggttccgcccagggtacaatgacccaatgagtggctttggggctactttggccgttggcctcacaatttttgtgctgagtgtcgtcactatcatcatctgtttcacttgtagctgctgttgtctgtacaagacgtgccgtaggcccagacccgtggttactacaacaacttcgacaactgtggtgcacgcaccttatccccaacctccatcagtgccaccttcttatcccggtccctcataccaaggatatcatactatgccccctcagcccggaatgcccgcagccccttaccctatgcagtaccctcccccttatcccgcacagcccatggggccaccggcataccatgagacactggccggaggggctgctgctccctacccagctagccagccaccttacaacccagcctacatggacgccccaaaggcagccctgtag

SEQ ID NO: 240435 - DNA, 630 bp, synthetic construct
  misc_feature 1..630: note = Description of Artificial Sequence: Synthetic coding sequence
  source 1..630: mol_type = other DNA
atggcttctagaggcctgagtctgtttccagagtcatgtcccgatttttgctgcggtacatgcgacgaccagtactgctgttctgatgttctcaagaaattcgtgtggtcagaggagaggtgtgcagttcccgaggcatccgtgccagcaagtgtcgagcctgtcgaacaacttggatccgccctgcgctttcggcctggatacaatgacccgatgtcaggatttggggctaccctggctgtgggcctaacgatcttcgtgctttctgtcgttaccataatcatctgctttacgtgcagctgttgttgcttatacaagacctgcaggcgaccaaggcccgtggtgacaacaactaccagcactaccgtagtccatgccccataccctcagccacctagcgtgcctccgtcttatcctggaccatcatatcagggctatcacaccatgccccctcagcccggaatgcccgctgctccatacccaatgcaatatccccctccatacccagcccagccaatggggccaccagcataccacgagactctggccggtggtgctgccgcaccatatccagcctctcagcccccatacaaccctgcgtacatggatgcaccaaaggccgctctgtag

SEQ ID NO: 240436 - DNA, 513 bp, synthetic construct
  misc_feature 1..513: note = Description of Artificial Sequence: Synthetic coding sequence
  source 1..513: mol_type = other DNA
atgcccccacagcccggatgccaacagcaccctacccagtgtagcactcatcaccttactcagccgtccccttgggctcaccgtcccactacacggccttggctggaggagcagcccaggccaactccacctgccagcctcctgaccacccgccctacctggatgccacgcggaggtcctctttcaattccatggcctctctggcttccactcggctatgtggtgtgtgttagggagtggtgtgccggtgccgtgccatacgctccttgcgtgctgtgtgtctcatgcctctatatgtggctgcccctgatgctcacccgctggggaacaattctcgctagagtggggtgggatcagacccttttttctagctctcctgagataatgcttcccaaaatctcttcacagactcagcggatgggttggtggggagctccctgtgaggtggctccagaacggtgggggccattgcaaggtacatccggtgtgttactccaattgacgttgggatag

SEQ ID NO: 240437 - DNA, 666 bp, synthetic construct
  misc_feature 1..666: note = Description of Artificial Sequence: Synthetic coding sequence
  source 1..666: mol_type = other DNA
atgaggcgcgtgcttcggctgttgctggggtgcttcctgactgagctgtgtgcaagggtttgccgagctcaggaaagagctggacatgggcagcttgcccagcttggtggcgtactcctgttggccggaggcaacagaagcggggctgcatcgggagaagcgagtgaaggcgcagaggcctccgatgcaccccctaccagggcacctaccccggatttttgccgcggatattttgacgttatgggccaatgggaccccccattcaactgttcatctggagacttcatcttctgttgcggtacctgcggatttcgattctgttgcactttcaagaaaagacggctaaatcagtcaacatgcactaactatgacacgccattgtggctgaatacggggaaaccaccagcacggaaagatgaccctctccacgaccctactaaggacaagacaaatttgatcgtgtatattatttgcggagttgtcgccgtcatggtgttggtgggaatctttacgaagttgggcctggagaaagcccatagaccccaaagagagcatatgagtcgactgtatgataacctattatttatggaggcccagatctccttccaggaggatgagccggctccgggagagtggtccgtcggattgcaaacttggaccgtatag

SEQ ID NO: 240438 - DNA, 1275 bp, synthetic construct
  misc_feature 1..1275: note = Description of Artificial Sequence: Synthetic coding sequence
  source 1..1275: mol_type = other DNA
atgcggagggtgctgagactcctgctcggctgctttctgaccgaactctgcgccagggtatgcagagcccaagaacgagccggacacgggcagctcgctcaactgggaggcgtactcctgctagcgggtggaaatcgctcaggcgctgcctcgggagaggcaagcgaaggggctgaagcttcggatgctcccccaacacgggcacccaccccagatttctgtagaggctactttgacgttatgggccagtgggaccccccattcaattgtagtagtggggatttcatcttttgttgcggcacatgtgggtttcggttttgctgtacatttaagaaaagacggttgaaccaatccacatgtaccaattacgacacgcccctctggctgaatacagggaagcctcccgcaagaaaggatgatcctcttcacgaccctaccaaagataaaactaatttgattgtttacattatctgcggagtggtggccgtcatggtcctcgtagggatctttaccaaattggggctagaaaaagcgcatcggcctcaacgagagcatatgtcacgcgctctggccgacgtcatgcgccctcagggtcattgcaataccgaccacatggagcgggatctcaacatcgtggtacacgtgcaacactacgagaacatggacactagaacacccattaacaatttacatgctacccaaatgaataacgccgtgcctacgagccccctcctccagcagatgggacatccccatagctatccaaacctggggcagatctccaatccgtatgagcagcagcctcccggaaaggaactcaacaagtacgctagcctcaaagctgtggggtcttctgatggagattgggctgtgtcaaccttgaagtcccctaaagctgacaaagtgaatgatgacttttatacgaaacggcgacacttggctgagcttgcagcgaagggaaatctgcccctgcatcctgtgcgggttgaagatgaaccacgggcattctcacccgagcatggcccagctaaacaaaacggacagaaatccaggaccaataagatgcccccacatccactggcttacacctcgactactaacttcaaaggctgggatcccaacgaacagtcactgagaaggcaggcctacagcaacaaagggaaactcggaaccgctgagacagggagtagcgatcccctggggactaggccacagcactaccccccaccacagccgtactttattacaaatagtaaaactgaagtcaccgtatag

SEQ ID NO: 240439 - DNA, 789 bp, synthetic construct
  misc_feature 1..789: note = Description of Artificial Sequence: Synthetic coding sequence
  source 1..789: mol_type = other DNA
atgtgcggacccaggaggcttgctgctccgggatcaagtctcgggtcattcggtagggcctcccggggaggacggcgaggctcaagcgggggaagagccgcagaacctgggctgggcgacacaatgcgcagggttttacgtctccttttaggctgctttctgactgaattatgcgccagagtgtgccgggctcaagagagggccggacatggccaactcgctcagctgggaggcgtcctgctgctcgccggaggaaatagatctggcgcagccagcggcgaagcaagcgagggcgctgaggcctcagatgcgcctccaaccagggctcccacccccgatttctgccgtggctattttgacgttatgggacagtgggatcctccttttaattgctcttctggggattttatcttttgctgtggtacatgcggatttcggttctgctgtacgttcaagaagcgcagactgaatcagtctacctgtacgaattatgacacacccctctggctgaatacaggcaaacccccagcacggaaagacgaccctctgcacgatccgacgaaagataaaacaaatttaattgtttatataatttgtggcgttgttgctgtcatggtgttggtgggtatcttcaccaaactagggctggagaaggcccataggccccaaagggagcacatgtcgcgcctctacgataatttactgtttatggaggcacagatctcttttcaagaggatgagccggcaccaggggagtggagcgtaggccttcaaacatggacggtgtag

SEQ ID NO: 240440 - DNA, 1398 bp, synthetic construct
  misc_feature 1..1398: note = Description of Artificial Sequence: Synthetic coding sequence
  source 1..1398: mol_type = other DNA
atgtgcggaccacgtagacttgccgcaccgggatcctcacttgggtccttcggcagggccagcagagggggacgaagagggtcctccggaggacgcgcagcagagcccggacttggcgacacgatgcgcagagtcctcagactcctgctgggatgttttctaacagagttgtgtgcacgcgtttgtagggcccaggagagggccggacatggccagctggcacaactgggtggggtgttgctgctagcgggtggtaacagaagcggagccgcaagtggggaagcatcggagggagcagaggcatccgatgccccacccactagggctcccacacccgatttttgtcgcggatactttgacgtcatgggccagtgggatcccccatttaattgttcctctggagactttattttttgttgtggcacgtgcgggtttagattctgctgtacttttaaaaagcggagactaaatcagagcacatgtactaactatgatactccactttggttaaatacaggcaagccaccagcgaggaaggatgaccctctgcacgaccctactaaagataagacaaacctgatcgtctacatcatttgcggcgtggtcgctgttatggtgctggtgggcatctttactaagctgggccttgagaaagcccacaggccccagagagaacacatgagtcgagccttggctgacgtgatgaggccacagggacattgcaacacagatcatatggagcgggacctcaatatagtcgtccacgtgcagcactacgagaatatggacaccaggacacctataaataatctgcacgctacgcagatgaataacgccgttcctacctctccattgctacaacagatgggtcacccacactcatatcctaatctgggccagattagcaacccgtacgagcagcagcctccaggcaaagagctcaacaaatacgcttccctgaaggcggtcggcagcagtgacggagattgggcagtgagcacccttaagagtccgaaagcagataaggtgaacgacgacttctacacgaaaaggcgtcacttagcggagctggccgcaaagggtaaccttccacttcaccctgtgagagtggaagacgagcctcgcgctttttctcctgaacacggccctgctaagcagaatgggcagaagtcgaggaccaacaaaatgcctcctcatcccctggcctatacttccaccactaacttcaaggggtgggacccaaacgaacagtccttaagaagacaggcttattctaacaaggggaagttgggtacagctgaaacaggcagtagcgatccactcgggaccaggccccagcactatccacccccacagccgtactttatcaccaactcgaagacagaagtcacagtgtag

SEQ ID NO: 240441 - DNA, 678 bp, synthetic construct
  misc_feature 1..678: note = Description of Artificial Sequence: Synthetic coding sequence
  source 1..678: mol_type = other DNA
atggaggaattgacagcttttgtgagtaaatcctttgaccaaaagagtaaagatgggaatggagggggtggcggaggtggaggcaagaaggactccatcacataccgggaggtgttagagagcggtttagccagatctagagagctgggaacttctgacagctcattgcaggacattacagaaggcggaggtcattgccccgtccatctgttcaaggatcacgtcgacaatgacaaggaaaaactgaaggaattcgggaccgccagggtggctgaaggcatttatgagtgcaaggagaaacgggaggatgtgaaatcagaggatgaggacggccagactaaacttaaacaacgtagaagcagaaccaattttactctcgagcaactcaacgagttagaaaggcttttcgatgagacacactaccccgatgcttttatgcgggaggaattatcacagagattgggtttatctgaagcccgagtgcaggtatggtttcaaaacagacgggcaaaatgtagaaaacaggaaaaccaaatgcacaagggagtaatactgggtacagcaaaccatttggacgcctgccgagttgcaccgtatgtgaatatgggtgccctgagaatgccattccagcagatggaattttgctcttgtaggcctgggtggagtatcatggcttag

SEQ ID NO: 240442 - DNA, 678 bp, synthetic construct
  misc_feature 1..678: note = Description of Artificial Sequence: Synthetic coding sequence
  source 1..678: mol_type = other DNA
atggaggagctaactgcgttcgtatcaaagtcctttgaccaaaagagcaaagatggaaacggcggaggtggcggtggcggtggcaaaaaagacagcataacataccgggaagtgctggagtccggtcttgctcgatctcgggagctgggcacgagtgatagtagcctgcaagatattaccgaaggaggtggccattgccccgtacacttattcaaggaccacgtggacaacgacaaagagaagctcaaagaatttggaaccgcccgagtcgcagagggcatctacgagtgcaaagaaaagagggaggacgtgaagtcagaagacgaagacggacaaacaaaacttaagcaacggcgttcaaggacaaacttcactttggagcagctgaatgagttagaaaggctgttcgacgagactcattaccctgacgcgttcatgcgggaggagctgtcacagcgacttgggctctccgaggcaagagttcaggtttggttccagaataggagagccaagtgccgcaagcaggaaaaccagatgcataagggggtgattttaggtacagccaaccacctggatgcatgtcgagttgctccatacgttaacatgggcgcactgcgaatgccctttcagcagatggaattctgctcctgccggccaggctggtctatcatggcttag

SEQ ID NO: 240443 - DNA, 879 bp, synthetic construct
  misc_feature 1..879: note = Description of Artificial Sequence: Synthetic coding sequence
  source 1..879: mol_type = other DNA
atggaggagctgacagcctttgtctctaagagcttcgaccagaagagcaaggacggcaatgggggaggcggaggtggcggaggaaagaaagatagtattacttaccgggaggtgctagaaagcgggctcgcccgatcacgagaacttggtactagcgatagcagcttacaggatattacagagggcggagggcactgcccggtacacctgtttaaggatcacgttgataatgataaagagaagctgaaagagtttggaacagccagagttgcagaaggcatctatgaatgcaaagaaaaaagagaggacgttaagtccgaagatgaggacggccagacaaaacttaaacaacggcgtagcaggacgaatttcacgctggagcaactgaatgaattagaacggcttttcgatgaaacccattaccctgacgcgtttatgcgcgaggaactttcccagcgtctgggactcagcgaggctagagtgcaagtatggttccagaaccgcagggccaagtgtcgcaagcaagagaatcagatgcataagggcgtgattcttggcacggccaaccatctggatgcatgccgcgtggctccctatgtgaacatgggagctctgcgcatgccattccaacaagtgcaggcgcagctacagctggagggggtggcccatgctcatcctcatcttcacccgcacctggcagcccacgccccatacctcatgttcccgccacccccttttggactgcccatcgcatcactggccgagtccgcctcagctgccgctgtggttgcagccgctgctaagtcaaattcaaaaaactcatcgattgcagatctcagactgaaagccagaaaacatgcagaggcccttggtctttag

SEQ ID NO: 240444 - DNA, 879 bp, synthetic construct
  misc_feature 1..879: note = Description of Artificial Sequence: Synthetic coding sequence
  source 1..879: mol_type = other DNA
atggaagagttgaccgcctttgtgtcgaagtcttttgatcagaagtctaaggacggcaatggaggagggggaggtggtggtggaaagaaggatagcatcacttacagagaggtactggagtccgggcttgctcgatctagggaactgggaacctcggacagttcactccaggatataactgagggcggtggccattgcccggtgcacctctttaaagaccatgtggacaatgacaaggaaaaattgaaagagtttggcactgccagggtggccgaaggaatctatgagtgtaaggagaagagggaggatgtgaagtctgaggacgaggatggtcagactaaactgaagcagcgccgttcgcgcacaaattttacactggaacagcttaacgagctcgagcgcctgttcgatgagacccattaccccgacgcttttatgcgcgaagaactcagtcaaaggctgggtctaagtgaggcacgcgtgcaggtgtggttccagaatcgcagggccaaatgtaggaaacaggagaaccagatgcacaaaggtgtgatattgggcacagccaaccacctggacgcctgccgcgtcgcaccttatgtgaacatgggagcgcttcgaatgccctttcagcaggtccaagcacagctgcagttggaaggggtggctcatgcccaccctcaccttcacccacatctggctgctcatgccccttacctcatgttcccccctccaccttttggcctccctattgcatctctggccgaaagcgcctcagcggcagccgtagtggccgctgctgccaagagtaattccaaaaactctagtatagcagacctgagacttaaagccaggaaacacgcagaagccctgggcctttag

SEQ ID NO: 240445 - DNA, 573 bp, synthetic construct
  misc_feature 1..573: note = Description of Artificial Sequence: Synthetic coding sequence
  source 1..573: mol_type = other DNA
atggaggacgaagggcaaactaagatcaaacagaggcggtcacgaacaaatttcacattggagcagctgaacgagctcgagagactgttcgatgagacacattacccagatgcattcatgcgggaggagctgtcccagaggctggggctaagcgaggcacgcgtacaggtgtggtttcagaatcgcagagcaaagtgtcgcaagcaagaaaatcagcttcacaaaggagtgctgattggcgctgcctctcagtttgaagcatgtagggtggctccatatgtaaacgtgggcgcactgaggatgcctttccagcaggtccaggcacagttacagcttgattcagccgttgcacacgcacatcatcatctccacccgcacttagcagctcatgctccatatatgatgtttcctgcccctccctttggtctcccactcgccaccctagccgctgactctgcttccgctgcatccgtggtggccgctgccgctgctgccaaaaccacatctaaaaattccagtattgccgatctgaggttaaaggccaaaaagcacgccgcagccttggggctgtag

SEQ ID NO: 240446 - DNA, 996 bp, synthetic construct
  misc_feature 1..996: note = Description of Artificial Sequence: Synthetic coding sequence
  source 1..996: mol_type = other DNA
atggaggaactcactgccttcgtgagcaaaagctttgatcagaaagtcaaggagaagaaggaggccatcacctacagagaggtgttagagtcaggccctctgcggggtgcgaaggagccaaccggatgcacagaagcaggtcgcgatgatcgttcgtcacctgccgtgagggccgctgggggaggcggagggggaggaggcggaggaggaggcggagggggaggaggcggtgtcggtggtggaggggctggcggtggcgctggtgggggacggagtccagtcagggaactggacatgggagctgctgagaggagtcgcgaacctggcagtcctcgtttgaccgaagtgtcccccgaacttaaggatcggaaagaggatgcaaaagggatggaagacgagggccagactaaaattaagcagagaaggagtcgaacgaatttcacactggagcagctgaatgaactcgaacgattgttcgatgaaacacactatcccgacgcctttatgagagaggaactctcacagcggctggggctgtcggaagcacgtgtgcaggtgtggttccagaaccgcagagctaaatgtaggaagcaggagaaccaactgcacaaaggagtgctgatcggcgcagcttcacaatttgaggcctgtagagtagcaccctacgtgaacgtgggggcactgcgtatgccttttcaacaagacagtcactgtaatgttactccactgtccttccaggtccaggcacagctgcaactcgattcggctgtcgcacatgctcaccatcatttacacccccacctagccgcacatgcgccatacatgatgttccccgcaccgccttttgggctccctctggccaccctcgctgctgatagcgcaagcgccgcaagcgtggttgccgctgctgctgccgctaagaccacatctaaaaacagcagtattgccgacctccggttgaaggcaaagaaacacgcggcagcactgggtttatag

SEQ ID NO: 240447 - DNA, 1068 bp, synthetic construct
  misc_feature 1..1068: note = Description of Artificial Sequence: Synthetic coding sequence
  source 1..1068: mol_type = other DNA
atggaggagctgactgcgttcgtcagcaaaagcttcgaccagaaagttaaggaaaagaaggaagcaatcacctatcgcgaagtattggaatccgggcctttgcggggtgccaaggaacctacagggtgcactgaagcgggacgtgacgataggtccagtccagcggtgcgggcagcaggtgggggagggggagggggtggcggtggaggcggtggcggaggcggtggtggtgtcggaggtgggggtgccggaggcggagcgggaggtggtcggagtcctgtccgagagctggatatgggcgcagccgagcgtagtcgcgagcccggttcacccagactgaccgaagggcgtagaaagccaaccaaagcagaagtgcaggctactctcctcctgccgggtgaggcttttagattcctagtatctccggagctcaaggacagaaaagaggatgccaaaggcatggaagacgaaggccaaactaaaatcaaacaaaggcgctcacggacgaactttacgctggaacagctgaacgaactggagcggctgtttgatgagacccattatccggacgctttcatgcgcgaggagcttagccagaggttgggcctgagcgaggctagggtccaggtgtggttccagaatcggagagccaaatgtaggaagcaagaaaaccagctgcataagggggtgctgattggagctgcatcccagtttgaagcctgcagggttgcgccttacgttaacgtgggcgcattacgaatgcccttccagcaggatagccattgcaatgtaacaccgctttcatttcaggtccaggcacagcttcagctggactctgcggtggcgcatgctcaccaccacctccatccgcacctcgccgcacacgcaccgtacatgatgttccctgcccctccattcggactgccactggcaacattggcagccgacagcgccagcgccgcatcagtggtggcggcagccgctgcggcaaaaaccacatccaagaactcctcaatcgccgacctgcggttgaaggctaagaagcacgctgcagcacttggcctgtag

SEQ ID NO: 240448 - DNA, 573 bp, synthetic construct
  misc_feature 1..573: note = Description of Artificial Sequence: Synthetic coding sequence
  source 1..573: mol_type = other DNA
atggaagacgaaggccaaacaaaaatcaaacaacgacgaagccgaacgaacttcactctggaacagctaaatgaattggaacgactttttgacgagacacattaccccgacgctttcatgagggaggagctgagccaaagactgggcctttccgaggcccgagttcaggtttggtttcagaataggcgggcaaaatgcaggaagcaggaaaatcaactccacaaaggggttctgatcggggctgcgtctcaattcgaagcatgtagggtggctccttatgtgaacgtgggggctctgcgcatgccctttcagcaggtgcaggctcagcttcagctggacagtgccgtggcacacgctcaccatcacctgcacccccacctggccgctcatgccccatacatgatgtttcctgccccaccttttgggctgcccttggccacactagccgcagacagtgcgagtgctgcgagtgtggttgccgctgctgctgccgcaaagaccacgagcaagaactcaagcatcgctgacctgagactcaaagccaaaaagcatgcggcagctctcggcctctag

SEQ ID NO: 240449 - DNA, 573 bp, synthetic construct
  misc_feature 1..573: note = Description of Artificial Sequence: Synthetic coding sequence
  source 1..573: mol_type = other DNA
atggaagacgaaggccagaccaagattaaacagaggagaagcaggaccaactttaccctggaacaactgaatgaactggagcggctttttgatgagacgcattaccccgacgcgttcatgcgggaagaactaagtcagaggctgggcctgtccgaggcaagagtgcaggtgtggtttcagaacaggcgggctaaatgcagaaagcaggagaatcagctgcataagggtgttctcattggagcagcctcgcagtttgaagcctgtagggtggccccttacgttaacgtgggggctctccggatgcctttccagcaagtgcaggcacagctgcagcttgattcagctgtggctcatgcccaccaccaccttcacccacatctcgcggcacacgcaccttatatgatgttcccagccccaccattcggtctgccgctggccaccctcgctgcagacagcgcatccgccgctagcgttgttgccgcagcagcggctgcgaagacaaccagtaaaaattctagcattgctgacctccggctgaaggcaaagaaacatgctgctgcgttaggcctctag

SEQ ID NO: 240450 - DNA, 1734 bp, synthetic construct
  misc_feature 1..1734: note = Description of Artificial Sequence: Synthetic coding sequence
  source 1..1734: mol_type = other DNA
atgctgacaccggcattcgatctgagtcaggatcctgactttctgaccattgctatccgagtgccctacgcgagggtgagtgagttcgatgtgtatttcgaagggagtgattttaagttctacgctaaaccatacttcctgagacttactttgcccggaagaatcgtagagaacggcagcgaacagggtagctacgacgcagacaaaggtatctttacaatcagactgccaaaggaaacgccaggccagcactttgaaggtcttaatatgctaactgccctgttggcgcctcgcaaatcgaggactgccaagcccttagtcgaggaaatcggtgcctctgagattcctgaagaggtggtggacgatgaggagttcgactgggagatagaacaaaccccatgtgaggaggtgtccgagtcagctctgaatccacaatgccactacggattcggcaacctccggagcggcgtcctgcagaggctccaagacgaactgagtgacgtgatcgacattaaggaccctgactttactcccgcagcagaacggaggcagaagcgactggccgctgagctggcgaaattcgaccccgatcactacttagcagacttctttgaggatgaagccatcgaacagatcttgaaatataatccttggtggactgataagtatagtaaaatgatggcatttctcgaaaaaagccaggaacaagaaaaccatgcaaccctggtgtctttctcagaggaggaaaaataccaactaagaaaatttgtaaacaagagctatctcctagataagagagcttgtcgccaagtctgttactcactgattgatatcctgttggcctactgctacgaaacaagagtcacagagggagagaagaacgtggagtccgcttggaacattagaaaattgtctcccacattatgctggttcgaaacctggacgaatgtgcatgacatcatggtgagcttcggcagacgtgtgttgtgttatccgctgtaccgtcacttcaagcttgtaatgaaggcgtatagggacactataaaaatcctgcaacttggaaaatcggctgtgttaaagtgcttactggacattcataagatctttcaggaaaatgacccagcctacattctgaatgacctctacatcagcgactattgtgtttggattcaaaaagtaaagtctaagaaattggccgctttggcggaggcactaaaggaagtgtcactcactaaagcgcagttgggactcgaactggaggagttagaggccgctgccttactcgtgcaggaagaagaaaccgccttgaaagcggctcattcagtcagcggccagcagactctgtgttccagctccgaagcctctgattcggaggatagcgattcctccgtttcttctggaaatgaggattccggaagcgacagtgagcaggacgaacttaaggatagcccttccgagacagtatcatctctccagggtcctttcttggaggaaagctccgcatttctgatcgtcgacggcggagtcagacggaataccgctatacaggaaagcgacgccagtcagggtaagccgctcgcgtcatcctggccactcggagtctccgggccattgatcgaggaactgggcgaacaactcaagaccactgtgcaggtgtcagaacccaaaggaaccacagcagtcaacaggagcaacattcaggaaagagatggctgtcagacccccaataattag

SEQ ID NO: 240451 - DNA, 4850 bp, synthetic construct
  misc_feature 1..4850: note = Description of Artificial Sequence: Synthetic coding sequence
  source 1..4850: mol_type = other DNA
atggaaggggctgagcctagagccagacccgaacgtctcgccgaggccgagacacgagccgctgacgggggacgactggtggaagtacaactcagcggaggcgctccttggggctttaccctaaagggtggcagggagcacggtgagcctcttgtaatcacgaagatagaggaagggtccaaggctgctgctgtggacaagttgttagctggagatgagattgtgggtattaacgacatcgggttgtctggttttaggcaagaagccatatgtcttgtcaaaggaagccacaagaccctaaagctcgtagtgaaacgcagatcagagctaggctggcgcccacactcttggcacgcgaccaaattctctgacagccatcccgagctcgccgcttccccatttacaagcacatccggctgtccttcatggagtgggaggcatcacgcctcttcttcatcacacgacctgtcctcttcctgggagcagacgaatctccagcgcaccctcgaccatttttctagtctcggctctgtcgacagcttggatcacccttccagtcggctgtcggtggccaaaagcaattcgtctatcgaccatctcggcagccacagtaaaagggactcagcctatggtagttttagtactagcagttctactcccgaccataccctgagcaaggcagacactagctctgccgaaaacattctgtacaccgtcgggctatgggaggccccaagacaaggcggtaggcaagcacaggccgctggagatccccaggggtctgaagagaagctgagttgtttccctcccagggtcccaggcgactccggaaagggacccaggccggagtataatgccgagccaaaattggccgctccagggaggtctaactttggcccagtgtggtatgtgccagataagaaaaaagctccttcctccccacctcctcccccaccgccactgcgaagcgatagctttgccgctactaagtcacatgagaaagcccaaggtcctgtatttagcgaggctgcagcagcacagcactttactgcccttgctcaggcccagccgcgaggtgatagacgccctgagctgacggatcggccttggcggtccgcccaccctgggagtctgggtaaaggcagcgggggtcccggatgcccccaagaggcacatgccgatggctcttggccccctagcaaggatggagcctctagtcgactgcaagcttctttatccagttccgatgtaaggttcccccagtctccacattccgggaggcaccctcctttatatagtgaccatagccctttgtgtgctgattctctggggcaagagcctggagctgcgtcatttcagaacgattctccaccacaagtgcggggactaagctcgtgtgaccagaaacttggatctggctggcagggtccccgaccatgtgtgcagggcgacctgcaagccgctcaattgtgggcaggatgttggccaagtgacacagcgcttggggctctggagtccctcccgcctcccacggtggggcaatctccgaggcatcatcttcctcagccagaaggaccgcctgatgccagagaaactggacgatgctacccactggataaaggcgcagaagggtgcagcgccggtgcgcaggaacctccaagagcatctcgcgctgagaaggcctctcaaagactggctgccagcatcacatgggcagacggggagtcaagtaggatatgcccgcaagagacaccacttttgcattcgctcacccaggagggtaaacggaggcctgagagttcccctgaagacagtgctacccgtccccctccattcgacgctcacgtgggcaagcctacacggaggtctgatcgttttgcaactactctgagaaacgaaatccagatgcatcgggctaagctgcagaaaagccgcagcaccgtagctctgactgcggctggcgaggccgaagatggcacaggcaggtggagggcaggcttgggagggggtactcaggaaggacccctggcaggcacttacaaggaccacttaaaagaagcccaggctcgcgtccttagggctacttcattcaagagaagagaccttgacccgaacccaggcgatctgtatcccgaaagcttggagcatcgaatgggggatcccgatactgtgccccatttttgggaggcgggactcgctcagcccccatcgagtactagcggtgggccacaccccccacggatcggagggaggagacggtttacagccgagcagaagctaaaatcttacagcgagccagagaagatgaatgaagtgggtttgacccgtggatactctccccaccaacatccacgcacaagtgaggacacggttggtacctttgcggaccgatggaagttttttgaggagacatccaagccagtacctcagcgacccgctcagaaacaggccttacacgggatacccagggataagccggaacgtccaagaaccgcaggcaggacctgcgagggaacagaaccctggtctcgcactacttctctgggagatagcctcaacgctcactccgcagctgaaaaggcagggacatcagacctcccgaggcgcctgggcacattcgccgagtatcaggcaagctggaaggagcagcgcaagccattggaggctaggtcaagcggccgatgtcactcagccgacgatatactggatgtcagcttggaccctcaagaaaggcctcagcatgtgcacggaaggtctagatcatccccaagtactgaccattacaagcaggaagcctcagtggagctgcgcaggcaggctggggaccccggagaaccgagagaagaattgccatctgccgtgagggctgaggaagggcagagcactcccaggcaagccgacgcccaatgtagagagggatcgcctggcagccagcagcatcccccttcacagaaagctcctaacccccctacattttctgaactgtctcactgtaggggcgctcctgagctcccacgcgagggacgaggtcgcgcaggcaccctcccaagagattatcgttatagcgaggagagtacacctgctgatttaggtcctagggcccagagccctggatctccactgcacgcgagaggacaagattcttggcctgtttcaagcgccttgctatcaaagcgacctgcacctcagcgcccaccgcctccgaagcgggaacctcggagatacagggctacggatggcgctcccgcagatgcgccagtgggtgtacttggacgacctttcccaactccttcgccagcttctcttgatgtctatgtggctaggctgtcactgtcccactcaccttccgtgtttagctccgctcaaccccaggacacacctaaggccactgtctgtgagaggggatctcagcacgtttccggcgatgcatcacggcctcttcctgaagccctcttacctccaaaacagcagcacctgaggttacagaccgccacaatggagactagtcggtcaccatccccacagtttgccccacagaagctgacggataaaccccctttactgatacaagacgaggactccacgcgaatagaaagagtgatggacaacaatacaacagtcaagatggttccgattaagatcgtgcattccgagtctcagccagaaaaggagtcccgccagtcattagcatgccccgctgagcctcctgcgctgccacatggcctggagaaggaccagatcaaaacactgtccacctcagagcagttctattctagattctgcctgtacacgcggcaaggtgctgagcctgaagctcctcatcgcgctcagccggctgagccccaacccctgggcacacaagtcccaccagagaaggatcgctgcacctctccacctgggctctcatacatgaaagccaaggaaaaaaccgttgaggatttaaagagcgaggaactggccagagaaattgtgggcaaggacaaatctctggcggatatcctcgatccctccgtgaagattaaaacgacaatggatttgatggaggggatttttcccaaggacgaacacctcctcgaggaagctcagcagaggcgaaaactgttgcccaaaattccctctccacgaagtacagaggaacgcaaggaagagccaagcgtcccggcagccgtgagcttggcaacaaactccacatattactctacttccgccccaaaggcggagctgctaattaagatgaaggacctacaggagcagcaagagcatgaggaggacagcggcagtgatcttgatcatgacctgagcgtgaagaaacaagaactgattgagagcatttccagaaagcttcaggttcttcgggaggcccgagaatcccttctggaggacgtgcaagccaatacagtcttaggcgctgaggtcgaggccattgtgaaaggagtctgtaaaccgagtgagttcgataagttcagaatgttcattggcgacctcgataaagtggtgaaccttcttctaagtttatccgggaggctggcccgagttgagaacgccttgaacaatctagatgacggagccagtcccggagatcgtcagagtctgttggagaagcagcgggtcctgatccaacagcacgaggacgctaaggaactgaaggaaaatcttgatcgtcgagagcggattgtgtttgatattctggcaaactaccttagcgaagaatccctcgctgactatgagcattttgtgaaaatgaagtctgccctgattattgaacagcgcgaacttgaagataaaatacacctgggcgaagaacagcttaagtgcctgctggactcccttcagccagaaaggggaaagta

SEQ ID NO: 240452 - DNA, 1356 bp, synthetic construct
  misc_feature 1..1356: note = Description of Artificial Sequence: Synthetic coding sequence
  source 1..1356: mol_type = other DNA
atggagacatctcggtccccttcaccccagttcgctcctcagaaacttaccgacaaacctcctctcctgatccaggacgaagactcgacaagaattgaacgagtgatggacaacaacaccaccgtgaaaatggtgccaatcaagatcgtccatagcgagtcacagcctgaaaaggaaagccgtcagtccctggcctgccccgcagaaccaccggcactgccacacggactagaaaaagaccaaattaagacattgtccaccagtgagcaattctacagccggttttgcctgtacacccggcagggcgctgaaccagaagctcctcatagggcccagcctgccgaaccccagccccttgggacccaggttcccccagaaaaagatagatgcacaagtcctccgggactcagttacatgaaagcaaaggagaaaaccgtggaggatctgaaatccgaggagttggctagggagatcgtcggcaaagacaagagcctggctgacatcttagatccttcagttaagattaaaacgacaatggatctgatggaagggatctttccaaaagacgaacacctgttagaggaggcccagcaaaggaggaagctgcttccaaaaattccctctccaagaagcactgaagagagaaaggaagaacccagtgtccccgctgctgtgtccctggctacaaattccacctactactccacttccgctccaaaagccgaactgctcatcaagatgaaagaccttcaggagcagcaggagcatgaggaagactctggcagcgatcttgatcacgatctgagcgtgaaaaagcaggaactgatcgaatctataagcagaaagctgcaagtgctccgggaagccagagagtcccttctagaagatgtgcaggctaacacagtgttgggcgctgaggtggaggccatcgtgaagggggtgtgtaaaccttctgaatttgacaaattccgaatgtttatcggagacttagacaaggtcgtaaacctgttactgtcgctgtcaggacgcctggccagagtcgagaatgccctgaataacctcgacgacggagcttcccctggtgatcgacagagcctactggagaagcagcgggtgttgattcagcagcacgaagacgccaaggagctaaaggaaaatttagaccgcagagagcgcatcgttttcgacatcctggctaactatctgtcagaggagtcactcgcagactacgaacattttgtaaagatgaaatccgcgttaatcattgaacagcgagagctggaggacaaaatacatctcggcgaggaacagctcaaatgtctgctggatagtctgcaaccggaaaggggcaagtag

SEQ ID NO: 240453 - DNA, 1128 bp, synthetic construct
  misc_feature 1..1128: note = Description of Artificial Sequence: Synthetic coding sequence
  source 1..1128: mol_type = other DNA
atggaaacgtcacggtcaccatccccgcagttcgcgccacagaagctgaccgataagccacctcttctgattcaagatgaagattcaacccgaatcgagagggtgatggacaacaacacaacagtcaaaatggtacctatcaagatcgtgcactccgagtcgcaaccggagaaggagtccagacaatcactcgcctgcccagctgagccaccggcattgccacacggcctggaaaaggatcagattaagacactgagcaccagcgaacagttctattctcggttctgcctgtatacccggcaaggagctgagcctgaggcaccccacagggctcagccagctgaaccacagccactcgggactcaggtgccaccagaaaaggatagatgcacctcacctcctgggctgagctacatgaaagctaaggaaaaaacagtggaggatttaaagtctgaggagctggcacgggaaatcgttggcaaggacaaatccctggctgatatacttgatccatccgttaagatcaagactacgatggacctaatggaaggaattttccccaaagatgagcacctccttgaagaggctcaacagcgcaggaagttgctacctaaaattccatccccacgtagcactgaggagcgcaaggaagagccatccgtcccagctgccgtctctctggccacaaattcgacatactactccacatccgccccaaaggccgaactcttaatcaaaatgaaggatctgcaagaacagcaggaacatgaggaggactccggtagcgatctggaccatgatttgtccgtgaagaagcaagaacttattgagagcatctctcgaaaactccaagtgctgcgcgaagccagggaatctctactggaggacgtccaggccaacactgtgctaggagccgaggtcgaagctattgtgaagggtgtgtgcaaaccatctgaattcgacaagttccgcatgttcatcggggatctggacaaggtggtaaacctcctactgtcactgtcaggcagactcgctcgggttgagaacgccctaaacaatctggacgatggcgcttcgccaggagaccgccagagccttctggagaagcagagggtcctcatccaatag

SEQ ID NO: 240454 - DNA, 1203 bp, synthetic construct
  misc_feature 1..1203: note = Description of Artificial Sequence: Synthetic coding sequence
  source 1..1203: mol_type = other DNA
atggagaccagccggtccccttctccgcaattcgctccacaaaaactgaccgataagcctccactgctgatccaggacgaggactctactaggattgagagggtcatggataacaacacaaccgttaagatggtgcctataaagatcgtgcattcagagtcccaacctgagaaagaatccaggcagagcttggcgtgtccggctgaacccccagcactgcctcacggcttggaaaaggaccagattaagacacttagcactagtgaacagttttacagccgattctgcctgtatacccgccagggggcagaacctgaggctccccatcgtgcacaaccggcagagccgcagcctctgggaacgcaggtacccccagagaaggatagatgcacttcgcctccgggactttcctacatgaaagcgaaggaaaaaaccgtagaagatctcaaaagcgaggagctggcacgagaaatcgtggggaaagacaagagcttagcagatatcctcgacccctctgtgaagattaagactaccatggacttaatggaagggatctttccaaaagatgaacatctacttgaggaggctcaacagcggagaaaactcttgcctaaaatcccatctcctcggagtactgaggaacgtaaagaggaacctagtgtgccagcagcagtttctcttgcaaccaacagtacttactatagtacttcagcccctaaggcagagctattgatcaagatgaaggatttgcaggaacaacaggagcacgaggaagactcaggtagtgacctggatcatgacttaagcgtgaagaaacaagaacttatcgagagcatttctcgtaagctgcaggtgcttagagaagccagagagtctttgttggaagacgtgcaggcaaacaccgtcctcggcgctgaggtggaggctatcgtaaagggcgtctgtaagccttccgaatttgacaagttcaggatgttcattggagatctggacaaggtggttaatctattattgagcctgagcggccgactggctcgcgtagagaatgctttgaacaacttagatgatggagcttctccaggcgatcgccagtcgctcctggaaaaacaacgtgtgttaatacaacagatgtgtgtggattttatgctcgatacttatcattcccctatcaatcgatcgtcttgcctaactgttaccaaatag

SEQ ID NO: 240455 - DNA, 777 bp, synthetic construct
  misc_feature 1..777: note = Description of Artificial Sequence: Synthetic coding sequence
  source 1..777: mol_type = other DNA
atgcgcgagagagctccccctccacctccacctagccaagaaacccctgtgtattcaatggatgatttcccacctcccccacctcacactgtttgcgaggctcagcttgactcagaagatccagaaggcccacggccatcattcaataagctgagcaaagtgactatagcaagagagcgccacatgccaggcgctgcccacgtggtggggagccaaacgctggctagccggctgcagacctctatcaaaggttcagaagcggaatccacaccaccatcatttatgagcgtgcatgcacagctcgcaggatcgttgggtggacagcctgcccctatacagactcagagcctgtcacacgaccctgtgtctgggacccagggactcgagaaaaaagtttcgccagacccccaaaagtcctccgaggatatacgaacagaggccctggctaaagaaattgtgcatcaggacaaatctcttgctgatatcctggatccagacagccgacttaagactacgatggacctgatggaagggctgttcccacgcgatgtgaatttgctcaaagaaaacagcgtgaagaggaaagcgatacagcgcaccgtttcatcctcaggctgcgagggcaaacgcaatgaggacaaagaggccgtgagcatgttggtaaattgtccgcagattagttttcctcggctcgggccatggctctgccctcagaccagcagggtgtcgccatttctcctgggtgctgtcctgtcagttgtcttttctcagcattag

SEQ ID NO: 240456 - DNA, 5990 bp, synthetic construct
  misc_feature 1..5990: note = Description of Artificial Sequence: Synthetic coding sequence
  source 1..5990: mol_type = other DNA
atgatgagaacaaccgaagacttccataaaccttcggcgacacttaacagtaacacggccacaaagggacggtacatttatctggaggccttccttgaggggggagctccctgggggttcacactaaaaggtggacttgaacacggcgagcctctcatcatcagtaaagtcgaagagggcggaaaagccgatactttgtcttccaagcttcaggccggagatgaggttgtgcacatcaatgaagtcaccctatcttcatctaggaaggaggctgtctctctggtgaagggaagctacaagaccttgaggctggtggtgaggcgcgacgtttgcacagatcccggtcacgcagacacaggggcatcaaacttcgtgtcaccagagcacctgacttccggaccgcagcatcgtaaagcagcctggtcaggtggcgtgaagttgagactcaaacataggagaagcgagccagccggaaggccccactcttggcacaccactaaatccggcgagaaacaacctgacgcatcgatgatgcagatctcacagggaatgataggacccccttggcatcagagttaccactcctcaagcagtacctccgacctcagtaactatgaccacgcatacctgcggagatcacctgaccagtgcagcagtcaaggttccatggaaagcctcgaaccttctggagcctaccccccttgccacctcagtccagccaagtcgacgggcagcattgaccagctttctcattttcataacaaacgggattcagcatactcctccttttcgacttcctcctccattcttgaataccctcatcctggcattagcggcagggaacggtccgggtcgatggacaatacttccgctcgaggcggactgttggaaggaatgcgccaggctgatataaggtacgtgaaaacagtttacgatactcggagaggagtctcagctgaatacgaggtgaattcatctgcgttgttgctgcagggcagagaggccagggcttctgcgaacggtcaaggatacgacaagtggtcaaatatccccagagggaaaggtgtgccaccaccttcatggagccagcaatgcccctcaagcctggaaacagccaccgataatctgccacctaaggtcggagctcccctgcccccagcgagaagcgattcttacgccgcttttcgtcacagagagcgcccatcatcatggtcctctttggaccagaagcgtctgtgccgacctcaagcaaacagtttgggctctctgaagtcaccctttatcgaggaacagctgcacacggtcttggaaaaatcacccgagaacagtcctcctgtcaagcccaagcacaactatacccagaaggcccaacccggacagccactgcttccaacatccatatatcctgtgccatctctcgaaccccactttgcccaggtgcctcaaccctctgtgagcagcaacggcatgttataccccgctttggctaaggagtctggctacatagcaccccagggcgcatgcaataaaatggcgactatcgacgaaaatggcaatcagaatggcagcggtagaccaggatttgctttctgtcagcccctggaacacgaccttctatctccggtggagaaaaagcctgaagcaaccgccaaatatgtgccatcgaaagtccatttttgtagcgtgcctgagaacgaggaagatgcaagtctgaagcgacaccttactcctcctcagggtaactccccccactctaatgagcggaaaagcacccactctaataaacctagctctcaccctcatagcttgaaatgcccccaagcccaggcctggcaggctggagaagacaagcgaagttcccgtttgtccgaaccctgggaaggcgattttcaagaagaccataatgccaacctctggaggcggctagaaagagagggactgggccaatcattgtccggaaacttcgggaagaccaagagcgcattttcttctctccagaatatcccagaaagcctccgccgacactcctctctggagttagggagaggtactcaggagggataccccggaggtaggcctacatgtgctgtaaacaccaaggccgaagatccaggtcgtaaggcggctccggatctcgggtctcatttggatcggcaggtgagttaccctagacccgaggggaggactggtgcgtctgcttcattcaatagcactgacccctccccagaggaaccccctgcgccatctcatccccacacatcctcactcggacggagaggacctggtcccggtagtgcttccgcactacagggattccaatatggcaaaccacactgtagcgtgcttgagaaagtgtccaagttcgagcaacgcgaacaagggagtcaaagaccttcggtcggcggttctggctttggacacaattaccggccacatcgcactgtgtcaaccagcagcacttcaggtaatgacttcgaggagacaaaggcccatatcagattctcagaaagtgccgagccgctggggaatggcgaacagcactttaagaatggcgagctgaaactggaggaggcatcgagacagccatgcggacagcagctgtccgggggtgcttcggacagcgggcgtggccctcaaaggcccgatgcgaggctgctgcgatcccaatctactttccaactgtctagcgagcctgagcgcgagccagaatggcgcgataggcctggctccccagagtctcccctgcttgacgccccattctctagggcctataggaattctattaaagatgctcagagcagggtcctcggagctacgtcttttcgcagaagggacctcgaactcggagcacccgttgcttctcgaagctggagacctaggcccagcagtgcacatgtgggcctgaggtctcccgaagcttcagcctctgcctccccccacacaccgcgagaaagacattctgtcacacccgctgagggcgatcttgcaaggcccgttcccccagcagctagacgcggagccagaagaagactcacccccgagcagaaaaaaaggagctactcagagcccgagaagatgaacgaagttggcatcgtcgaagaggccgaaccagccccacttggccctcagcgcaacggcatgcgttttcccgaaagctccgttgctgatcggcgtcgactgttcgagagggacgggaaggcctgctctactctttccctcagcggcccagaactgaagcagttccaacaatccgctctggccgattacatccagcggaaaaccgggaaacgacccacctctgccgctggctgttctcttcaggagccaggccctcttagggagcgcgctcaaagtgcctatctgcagccagggcctgcagctctggaaggcagcggcttagccagcgcctccagtctgagcagtttaagagagccctctttgcagcctcgcagagaagcaactctgttaccggcaaccgtggccgaaacacagcaggcaccacgggataggagctctagctttgcaggagggcgacgactcggcgaaaggcgacgcggtgacctcctgagtggggcaaatgggggtactcgcggtacccagcggggtgacgagacccccagagaacccagcagctggggcgctagagccggtaagtcgatgtccgccgaagatctacttgaaaggtctgatgtgctggccggacccgttcacgtccgctctaggagctcccccgcaactgcagacaagaggcaggacgtcctgttgggtcaagactctggcttcgggctcgtaaaagacccctgctacctggccggacccggatcacgcagccttagctgctcggagcggggacaagaggagatgctgccattgtttcatcatctgacccccaggtggggcggtagcggctgtaaagctatcggagattcctctgtcccttccgaatgtcctggaacgctggaccatcagcgccaggcctcccgaacaccttgccctcgccctcccctcgccggaactcaggggcttgtcactgatactcgcgctgcgccactgaccccgatcggtactcctctgccctctgcaattccgtcaggctactgcagccaggatggtcagaccggcaggcaacccctacccccttatactccagcaatgatgcaccgatctaacggacacaccctcacccagccccctggccctagaggctgtgagggcgatggacctgaacatggcgtggaggagggaactcggaaacgggtgagcttgccacagtggcctcctccttcacgcgcaaaatgggcccacgcagccagggaggatagcctgcccgaggaatcctcggccccagatttcgcaaatctaaagcactatcagaagcagcagagcctaccttctttgtgctccacttcagacccagatactcccctgggggcacccagtacaccgggaaggatatcgctaagaatttccgaaagtgtgctgagggatagtcctccaccccacgaggactatgaagacgaagtcttcgtgcgcgacccccatccaaaagcaacttcctctcctactttcgagccccttcccccaccacctcccccaccgccatcccaggaaacccccgtgtattccatggacgattttcccccaccccctccacacacagtatgcgaggcccagctggactcggaagaccccgagggccctagaccgagcttcaacaagctctctaaagtcacaattgctagagagaggcacatgcccggtgccgctcacgtggtgggtagtcagactctggcgagtagactccagaccagtatcaaaggctctgaggccgagtcaactcctccctctttcatgtccgtccacgcacaactagcgggaagcctgggcggacagcccgctccaattcagacacagagcctgtctcacgaccccgtatcaggcacgcaaggattggaaaaaaaggtgtccccggaccctcagaaaagcagtgaggatatccgcacagaggccctcgctaaggaaatcgtccaccaggataagtctcttgctgacatcctggaccctgactcccggttgaaaacaactatggacctgatggaagggctgttccctagagacgtgaacctgttgaaagaaaactccgtgaaaagaaaggccatccagagaaccgtttcctcgagcgggtgcgagggcaagagaaatgaggataaggaagccgttagtatgctggtcaattgtcctgcatattacagcgtttccgccccaaaagcagaactgctgaacaagataaaagagatgccagcggaggtgaatgaagaagaagaacaggctgatgtgaacgaaaaaaaggctgaactgataggaagcctgactcacaagttagaaacccttcaggaagctaaaggttctctgttgacagatatcaagcttaacaatgctttgggagaggaggtggaggctctcatctcagagttgtgtaaacctaacgagttcgataagtacagaatgtttatcggagacctggataaagtagtcaatctcctgctctccctcagcggcaggttggccagggtggagaacgtgctgtccgggcttggcgaagacgctagcaacgaggaacgctcctcactgtacgagaaacggaaaattctagccggacaacatgaagatgccagagaactgaaagaaaacctcgatagacgggaacgcgttgtgctgggaatccttgcaaattacctgtccgaggaacagctccaggattatcagcactttgtgaagatgaagtcaaccctgctgatcgagcagcggaagctcgatgataaaatcaagctgggccaggaacaggtcaagtgtcttttggagtcactgccaagcgactttattcctaaagctggagctctcgccctgccgcctaatttaaccagtgaacctatccccgcaggaggatgtaccttttcaggaatctttcctactctgacttcaccgctgta

SEQ ID NO: 240457 - DNA, 561 bp, synthetic construct
  misc_feature 1..561: note = Description of Artificial Sequence: Synthetic coding sequence
  source 1..561: mol_type = other DNA
atggctttctacagtaccactgagtacgacatacaactcgcgaggggtctcctgagcggcatgttccttttcgcaacccgacggtccgagccagcaggcagaccccactcctggcacactacaaaaagtggtgaaaagcagcccgacgcatccatgatgcagatctcccagggtatgattggaccaccgtggcatcagtcctaccattctagttccagcaccagtgacctttccaattacgaccacgcctatctcagacgcagcccggaccaatgctcctctcaagggagcatggaatccctggagccgtccggtgcctaccctccttgccatctgtccccggcaaaaagcaccgggtccattgaccagctgagtcatttccataataaacgcgactccgcttattcttcctttagcacatcgagctctatcctggaataccctcatccgggtaagagggtcaagaccagagacttgccgggatcgcagtcccccggacgcgcaatttctcgaaagaccacgatgccgacaagcggcggtggttggcgagaaaaggcctag

SEQ ID NO: 240458 - DNA, 4482 bp, synthetic construct
  misc_feature 1..4482: note = Description of Artificial Sequence: Synthetic coding sequence
  source 1..4482: mol_type = other DNA
atggagaataggcctgggagttttcagtacgtccctgtccagctgcaaggcggtgcaccttgggggtttaccttgaaggggggtctggaacactgtgagcccctcactgtcagtaagatcgaggacgggggtaaggcagcactgagtcaaaagatgcggacaggggacgagcttgtgaatattaatggcactcctctgtacggttcccggcaggaggctttgattcttattaaggggagctttcgcattctgaaactgatcgtgcggcgacgtaacgcccctgtttctcgacctcacagctggcacgttgcaaagctactggaaggatgtccagaggcagcgaccaccatgcatttcccttctgaggctttctctctgtcctggcactccggatgtaacaccagcgacgtgtgtgtgcagtggtgtcccttatcccggcactgcagtacagaaaaatctagcagcattgggtccatggaatctttggaacaaccgggtcaagcaacgtacgaatcccatctgctacccattgatcagaacatgtatcccaatcaacgtgactccgcctacagcagcttctccgcctcaagtaacgctagcgactgcgctctgagtctccggcctgaggagccagcttccacagattgcatcatgcaaggcccaggcccaacaaaagctccctcaggtcggcctaatgtggcggagactagtggcggatccagaaggacaaatggcggtcacctgacaccaagtagccaaatgtcatcacgccctcaagagggttaccaaagcggacctgctaaggcagtccgtggacctccacagcctccggtgcggagagacagtcttcaggcaagcagggcacagctcctcaatggcgagcagagacgcgcaagtgaacctgtggtgccgcttccacagaaggagaaactttctctggagcctgtccttccagctagaaaccctaaccggttttgttgcctctctggacacgatcaggtcactagtgagggtcatcagaactgcgagttcagccagccgcctgagtcaagccagcaaggcagtgaacatctactgatgcaagccagtaccaaggccgtcggctcccctaaagcttgcgatagggcgtctagtgttgatagcaaccctctaaatgaagcaagcgccgaactcgctaaggcgagctttggcagaccaccccacctcataggccctacaggacacagacacagcgcgcctgaacagctcctcgctagccatctgcagcacgtgcacctggataccaggggctccaagggcatggagttgcctcctgtgcaagacgggcaccagtggaccctgtctccacttcactcatcccataagggcaagaagtcgccctgtccacccactggcggtacacacgaccagagctctaaagagagaaagacaagacaagtcgacgaccgctcgctcgtgcttgggcatcagtcacagtcctctccgcctcacggcgaagcagacgggcatccttcagaaaaaggctttctcgaccccaacagaacctcgagagctgctagtgaacttgccaaccagcagccaagcgcctctgggagcctcgtgcagcaggctaccgactgttctagcacaacgaaggccgctagtggcaccgaagctggtgaggagggcgacagcgaacccaaggagtgcagccgcatgggaggccgacggagcggtggcacccgcggacggagcattcaaaatcggcgaaagagcgagcgtttcgccaccaatctgaggaacgagattcaacggagaaaggcacagctccagaaatccaaggggcctctgagccagctgtgcgacacaaaggaaccagttgaggaaacacaagagccccctgaatcgccgccactaaccgcatccaacacttccctgcttagctcctgtaagaagcccccaagtcctcgcgataaattgttcaacaaaagcatgatgctccgggcaaggtcgtcagagtgtctgtctcaggccccagaatctcacgagagtaggacaggcctggagggtcgcatctcacctgggcaacggcctggacagtcctcgctggggctgaatacgtggtggaaagccccagaccctagcagcagcgatcctgagaaggcccacgcacattgtggtgtcaggggtggacactggcgatggtcccccgagcacaatagccaacctcttgtcgccgcagcaatggagggacccagcaaccctggtgataataaagagttgaaagcttctactgctcaagccggtgaagacgccatcctgctgcctttcgcagatcgtcggaaattttttgaagaatccagtaaatccctgagtacatcacatctccctggattgaccacacactctaacaagactttcactcagagacctaaacccattgaccagaattttcagcctatgagttcgagttgcagggaactgaggagacacccgatggaccaatcataccattccgcggaccagccttaccatgcaaccgatcagagttaccactccatgtcacccttgcagagcgaaacccccacctacagcgagtgcttcgcctcaaagggactcgaaaactccatgtgctgtaagccgctgcattgcggcgacttcgactaccacaggacctgttcttattcatgttcagtgcaaggagctctcgtccacgacccttgcatctattgctccggggagatctgtcccgcactacttaagagaaatatgatgccaaattgttacaattgcaggtgtcaccaccatcagtgcattagatgtagcgtgtgctatcacaatcctcagcatagcgccttggaggacagtagtctggccccaggcaacacctggaagccaaggaaactcactgttcaagagtttcctggcgacaagtggaacccaatcacgggtaatcggaaaacctcccagagtggcagagagatggcccactcaaagacatccttcagttgggctacaccttttcacccctgtttagagaaccccgcattggatctgtcgagctacagagcaatttcctccctggatctcctaggcgactttaaacacgcactcaagaaatctgaggagacctcagtgtacgaggaaggatctagcctcgcctcaatgccgcaccccttgaggtcccgcgctttcagtgaatcccatataagtctggctccacagagcacacgggcttggggacagcacaggcgcgaactgttcagtaagggagacgagacccagagcgacctcctcggagccaggaagaaagccttcccccctccgagaccccctccccctaactgggaaaaatataggctcttccgggctgcccagcagcagaagcagcagcagcagcagcaaaagcagcaggaagaagaagaggaggaagaagaggaggaagaggaagaggaagaagaagaggaagaggaggctgaggaagaggaggaggaactcccaccccagtatttctcttccgaaacgtcaggctcctgcgcgctgaaccccgaagaggtgttggaacagccacagcctttgagttttggacaccttgagggtagccggcaaggttcccagagcgtgcccgctgaacaagaaagtttcgccctccatagctcagactttctgccaccaatcagagggcatctcggctcccagcccgagcaggcccagccaccatgctactatggcataggaggtctgtggaggacttctggacaggaggccacggaaagtgccaaacaggagtttcagcatttcagccctccgagtggcgctcctggaatccccaccagctattctgcttattacaatatcagtgtggcaaaggctgagctgttgaataagctgaaagatcagccggagatggccgagattggactcggcgaagaagaagtggaccacgagttggcccagaagaagattcagctgattgaaagtatcagcagaaagctgtccgtgctgagggaagctcagagagggctgctcgaggacatcaatgctaatagtgcactgggggaagaggtggaggctaacctgaaagcagtctgcaagtccaacgaattcgagaagtaccacttattcgttggtgacctggacaaggttgttaatctactgctatccctcagtggcaggctggctagagtcgaaaacgcactaaatagcattgattccgaggcaaaccaggagaaactcgtcctgattgagaaaaaacagcagctgactggacagctggccgatgctaaggaacttaaagagcatgtggacagaagggagaaattggtttttggtatggtcagccgctatctaccacaggatcagctgcaagattaccagcattttgtgaagatgaaaagcgccctgattatcgaacaaagagagctggaggaaaagatcaaactcggcgaggagcagctgaagtgcctaagggaaagcctgctgctgggaccaagcaatttctag

SEQ ID NO: 240459 - DNA, 4481 bp, synthetic construct
  misc_feature 1..4481: note = Description of Artificial Sequence: Synthetic coding sequence
  source 1..4481: mol_type = other DNA
atggagaacagacctgggagcttccagtacgtacccgtccagctccagggcggagccccttggggttttactctgaaagggggtctggagcactgcgagccacttactgtgagcaagatcgaggatggtggcaaagccgctctctcacagaaaatgagaacaggggacgagcttgtaaacatcaatggtacccccctatacggaagtagacaagaggcactcatcctcatcaaagggtcctttcggatcctaaagttaatcgtgcgcagacgaaatgccccagtctccaggccccattcgtggcatgtggcaaagctcctggaaggctgccctgaggcggcaaccactatgcatttccctagtgaggcattctctctgtcttggcactctgggtgtaacactagcgacgtttgcgtgcagtggtgcccgttgagtcgtcattgtagcactgaaaagtccagtagtattggttcgatggagagcttggagcagccgggtcaggccacttacgagtcacatttgctaccaatcgaccagaatatgtatccgaaccagcgcgacagcgcctatagcagtttctcagccagcagcaacgcatcagactgtgcactgagtttgaggcccgaagagcccgctagtaccgactgtatcatgcagggaccaggcccaaccaaggccccttccggcaggccaaatgttgccgaaacaagcgggggatcaaggcgaaccaatggcggacatctgacccccagcagccagatgagctcccgcccacaggaaggataccagtctgggcctgctaaagcggttcgcggaccaccccagccaccagtcaggagagatagtttacaggctagcagagcccaactgttaaatggagagcagcgcagggccagcgagcccgtggtgccactgcctcaaaaggagaagctgtcgttggagccggtgttaccagccaggaatcctaataggttctgctgcctatccggtcacgaccaggtgacctcagaagggcaccagaattgtgagttcagccagcccccagagtcctcccaacagggatccgagcatcttcttatgcaggcgtcaacaaaagccgtggggtcaccaaaggcttgcgatagggcatcatccgtggactcaaatcctctgaatgaggcttccgccgagttggccaaggcctcgtttgggagacccccacatttgataggtcctactggccataggcactctgcccctgaacagctactggcctctcatttgcaacatgttcatttagatacacgaggctccaaaggcatggagctacctcccgtgcaggacggacaccagtggacattgtccccattacacagctcccataaaggtaaaaagagcccctgccccccaacaggtggtacgcatgaccaatcctcaaaggagagaaagacacgtcaagtggacgatcgtagtctggtgctagggcaccaatcccagagctctcctccccatggagaggctgacggacatccatccgaaaagggtttcctggaccctaaccgtacttcaagagcagcatccgaactagcaaaccagcaaccttctgcttcaggcagtctcgtgcagcaggccaccgactgtagttcaaccactaaagcggcaagcggaactgaagccggtgaggaaggcgactctgagcccaaggagtgttccagaatgggaggaagaaggtccggagggacacgcggtagatcgatccagaacagaaggaagtcagagcgctttgctaccaaccttaggaatgaaatacagcggagaaaagcgcagctgcaaaaatctaagggccctctcagccagctgtgtgacaccaaggaacccgtggaggaaacccaggaacctccggagtcgccgcctctgacggcaagcaatacttctctcttgtcatcttgtaagaaaccacccagtccacgggacaaactattcaataaaagtatgatgcttagagccaggtctagtgagtgcctgtcccaagctcctgagtcccatgaaagccgcacagggttagaggggaggattagccccggtcaaaggccaggacagagttccttaggcctcaacacctggtggaaagccccagacccaagcagctccgaccctgagaaggcccatgcccactgcggcgtgcggggtggtcactggcggtggtcccccgagcacaattcccagcctttagtagctgctgcaatggagggcccatcaaacccaggagataataaagaattaaaggcctcaaccgcccaggcaggcgaagatgccatcctactgcctttcgctgatcgcagaaagttttttgaggagtcctctaaatctctttctacatcccatctaccgggattaacaacccactcaaataaaacctttactcaacggccaaaacctattgatcagaatttccagcccatgtcttcatcctgccgggagctccgcaggcacccaatggaccagagttaccattcggcagatcaaccgtaccacgccacagaccagagctatcattctatgtctcccctgcagtctgagacccctacatattcagagtgtttcgcaagtaaagggttggagaatagcatgtgttgcaagcctcttcactgtggggatttcgattaccataggacctgcagctatagctgtagtgtgcagggcgctcttgtgcacgacccatgcatttattgctcaggcgagatctgccctgctctccttaaaaggaacatgatgcccaactgttataactgtagatgccatcaccatcagtgcattagatgtagcgtctgctatcataatccccaacattctgctctggaagacagcagcctcgcacctgggaacacatggaagcccagaaagctgacagttcaagagttccctggggacaaatggaaccctatcaccggaaacaggaaaaccagccaatcagggagggaaatggcacattccaagaccagctttagttgggctaccccatttcacccttgcctcgagaaccctgccctcgatttgagttcctatcgagctatcagctcattagacctgctgggcgatttcaaacatgcactcaagaagtcagaagaaacttccgtgtatgaggaagggtccagcctggcatcaatgccgcacccccttcgaagcagggcgttttcagaaagccacatcagcctcgctccccagtctacccgcgcttggggacaacatcggagagagttattcagtaagggcgacgagacccagagcgatctgcttggggcaaggaaaaaggcctttcctccccctcgacctccgcctccaaactgggaaaagtatcgtctgttccgtgccgctcagcagcagaagcagcagcaacagcagcagaagcagcaagaggaagaagaggaagaggaagaggaggaggaggaggaggaggaagaggaagaggaggaggccgaagaagaagaagaggaacttccaccacagtacttctccagcgagacatctgggtcatgtgctttgaaccctgaagaggtgcttgaacaaccccaaccattgtcattcggacatctggagggaagcaggcagggtagtcagtccgtccccgctgaacaggaaagcttcgctttgcatagtagtgactttttacctccaatcaggggccacctggggagccagcccgaacaagctcaaccaccttgttattacggaattggcggactgtggagaacaagtggacaagaggccactgaatctgcaaaacaggagtttcaacatttttcccccccttcaggagctccgggaatccctacatcgtactctgcttactacaacatttccgtggcgaaggcagagttgctgaacaagttgaaggaccaacccgagatggctgagattggactgggagaagaagaagtggaccatgaactcgctcaaaagaaaatacagctgatagagagtatctcccgtaaactgagcgttttacgagaggcacagaggggcttgctggaggatatcaacgccaacagtgcactcggggaggaagtcgaagcaaacttaaaggcagtgtgtaaaagtaatgagttcgagaaataccacctattcgtgggggatctggacaaagtggtgaatcttctgctgagtctgagcgggagattggctagagttgagaatgccctcaacagtatagactcagaagctaaccaggagaaactggttctgatcgaaaagaaacaacaactgacaggccagctggccgatgccaaggagctgaaagagcacgtggataggcgggaaaagctagtttttgggatggtgagtaggtacctccctcaggatcaactgcaagattaccagcacttcgtaaaaatgaaatccgcattgatcattgagcaacgtgaactggaggagaaaattaaactcggggaggaacagctgaagtgtctaagggaatcgctgctgctgggtccctctaacttcta

SEQ ID NO: 240460 - DNA, 4134 bp, synthetic construct
  misc_feature 1..4134: note = Description of Artificial Sequence: Synthetic coding sequence
  source 1..4134: mol_type = other DNA
atgcattttccaagcgaggctttctctctgagctggcacagcgggtgcaatacttctgacgtgtgcgttcagtggtgtccgctatcgcgacattgttccaccgagaagagcagctccatcggctcaatggagagtctagaacagcctggtcaggccacttacgaaagccacctcctgcctatcgaccaaaacatgtatccaaatcagcgcgattctgcatacagctcctttagcgcttcatccaatgcatctgactgcgctctctcgctccgcccagaagaacctgcgtctacagattgtataatgcagggccctggccctactaaagcgccatccggcaggccaaacgtggccgagacgtcagggggttcaaggcggacaaatgggggacatttaacaccctccagccagatgtcgtcccggcctcaggaaggctaccagtctggtccagctaaagctgtgcggggtccaccccagcccccagtgaggagggatagtctgcaggcctctagagcacagctccttaacggcgagcaaaggcgagcctccgagcccgtggtgccattaccacagaaggaaaagctgtccctcgaacctgtgctccctgcccgaaaccctaacagattctgttgcctgtctggtcacgatcaggtgacatcggagggccaccaaaactgtgagtttagtcagccccctgagtcaagccagcaaggatcagaacacctcctcatgcaagccagtactaaggcagtagggtctccaaaggcctgcgacagagcctccagcgtggatagtaacccactcaacgaggcttccgcggaattggccaaagcgtcatttggccgacctcctcaccttatcggacctaccggacatcggcattccgccccagagcagctacttgcttcccatctgcagcatgtccatctcgatacaagaggatctaaaggcatggagttgcctcctgtccaggacggccaccagtggaccctttcccccttacacagctcacacaagggtaagaagtccccctgcccacctactggaggcacgcatgaccagtcatctaaagagcggaagacgagacaagtggatgatcgcagccttgttcttggacaccaatcccagtcctcacctcctcatggggaagccgatgggcacccatctgagaaggggttcctcgacccgaatagaacgagcagagccgcatcagaactcgcgaatcaacagccttccgcgtcaggcagtctcgtgcagcaagcaactgattgctccagcaccactaaggcggcttccggcactgaagcaggagaggagggcgatagtgagcctaaggagtgtagtcggatgggcggacggagaagtgggggaacccgagggagatcaatacagaacagacgaaaatccgagcgcttcgcgacaaatctcagaaacgagatacagcgccgtaaggctcagcttcaaaagagcaaaggcccactctcacagctgtgcgacacgaaagaaccagtggaagagactcaggaacctcccgagagcccaccactcacagcttcgaatacctccctgctctcatcgtgcaagaaacccccatcaccacgggataagcttttcaataagagcatgatgttgagagcgagatctagcgagtgcctatcccaggcgcctgagtcccacgaatcaagaactgggctggagggacgcattagtccgggtcaacgtccgggtcagagctctctaggactcaatacctggtggaaagctcctgacccgtcctcttctgacccagaaaaagcccatgcacactgcggagtccgtggaggacattggcgttggagcccagagcataatagtcaacctttggttgctgcagccatggaaggcccttccaatcccggtgataataaggagctcaaggcctctacagctcaggctggcgaggatgcgattctgctgccctttgccgatcggagaaagttctttgaggagtcttccaagagcctgtccaccagtcatctgccagggcttaccacacactctaacaaaactttcacgcaacgtcctaagcctattgaccagaatttccagcccatgtcgtcgtcctgcagagaacttcgaaggcacccgatggatcagtcatatcactctgccgatcagccataccacgccacagaccaaagctaccatagcatgtctcctctccagagcgaaacaccgacctatagcgagtgttttgcaagcaaaggcttagaaaactccatgtgctgcaaacctctccactgcggagacttcgactaccaccgcacatgttcatacagttgcagcgtacaaggtgccctcgtccacgatccttgcatatactgtagcggggagatctgccctgcacttcttaagcgcaacatgatgcccaactgttacaactgcagatgccatcatcaccaatgcatccgttgttccgtatgttaccataatccccagcatagcgcacttgaagatagttcactggcacctggcaacacctggaagccacggaaactgacggtgcaggaattccccggtgacaaatggaacccaatcacaggtaaccgcaagacttcgcaaagcggcagagagatggcccactccaagacatcttttagctgggctactcccttccatccttgtctggaaaatcctgccctagacctgtcaagctaccgagctatttctagtctcgatctgctgggggacttcaagcacgccctgaagaagagcgaagaaactagtgtctatgaggagggcagttcacttgcttcaatgccacaccccctgagatcaagagctttcagcgagtcacatatctccctagctcctcagtccacaagagcctggggacagcatcggagagaacttttctccaaaggcgacgagacacagtcggatctgcttggcgctcgcaagaaggcgtttccccctcctagaccccctcccccaaactgggagaagtatcgtctcttcagagccgctcagcaacaaaagcagcaacagcagcagcagaaacagcaggaggaagaggaggaggaggaggaggaagaagaggaggaggaggaagaggaggaagaagaagccgaggaagaagaggaagagttaccaccgcaatattttagtagcgaaacaagcggctcctgcgctctgaacccggaagaagtgctggagcagcctcaacctctgtccttcgggcatctggagggctctcgccaagggagccagagtgtacctgctgagcaagagtcatttgcactccacagcagcgattttctgccaccaattagaggccacctcgggagtcaacccgagcaggcccagcccccatgctattatggtataggagggctctggcggacaagcggtcaggaggcaaccgaatccgccaagcaggagttccagcattttagtcctccctctggggctccaggcatccccacctcgtatagcgcctattataacattagtgtcgccaaggcagaattactcaacaagctgaaggatcaaccagagatggccgagatcggcctcggtgaggaggaagtcgatcacgagctggctcaaaagaaaatacaacttattgagtccatatcgagaaagctttcagtgctcagggaggcgcagaggggattgttggaagatatcaacgcaaattcggccctgggagaggaagtcgaggcaaacctgaaagcagtctgtaaatccaatgagttcgagaagtatcatctttttgtaggagatctagacaaagtcgtaaacttgctgttgtcactgtcgggacggctcgcacgggtcgagaatgccctcaactcaatcgactcggaagctaatcaagagaaactcgtgctgattgagaagaagcagcagctgactgggcagctggccgatgctaaggagcttaaagagcatgtcgatagaagagagaaacttgttttcggtatggtcagtcgatatctaccgcaggaccagctgcaggactaccagcacttcgtgaaaatgaagtccgccttaattattgaacagcgcgagcttgaggaaaaaatcaagttgggggaagagcagctaaaatgcctgagggaaagcttgctgttaggcccaagcaacttctag

SEQ ID NO: 240461 - DNA, 1686 bp, synthetic construct
  misc_feature 1..1686: note = Description of Artificial Sequence: Synthetic coding sequence
  source 1..1686: mol_type = other DNA
atggccaaggagcggtgtcttaagaaatctttccaggatagcctcgaagatattaagaaacgtatgaaagagaaaaggaacaaaaacttggcagagatcggtaagcgtcgttcttttatcgccgcaccatgtcagattatcactaatacttccactttactgaaaaactatcaggacaacaacaaaatgttggtcctggcactcgagaacgagaaatcaaaggtgaaggaggctcaggacatcatactccagcttcgcaaggaatgctattatctgacctgccagttgtatgccctcaagggtaaactgacaagccagcaaacagtggaaccagcacaaaaccaggaaatctgtagctctggaatggacccaaacagcgatgattccagtcgtaacttgtttgtcaaggatctcccacagatcccactagaagaaactgagctcccaggacagggtgaaagttttcaaattgaggatcagatccctacgatcccacaggataccttgggagtcgattttgactccggcgaggccaagtcgaccgacaacgtcctcccgagaactgtgagcgtgcggagcagtctcaagaagcactgcaattccatttgccaattcgattccctggatgacttcgaaacatcacatctggccggaaagtcttttgagttcgaaagagttggcttcctcgaccctttagtcaatatgcatatccctgagaatgtccagcacaatgcgtgtcagtggtccaaggatcaggttaatctgagtcccaagctaattcagcccggaaccttcacaaagacaaaagaggacatcctggagtctaagtccgaacagactaagtcgaagcagcgagacacacaggagcgaaagagggaggagaagaggaaggccaaccgcagaaagagcaagcgcatgtcgaagtacaaggaaaacaaatccgaaaataaaaaaacggtgcctcagaaaaagatgcataagagtgttagttctaatgacgcttataattttaatttagaggagggagtacacctgaccccctttagacaaaaggtgtcaaatgacagtaatcgcgaggagaataatgagagcgaggtaagtctttgtgagagctccggaagcggggatgactcagacgacctgtatctacctacctgtaaatacatacaaaatccaacatctaacagtgatagacctgtgacacggcctctggccaagcgcgctctcaaatacactgacgagaaagagaccgaaggtagcaaacctactaagacacccactactaccccccctgaaacccagcagtctcctcacctttccttgaaagacatcactaacgtgtccctatatcctgtggtgaaaataagaaggttatcgctttccccaaaaaaaaacaaggcaagccccgctgtcgcacttccaaaaaggagatgtaccgcttcagttaactacaaagaacccaccttggcctcaaagctgcggcgaggagatccctttaccgatctgtgcttcctgaatagtcctatatttaagcaaaagaaagacctcaggaggagtaagaagcgagccctggaagtgtcccccgctaaggaggcaattttcattctctactacgtacgcgagttcgtgtctcgattcccagactgcagaaaatgcaagttggagactcatatctgcctgagatag

SEQ ID NO: 240462 - DNA, 879 bp, synthetic construct
  misc_feature 1..879: note = Description of Artificial Sequence: Synthetic coding sequence
  source 1..879: mol_type = other DNA
atggctaaagaaagatgtctgaagaagtctttccaggatagcctggaagacattaagaagagaatgaaggagaagcgaaacaagaatcttgccgagattggaaaaagacgctctttcatagccgctccctgtcaaattatcactaataccagtactctgctgaagaactaccaggataataataagatgctggtgctagctctcgagaacgagaagtctaaagtaaaagaagcacaagacattattttgcagttgaggaaggaatgctactaccttacatgccagctttacgcgcttaagggcaaactcacgtctcagcagacagttgaacctgctcagaatcaagagatctgtagctccggaatggaccctaactctgacgattcttcccgaaacttattcgtcaaggatctaccgcagatccccttggaagagactgaactcccagggcagggagagtcattccaaatagaagcaactcctcctgaaacccaacagtcacctcatctgtcgctgaaagatattaccaacgtctccttatatcccgtggtcaaaattcggaggctcagcctgtcaccaaaaaagaacaaagcctctcctgctgtcgccctgcccaaaaggcggtgcacagcctctgtcaactataaagagccaacgttggcatctaagctgagacggggagacccatttacagacttgtgcttccttaatagccctatttttaaacagaaaaaagatctgcgacggtccaaaaagcgggcactggaagtttcccccgcaaaggaagccatcttcattttgtactacgtccgtgagtttgttagcaggttcccagactgccggaaatgtaagcttgaaacccacatctgcctcaggtag

SEQ ID NO: 240463 - DNA, 648 bp, synthetic construct
  misc_feature 1..648: note = Description of Artificial Sequence: Synthetic coding sequence
  source 1..648: mol_type = other DNA
atggctaaggagcggtgccttaagaagtcgtttcaggacagtctggaggatatcaagaaacggatgaaagaaaaacgtaacaagaaccttgcagagatcggcaagaggaggagctttatagcggctccttgccagatcataaccaatacgtctacattattgaagaactaccaggataacaacaaaatgcttgtgttggccctggaaaacgagaaatctaaggtaaaagaggcccaggatattatcctgcagctgcgcaaggagtgttattacctgacttgccagctgtacgccctaaaaggaaaactgactagccagcagactgttgaaccggctcaaaatcaggagatatgctccagcggtatggatccgaactcggacgattccagccgcaatttattcgtgaaggacctaccgcagattccccttgaggaaacagagctgcctggccagggagagtcgtttcagatcgaggaccagattcccacaatccctcaggatacactgggggttgacttcgatagcggggcattagaagtgtcccctgctaaggaagccatcttcatactgtactacgtcagggaattcgtctcccggtttccagattgccggaaatgcaagcttgaaacccatatctgcctgaggtag

SEQ ID NO: 240464 - DNA, 1584 bp, synthetic construct
  misc_feature 1..1584: note = Description of Artificial Sequence: Synthetic coding sequence
  source 1..1584: mol_type = other DNA
atggcaaaagagcggtgtctgaaaaagagctttcaggactcgttagaagacatcaaaaaacggatgaaagagaagcgtaataaaaacctcgcagaaatcggcaagagacgaagtttcattgcggcaccttgtcagataatcaccaacactagcactctgttgaagaattaccaggataataacaaaatgttggtcttagcccttgagaacgagaaaagtaaggtcaaggaagcacaggacatcattcttcaactgcgtaaagaatgttactatttgacctgtcagctttatgccctcaaaggaaaacttacctcccagcaaactgtagagccagcccagaatcaggagatatgcagcagcgggatggatcccaattctgacgactcgtcgagaaatcttttcgtcaaggacctgcctcaaattccgttagaagagactgaacttccagggcaaggagagtccttccaaatcgaggatcaaatccccacaatcccccaggatacacttggtgtagacttcgattccggggaggcaaagagtactgacaatgtgctgcctcgcaccgtctctgtccgaagctccttaaaaaagcactgtaactccatatgccagtttgacagtctggacgactttgaaacctctcatctagccggaaaaagtttcgagttcgagcgtgtgggcttccttgaccccctggttaatatgcatatcccagagaatgtgcagcacaatgcttgtcagtggtcgaaggaccaggtgaacctctcacccaaactgattcaaccagggacttttaccaaaaccaaagaggacattctcgagtcaaaaagtgagcagaccaagtctaaacagcgcgatacccaggaaagaaaacgagaagaaaaaaggaaggctaatcggaggaagtccaagcgtatgagtaaatacaaggagaataaatccgaaaacaagaagacagtgcctcagaaaaagatgcacaaaagtgtcagcagcaacgacgcctataactttaatctcgaggagggtgtacatctcaccccgtttcgccagaaggttagcaatgattctaatagagaggaaaataacgaaagcgaggtctctctgtgcgaatcttctggaagtggagacgactctgatgacctctatttgcctacatgcaagtacatacagaaccccactagtaattcagatcggccagtcacacgccctctcgccaaaagggcgctgaagtacaccgatgagaaagagaccgagggctccaagcccactaaaacccccaccacaactcctcctgagactcagcagagccctcatctgagtcttaaagacataacaaacgtatccctgtacccagttgtgaagattagacgcctgagtctcagccccaagaagaataaggcatcgcctgcagtcgcccttcccaagaggaggtgcaccgcctcagttaactacaaagaaccaacattggcttcgaagcttcgcagaggcgatccctttacagacctgtgtttccttaacagccctattttcaaacagaagaaagacttaagaaggtccaaaaagtctatgaagcagatccagtag

SEQ ID NO: 240465 - DNA, 1584 bp, synthetic construct
  misc_feature 1..1584: note = Description of Artificial Sequence: Synthetic coding sequence
  source 1..1584: mol_type = other DNA
atggccaaagaaagatgccttaagaagtcctttcaggatagccttgaggacatcaaaaagcggatgaaagagaaaaggaacaaaaaccttgcagagattggcaaacggaggagcttcatcgcagctccatgtcagatcatcacaaatacgtcaaccctgttgaaaaattatcaagacaataacaagatgttagtcttggctcttgagaacgagaagtctaaggtgaaagaagcacaggatattatccttcagctcaggaaggaatgttattatcttacctgccagttatacgcactcaaaggcaagcttacatctcagcagacggttgaacctgcccaaaatcaggagatctgtagcagcggcatggatcccaatagcgatgacagctcccggaatctgttcgtgaaggacttgccacagatccccctggaggaaactgaactgcctgggcagggtgaaagttttcaaatcgaggaccagatacctacaatcccacaggatacactcggtgtggacttcgatagtggcgaagccaaatcaacggacaacgtgctgcccaggaccgtgagtgtgcggagtagcctgaagaagcactgtaacagtatttgccagtttgacagcctggatgacttcgaaaccagccaccttgccggaaagagcttcgaattcgaacgtgttggtttcctcgaccctttggtgaacatgcacatccccgagaatgtgcagcacaacgcctgtcagtggtcgaaggaccaagtaaacctgtcaccgaagctaatccaaccaggtacatttacaaagacaaaggaagatatcctggagtccaaatctgagcaaacaaagagtaaacagcgggacacccaggagcgtaagcgcgaggagaaacgaaaggctaaccgacgtaagtctaagagaatgagtaagtacaaagagaacaagtctgagaataagaagactgtaccccagaagaaaatgcacaagtcagtttcttcaaacgacgcctataatttcaacctagaggagggagtccatctgacacctttcaggcaaaaggtgagcaatgattctaaccgggaggagaataatgagtcagaggtatccctttgcgaatctagcggcagcggagacgacagcgacgacttatacttgcccacatgcaagtacatccagaatcctacctcaaacagcgaccgccctgtcacacgcccactcgcaaaaagggctctgaaatatactgacgagaaagagaccgagggctctaaaccgaccaaaacgccgactactaccccacctgagacgcagcaatccccacatctgagtctgaaggacattacaaacgttagcctctaccccgtcgtcaagataagaagattatccctgtcaccaaaaaaaaacaaagcctcacccgcagtggccttgccaaagcgcagatgcactgcttcagtgaattataaggaacctacactggcctccaaattgcggagaggtgatccgttcaccgatctgtgcttccttaactctccgatctttaaacaaaagaaggatttgcgcaggtctaaaaagtccatgaaacagattcaatag

SEQ ID NO: 240466 - DNA, 828 bp, synthetic construct
  misc_feature 1..828: note = Description of Artificial Sequence: Synthetic coding sequence
  source 1..828: mol_type = other DNA
atggcgaaggagcggtgtttgaagaagtcctttcaggactccctggaggatataaaaaagcgcatgaaagagaagaggaataagaacctggcggagattggaaagagacggtcattcattgctgctccatgccagataataactaacacctcaaccctgctcaagaactaccaggataacaataaaatgcttgtcctggcactggagaatgaaaaaagcaaagtcaaggaggctcaagacattatcctgcagctcagaaaggaatgctactacctgacctgccagctttatgccctgaagggcaaactcactagtcagcagaccgtggagcctgctcagaatcaggagatttgcagttcaggcatggatcccaactcagacgactccagcagaaatctctttgtgaaggatctcccccagattcctctagaggagacagagctgccaggtcagggggaatctttccaaatcgaggatcaaattccgacgattcctcaggatacactcggcgttgacttcgattctgcgacaccccctgagacccagcaaagcccccatctatctctgaaggatatcaccaatgttagtttgtaccccgttgtcaaaattcgcaggctgtcccttagccccaaaaagaataaggcttctcctgcagtggccctgcctaagcgcaggtgtactgcttccgtgaactataaggaacctacactggcgagtaaactgcgaaggggcgacccattcaccgatttatgtttcctgaatagcccgatatttaaacagaagaaagacctcagaagatccaaaaaatccatgaaacaaatccagtag

SEQ ID NO: 240467 - DNA, 930 bp, synthetic construct
  misc_feature 1..930: note = Description of Artificial Sequence: Synthetic coding sequence
  source 1..930: mol_type = other DNA
atggctaaagagagatgtctgaagaaatcctttcaggacagtctggaagacattaagaaacggatgaaggaaaagcgcaacaagaacctggccgaaataggcaaacggagatcctttatagctgcaccttgccagataattaccaatacctccacactcttgaaaaattaccaagacaacaacaaaatgcttgtgctagccctggagaacgagaagtcaaaggtgaaagaagcccaggatatcatccttcaattacgcaaggagtgttattatttaacatgccaactctatgccctcaagggtaagctgacttcccagcagacagtggagcctgcccagaatcaggagatatgcagcagcggcatggatcccaattcggacgactcatctcgtaacctgttcgtgaaggaccttccccagattcctcttgaggagacagagctccccggtcaaggcgaaagctttcagattgaagaccagataccaaccatcccccaggatacactgggagtcgattttgactctgcgactcctcccgagacccagcaatcaccacacctgtccctgaaggatatcaccaatgtctccctctacccagtggttaagatccgcagactgagcttgagccctaagaaaaataaagccagccctgcagtggccctgccaaagcgtcggtgtacagccagtgtgaactacaaagaacccacacttgcaagcaaactgagaagaggggatccctttaccgatctttgctttctgaattcgcctatattcaagcaaaaaaaagacctccggcgtagcaaaaagcgggctctggaggtgtcgcccgctaaagaggcaattttcattttgtactatgtccgcgagtttgtttctaggttcccagattgcagaaagtgcaagttagagacacacatctgtctcagatag

SEQ ID NO: 240468 - DNA, 1686 bp, synthetic construct
  misc_feature 1..1686: note = Description of Artificial Sequence: Synthetic coding sequence
  source 1..1686: mol_type = other DNA
atggctaaggagagatgcttaaagaagagttttcaggactccctggaggatattaaaaaaagaatgaaagaaaagcggaataaaaacctggccgagatcgggaagcggcgttcattcatcgccgcaccatgccagatcatcaccaacacaagtactcttctgaagaactatcaggataataataaaatgctggtgctcgctctggagaatgagaaatccaaggtgaaagaagctcaggatattattctccaattacggaaagagtgctactacctgacttgtcagctgtacgccctgaaaggtaaattgacctctcagcagaccgtggagcccgctcagaaccaggaaatctgcagtagcggcatggatcctaactcggacgattcgtctaggaacctcttcgtaaaggacttgcctcagataccgctagaagagacggagttacccggacaaggcgagtcattccagatagaagatcagatcccgactataccccaggatacgttgggggtagactttgactctggggaagccaagtctaccgacaacgtgctgcctaggactgtgagcgtccgttcgtccttgaagaagcactgtaattcaatatgccagttcgactctttggacgattttgagacctcgcacttggcaggaaagtcattcgaatttgagagggtgggtttcctggatccgctggtaaatatgcacatccccgagaacgtacagcataatgcatgccagtggagtaaggaccaggtgaatcttagcccgaagttgatccagcctgggacctttaccaaaacaaaggaggatattttggagtctaaaagcgaacagacaaaatcgaaacagcgcgacacacaagaacggaagcgcgaggagaaaaggaaagccaataggcgaaagagtaagagaatgagcaaatacaaggaaaacaagtctgaaaataaaaaaaccgtgcctcaaaagaaaatgcacaaaagcgtcagttctaatgatgcttacaactttaacttggaggagggagtgcatctgacacccttcagacagaaggtttcgaacgatagcaaccgggaggagaacaacgaatctgaggtgagcctttgtgagagtagcggctccggcgacgattcagatgacctttatctccccacgtgcaaatatattcagaaccccacctccaactcagacaggcctgtgacgcgacccctcgcaaaacgtgctcttaagtacactgacgaaaaagagacagaggggagtaagcctacaaaaactccaaccactacgccacctgaaacccaacaaagcccgcacctgtccctaaaggatataacgaatgttagcctttaccctgtggtgaagattaggcgtctcagtctatcccctaagaaaaataaggcctctcctgctgtagccctccccaagcggagatgcacagcatcagtgaactacaaggaaccaactttagcttctaaattgaggagaggagacccattcacagacctctgcttcttaaactcccccattttcaagcagaagaaggatctccgtcgtagtaagaagagagccttagaggtatctccggctaaggaggccatctttatcctctactacgtgcgcgaattcgtgagtcgctttcctgactgtcgtaaatgcaaactggagacccatatctgtctgcgctag

SEQ ID NO: 240469 - DNA, 930 bp, synthetic construct
  misc_feature 1..930: note = Description of Artificial Sequence: Synthetic coding sequence
  source 1..930: mol_type = other DNA
atggccaaggagcgctgtctgaagaaatcatttcaggacagcctggaggatattaagaagagaatgaaggaaaagcgcaataagaaccttgccgagataggaaaacggcgatcttttattgctgcgccatgtcaaatcatcacaaacacctcgaccctgttgaagaattaccaggacaacaataaaatgttagtgcttgccctcgaaaacgagaagtcaaaagtcaaagaagcacaggatatcattcttcagttaaggaaggaatgttactatctgacatgccagttgtacgcactcaaaggcaagcttacatcccagcagacggtggagcctgcccagaaccaggaaatctgttcaagcggcatggatcctaattccgacgacagctctaggaatttgttcgtgaaggacttaccccagataccgttggaagagaccgagctccctgggcagggtgagagttttcagatagaggaccagataccaaccatcccccaggacactcttggcgtggatttcgactctgctacacctcctgaaacacagcagtcccctcacctctctctcaaggacattaccaatgtctccttgtaccctgttgtgaagattcgcaggctgtccctgtcgcctaagaagaataaggcgagcccggcagttgcgctgcccaaaaggaggtgtaccgccagtgtcaattacaaggaaccgactctcgcgagcaagcttcggaggggcgatccattcacggacttatgtttcctgaattctccgatattcaagcagaaaaaagacctgagacgctcaaagaagagggctctggaagttagccccgctaaagaggcgatcttcatcctctactatgtgagagagttcgtgagcaggttccctgactgtagaaaatgtaaactcgagacacatatatgcctgaggtag

SEQ ID NO: 240470 - DNA, 777 bp, synthetic construct
  misc_feature 1..777: note = Description of Artificial Sequence: Synthetic coding sequence
  source 1..777: mol_type = other DNA
atggcgaaggagcgatgtctcaaaaagagcttccaagacagcttagaagacataaagaaacgcatgaaagagaaaaggaacaaaaacctggccgagatcggtaagagacgaagtttcatagccgcaccctgtcaaattattacaaatacctctactcttctgaagaactaccaggacaacaataaaatgctagtcctggctcttgagaatgagaaatcgaaggtcaaggaggcccaagacataattcttcagttgcggaaagaatgctattatctcacgtgccagttgtacgcgttgaagggtaaactgacaagccagcagacagtggagccagcccagaatcaagagatatgctcctccggcatggacccgaattctgatgattcatcccgtaatctcttcgtcaaggatctaccacagatccctctggaggagacggaattgcctggccagggtgagtcgtttcagatcgaggccactccccctgaaacccagcagtccccacacctatctctgaaggatattactaacgtgagtctctatcccgtcgtgaaaatccgccgactgtccctgagccccaaaaagaacaaggcctctcccgctgtggctctccccaaaaggaggtgtacagcatcggtcaactacaaggaacctacgctggctagcaagctccgcagaggagatcctttcaccgatctttgctttctcaattccccaatcttcaaacagaagaaagacctccgaaggtctaagaagagtatgaagcagatccagtag

SEQ ID NO: 240471 - DNA, 828 bp, synthetic construct
  misc_feature 1..828: note = Description of Artificial Sequence: Synthetic coding sequence
  source 1..828: mol_type = other DNA
atggctaaggaacgctgcctgaagaagagtttccaggattccctagaggacatcaagaaacggatgaaagaaaagagaaataaaaacctcgccgagatcggcaagcgacgctcattcatcgctgccccttgccagattatcaccaatactagcacgctccttaagaactatcaagacaataacaaaatgctggtgctcgctctggaaaatgagaagtccaaggttaaggaggcccaggacataatcctgcagcttaggaaggaatgttactacctgacctgtcaactgtatgccctcaagggtaaactcactagccagcagaccgtggagcctgcccagaatcaggagatttgcagcagcggcatggatcccaatagtgacgactcttcccgcaatttgttcgtcaaagacctgcctcagattccactggaagagactgaactgcctggccagggggagagcttccagattgaagaccagatacctactatcccccaagatacactcggggtggacttcgacagcgctacacctccggaaactcagcagtccccccacctctccctgaaagacattacaaacgtcagcctatatcccgtggtcaaaattcggcgtttgtccctgagccctaaaaagaacaaagccagtccagccgtcgctctgcccaaaaggagatgtacagctagcgtgaactacaaggagccaacccttgcttctaagctgaggagaggtgatcctttcacggacctgtgttttctcaattcacccattttcaaacagaaaaaagacttgaggcgcagtaagaagtcaatgaagcagattcagtag

SEQ ID NO: 240472 - DNA, 777 bp, synthetic construct
  misc_feature 1..777: note = Description of Artificial Sequence: Synthetic coding sequence
  source 1..777: mol_type = other DNA
atggcaaaagaaaggtgtttgaagaagagctttcaggatagtttggaagatatcaagaaacgcatgaaggagaaaagaaataagaacttggcagaaattggcaaacgcaggtcgtttattgcagcgccatgtcagataatcacgaacacgagtactctgttgaagaattatcaggacaacaataaaatgctcgtcttggctctcgagaacgaaaaaagcaaggttaaggaagctcaggatatcatactgcagctgcgcaaggagtgttattacctaacctgtcagctgtatgccctgaagggaaaattgacctctcagcagaccgtagagcctgctcaaaatcaggaaatctgctcttctgggatggacccaaacagtgatgactcttctagaaatctcttcgtgaaggatctgccccagatccccctcgaagaaaccgagttgcccggacaaggagagagtttccaaattgaggccactcctcccgaaacccagcagtcaccacacctgtcactgaaggacatcactaatgtgtcactctatcccgtggtgaaaatacgcaggctctctctttcgcccaaaaaaaataaagcctcccctgccgtggccctgcccaagcggcgttgtactgcgtcggtgaactataaagaaccgactctagcatcgaagctacggaggggtgaccctttcactgacctttgttttctgaattcacccatcttcaagcaaaaaaaagacctaaggcgatccaagaaaagcatgaaacaaattcagtag

SEQ ID NO: 240473 - DNA, 879 bp, synthetic construct
  misc_feature 1..879: note = Description of Artificial Sequence: Synthetic coding sequence
  source 1..879: mol_type = other DNA
atggccaaggagagatgcctaaagaagagtttccaagactcattggaggacatcaaaaagcgcatgaaggaaaagcggaataaaaacctggccgaaatcggaaagaggaggtccttcatcgcagccccatgtcaaataatcaccaacaccagtactctcctcaaaaactatcaggacaacaataagatgctcgttctggccctagagaacgaaaagtcgaaggtgaaagaagctcaggacataatcctccagttgcggaaagagtgctattacctgacatgtcaattatacgcgctgaaagggaagctcacgtctcagcaaaccgttgaacccgctcaaaaccaagagatttgctccagtggaatggaccccaattcagacgactcatctcgtaatctgtttgtgaaggacctgccacagatcccattggaagaaacagagctgcctggccagggggaaagcttccagattgaagccacacctcctgagacccagcagtctccccacttgtcactcaaagatattactaacgttagtctgtaccccgtagtgaagatcaggcgtttaagtctgtcaccaaaaaagaataaagcatctccggctgtagctctcccaaaaagacggtgtaccgcctccgtgaactataaggagccaactctggcctcaaaactgagacgaggcgacccattcaccgacctgtgctttctgaacagccccatcttcaagcagaaaaaagacctacgtagatcaaaaaaacgcgcattggaggtgagtcccgctaaagaagcaatttttattctgtattatgttcgggagtttgtaagccggttccccgattgtcgtaaatgcaaattggagacacacatctgcctcaggtag

SEQ ID NO: 240474 - DNA, 3798 bp, synthetic construct
  misc_feature 1..3798: note = Description of Artificial Sequence: Synthetic coding sequence
  source 1..3798: mol_type = other DNA
atggaatgcccggttatggaaactggctcacttttcactagtgggattaaaaggcatctgaaggataagcgcatcagcaaaacaactaagctgaacgtgagcctggcatccaagattaaaactaagatcctgaataactcctccatattcaagatatcgttgaagcacaacaatagagccctggcccaagccctgagcagggaaaaagagaatagtagacgtatcaccaccgagaaaatgctcctgcagaaggaggtggagaagctgaactttgaaaatacattcctccggctgaaactgaataacctcaataaaaagctcattgacatcgaggcgctcatgaataataatctgattactgccatcgagatgtcctcactttcagagtttcatcagtcttcatttttgctttctgccagcaagaagaagcgaatctcaaaacaatgcaaacttatgcgtctccccttcgccagggtcccactgaccagcaatgacgatgaagacgaagacaaggagaaaatgcagtgcgataacaacatcaagagcaaaacgttgccagatatcccctcctccgggagtaccacccagcccctgtccacgcaagataacagcgaggtgctttttctcaaagaaaacaatcagaatgtctacgggctggatgacagcgaacatatctccagcatcgtagacgtgccaccccgtgagagccactctcactctgatcagagctctaaaacctcactgatgagcgagatgagaaacgcgcaatcgatcggacgcaggtgggagaagcccagccccagcaacgtgacagagaggaaaaaacggggttcttcatgggagagtaataatctgtcggcagacacgccatgcgccacggtgctcgacaaacagcacatctcctcacctgaactcaattgcaataacgaaattaatggacacaccaatgagacgaatacagagatgcaacgcaataagcaggatctgcccggtttgtcatccgagtctgccagggaaccaaacgcagaatgcatgaatcagatagaggacaatgatgattttcaactacagaaaacagtgtatgacgcagatatggaccttaccgcctcagaggtctcaaaaattgtcactgtctccaccggaattaagaagaaaagtaataagaaaacgaacgaacatggcatgaaaaccttcagaaaagtgaaggacagttcgtcagaaaagaagcgggagaggtcaaagcgccagtttaagaacagttccgacgtggatattggagagaaaatcgagaacaggaccgaaaggagcgatgtcctagacggaaagcgtggcgctgaggatcccggatttatcttcaataatgagcagctagcccagatgaacgaacaattggcgcaggttaatgaattgaagaagatgactctgcaaacgggcttcgagcagggagacagagaaaacgtactgtgcaataagaaggagaagcgaattaccaatgagcaggaagagacctacagcttgtcccagtcatcaggcaaattccaccaggaaagtaagtttgataaggggcagaattcactgacctgcaacaaatctaaggcctctaggcaaacattcgtgatacacaaactggagaaagacaacttgcttcctaatcagaaggacaaagtcaccatctatgaaaatttagatgtgaccaatgaattccatactgcaaatctttctaccaaagacaatgggaacctttgcgactatggtacccataatatccttgacctgaagaaatatgtgacagatattcagccctctgagcagaacgagtcgaacattaacaaactgcgcaaaaaggtgaataggaaaaccgagataatctccgggatgaaccatatgtatgaggataatgacaaggacgtggttcatggtctgaaaaaggggaacttctttttcaaaacccaggaggataaggagcccatctctgagaatattgaggtgtccaaggagctgcaaattcccgcactttccacgagggacaacgaaaaccagtgtgattacagaactcaaaacgtgctcgggctccagaagcagattacaaacatgtatcctgtccagcaaaacgaatccaaggtgaataaaaagctcaggcaaaaggtcaaccgcaagactgaaatcataagcgaggtcaatcacctcgacaacgacaagtccattgagtatacagtgaaaagtcatagtctcttcctaacccaaaaggacaaggagatcattcccggaaatttggaagacccctccgagtttgaaactcccgcactgagtaccaaggacagcgggaatctttacgactctgaaatacaaaatgtattgggggtgaagcacggccacgacatgcagcctgcctgccagaatgacagtaagataggcaaaaagccacgtctcaatgtatgccagaaaagtgagatcatccccgagacaaatcagatctacgaaaatgacaacaagggggtgcatgacctggaaaaagacaacttcttctcccttacccctaaagataaggagactatcagcgagaacctacaagtaactaatgagttccagaccgtggacttacttattaaggacaatggtaatctttgcgattacgatacccagaatattctggagctcaagaagtacgtcactgaccgtaagtcagcggagcagaatgagagtaagataaataaactcagaaataaggttaattggaaaacagaaattatctcagaaatgaaccagatctatgaggacaatgacaaagatgctcacgtacaggaatcatatactaaggacctggatttcaaggttaataaatctaaacagaaactcgaatgccaggacattatcaataagcactacatggaagtgaattccaatgagaaggagagttgcgaccagatccttgattcctataaagtggtgaaaaaacgcaagaaagagtcgtcttgcaaggccaagaacatcctgacaaaggctaagaacaagctggcaagccagttaacagaatcctcacagacatcaatcagccttgagtcagaccttaaacatatcacatcggaggcagattctgaccctggcaaccccgttgagctgtgtaagacacagaagcaaagtaccactaccctgaacaaaaaagatctcccatttgtcgaggagataaaggagggggaatgtcaggtcaagaaagtcaataagatgaccagcaaaagcaagaagcgtaagacctccatcgatccatctcccgagagccacgaggtaatggagcgaatcctggactcagttcaaggaaagagcacagtatctgagcaggccgacaaagaaaacaatctggagaatgagaaaatggttaagaacaagcccgacttttatacaaaggctttccggtcacttagcgagatccattcacccaatatccaggactcatcgttcgattctgtgcgggagggcttggtccccttatccgtttcttccgggaaaaatgtgatcattaaagagaactttgccctcgagtgctctcctgcctttcaagtctcagacgacgagcacgaaaagatgaataagatgaaatttaaagtgaaccgcaggacccagaagtcgggtattggtgaccgcccacttcaggatctctcaaacaccagcttcgtctcgaataacacagctgaatccgagaataagtccgaagatctgagctcagaacgtacaagtagacgccgtaggtgtacccccttctatttcaaagagccttccctgcgcgataagatgaggcgctag

SEQ ID NO: 240475 - DNA, 744 bp, synthetic construct
  misc_feature 1..744: note = Description of Artificial Sequence: Synthetic coding sequence
  source 1..744: mol_type = other DNA
atggaatgccctgttatggaaactggatccctgtttacatcgggcattaagcggcacctaaaagataagcgaattagcaaaactactaagcttaacgtgtcactggcgtcaaaaattaaaactaaaattctcaacaactcctcgattttcaagatctctctcaagcataacaatcgtgcccttgctcaggcattgtccagagagaaggagaattcaaggcggatcacaactgagaagatgctgctgcagaaagaggtcgagaagctgaattttgaaaacaccttccttaggcttaaattaaataacctgaataaaaagctgatcgacattgaggctctgatgaataataatcttattactgcaattgagatgagcagtttgagcgagttccatcaatctagtttcttgctgagtgcatcgaagaaaaagaggatttccaaacagtgcaaactcatgaggctgccctttgcgagggtaccgctgacttccaatgacgacgaggacgaggacaaagaaaagatgcaatgtgacaataacattaagagtaagaccctcccagacatcccctcatccggaagcacaacacaaccactttccacccaggacaatagcgaggtgttgttcctgaaggagaataatcagaacgtttacggactggacgattcagaacacatcagcagcattgtggacgtgccaccgcgaggggagattgtgctgaagattcacttcgaatacctctactag

SEQ ID NO: 240476 - DNA, 264 bp, synthetic construct
  misc_feature 1..264: note = Description of Artificial Sequence: Synthetic coding sequence
  source 1..264: mol_type = other DNA
atggagtgtcccgtgatggagactggctccctctttactagcggcatcaagcgccacctaaaggacaagagaatctccaagacaacaaaactgaacgtgtccctggcaagtaagatcaagactaagatactgaataatagctcgattttcaagatcagtctgaaacacaacaaccgcgctctggcccaagcgctgtcgcgagagaaggagaactcacggcgtatcactaccgagaagatgctcctccaaaaggaagtggaatag

SEQ ID NO: 240477 - DNA, 753 bp, synthetic construct
  misc_feature 1..753: note = Description of Artificial Sequence: Synthetic coding sequence
  source 1..753: mol_type = other DNA
atgagtatttttacgccaaccaatcagatacgccttactaatgtggctgttgtgcgcatgaagagggctggtaagagatttgagattgcttgctacaagaacaaagtggttggttggcgatctggggtggaaaaagacctggatgaggtcctccagactcactccgtcttcgtcaatgtgtctaagggacaagtggcgaaaaaggaggaccttattagcgcatttggcactgatgatcaaaccgagatttgtaagcagatcctcactaagggagaagtgcaagtgtctgacaaggagcggcatacccagttagagcagatgtttcgggacatagcaacgatcgttgcagacaaatgtgttaacccggaaactaaaaggccatacacagtcatactcattgaacgagcaatgaaggatatccattacagcgtgaagacaaataagtccactaaacagcaagccttggaagtgataaagcaactgaaggagaagatgaaaattgagcgggcacatatgaggctcagattcatcctcccggtgaatgagggcaagaagctgaaagaaaagctgaagccattaatcaaagtaattgaatctgaagattatgggcagcagctcgaaattgtctgtttaattgatccgggttgtttccgagaaatagatgagctgattaagaaagaaacaaaaggtaaaggcagtcttgaagtgttgaatctcaaagacgtcgaggagggtgatgagaaatttgagtag

SEQ ID NO: 240478 - DNA, 1572 bp, synthetic construct
  misc_feature 1..1572: note = Description of Artificial Sequence: Synthetic coding sequence
  source 1..1572: mol_type = other DNA
atggtcgcacccggtctcgttctcgggctggtgctgcccctgatattgtgggcagacaggtcagccggtatcggattccgcttcgcgtcatatatcaataatgatatggttttgcagaaagagccagctggagccgttatctggggcttcggaactccgggtgcaactgtcaccgtcacactgaggcaggggcaggaaactatcatgaaaaaagtgacatctgtgaaggcacacagcgacacttggatggtggttctagatccaatgaagcccggtggcccatttgaggttatggctcaacaaaccctggagaagatcaatttcactttgcgggtccatgacgtgctgtttggcgacgtgtggctgtgctctggccagagcaatatgcagatgaccgttctgcagatctttaacgcaactcgcgaactgtctaacacagctgcctatcagtcggtgcgcatactgagcgtgtcaccaattcaagctgagcaggagcttgaagacctggtggctgtggacctccagtggagcaagcccacctctgagaatctgggtcacggttatttcaagtacatgagtgctgtgtgttggctttttggccgacacctctacgataccctgcagtacccgatcgggctcatcgctagctcttggggtggaacacccattgaggcctggagctccggccgtagtctcaaggcatgtggggtccccaaacagggatctattccttatgactctgtcactggtccatcaaagcactcagtcctctggaatgccatgatccaccctctgtgcaacatgactctgaagggggttgtttggtaccagggggaatccaacataaactataacaccgacttatacaattgcacttttccggctctgatagaggactggcgggaaacctttcatcgcggatcacagggccagacagagcgattcttcccgttcggactcgtccagctgagcagcgatctatcgaaaaagagctcggacgacggcttccctcagattaggtggcaccagaccgcagacttcggttacgtcccgaaccccaagatgccaaacacctttatggccgtggccatggacctgtgcgaccgcgacagccctttcggcagcattcacccccgagacaagcagacagtcgcttatcgcctccacttaggtgcacgagccctggcttacggagagaaaaatctcacatttgaaggtcctctgcctgagaagatcgaactgctcgcccacaaaggtctgttaaatcttacctactaccagcaaatacaagtgcagaagaaagacaataagatcttcgagatctcttgttgcagcgaccaccgatgcaaatggcttcctgcatccatgaatactgtgtctactcaatcattaaccctcgcaatcgactcctgccacggaactgtggtggcattgagatacgcttggactacttggccgtgcgaatacaagcagtgtccactgtaccacccatccagtgccctcccggcaccaccattcatcgcattcatcaccgatcaggggccaggacaccagtccaatgtggccaaatag

SEQ ID NO: 240479 - DNA, 1467 bp, synthetic construct
  misc_feature 1..1467: note = Description of Artificial Sequence: Synthetic coding sequence
  source 1..1467: mol_type = other DNA
atggttctacagaaggaacctgcaggagctgtcatttggggctttgggacgcccggagcaaccgtgaccgttactttgcgtcaaggccaagagacaattatgaaaaaagttacctccgtcaaggcccactccgacacatggatggtggtgctggatcccatgaagcccggaggcccattcgaagtgatggctcagcaaactctagagaagatcaactttactctgcgtgttcatgacgtgctgttcggcgacgtgtggttatgctcggggcagtccaacatgcaaatgactgtgctgcagatcttcaatgctacaagggagctgtccaacactgcagcctaccagagcgtgcgtatactcagtgtctctccaatacaggccgagcaagagctggaggacctggtggctgtggatctgcaatggtcaaagcccacgtccgagaacctaggccacggctattttaaatatatgagtgccgtctgttggctgttcggtagacatctctacgacacacttcagtatcccatcgggttgatagcttcctcctgggggggaaccccaatcgaagcttggagtagcggccgatctctaaaagcatgtggcgttcctaagcaggggtctatcccctacgattcagtcaccgggcctagcaagcacagtgtgttatggaatgccatgatccatcccctgtgtaacatgaccttgaagggggtggtctggtaccaaggcgagagcaatattaactacaatacagacctgtataattgcactttccctgccttgatcgaagactggcgggaaacctttcaccgcggatcacaggggcagacagaacgcttctttccattcggcctggtccagttgtcttccgacctgtccaagaagtcgagcgatgatggatttcctcagattagatggcaccagaccgcagactttggatatgtccctaatcctaagatgcctaatactttcatggcagtggctatggatctctgcgatagagacagcccctttgggtctatccaccccagagacaaacagaccgtggcttacaggttgcatctgggtgctagggccttagcatacggcgagaagaacctgaccttcgagggtccactgccagagaagattgagctgctggcccataaaggcctgcttaacctgacgtactaccagcagattcaggtccaaaagaaagataacaaaatatttgagatatcttgctgcagtgatcaccggtgcaagtggctgcccgcatccatgaataccgtgtcaactcagagtttgaccctggccatagattcatgccatgggacagtcgttgccttgcgatatgcctggaccacttggccttgtgaatacaaacagtgccccttgtatcatccgtcgagtgccttacctgcccctcctttcatagccttcatcaccgaccagggtccaggccaccaatctaatgtggctaaatag

SEQ ID NO: 240480 - DNA, 2094 bp, synthetic construct
  misc_feature 1..2094: note = Description of Artificial Sequence: Synthetic coding sequence
  source 1..2094: mol_type = other DNA
atgttgcttccattactgctatcatccctgctaggtggctctcaggccatggatggcaggttttggatcagagtccaagaaagcgtgatggtcccagagggcctatgtatctcagtgccctgctcattttcctatcctaggcaggactggacgggaagtactcccgcatatggctattggtttaaggcagtgacggagaccacaaagggggctccagttgctaccaaccaccagtcaagagaggtagagatgtccacccgcggacggtttcagctgaccggcgatccagccaaagggaactgttcgctggtcatcagagacgctcagatgcaagacgagtcccagtatttctttcgggttgagcggggtagttatgtgcggtataactttatgaatgacggcttcttcctgaaagtgacagccctcacacagaaacccgatgtgtatattccagagacactagaacctgggcagcctgtgaccgttatctgcgtgtttaattgggctttcgaggagtgcccccctccctcgtttagctggactggtgctgccctctcttcccaagggactaagcccacgacgagccatttctccgtgttaagtttcacgccacgtccacaagaccacaataccgacttaacctgccacgtagacttcagccgcaagggtgtcagtgcacagcggactgtaagattgcgggtggcatatgcgcctcgggaccttgttattagcattagcagggacaatacacccgctcttgagccccagccccagggaaacgtgccatacctggaagctcagaaaggacaattcttgcgtctcttatgcgctgcggacagtcagccgcctgctactctgtcttgggtgctccagaatcgcgttctgtcctcgtctcacccgtggggacccaggcctctggggttagagctacctggggttaaagcaggagactccggcagatatacctgcagggctgagaatagacttggaagccagcagagggcactcgatttgtccgtccagtatccacctgagaatctcagggtcatggtgagccaggccaacagaaccgtgctggaaaatctgggcaacgggactagcttgcctgtgcttgaggggcagagcttgtgtctggtgtgtgtgactcatagctctcccccagccagactgtcgtggacgcaaaggggccaggtactgagcccgagccaaccctccgacccaggcgtgctggagctgcctcgcgttcaggtggagcatgaaggcgagtttacttgccatgcccgtcaccctctggggagccagcacgtgtccttgtcactgagcgtacactactccccaaaactcctcggcccttcttgcagctgggaggccgaaggcttgcattgctcctgctcctcacaagcctcgcctgcacctagcttaaggtggtggctgggcgaggagctccttgaaggcaactcctcgcaggacagttttgaggtgaccccttctagcgctgggccatgggccaattcttcactttccctgcacggaggcctcagctcaggactgagactgaggtgtgaagcctggaatgtacacggggcacagagtgggagtattcttcaattgcccgataaaaagggcctcatcagcactgcattttcaaacggagccttcttgggcattggtatcacagccctgctattcctgtgtctggctcttatcatcatgaagatactgccaaagaggcggacccagacagagactcccagaccacggttttcacgtcattccacaatcttggattatataaatgtggtgcctaccgccggaccgctggctcaaaaaaggaaccagaaggcaactcctaattcccccagaacccctttgccgccaggggcaccctcaccggaaagtaagaagaaccaaaagaaacaataccagctgccctcctttcccgagcccaagtcatccacacaggcacctgagtcccaggagtcacaggaagagttgcactacgctacccttaactttcctggcgtgagacccagaccagaagcccgaatgccaaagggtacccaggcagattatgccgaagtcaagttccaatag

SEQ ID NO: 240481 - DNA, 1809 bp, synthetic construct
  misc_feature 1..1809: note = Description of Artificial Sequence: Synthetic coding sequence
  source 1..1809: mol_type = other DNA
atgctgctaccactgttgctgagctccctcctgggtgggagccaggctatggacggcaggttttggattcgcgtccaggaaagcgttatggtgcccgagggattgtgcattagtgtgccatgctctttctcatatccacgacaggactggacagggtctactcccgcatatggatactggttcaaggcagttacggagactaccaaaggagcacccgttgccaccaatcaccagagtcgggaggttgagatgagcacccgaggacgcttccagctgactggagacccggcaaaagggaactgttcacttgtgatccgggatgcacagatgcaggatgaaagtcaatacttttttcgagttgaacgcggatcatatgttcgctacaacttcatgaacgacggcttttttctcaaagtgacggcgttgacccagaaaccggatgtgtacattcctgaaaccctcgagccaggccaacccgtcaccgtcatttgcgtcttcaattgggctttcgaggagtgcccccctccttccttttcatggacaggggctgcactcagttcgcaggggacgaagcctacgaccagtcatttcagtgtgctgtcgtttacccctcggccacaggaccataatacagatctgacatgccatgttgattttagtagaaaaggagtgtctgcacagcggacggttcggcttagagttgcgtacgcccctagggacttggtcataagtatctctcgtgacaacaccccagcattggagccgcaacctcaagggaacgtgccgtacctggaagctcagaagggtcagtttcttcgcctgctttgcgcagccgactcacagccaccagccaccttgtcttgggtcctccaaaacagagtccttagtagcagccatccttggggtcctaggccacttggtctagagctaccaggagtaaaagcgggagactccgggaggtacacttgccgagctgagaacagactggggagccagcagcgggctttggacctttcagtgcagtaccccccagaaaatctccgcgtcatggtgtcacaagcaaaccggactgtgctggagaacctgggaaacggcacatcactgcccgtactggagggccaatcgctgtgtctggtctgtgtgacgcattctagcccgccagctcgtctgagctggacacagcgaggccaggtgctctccccttcacagccctctgatccaggagtcttagaactgcccagagttcaggtggaacacgaaggcgagttcacatgccatgcaaggcatccgctaggcagtcagcacgtctccttgtccttgtctgtacattataaaaaaggactcatctccaccgccttttccaatggtgccttcttgggaattggcatcactgcactcctgttcctgtgtctcgccttaatcatcatgaagattcttccaaagcggagaacccaaactgaaaccccaagaccaaggttctcacgccatagcactatccttgactatattaacgtggtgcccacagccggacccctggcacagaagcgcaaccagaaagcaacccccaattccccacggacccccctgccccctggggctccatcgcctgagagtaagaaaaaccagaagaagcagtaccagcttcctagctttcctgagcctaagtcctctacacaggcccctgagagtcaggagagccaggaagagttgcattacgctactctgaactttcccggtgtacgaccaagaccagaagctcgaatgccaaagggcacacaagctgactacgccgaggttaagttccagtag

SEQ ID NO: 240482 - DNA, 2094 bp, synthetic construct
  misc_feature 1..2094: note = Description of Artificial Sequence: Synthetic coding sequence
  source 1..2094: mol_type = other DNA
atgctcctcccccttttgctctcttctctccttgggggaagccaggccatggatggtagattttggattcgcgttcaggagagtgtgatggtccctgagggcttatgcatctctgtcccttgttcttttagctacccacgccaggattggacaggcagcacccctgcatatggatattggtttaaggccgtgacggaaactacgaaaggcgctcctgttgccaccaatcaccaatcccgtgaggttgagatgagcacccgcggtcggttccaactcacgggagatcctgcaaaaggaaattgttcactggtgatccgcgacgcccaaatgcaagacgagtcccagtacttcttcagagtggaaaggggctcgtatgtaagatacaatttcatgaatgacggcttttttctgaaggttacggcgcttacacaaaaacccgatgtgtacatccccgagaccctcgaaccgggacagccggtgacagtcatttgcgtgtttaattgggcatttgaggagtgcccccctcccagcttctcctggacaggggctgccctgagctctcagggcaccaagcccactacctcacatttcagcgtgctgagctttaccccacggcctcaagaccacaacacggaccttacttgtcatgtggacttttccaggaagggtgtcagtgcccagagaaccgtccgcttgagagttgcctacgccccacgggacctggtaatttctattagtagggataacactccagccctggagcctcagccccagggcaacgtaccttacttagaggctcaaaaagggcaatttttgaggttgctgtgtgcagccgattcccagcctcccgcaaccttgtcttgggtgctgcagaatagggttttatcgtccagccacccatgggggcctaggcccctggggctggagctcccgggagtgaaggccggagattcaggtcggtatacttgcagggctgaaaaccgtctgggctcgcagcagagagccctggacctgagtgtccagtatccacccgagaacctgcgagttatggtatcccaggcgaatagaacagtacttgaaaaccttggcaatgggacttcactccctgttcttgaaggacagtcgctatgtctggtgtgcgtcacccacagctcccctcctgcaaggttgtcttggacccagcggggtcaggtactgtccccgagtcagccctcagaccctggggtgctggaactgccacgcgtgcaggtggagcacgagggcgaattcacttgccacgccaggcaccctctgggatcccagcacgtttcgctgtccctcagcgtacactactctccaaagttactggggccttcatgctcctgggaggccgagggtctccactgtagctgctctagtcaggcatcacccgctccctcactaagatggtggctgggtgaggagctacttgagggaaactcaagccaggacagctttgaggtgaccccgtctagcgctggaccttgggccaactctagtctgtcactccacggaggcttatcttccggtctgaggctcaggtgcgaagcatggaatgttcacggcgcacagagcggcagtatcctgcaactgcccgataagaaggggctgatctccactgccttttcaaacggagcattccttggcattggaatcaccgctcttctctttttatgcttggcattaatcatcatgaaaatcctgccaaagcgtaggactcaaactgaaaccccaagacccagattttccaggcattcaaccatactcgattacataaacgtggtgccaaccgctggtccccttgctcagaaacggaatcagaaagcaacacccaactctcccagaacccctctccccccaggcgcaccgtctccagaatctaagaagaatcagaaaaagcagtatcagctgcctagctttcctgagcccaagtctagtactcaggcaccagagtcacaggaatcacaagaagagctgcattatgctaccttgaactttccaggcgtcaggccccgacctgaggcacggatgcctaaaggcactcaggccgactatgctgaagttaagtttcagtag

SEQ ID NO: 240483 - DNA, 1560 bp, synthetic construct
  misc_feature 1..1560: note = Description of Artificial Sequence: Synthetic coding sequence
  source 1..1560: mol_type = other DNA
atgctgctgccactcctgctatcgagcctccttggaggcagccaagcaatggatgggagattctggatccgcgttcaggagagcgttatggtaccggaaggcttatgcatcagcgtgccctgctcgttctcttatccacgtcaggattggactggctctactccggcttacgggtattggttcaaggctgtaacagagacgacgaaaggcgcacccgtggcaacgaatcatcagagccgcgaagttgaaatgtcaacccggggacgattccagctaacaggcgaccctgccaaaggcaactgttcgctggtgattagagacgcacagatgcaagatgagagccagtacttcttccgcgtcgagcggggttcatacgtccggtataacttcatgaatgatggtttcttcctcaaagttaccgccttgactcagaaaactgtgaggttgagagtggcttacgccccaagagacctggtgattagtataagccgtgataacaccccagccctggaaccacagcctcagggcaacgtgccctacttggaggcccaaaagggtcaattccttcgcctcttgtgtgccgcagattcacagccacccgcaacgctgagttgggtgctccaaaatcgcgttctgagttcctcccatccgtggggtcctcggccactgggcctcgagttaccgggagtgaaagctggagattctggaagatatacatgtagggccgagaatcggctcggaagccagcagcgcgctctggatctctccgtgcaatatccccctgagaatctgagagtgatggttagtcaagctaaccggaccgtgctcgaaaatctgggcaacggaacctctctgccagtcctggaggggcaatccctctgcctggtatgcgtcacccactcaagtccccctgccaggctttcttggactcagagaggacaggttctgagtcccagccaaccctctgaccctggcgtccttgagctgccccgtgtgcaagtggagcatgaaggagaattcacatgccacgccaggcatcccctgggaagccagcatgtgtcactgtcactgagtgtacattataagaaagggctcattagcactgctttctctaacggtgcttttttgggtatcggaatcaccgccctgctcttcctgtgccttgcgctgatcattatgaagatcttgccaaaacgtcggactcagacagagactccacgtcctcgcttcagcagacattccaccatcttagactacatcaacgttgtgccaaccgcgggacctctagctcagaagagaaatcaaaaagctactccgaattccccacgaactcccctacctcccggtgccccttcacctgaatccaagaagaatcagaagaaacagtaccaacttccaagctttccagagccgaaaagcagtacacaagctccggaaagtcaagaatcccaggaggaattacattacgcgaccttgaatttccctggcgtgcggccaagacctgaagcccgaatgcctaaggggactcaggctgattatgcagaggttaaattccagtag

SEQ ID NO: 240484 - DNA, 1920 bp, synthetic construct
  misc_feature 1..1920: note = Description of Artificial Sequence: Synthetic coding sequence
  source 1..1920: mol_type = other DNA
atgttattgccgttactgctgtcttccctgctcggaggctcacaggccatggacggtcgcttttggattagggtgcaagaatccgtgatggttcccgaaggattatgtatttcagttccctgttcatttagctacccacgccaggactggactgggtccacccccgcttacggctattggttcaaggccgtgaccgagaccacgaagggggctccagtggccaccaaccatcaatccagggaagtcgaaatgtctacgcgcggaagatttcagctcacaggggacccagctaaaggtaactgtagtctcgtgatacgagacgctcagatgcaagacgaatctcagtatttcttccgggtcgagaggggatcgtatgtccgttacaatttcatgaatgatgggtttttcttaaaagtgaccgtactgagttttacaccgaggccccaagaccataatacagacctgacttgccatgtcgactttagcaggaagggagtttccgctcagagaaccgtcaggctccgggtggcctatgcccctagggatctcgttatctctatctccagggacaacacgcccgctctggagccacaaccacagggcaatgtgccctacctagaggcccagaaaggccaattcctgcgactgctctgtgctgctgattctcagccacccgcaactctatcctgggtcttacaaaaccgcgtgcttagttcctcacacccttgggggcctaggcctctggggttagagttgcccggagtaaaagcaggtgattcgggaaggtatacgtgtcgtgctgaaaatcgcctgggctctcagcaacgtgccttggacctatccgttcagtaccccccagaaaacctgcgagtcatggtatcccaagctaacaggacagtactagaaaacctgggcaatgggaccagcctccctgtgctggagggccagtctttgtgcctcgtttgtgtaactcacagtagcccacctgccagactctcatggactcagcgcggtcaagtgctgtcccccagccaaccgtctgaccctggagtattagaacttcctcgggtgcaggtggaacacgagggcgaattcacatgccacgcacgacatcctctaggttctcagcacgtgtcactgagtctcagcgtacactactcacccaagttactgggaccttcttgcagctgggaggctgagggtctccactgcagttgttcttctcaggcctcacccgcaccgtcactcagatggtggctcggagaggagctgctggaaggaaacagctcccaagattcatttgaggttacaccttcttctgccggaccatgggccaactcttctctttcactgcacggaggactgagctcgggcctgagacttcgctgcgaagcctggaatgtgcacggtgcgcagagcggcagtattctgcagctgcctgataagaaagggctgatttccaccgcattctcgaacggcgctttcctaggtatcggtatcactgccctactgtttttatgccttgcactcattatcatgaagattcttcccaaacgcaggactcaaacggagactccaaggcccaggttcagtcgccattcgacgatcttggattacattaacgtcgtacctacagccggacccttggcacagaaacgcaatcagaaggcaacacccaacagcccgcgtactcccctgcctccgggtgcaccttcccctgagagtaagaaaaatcagaaaaagcaatatcagctgccatctttccctgaacctaaatcatccacacaagctcccgaatcccaagagtcacaagaggagcttcactatgccaccctgaacttcccgggagttagacccaggcccgaggctagaatgccaaaggggacacaggccgattatgccgaagtgaaatttcagtag

SEQ ID NO: 240485 - DNA, 1635 bp, synthetic construct
  misc_feature 1..1635: note = Description of Artificial Sequence: Synthetic coding sequence
  source 1..1635: mol_type = other DNA
atgttgttgccgcttctgctttcatcactgctgggcggatcgcaggctatggacgggcgtttctggatacgcgttcaggagagtgtaatggtacccgagggcctgtgcatcagcgtgccgtgcagcttctcctacccccgtcaggactggaccgggagtacccccgcttatgggtattggtttaaagctgtaacggaaaccacgaaaggagcccctgttgctacaaatcaccagagcagagaggtggagatgtcaacccgcggtaggttccagctgacaggtgatcccgctaaaggaaattgttcactggtcattagggatgcccagatgcaagatgagtctcagtactttttccgcgtggaacgcggtagctacgtgaggtataactttatgaatgacggcttctttctgaaggtcacagtgctgtcgtttacgcctagacctcaagaccacaacacagacttgacctgccacgtggacttcagccgaaagggcgtgtccgcacaaagaacggtacggttgagggtcgcatatgctcctcgcgacctcgtcatctccatctcacgggacaacacccctgccttagagccacagcctcagggtaacgtgccctatcttgaagcccaaaaaggccagttcttacgtttgctgtgcgccgctgactcccaaccccctgccacattgtcctgggtactacagaatcgggttttgagttcatcccatccttgggggcctcggcctttggggctcgagctccctggcgttaaagccggagattctggaaggtacacctgtcgggcagagaatagactcggatctcagcagcgcgcactggatcttagcgtgcagtatccacccgagaacctacgagttatggtgagtcaggcaaatcggacagtcctggagaacttgggaaacggaacgtcgctgcccgtgttggagggccaatcactgtgtctggtctgcgtgacccactcctctccccctgcccgactcagttggactcagcgtggccaagtcctgagcccgtctcagcctagtgatcccggtgtactggagctgcctagagtgcaggtggaacacgaaggtgagtttacatgccacgctcgacacccactgggcagtcagcacgtgagtctgtccttgtccgtacactacaagaaggggctgatttccaccgcattctccaacggcgcattcctgggcatcggtatcactgcactgctctttttatgcctcgcactcattatcatgaagatattgcctaagcggaggactcaaacggaaacacctcgccctcgcttctcccgccattccaccatactggactatatcaatgttgtccccacagccggtcccctcgcccagaagcggaaccagaaggcaactccaaattcacctcggaccccactgccacctggggcacctagtcccgaatccaagaagaaccagaaaaagcagtatcagttgccatcttttcctgaaccaaaaagtagtacacaggccccagaaagtcaggaaagccaagaagagctccattacgccacacttaatttccccggagtgcgacctcgcccagaagccagaatgcctaaaggaacccaggcagactatgccgaagtaaaattccagtag

SEQ ID NO: 240486 - DNA, 1365 bp, synthetic construct
  misc_feature 1..1365: note = Description of Artificial Sequence: Synthetic coding sequence
  source 1..1365: mol_type = other DNA
atgctgcttccactccttctttcatccctgctggggggatcccaggctatggatgggagattctggattcgagtccaagagtctgtgatggtccctgaggggctttgcattagtgtaccctgctctttcagttatcctagacaagattggaccggctctacgccagcatatggctactggtttaaagcagtgacagagaccactaagggagctcccgtggctacgaatcatcagtcaagggaggtcgagatgagcacccggggaaggttccaattgacgggagatccagctaaggggaactgcagcctggtcattcgggatgctcaaatgcaggatgaaagtcagtacttttttagagtcgaaagaggcagctacgtacggtataacttcatgaatgatggatttttcttgaaggtcactgtcctgtcgtttacacccagacctcaggaccacaacactgatctcacttgccatgtggatttcagtaggaaaggcgttagtgctcaaaggaccgttcggctgcgggtcgcatacgcgccaagagaccttgtcattagcattagtcgggacaatacccctgaccccccagaaaatttacgtgtgatggtctctcaagctaaccggaccgtcttagaaaacctcggaaacggtaccagcctacctgtgctcgagggccagtcgctgtgcctggtgtgtgtgacccacagctcgccgccagcacggctttcttggacgcagagagggcaagtactttctccaagtcaacccagtgaccccggagtgctggagctgccgagggtacaggtcgagcacgagggagagttcacctgccatgccagacatcctctgggctcccaacacgtctccctcagtctatccgtgcactacaaaaaagggctcatctctaccgcattttctaatggcgctttcctggggatcggcatcacggctctgctgtttttgtgccttgcccttatcatcatgaagattcttccgaaacggaggacccagactgaaactccaaggcctcgcttttcgcgccattcaacaatcctggactacatcaatgtggttcctactgccggtcctcttgctcagaagcgaaaccagaaggcaaccccaaactcacccagaacaccactgcctcccggtgctccaagcccagagtctaagaaaaatcagaaaaagcaataccaactcccttcgttccctgaaccgaagtcttcaacccaggccccagaatctcaggaatcccaggaggaattacactacgccacccttaatttcccaggagtgaggccacgacccgaggcccgtatgccgaaaggaactcaggcggattacgctgaggtgaagtttcagtag

SEQ ID NO: 240487 - DNA, 1665 bp, synthetic construct
  misc_feature 1..1665: note = Description of Artificial Sequence: Synthetic coding sequence
  source 1..1665: mol_type = other DNA
atgctgctacccctgctcctgagcagtctgcttggcggttctcaggctatggatggcagattttggatccgcgttcaagaaagcgttatggtgcccgaagggttgtgcatttctgtcccttgctctttttcctaccccaggcaggactggactggatctaccccagcttatggctactggttcaaggccgtgaccgaaaccactaagggcgcaccagtggcaactaatcaccagagccgagaagtcgagatgtcaacaaggggcaggtttcagctgacgggggaccctgccaaaggaaactgtagtctggtcataagggatgcacaaatgcaggacgagagccagtacttcttccgagtggaacgcggttcttacgtccgatataactttatgaacgacggtttttttcttaaggtcacggggacaaagccaacgacgtcccacttcagcgttttgtctttcacacccagaccacaagaccataacacagacctgacatgccacgtagacttttcgcgtaagggcgtgtcagcccagaggacagtcaggctccgtgtcgcttacgccccacgcgacctggtgatttctattagtcgcgataacaccccagctttagaaccgcagccacaggggaatgttccgtacctggaagcccagaagggacagttcctacgtctgctgtgcgcggcagacagccagccaccagctactctgagctgggtccttcaaaaccgagtgttgtcatcaagccacccctggggccctcgtccgctgggcttagaacttcccggtgtgaaggccggagatagtgggcgttacacgtgtcgggcagagaaccggctgggctcacagcagcgggcactcgacttgagcgtgcaatacccccctgagaacctccgcgttatggtgtcccaagcaaaccgcactgtgctagaaaatctgggcaacggaaccagcttgccagtactagaaggtcaaagcctgtgcctggtctgcgtcactcattcgagccctcccgctcgcttgagttggacccaaaggggtcaagtcttaagtcccagtcagcctagtgacccgggagtactggagctgcccagggtgcaagtcgaacacgagggagaatttacctgtcacgcaagacaccctctcggatcacagcacgtgtcattgtcactctccgtacactacaagaaaggactgatttctaccgcgttttccaatggagctttcctcggaattggtatcaccgccctgctgtttctgtgtctagctctcataattatgaaaatcctgcccaaacggagaacccagaccgaaacccctcgtcctcgattcagtcgacacagcaccattctcgactacatcaatgtcgtgccaactgctggtccactggcacagaaaagaaatcagaaggccaccccaaactcccccagaacacctctgccacccggtgctccctcacccgaatcaaaaaagaatcagaagaagcagtatcagttgcccagcttcccagaaccgaagtcatcaacccaggctccggaaagccaggagtctcaagaagagctgcactacgcaaccctcaactttcccggagtccggcctaggcccgaagccaggatgccgaaaggcacacaggcagattacgccgaggtgaagtttcagtag

SEQ ID NO: 240488 - DNA, 2097 bp, synthetic construct
  misc_feature 1..2097: note = Description of Artificial Sequence: Synthetic coding sequence
  source 1..2097: mol_type = other DNA
atggttccagggcaggctcaaccgcagagccccgaaatgctcttattgcctctgttactgcccgttctgggggctggttccctcaataaggaccccagctactccctgcaagttcagcgccaagtgcctgtgcctgagggcctttgcgtgattgtatcttgcaatttatcgtacccccgagacggttgggatgagtccacagcagcctatggttattggtttaaaggtaggacatcaccgaaaaccggagccccagtagccacaaataatcaaagccgagaagtggagatgagcactcgtgaccggttccagctgacaggagatccagggaagggctcatgctctctggtaataagagatgcgcagagggaagacgaggcttggtactttttccgtgtagagagaggctccagggtacgacattcgttcctgtcaaatgccttctttttgaaggttaccgccctgacaaaaaaaccggacgtgtacattcccgagactctcgagccgggacagccagttacggtgatctgtgtgttcaactgggcttttaagaaatgccccgctccttccttttcgtggactggagcagcgctgtctccacggaggaccaggccttccacctcacacttttcagtgctcagtttcactcccagcccgcaggaccacgacaccgacctcacgtgtcatgtcgacttctcacgcaaaggcgtttcagcccagcggacagttagacttcgggttgcttacgcccctaaagatctaataatcagtatttctcacgataatactagtgccttggaacttcaaggcaatgtaatttatctcgaggttcagaagggccaatttctccgtctcctgtgcgcggcagacagtcaaccacctgcgaccttatcttgggtcctgcaggaccgggtattgtcctcctctcacccatggggccctagaaccctggggcttgaactccgaggagtacgggctggcgatagcggcagatacacctgcagggccgaaaatagactgggatcccagcagcaagctctcgatctttccgtgcagtatcccccagagaaccttagagtgatggtgagtcaggccaatcggactgtgctggaaaatctgggcaacggaacttcactgccggttttggagggccagagccttaggttggtttgcgtgacccactccagcccccctgcccgactctcatggacccgctggggccagacagttggcccatctcagccttctgatcctggcgtgctggaacttccacctattcagatggagcacgaaggggaattcacgtgccacgcccagcacccactagggtcccagcatgtgtctctgagcctgtccgttcattacccccctcagctgctgggcccatcatgttcatgggaggccgaaggccttcattgttcatgtagctctcaagcctccccagccccatcacttcgctggtggttgggcgaagaattattggaaggcaattcgtctcaggggagctttgaagtcaccccctccagcgccggaccttgggccaattcgtccctatccctgcacggcggtctgagcagcggattgcgtttgcggtgcaaggcatggaatgtccacggggcacaaagtggttcagtgtttcagctgctgcccggaaaactggaacatggcggaggactgggacttggggcagccctgggcgcaggtgtggccgctctactggccttctgtagctgtctcgtcgtttttcgcgttaagatttgtaggaaagaagccaggaagagggccgcagcagaacaggatgtcccaagtactctgggcccaatatcccagggtcaccagcatgagtgctccgctggctcatcacaggaccatcctccaccgggtgccgctacatatacccctggaaaaggggaagaacaggaactgcattatgcatccttgtccttccagggcctgcgtctgtgggaacccgcagaccaggaggccccttccactacggaatacagtgagataaagattcacaccggacagcccctgaggggcccaggattcgggctacagctggaaagggagatgagtggaatggtgccgaaatag

SEQ ID NO: 240489 - DNA, 1809 bp, synthetic construct
  misc_feature 1..1809: note = Description of Artificial Sequence: Synthetic coding sequence
  source 1..1809: mol_type = other DNA
atggtacccggacaggcccagccacagtctcccgagatgctactcctccctcttctactccctgtcctaggtgccggatcgctgaataaggatccctcctactcactgcaggtccagcgccaggtgcctgtcccggagggattatgtgtgatcgtgagttgcaatcttagctatcctcgagacggatgggatgagagcacagcagcatacggatactggttcaaaggacgcaccagccctaagacaggcgctccggttgccaccaataatcaaagccgggaggttgagatgtcaacacgtgacagatttcagctgacaggcgacccgggtaagggcagttgtagtctcgtcattcgcgatgctcagcgggaagatgaggcctggtattttttcagagtggaacggggaagcagggtcaggcattctttcctgtctaacgctttctttctgaaggttaccgctctcacaaaaaaaccagacgtttatatacccgagacccttgaaccgggacagccagtcactgtgatatgtgtgtttaactgggcgtttaagaagtgccccgcaccaagcttttcttggactggggctgccctctctcccagaaggacacggccatctaccagtcattttagtgtgctgagttttacaccttctccccaggaccacgatacggatctcacatgccacgtcgatttcagtcgtaagggggtatcagcccagaggacagtgagacttagagtcgcgtatgcccctaaggatctgatcatctcgatttcccacgacaacacaagcgcactggagcttcaggggaacgtgatttatctagaggtacagaagggccaattccttaggttactatgtgccgctgatagtcagccacccgcaacgctttcctgggtgcttcaagaccgggttctgtcctcttctcatccatggggaccgagaactctcggattggaactacgtggagttagagccggagactctggcaggtacacctgccgcgctgaaaatcgcttaggctcccagcaacaggccctggacttgagtgttcaatacccaccagagaacctacgggtcatggtgtcgcaggcgaacagaaccgtgcttgaaaacttagggaacggcactagcctgcctgtgctggagggtcagtcgctacgtctggtttgtgtgactcattccagcccaccagctcgactgtcctggactcgctggggacaaactgtcgggccatcacagcccagtgatcccggtgtgttggagctacccccaatccagatggagcatgagggggagttcacctgtcacgcgcagcatcccttaggcagccagcacgtaagcctctcactatccgtacactggaagctggaacatggcggagggctgggtctgggggctgcgctgggcgctggtgtggcagcgctcttggctttctgttcttgtctggtggtttttcgggtaaaaatctgtaggaaagaggctcgaaaaagagcggcagctgaacaagacgtgcccagcaccctgggcccaatatcacaaggacatcagcacgagtgcagcgccggatccagccaggatcacccaccacccggagccgctacatatactccaggaaagggggaggaacaggagttacactacgccagcctctcatttcagggcttaaggttgtgggaaccagccgatcaagaggctccatctaccaccgagtattcagagattaagatccacactggacaacctctgcgaggtcccggatttgggctgcagctggaacgggagatgtccggtatggttccaaaatag

SEQ ID NO: 240490 - DNA, 1809 bp, synthetic construct
  misc_feature 1..1809: note = Description of Artificial Sequence: Synthetic coding sequence
  source 1..1809: mol_type = other DNA
atggtacccggacaagcacagccccaatcaccagagatgttattattgcccctcttgctgcccgtgctcggagctgggagcttgaacaaggacccatcttacagtctgcaggtacagagacaggttcccgttcccgaaggcctgtgcgtgattgtctcttgcaatctctcatatcccagagatggttgggacgagtccactgccgcatacggatactggttcaagggtcgcactagcccaaagactggcgctcccgtggcgactaataaccagagtcgagaggtggaaatgtccacaagagacaggttccaactgaccggggatcccggtaaggggagttgctcacttgtcatcagagatgcccagagggaggacgaggcctggtacttttttagagtagaaaggggctcccgcgtgcgccattcgttcctctccaatgccttcttcctcaaggtaactgcgttgaccaaaaagcccgacgtgtatatcccagagaccctcgagcctggtcaacctgtgactgtaatctgcgttttcaactgggcttttaaaaagtgcccagctccctcattctcttggactggagccgctctgtcacctaggcgaacccgccctagtacctcacatttttctgtactaagctttacaccatcaccccaagaccatgacacagacctgacatgtcacgtggatttctcacgcaagggcgtatctgcacaaagaaccgtgcgactacgagtggcgtatgcgcctaaggatctcattatctctatctctcacgacaacacaagtgcactcgagctgcagggaaacgtcatttacttggaggtccagaagggacagtttcttcggctactctgcgctgctgactctcagcctcctgctacgctatcctgggtgttacaggatcgcgtgctatcctcctcacatccctggggcccaagaaccctggggttggaactcagaggcgtccgggcaggagactctggcagatacacctgtcgcgctgagaatagattaggatcccaacagcaggctcttgacctcagcgttcagtaccctccagagaatttgcgggtgatggtcagtcaggcaaatcggacagtgctagagaatctcgggaatgggacaagcctgccagtgctagaggggcagagtctaagacttgtgtgcgtgacccactcctcgcccccagccagactcagttggacccgttggggacaaaccgtgggaccctcccaaccatccgaccctggggtgctggagctgccacccatccagatggagcacgaaggagagtttacctgccacgcccagcatcccttaggttcccagcatgtgagcttgagcctgtccgtccattggaaattggagcacggcggaggcctcggtttgggcgctgccctgggcgcaggggttgctgcacttttagctttctgctcctgtttggttgtgtttagggtaaaaatctgccgcaaagaagcacgcaagagagctgctgccgagcaagacgtgccgtccacactcgggcctattagccaaggacatcaacacgagtgctccgccggttccagccaggaccacccaccccctggggcagccacctacactccagggaaaggagaggagcaggaactgcactatgcctctctcagcttccagggcctgcgactctgggagcctgctgaccaggaggccccttctaccacggaatactccgagatcaaaattcacactggacagcccctgcggggtccaggcttcggcctgcagcttgaacgggagatgagcggcatggtgcccaaatag

SEQ ID NO: 240491 - DNA, 1788 bp, synthetic construct
  misc_feature 1..1788: note = Description of Artificial Sequence: Synthetic coding sequence
  source 1..1788: mol_type = other DNA
atgttgctcctccttctactcctgcctcccctgctttgtggcagggtgggagctaaggagcagaaggactatctgctcacgatgcaaaagagtgtcaccgttcaagaaggtctgtgcgtgtcagtgctctgctccttcagttacccacagaatgggtggactgcttccgacccagtacacggatattggttccgggctggggatcatgtctctaggaatatacctgtagcaaccaacaaccctgctagggctgtacaggaggaaaccagagatcgctttcatcttctcggggacccacaaaacaaggattgtaccctgtctatccgggacacaagagagtcagacgcagggacctacgtgttttgcgtagaacgcggtaatatgaaatggaactacaagtacgaccagctcagtgtgaatgtcaccgcgtctcaggatctactttctcggtataggctggaggtccccgagtccgtcaccgtgcaggaggggctgtgtgtaagcgttccttgcagcgttctttacccacactacaactggacagcatcgtctccagtatacgggagctggttcaaagagggtgccgatatcccttgggatataccagtagctacaaatactccaagcggcaaagtccaggaggatacccatggcagattcctgctcctaggcgacccgcagactaacaactgttctctgtctattcgcgacgcacgcaaaggtgactctgggaaatattattttcaggttgagagaggctctcgaaagtggaactatatttatgataagttaagcgtccacgtgactgctttgactcacatgcctacctttagtatccccggtactctggaatcgggacatcccaggaaccttacgtgtagcgttccatgggcctgcgagcaagggactcctccgaccattacttggatgggtgcatctgtctcaagcttagaccctaccattacccgctcctccatgctttctttgatcccacagcctcaagaccatggcaccagcctgacctgccaggtcactctgcccggagccggagttacaatgaccagagctgtgcgcctgaacattagttatcccccacagaacttaacgatgacagtgttccagggcgatggtactgcctctactacactgcggaatggaagcgctctctctgtccttgaagggcagtccttgcaccttgtgtgtgccgttgacagcaacccacccgcaagacttagctggacatggggatcacttacattatcaccaagccaaagcagtaatctgggagtgctggagttgccacgggtccatgtcaaggatgaaggcgaattcacatgccgtgcccagaatcctctcggcagtcagcatatcagtctgtcactgagtctccagaatgagtataccggcaaaatgagaccaatcagcggagtcaccctcggagcctttggcggagcgggagccactgctctggtgttcctgtacttttgtatcatcttcgtggtggtgagaagttgtcggaagaagagcgccaggcccgcagtgggtgttggggatacggggatggaggacgccaatgccgtgaggggctctgccagccaggggccattgattgaaagtccagctgatgattcaccaccgcatcacgctccccctgccctggcaacaccatcaccagaggaaggtgagattcagtatgcctccctgagctttcacaaagctaggcctcagtacccacaggaacaggaagctattggatacgagtacagtgaaataaatatccccaaatag

SEQ ID NO: 240492 - DNA, 1290 bp, synthetic construct
  misc_feature 1..1290: note = Description of Artificial Sequence: Synthetic coding sequence
  source 1..1290: mol_type = other DNA
atgcccctctgtagacctgaacacctaatgcctagggcctcccgtgtcccagtggctgcatccctgccactcagtcatgcggtgatacccactcagctgccatctaggcccggacatcggcctcctggcagacctcgcagatgtccaaaggcctcctgtctgcctccaccggtgggtccatcctctacacagacggccaagcgggtgactatgggttggcccagaccaggtcgtgcgctagtggctgtgaaggcacttctcgtactgtccctgctacaggtgcccgctcaggccgttgtgagggctgtgctcgaggataacagcagctcggtagattttgccgacctcccagctctcttcggggtacctctcgctcccgaggggatacgaggttacctgatggaggtgaaaccggcaaacgcatgccaccccatcgaggctcccaggctggggaaccggagcctcggcgcaatagtgctaattcgaaggtacgactgcacattcgatctcaaagtgttaaacgcccaacgggcaggatttgaggcagccatagtccacaatgtccatagtgatgacctcgtttcaatgacccacgtatacgaagacttaaggggccagatcgctattccatcagtgtttgtgtcagaggccgcaagccaggatctgagagtgattttaggatgcaataagtccgcccacgctttgttgctacccgatgatccaccctgccacgacttaggctgccacccggtactcacagtctcatgggtgctaggctgcaccctggccctagtcgtgagcgcttttttcgtgctcaaccacttgtggttgtgggctcaggcttgttgcagccaccgccgtcctgtgaagacctccacatgccagaaggcgcaggttcggacatttacttggcacaatgacttgtgtgcaatttgcctggacgagtacgaagaaggagaccagctaaaaattctgccatgtagccatacctatcactgtaaatgtatcgatccctggttctctcaagctcctcggagaagctgtccagtgtgcaaacagtccgtggcagcaacagaggacagtttcgatagtaccacatatagctttcgtgacgaagaccctagcctgcctggccatagaccacctatctgggcgatccaagtgcaactccgaagtaggagacttgagttattaggcagagcgagtccccactgccactgcagcacaacttctctggaggcggagtataccacagtgtcatccgcccctccagaggcgcctggacagtag

SEQ ID NO: 240493 - DNA, 1656 bp, synthetic construct
  misc_feature 1..1656: note = Description of Artificial Sequence: Synthetic coding sequence
  source 1..1656: mol_type = other DNA
atgctgccgttgttgctgctgcctctgctttgggggggatccctacaggagaagcccgtgtatgaactacaggtacagaaatctgtgaccgtacaggaaggcctttgcgtcctagtgccttgcagcttcagttatccctggcgctcctggtattccagtccccctctgtatgtgtattggttccgcgatggagaaattccatactatgctgaagtggtagcaacaaataatccggatagaagagtaaagcccgagacgcagggacgcttccgattgttgggcgatgtgcagaaaaaaaattgtagcttgtctattggtgacgccaggatggaagacacgggatcttatttcttcagggttgaacggggaagagatgtgaagtactcataccagcagaacaaacttaacctagaagtgacggccctgatcgagaagccagacatccatttcctggagcccctggaaagcggaagacccaccaggctgtcatgctctctccctgggagctgcgaagcaggcccaccattgacattctcctggacaggcaacgcattgagtccactcgaccctgaaaccacgcgcagttcggagctcacactaacccctaggcccgaagaccacggaactaatctcacatgtcagatgaagcgtcagggagcacaagtgacgactgaacgtaccgtgcaactcaatgtttcctatgcaccacagacaatcactattttccgaaacggcatcgccttggagattctccagaacacgagctacctgcccgtgctggagggacaggccttgcgcttgctctgcgatgccccaagcaatccgcctgctcacctgtcctggtttcagggctcgccagcacttaacgctacgcctatctcgaacaccggcattctggaactgagacgggtaagaagtgccgaggaaggcggtttcacatgtcgggcacaacaccctctgggcttcctacagatcttcttaaacctgtctgtctacagcctgccacagctgttagggccaagttgtagctgggaagctgaaggattacattgtcgttgttcattccgtgcaagacccgctccatccttatgctggaggctggaggagaagccccttgagggtaactccagccaggggtcatttaaggtgaattcttcctcggctggcccatgggcaaacagctcgctcatccttcacggaggactgagctcagatctgaaagtttcatgcaaggcatggaatatctatggtagccagtctggaagtgtgctcctgctgcaagggcgttctaatctgggtaccggtgtcgtccctgcagcactgggcggtgcaggagtgatggctcttctgtgtatttgtctgtgcctcattttcttcctgattgttaaagcccgtcggaaacaggcggctggacgccctgaaaagatggatgatgaagatcctattatggggaccattacctcggggtcccgcaaaaagccctggcctgactctcctggagaccaggccagtcctcccggagatgcacccccattggaagaacaaaaggagttgcactacgcatccctgtcatttagcgagatgaaaagcagagagccaaaggatcaagaggccccttctactaccgagtactccgagatcaagacaagcaaatag

SEQ ID NO: 240494 - DNA, 1062 bp, synthetic construct
  misc_feature 1..1062: note = Description of Artificial Sequence: Synthetic coding sequence
  source 1..1062: mol_type = other DNA
atgcagggcgcacaggaagctagcgcctcagaaatgctccctctcctccttcccttgctttgggccggagctctggcccaggaacgcaggtttcagttagaaggcccagaatcacttacagtccaggagggattgtgcgtactggttccttgtcgcctgccaacaaccctgcccgcatcctattatggatatgggtactggtttctggagggtgcagacgtgccagtggccaccaatgatcctgacgaggaggtccaggaggaaacacgcggtcgctttcacctgctttgggacccaagaaggaagaattgttccttaagcattcgtgatgctcgcaggcgggataatgccgcttacttttttcgcctcaagtccaaatggatgaagtacggatataccagttctaagctgtctgtgcgagtcatggcccttacccaccggccaaatatctccatccccggtacacttgagtcaggtcacccttctaacctcacctgtagtgtgccatgggtgtgtgagcaaggcacacccccaatcttttcatggatgtcagccgctcccacgagccttggacctcggacaactcagtctagtgttttgaccatcactccaagaccacaagatcacagcacgaatcttacctgccaggtaacatttcccggagctggggtcacgatggagcgcaccatccagctgaatgtgtcttacgcccctcaaaaagtggccatctctatcttccagggcaactcagccgctttcaaaatacttcagaacacgagttctctccctgttctggaaggccaggcactgcggcttttatgcgatgcagatgggaacccgcctgctcacctgtcttggtttcaggggttcccggctctgaatgccacccctataagtaacactggcgtattggagctgccacaggttgggtctgcggaggaaggagattttacttgcagggctcagcacccattgggctccctccaaatcagtctctcactgttcgtgcattggagctcagctccagtcccagatagacactcttttagacccccttgttag

SEQ ID NO: 240495 - DNA, 1281 bp, synthetic construct
  misc_feature 1..1281: note = Description of Artificial Sequence: Synthetic coding sequence
  source 1..1281: mol_type = other DNA
atgttacctttactgctgcctctcctttgggccggagctctggcccaagaaaggagattccagctggagggccctgaatccttgaccgtgcaggaggggctctgcgtgttggtcccttgtcggctgcctactacgctccccgcttcctactatgggtacggctattggttcctggagggagcagacgtgcccgtggctacgaatgaccctgacgaggaagtgcaagaggaaacaagagggaggtttcacttgctttgggaccctcgaaggaagaactgctccctgagcattagggatgcaagaagaagagataacgcagcctatttcttccggctgaaatctaaatggatgaagtatggctatacctcatccaagctttctgtacgtgtgatggctttgacacacagaccaaatatcagcatcccaggtactctcgaaagtggtcatccatcaaatctgacatgcagtgtgccatgggtctgtgagcaaggcaccccgccaatttttagttggatgtctgcggctccgacttctctgggcccacggaccactcaatccagcgtgttgaccatcacgccacgcccacaggaccactcaaccaacctcacgtgccaggtcacatttcccggtgccggtgttaccatggagaggaccatccaactaaatgtctcatcttttaaaatcctccagaacaccagctccctgccagtactggagggacaggctctgcgacttctgtgcgacgctgatgggaacccccctgcccacctgagctggttccagggctttccagctctcaacgccactcccataagtaacactggggtactggagctacctcaggtgggatctgcggaggaaggggattttacatgccgcgctcaacatccgctcggctcgctgcagattagcctgtccctgttcgtacattggaaacctgagggtcgggcaggcggtgtgctgggggctgtatggggcgcttccattactacgcttgtctttctgtgtgtctgcttcatcttccgcgtgaagacgcgcagaaaaaaggcagcgcaacctgtacaaaatactgacgatgttaaccccgtcatggtgagcggaagcagggggcatcagcaccagttccagaccggtattgtctctgatcatccggctgaggccggtccaattagcgaggatgagcaggaactgcattacgcggtgctccacttccacaaggtccagccacaggaaccaaaagtcaccgacaccgaatacagtgagattaaaatccataagtag

SEQ ID NO: 240496 - DNA, 1314 bp, synthetic construct
  misc_feature 1..1314: note = Description of Artificial Sequence: Synthetic coding sequence
  source 1..1314: mol_type = other DNA
atgcaaggcgctcaggaggcatctgcatccgaaatgctgccactgctgctcccactcctttgggccggtgctctggctcaggaaaggcgatttcaactcgagggccctgaaagcttaacagtacaggagggtctgtgtgtgcttgtgccctgtagactgccaacaaccttgcctgcttcctattacggctacggctactggttcctcgaaggcgctgatgtacccgtggctactaatgaccctgacgaagaggtgcaagaggaaacgcgaggcaggttccatctgctctgggacccaaggaggaagaactgcagcctgagtattcgcgacgcaagaaggcgtgataatgcggcatatttctttagactgaaatcaaagtggatgaagtatggctacacatcgagtaagctctccgtgcgtgtgatggccctaacccatagacctaacatcagcattcctggtacgctggagtcaggacacccatctaatttgacctgtagtgtgccatgggtttgtgagcagggaactcctccgatttttagctggatgagtgccgctcccacttccttgggtccccgaacaacacagagctctgtgcttaccataacacctagaccccaggaccacagcacaaacctgacatgccaggtgacgtttcctggtgccggagtgaccatggaaagaaccattcagttgaacgttagctcttttaagattttacagaacacctcttctttgcctgtgctcgaaggacaggcgctgcgactcctgtgcgacgctgatggtaaccccccagcccatctctcgtggttccaaggatttcctgccctgaacgccacacctatatcaaataccggtgtgctggagctgccgcaggtgggctccgcagaggaaggcgactttacctgcagggctcaacaccctctggggtcactgcagatatccctgtcattgttcgttcactggaaaccagagggtagggccggaggtgtcctcggcgctgtgtggggcgcaagcatcacaaccctcgtgttcctatgcgtgtgtttcatcttccgagtcaagactcggcgtaaaaaagctgcacaacccgtgcaaaacacagatgatgttaatcctgtcatggtgtccgggtctcgcggtcatcagcatcagttccaaaccggcattgtgtcagatcacccggctgaagctggcccaatttctgaggacgaacaggaactgcactacgctgtgcttcattttcacaaagtccagccccaggagcccaaggtcactgacactgaatactccgagatcaagatccataaatag

SEQ ID NO: 240497 - DNA, 1362 bp, synthetic construct
  misc_feature 1..1362: note = Description of Artificial Sequence: Synthetic coding sequence
  source 1..1362: mol_type = other DNA
atgcagggagcccaggaggcctccgctagcgaaatgctgccgcttctgttaccccttctttgggcaggagccttggcccaagaacggagatttcaattagaggggccagagagccttaccgtgcaggaaggtctatgcgtgttagtgccatgtcggttacccacgacccttcctgcgagctattacggctacggctactggtttcttgaaggggcagatgtcccagtagctacaaatgaccccgacgaggaagtgcaagaagagacgcgaggcagatttcatcttctttgggatcccaggaggaaaaattgcagcctatccatacgcgacgctcgtaggagggacaacgcagcttatttctttcgtcttaaatcgaagtggatgaaatacggatacacaagttccaaacttagtgtgagggtgatggcgcttactcaccggcctaacattagtattcccggtactctcgaatccggacaccctagtaaccttacttgctccgtcccgtgggtgtgtgagcagggcaccccgccaatcttctcctggatgagtgccgcacctacttccctggggccaagaaccacccagagtagtgttctcaccatcaccccaagacctcaggatcactccacaaacctaacatgtcaagttacgttccccggagctggtgtcacgatggagagaacgatccagctgaatgtttcctacgctccccagaaagttgccatatcaatattccagggtaatagcgcagctttcaagatcctgcaaaacacatcatctctgcccgtcctggagggccaggcgctcagacttctgtgtgatgcagatggaaatccccctgcccacctcagttggtttcagggtttcccagctctaaacgctacccccataagtaataccggggtgcttgagctgccccaggtgggatcggcagaggagggcgatttcacgtgccgagcccagcaccctctcgggtcattgcaaatttctctatctcttttcgtgcattggaagccagagggccgtgctggcggtgttttgggtgcagtgtggggggcatctatcactacccttgtttttctatgtgtatgcttcatctttcgggtcaagacgcgcaggaaaaaagcggctcagcccgtccaaaacacagatgatgtaaaccctgtcatggtatccggatctcggggacatcagcaccagttccagacaggtatcgtgtcagatcatcctgcagaggctggtcctatctccgaagacgagcaagaattgcactacgcggtactgcacttccacaaggtccagccacaggagcccaaggtgactgacacagaatatagcgagatcaagattcataagtag

SEQ ID NO: 240498 - DNA, 1170 bp, synthetic construct
  misc_feature 1..1170: note = Description of Artificial Sequence: Synthetic coding sequence
  source 1..1170: mol_type = other DNA
atgcagggagcccaggaagcatctgcctctgaaatgttgccccttctgctgcccctcctgtgggcaggcgcactggcacaggaacgacgcttccagctggagggaccagaaagtttgacggtgcaggaaggactgtgtgtgctggtcccttgcaggctgccaacaaccttacccgcatcatactatgggtatggctactggtttcttgaaggagccgatgtcccagtggccacaaatgatcctgatgaagaggtgcaggaggagacccgtggcagatttcatctcctttgggatccgcgacgcaagaattgttcactttccatcagagatgccaggcgaagagacaatgccgcttacttcttcaggctaaagagcaagtggatgaagtatgggtatacctcttctaagttatccgtcagggtcatggctctcacccatcggccaaacatatcaattcccggtaccctggaaagcggccacccgtcgaaccttacatgtagtgtgccctgggtgtgtgaacaggggaccccccctattttcagctggatgtctgctgcaccgaccagcctggggccaaggactacacagtctagcgttctgaccattacgccacggcctcaggaccattcaacaaatctgacgtgccaagtgactttccccggtgcaggggtaaccatggaacggacaattcaactcaatgtctcatggatgctacggaggcctccacttagcacgccagacgcccctcaaaaggttgcaatatccatatttcaagggaacagtgcggcattcaaaattctacaaaacactagtagtctgcctgtgctggagggccaggctctgcggttgctctgcgacgcggacggtaatccacccgctcacctgtcatggtttcaggggttccccgctttaaacgccacacctatttccaataccggcgtgctggaactgccccaggtcggaagtgccgaggagggagatttcacttgcagagcgcagcatccgcttggatctctccaaatctccttatccctcttcgtacactggaaacccgaaggccgagctggcggtgtgctgggagcggtgtggggagctagcatcacaacactcgtcttcctgtgcgtctgcttcatttttcgcgtgatctccactagcagtcgtcaagcctag

SEQ ID NO: 240499 - DNA, 1206 bp, synthetic construct
  misc_feature 1..1206: note = Description of Artificial Sequence: Synthetic coding sequence
  source 1..1206: mol_type = other DNA
atgcagggcgctcaggaggcctcggcaagcgagatgcttcctctccttctgccacttctgtgggcagcttcttattacggttatggatactggtttctggaaggggcagacgtgcccgtggcaactaacgaccctgatgaggaagttcaggaggaaacgcggggacggtttcacctcctctgggatccacggagaaagaattgtagcctatcaatccgagatgctcggaggcgggataacgccgcttacttctttcgtttgaaaagcaaatggatgaagtatgggtacactagttctaagctgtcagtgcgggtcatggccctgacacatcggccaaacatctccatacctggaaccctggagtcaggccaccctagcaatttaacctgctctgtcccatgggtgtgcgaacagggtacaccacccattttcagttggatgtccgctgcccctacaagcttggggcctagaaccacccagagcagcgtcctgactattactccccgtcctcaggatcacagcactaacttgacttgtcaagtgactttccccggagctggagtgacgatggagcgcacgatccagctaaatgtgagttcgtttaagatattgcagaatacttcgagtcttccagtccttgaaggccaggctttgcgcctcctctgcgatgccgacgggaatcccccagcacacctttcatggttccaggggttcccggcactgaacgctactccaatctcaaatacgggtgtgctcgagcttcctcaagtcgggagcgcggaggagggcgactttacatgtcgcgcacagcatcctttaggatctctgcagatcagcttgtcacttttcgtacattggaaaccagaaggcagagcagggggtgtcttaggagccgtctggggagctagcataacaacactagttttcctgtgcgtgtgttttatattccgtgtgaagactcgtagaaagaaggctgcacaacccgttcagaatacggatgacgttaaccccgtgatggtctcaggttccaggggacaccaacaccagttccaaaccggaattgtaagcgatcaccctgccgaggctgggcctatttcagaggacgagcaggaattgcattatgccgtactgcactttcataaagtccagccccaggaacccaaggtgacagatactgagtatagcgagatcaaaatccataaatag

SEQ ID NO: 240500 - DNA, 1125 bp, synthetic construct
  misc_feature 1..1125: note = Description of Artificial Sequence: Synthetic coding sequence
  source 1..1125: mol_type = other DNA
atgttgttgctgctgctattgcccctgctctggggaagagaacgggtggaggggcagaagagcaatagaaaggattatagcctgacgatgcaatcaagcgtcacagtccaggagggaatgtgtgtccacgtcagatgtagtttttcttacccagtcgactcacagactgactccgaccctgtgcacggatactggtttagggcaggtaatgatatctcctggaaggctccggtagctacaaataatcccgcttgggcagtgcaggaagaaactcgcgacagattccacttgctgggagacccccagactaaaaattgtaccctgtccatcagagacgccaggatgtcagatgccggacgctactttttccggatggagaaggggaatataaagtggaactacaagtacgatcaattgtctgtgaacgttaccgaccctccacaaaacttgacggtgacggtttttcagggagaaggtacggctagcacggcactcggcaattcctcatcactctcggtgctggagggacaaagtctgcgtctggtctgtgccgtggacagcaatccacctgccaggctgtcttggacctggaggtccctaacgctctacccatcgcaaccatccaaccctcttgttttggaactgcaggtgcacctcggggatgagggagagtttacctgccgtgcacaaaacagtctggggtctcagcacgtttcactcaacctctccttacagcaggagtacaccggcaagatgcgtccagttagcggagtgctgctgggagcagtgggaggggcaggagccaccgcccttgtgttcctctccttctgcgtcatctttatagtggtccggtcttgtagaaaaaagtcagctcggccagcagcggacgtcggcgatattggtatgaaagatgccaacaccattcgtggaagcgcctcacagggtaatttgactgaatcctgggccgatgacaatccgagacatcatggcttagccgcacacagctctggggaggaacgggaaattcagtatgccccattgagcttccacaagggtgagccacaggacctgtccgggcaggaggcgaccaataatgagtacagcgaaattaagattcctaaatag

SEQ ID NO: 240501 - DNA, 1404 bp, synthetic construct
  misc_feature 1..1404: note = Description of Artificial Sequence: Synthetic coding sequence
  source 1..1404: mol_type = other DNA
atgctgcttctgctactcctgccactgctgtggggcagagaacgtgtagagggacaaaaatctaataggaaggattattccctgacgatgcaaagtagcgttacagttcaggaaggcatgtgcgtgcacgttcgatgctccttttcctatccagttgacagtcagacagatagtgacccagttcatggttactggttccgggctggtaatgacatctcctggaaagcccctgtagccacgaataaccccgcttgggctgtgcaggaggagacacgggaccgatttcacctcttaggagatccccagaccaaaaactgtacccttagtatccgagacgccagaatgagcgacgctggtcggtactttttcaggatggagaagggcaacatcaagtggaattacaagtatgatcagctgtccgtaaacgtgacagccctgactcacaggcctaacattctcattcccggaacactggaatctggatgttttcagaatctgacatgctccgtgccctgggcatgtgaacagggcactccaccaatgatttcttggatgggaactagtgtctctccactgcatccaagtaccacccgaagcagtgttctcaccttgatcccccagccgcagcaccatggaacatccctgacctgtcaggtgacgcttccaggcgcaggtgttactacaaaccggaccatacagcttaacgtgtcttaccctccgcagaatttaactgtcaccgtgttccaaggagaaggaaccgcaagtaccgccttaggcaactcctcaagcctgagcgtgctggaaggtcagtcactcaggctggtctgtgcagttgatagcaatccccctgccaggttatcctggacatggaggagcctgaccctttacccttcccagcccagcaatcctttagttctggagctgcaggtgcacctgggcgatgagggagagtttacctgccgggctcagaactcacttggctcacagcacgtatccctgaacctgagcctccagcaggaatacacgggcaaaatgcggccagtctccggtgtgttgcttggtgcagtcggaggagcaggggctacagccctggtcttcctctcattctgtgtcatttttatcgtcgtgcggtcctgtaggaagaaatctgcaaggcccgctgctgatgttggcgacattggcatgaaggatgcaaacactattagagggagtgcttcccagggcaatctgaccgaaagctgggccgacgacaatccacgtcatcacggactcgcagcacactctagtggggaggagagagagatccagtacgcacctctgagtttccataaaggggaaccccaggatctctcaggccaagaggccacgaacaatgaatattctgagataaaaattcccaagtag

SEQ ID NO: 240502 - DNA, 438 bp, synthetic construct
  misc_feature 1..438: note = Description of Artificial Sequence: Synthetic coding sequence
  source 1..438: mol_type = other DNA
atgttgcttttgctgttactcccccttctgtggggtcgtgagagagtagaaggccaaaaatctaatcggaaagactactcgttgacaatgcagtctagcgtgaccgtgcaggaagggatgtgcgttcacgtgagatgctccttctcctatccagttgattctcaaacggattctgaccccgttcatggctactggttccgcgcaggcaatgacatcagctggaaagccccagttgcaaccaataatcccgcttgggcagttcaggaagagactagggatcgcttccacctgttgggggaccctcagacgaagaattgtacgctcagcatccgtgacgcgcgaatgtctgacgccggtcgctacttctttaggatggagaaggggaacattaaatggaactataagtacgaccaacttagcgtgaacgtgacagaatag

SEQ ID NO: 240503 - DNA, 1500 bp, synthetic construct
  misc_feature 1..1500: note = Description of Artificial Sequence: Synthetic coding sequence
  source 1..1500: mol_type = other DNA
atgttactattgctgctgctgctccccctcctgtggggaaccaagggtatggaaggtgataggcagtatggagatggctacctactgcaggtgcaagaactggttacagtgcaggagggactctgcgtgcacgttccatgctcgttttcttatccccaggatgggtggaccgatagcgaccccgtgcatggatattggtttagggcaggcgataggccataccaggatgcccctgttgcaactaacaatcctgaccgagaagtgcaggcggaaacccagggcaggtttcagttgctcggcgatatctggtccaatgattgctccctctccattagggacgcaaggaaacgggataagggttcatacttcttcagactggagcgagggagtatgaagtggtcctacaagtctcagcttaattataagactaagcagctttcggtcttcgtgactgccttgacacaccgcccagacattctcatcctcggaacactggagagcggccactctcggaatctaacttgcagcgtaccatgggcctgcaagcaggggaccccgcctatgatctcctggataggcgcttccgtgagcagccccggacctacaactgccagatcctcagtcctcaccttgactcctaagccgcaggaccatggtacgtccctcacatgtcaggtgacgctgcccggtactggagtgaccaccacttccaccgtgaggttggacgtgtcttatccgccatggaatcttacgatgaccgtctttcagggcgatgctaccgcatctaccgcattgggaaacggctcctcgctatccgttctggaggggcagtctctgagattagtgtgtgctgttaatagcaatccgccagccagactttcttggacccgagggtctcttacattgtgccctagcaggtcgagtaatcccggattactggagctgcctcgcgtgcacgtaagggacgaaggcgaatttacctgcagggcccagaatgcccagggcagtcagcacatctccctctctctgtcacttcaaaatgaaggcacagggaccagccggcctgtgtcacaggtgaccctggctgcggtcggaggagcaggtgccacagccctggcctttctttcattttgtataatctttataatcgtgcgctcctgccggaaaaaaagcgcacggcctgctgcaggggtgggggatacagggatggaggatgctaaagccattcgcggatctgctagtcagggccctctgacagagtcctggaaagatggtaacccattgaaaaagccaccacccgcagtggccccttcctccggcgaggagggagaactacattatgcgactttaagtttccataaggtcaaacctcaggatccccagggccaggaagctactgatagtgaatattcagagattaaaatccataagagggaaacggccgaaacacaagcatgtctgcgcaaccataatccatcttcaaaagaagtcaggggatag

SEQ ID NO: 240504 - DNA, 1221 bp, synthetic construct
  misc_feature 1..1221: note = Description of Artificial Sequence: Synthetic coding sequence
  source 1..1221: mol_type = other DNA
atgttactgctgctgctgctgctgcctttgctttggggcacaaagggaatggaaggcgatcgccagtacggcgacgggtacctgttgcaggtccaggagcttgtcacagtgcaggaaggcctctgcgtccatgtcccctgctccttcagctaccctcaggacggatggacagattctgaccccgtgcacgggtactggtttcgcgcaggtgacaggccatatcaggatgctccggtcgcgaccaacaatccagatcgtgaggttcaagccgaaactcaaggcaggttccagctcctcggcgacatctggagtaacgattgtagcttgtcaatcagggacgccagaaagcgagacaaagggtcgtatttcttccgcctcgagcgcggatctatgaaatggtcgtataaatcacagctgaactacaagacaaaacagcttagcgtctttgtgacggatcctccctggaacctgacaatgaccgtgttccagggagacgccactgcgtccacagctctgggaaatgggagctctctctcggtgctggaggggcagagtttaagactcgtgtgcgccgtgaactccaacccgccagctcgcctcagctggacaagggggtctttgacactctgcccctccagaagcagtaatcccggtctattagagcttccacgcgtccatgtccgggatgaaggcgagtttacctgtcgagcccagaatgcccaaggcagccagcacataagccttagcctgagcttacagaacgaagggaccggtactagtaggcccgtgagccaggtgacccttgccgcagttggcggtgctggagccacggctctcgcatttctgtccttctgtattatcttcataatcgtcagatcttgcaggaagaagagtgcccgacccgcagccggagtgggtgacacaggaatggaggacgcaaaagccatcagaggatctgccagccagggtcctttaacggagtcgtggaaggatggaaatccattaaagaaacctcctcccgctgtcgcgccaagtagcggcgaggagggcgagctgcactacgctactctgagtttccacaaagtcaaacctcaggatccccaaggccaggaggccacggacagtgaatactccgaaattaaaatccacaaaagggagactgccgagacacaggcatgcctccgaaaccacaaccccagcagcaaggaggttcggggatag

SEQ ID NO: 240505 - DNA, 1173 bp, synthetic construct
  misc_feature 1..1173: note = Description of Artificial Sequence: Synthetic coding sequence
  source 1..1173: mol_type = other DNA
atgctcctcctgctgctcctgctgcctcttttgtgggggaccaagggcatggagggagacaggcagtatggagacgggtacctcctacaagtgcaggagctggttaccgtccaggagggcctttgcgtgcacgtcccctgctccttttcctacccgcaggatggttggactgattctgatccagtccacggttactggttcagagctggcgataggccataccaggacgcgcctgtggccaccaacaatcccgatagggaggtacaggccgaaacccagggccgattccagctgctgggcgacatctggtccaatgattgctcactctccataagggatgctcggaagcgcgacaagggttcctatttttttaggctcgagagaggatcaatgaagtggagctacaaatctcagttaaattacaagacgaaacagctgtcggtctttgtaacggcaagcacagccctgggcaatggtagcagcttatctgtccttgagggtcagagcctgaggcttgtttgcgctgtaaatagtaatccgcctgctagactgtcctggacacggggatcgttaactctgtgtccatcacgcagctcaaatccaggccttctggagctgccccgagtacatgttagggacgagggtgaattcacctgcagagctcagaatgcccagggatcacagcacatctccctaagcctcagtctgcagaatgagggcacaggcacctcaaggcccgtgtcccaggtgacgctggccgctgttggcggtgcgggtgccacagctctggctttcctgtcattctgcattatcttcatcattgtcagaagttgccgtaaaaagtctgcgcgacccgctgccggagtaggggatacaggaatggaagatgcgaaagccattcgcggatccgccagccagggcccacttactgagagttggaaagatggaaatcccctgaagaaaccgccacctgcagtggccccatcatctggtgaggaaggagaactgcactatgccactctgagtttccacaaggttaagccccaggacccacaggggcaagaagctaccgattcggagtacagcgagatcaagatccataagcgggaaaccgccgagactcaggcttgtttacgaaatcacaatccatcttcgaaggaggtgaggggttag

SEQ ID NO: 240506 - DNA, 1392 bp, synthetic construct
  misc_feature 1..1392: note = Description of Artificial Sequence: Synthetic coding sequence
  source 1..1392: mol_type = other DNA
atgctcctgctgttgctgccactgctgtgggggcgagagcgagcagaggggcagacttcaaagctcctcaccatgcaaagttcggttaccgtgcaggaaggcctgtgcgtgcatgtgccatgtagcttcagctacccctcccatggctggatctatcctggcccagtggtacacgggtactggttccgagagggagccaacaccgatcaggacgcacccgtggcaacaaataatcccgcacgggcagtttgggaggagactcgtgatcggtttcatcttttgggtgatcctcacacaaaaaactgtaccctgtccatccgtgatgcaaggcgttcagacgccggacgctatttttttcgaatggaaaaaggcagcatcaagtggaactacaaacaccacagactttccgtgaatgtgacggcactgacccatcgccctaacatactgatccccggtacgttagaaagcggttgccctcaaaacctcacgtgctcagtaccctgggcctgcgaacaaggcacgcccccaatgatctcctggatcgggacgagcgtctcgccactggaccccagcaccaccaggagcagcgttctgaccctgattccacagccccaggatcacgggacatcactgacttgtcaggtgacatttccgggagccagtgtaaccaccaacaagacggtccacctgaatgtgtcttatcctccgcaaaaccttacaatgaccgtttttcagggcgacggcaccgtgtctactgtacttggcaatgggtctagcctaagtctgccagaggggcagagtcttcgactagtgtgcgccgtcgacgctgtggacagcaatcctcctgccaggttgtctttatcgtggcggggtctgacactgtgtccctcacagccgtcaaaccctggagtgctggagttgccctgggtgcacctgagagacgccgcagagtttacttgcagggcacaaaatcctttgggaagccaacaagtttacctcaacgtgtctttgcagagcaaggccacgtccggggtgacgcaaggggtggtcgggggagccggtgctactgccctcgtgtttctatctttctgtgtgattttcgtagttgtccgatcttgccggaagaagagcgctaggcccgcagccggagttggcgacactggtatcgaagatgctaacgctgtgcggggatcagctagtcagggtccgctcacggagccatgggccgaggactcaccaccggaccagccaccacccgcatccgcaagatcctccgtgggggagggagagctccaatatgcgtcgctctcctttcagatggtcaagccttgggactctcgcggtcaggaagcaaccgacactgagtattcggagataaaaattcacaggtag

SEQ ID NO: 240507 - DNA, 1440 bp, synthetic construct
  misc_feature 1..1440: note = Description of Artificial Sequence: Synthetic coding sequence
  source 1..1440: mol_type = other DNA
atgcttttgctgttgttgcctctgttgtgggggagggagcgtgcagagggacaaacttcaaagcttctgactatgcagtcaagcgtgacagtccaggaaggtctgtgtgttcatgttccatgcagtttcagctatccctcacacggctggatctatcctggaccagtggttcatggttattggttcagggagggggcaaacaccgaccaggacgcccctgtggcaaccaacaaccccgcacgcgctgtctgggaagagacacgagatagattccacttactgggtgatccccatacaaaaaattgtaccttgtcaatccgagacgctcgcaggagcgatgcaggcagatacttttttagaatggagaaaggctcgattaagtggaactataagcatcataggctgagcgtgaacgttacagccttgacgcacagacccaacattcttattcctggcactcttgagtccgggtgtcctcagaaccttacctgttccgtgccatgggcatgtgagcaaggcacccctcccatgatatcctggattgggacatctgtgagtcctctggatccttccaccaccaggtcctctgtgttgactctgatcccgcagccccaagaccacggcacaagcctgacttgccaggtcactttcccaggcgcttcagtgaccacgaataaaaccgtgcacctgaatgtgtcatatccaccacagaacttaactatgaccgtcttccagggtgacggcacagtgagtactgtgttgggaaacggctctagcctcagtctgcctgagggccagtccctgaggctcgtgtgtgccgtagacgctgtggattctaatccccctgctaggttaagtctgtcttggcggggtctgacactttgcccttcccagccctcaaaccctggagtgctggagctcccatgggtgcacctaagagatgcagcggagttcacatgtcgggctcagaatcccctcgggtcccagcaggtatacttaaacgtgagcctccagtccaaggctactagtggcgtcacgcagggagtcgtgggaggagcaggcgctacagctctggtgtttctgtctttctgtgtgatctttgtggtggtgcggagttgccgcaagaagtccgcccgacctgccgcaggtgtcggagacacagggattgaggatgctaatgctgtcaggggaagtgcgtcacagattttaaatcactttatcggctttccaaccttcctcggactgggttttgagttcttgctgaatcttagggacctgtgttgtcatccggacagcgagttctacgtgtaccacttttctcactttaggctgatcaagaacatcgccggagaaatagtgtggagcttagaggggaagatactttggctgctcgatgtgtctgatttttttcactggttcttcctgatctgcgtgggctag

SEQ ID NO: 240508 - DNA, 735 bp, synthetic construct
  misc_feature 1..735: note = Description of Artificial Sequence: Synthetic coding sequence
  source 1..735: mol_type = other DNA
atggctgctgccgcatcgcccgctttcctgttgtgtctcccgctcctgcatctgctgtcaggctggtcccgcgcaggctgggtggacacccactgcctgtgctacgatttcatcattactcctaaaagccgtccagaacctcagtggtgtgaggtgcagggcctcgttgacgagcgtccattcctgcactatgactgtgtgaaccacaaggccaaagctttcgcctctctgggaaaaaaggtaaatgtgactaaaacctgggaggagcagacagaaacccttcgcgatgttgtggattttctcaagggccaactgctcgacattcaggtagagaacctgatacctatcgagccgcttacccttcaggcccgtatgtcatgcgagcacgaagcacacgggcatggtagaggctcctggcagtttctttttaatggccagaaattcttactcttcgattctaataataggaaatggactgcccttcatcccggagccaagaagatgaccgagaagtgggaaaagaatcgcgacgtgacgatgttcttccagaagatctctctgggcgactgtaagatgtggctagaagaattcctgatgtattgggagcagatgctagacccaacaaagcccccttcactcgctcctggcaccactcagcccaaggctatggctacaacccttagtccttggtccttattgattatctttctgtgctttattctcgcaggacgatag

SEQ ID NO: 240509 - DNA, 1248 bp, synthetic construct
  misc_feature 1..1248: note = Description of Artificial Sequence: Synthetic coding sequence
  source 1..1248: mol_type = other DNA
atgacgggcgaaagaccttctactgctttgcctgatagaagatggggtccccgaattctcggcttttggggaggctgccgggtgtgggtgtttgccgcaatctttttattgttgagtctggccgcttcatggtccaaggcagagaacgatttcgggctggtccagccactggtgacaatggagcagcttctgtgggtcagcggcaggcagatcggttctgtggacaccttcaggatcccgctcattaccgctacaccccgaggaacactgctcgcatttgccgaggccaggaagatgagctccagcgatgaaggggcaaagtttatcgccctgcgcagaagcatggaccagggtagtacctggagtcctactgcatttattgttaacgatggagacgtccccgatggcttaaacttaggagcagttgtaagcgacgtggagactggtgtcgtgtttctgttttattctctttgtgcacataaggctggttgccaggtcgcaagcactatgctagtgtggagtaaggatgacggagtttcatggtccacacccagaaacctcagtctagacatcggcacggaagtgtttgcgccaggcccagggtctggaatccagaagcagcgggaaccacgtaaaggaaggcttatagtatgtggtcacgggaccctcgaacgcgacggcgtgttttgcctgctgtccgatgatcacggtgcctcatggagatatggatcaggtgtgagcggcatcccatacgggcagcctaaacaggagaacgatttcaacccagatgaatgccagccatacgagctgcccgacggcagcgtggtaattaacgctagaaatcagaacaactaccattgccattgtaggatagtcctgaggagttatgacgcttgcgacactctccggccacgggatgtgacctttgacccagagttggtcgacccagtcgtcgccgcaggagctgtggtgacttcctctggaattgttttcttcagcaacccagcccaccctgaattcagagtgaacctgacccttaggtggtccttttctaacggcacatcgtggcgcaaggaaaccgtgcagctgtggcccggaccatcaggatatagcagccttgcgactctggaggggtcaatggacggtgaagaacaggctccacaactctatgtactttatgaaaagggtcggaaccactataccgaaagtatctccgttgccaagatttcagtttacggcacactgtag

SEQ ID NO: 240510 - DNA, 1248 bp, synthetic construct
  misc_feature 1..1248: note = Description of Artificial Sequence: Synthetic coding sequence
  source 1..1248: mol_type = other DNA
atgaccggtgaacggccttctacagcactgcctgacagacgatggggtcctcgcatcctcggcttctggggcggatgtagggtgtgggtgttcgcagccatcttcttgcttctgagtctagcggctagctggtcgaaggccgaaaatgactttggcctcgtgcaaccgctggttaccatggaacaactgctgtgggttagcggacggcagataggctcagtggataccttcagaatccctctgataaccgcaaccccaaggggtacactcctggcttttgccgaggcccgaaagatgtcgtccagcgacgaaggggcaaaatttattgcccttagacgatcgatggatcaggggagtacttggtcccctaccgctttcattgtgaatgatggagacgtgcctgatgggctgaatctcggcgcagtggtgtctgacgtggaaactggggtggtgtttctgttctatagcctctgcgcacacaaggcgggatgccaagtggcgtccaccatgctagtgtggtccaaagacgatggggtctcctggtccacccctaggaatctctctctcgatatcgggactgaagtgtttgctcccggacccggaagtggcattcagaaacaaagggagccgaggaagggcagactgatcgtgtgcggacatgggacgctagaacgcgacggggtcttttgcctgctctcagacgatcatggtgcttcctggcgctacggctctggggtctccgggatcccatacggccagcccaagcaggagaacgactttaacccagacgaatgccagccctatgaactgcccgatgggtccgtagtgatcaacgcccgaaaccagaacaactatcattgtcattgccgtatagtgttgaggtcatacgacgcttgcgatacacttcgcccaagggacgtcacctttgaccctgagctcgttgatcccgttgttgcggctggggctgtcgttacatcttccggtattgtatttttctccaaccccgcacacccagaatttcgcgtgaacttaacgcttcgctggtctttctctaatggaacatcatggaggaaagaaaccgtccaactgtggccaggaccttccggctattcctctttagctactctggagggtagtatggacggcgaggagcaagcgcctcagctttatgtattatacgaaaaaggcagaaatcactacaccgaatcaatctccgttgcaaagatctcagtatacgggacactctag

SEQ ID NO: 240511 - DNA, 1248 bp, synthetic construct
  misc_feature 1..1248: note = Description of Artificial Sequence: Synthetic coding sequence
  source 1..1248: mol_type = other DNA
atgactggcgagagacctagcacagctctgccagacagacgttggggtcctcgtatcttggggttctggggcggatgtagggtctgggtgtttgccgctatctttctcttactatctttagccgcttcttggtccaaggcagagaacgactttggactggttcaaccgctcgttaccatggagcagctgctgtgggtatctggtcgtcagattggaagtgtggacacattccgaattcctctcattacggcgacacccagaggcacactgctcgcttttgcagaagcccgaaagatgtcatcatccgacgaaggagcgaagtttattgctctgcggcgatcaatggaccagggtagcacttggtcacccaccgcttttattgtcaacgatggcgatgtgcccgacgggctaaatctgggggcagtggtgagcgatgtggaaacaggcgtggtattcctgttttacagtctgtgcgcccataaagccggatgccaagtggcaagcaccatgttagtttggtcaaaagacgacggggtatcctggtccacacccagaaatctgtcattagacatcggaacagaggtgtttgctcccggacccggtagtgggattcagaagcagcgagagccgaggaagggaaggctcattgtctgcggccacgggaccctagagagggatggcgtgttttgcctcctgtcagacgatcatggcgcaagctggagatacggatccggcgtgtcagggatcccctatgggcaaccaaaacaggagaatgatttcaatcccgatgaatgtcagccatacgaacttccggatgggagcgtggtgattaatgccagaaatcaaaataactatcattgccactgccgcatcgtattgagatcgtatgacgcatgtgatacattgcgccctcgcgacgtcacatttgaccccgagttggttgaccccgtggttgcagctggcgcagtcgtaaccagctccggcatagttttcttttctaatccggctcatcccgagttccgagtgaacctgacactccggtggagcttcagtaatggcacgtcatggcgtaaggagaccgtgcagctgtggccgggaccctccggctatagttcgctggcgactctggagggcagcatggacggggaggaacaggctccacagctctacgtactctacgaaaagggaagaaaccactatacagagtctatatctgtcgccaagatctctgtttatggtactctgtag

SEQ ID NO: 240512 - DNA, 1248 bp, synthetic construct
  misc_feature 1..1248: note = Description of Artificial Sequence: Synthetic coding sequence
  source 1..1248: mol_type = other DNA
atgaccggcgaacggccaagtaccgctctgcctgaccggagatggggcccaaggatcctcggcttctgggggggttgccgcgtctgggtatttgccgcaatcttcctcctgctcagccttgctgcctcctggtctaaggccgagaacgactttggccttgtccagccgcttgttacaatggaacagctgctgtgggtctcagggcgacagatcggcagcgtcgataccttccgtattcctctcattaccgcgacaccccgtggcaccctcctagcgtttgctgaggctcgcaaaatgtccagctccgacgagggtgccaagtttatcgctctgcgcagaagcatggatcaagggtccacttggtcaccgaccgccttcattgtcaacgacggcgacgtgcctgacggactgaacttgggtgcggtggtgtcggacgttgaaacgggcgtcgtgttcctcttctactccctgtgtgcccataaagctggctgccaggtcgcatccaccatgctggtttggagcaaagacgacggcgtgtcgtggtcgacccctcgcaacctgtctttagatatcgggaccgaagttttcgcgccaggcccaggatctggaatccagaagcaaagagaaccgaggaagggacggcttatcgtgtgcggtcacggtactttggaacgagacggtgtcttctgcttgctctctgacgatcacggagcttcgtggcggtatggatccggggtgtccggcattccatacggacagcccaagcaggaaaatgattttaatcccgatgagtgccagccatacgagttgccagatggatctgtggttatcaacgcaaggaaccaaaataactaccattgtcattgcagaatcgtgctgcgttcttacgacgcctgcgatactttaagaccacgggacgtaacattcgatcctgagctggtggatcctgtggtcgcagcaggcgcagtcgtgacctcttcaggcattgttttcttctcaaacccagcacatccggaattcagggttaacctgacgctccgttggtccttctcaaacggtaccagctggagaaaggagacagtgcagctgtggcccggtccttctggttatagctcccttgccaccctggagggctcaatggatggggaggagcaagcccctcagctgtatgtgctgtacgaaaagggcagaaatcactataccgagagcatcagcgtcgcaaaaatatccgtgtatgggactctttag

SEQ ID NO: 240513 - DNA, 1248 bp, synthetic construct
  misc_feature 1..1248: note = Description of Artificial Sequence: Synthetic coding sequence
  source 1..1248: mol_type = other DNA
atgacaggcgagcgcccaagcaccgccctgcctgatcgtaggtgggggcctcgcattttaggcttctggggcggttgccgggtctgggtcttcgctgctatttttttgcttctgagcttagctgcttcctggtctaaggctgagaatgacttcggcttagtacagccccttgtaaccatggagcagctgctttgggtttctggacgccaaatcgggagcgtggacaccttccgcattccccttattaccgcaacaccgaggggaaccttactggccttcgctgaggcccgaaagatgtcgtcttctgatgagggggcaaaattcatcgcgctgcgacggtccatggatcaggggagtacatggagcccgactgcctttatcgtgaacgacggggacgtgccagatggcctaaacctcggagctgtcgtgtccgacgtggagactggcgtagtgtttcttttttatagcctgtgcgcccataaagccggatgtcaagtcgctagtacgatgttggtttggtcaaaagatgacggtgttagctggtcaacacccagaaacctcagtctcgacatcgggactgaggttttcgcacccggacctggcagcggtattcagaagcagcgggagccaaggaaagggagactgatagtctgcggacacgggactctcgaacgcgatggggtgttttgtcttttgtctgacgaccatggagcaagctggaggtacggcagcggcgtttcgggtataccatatggccaacctaagcaagaaaacgacttcaaccccgatgagtgccagccttacgagctgccagacggctccgtggtgatcaatgcccgaaaccagaataactaccattgtcactgcagaatagttttgcgatcatacgatgcatgcgacacactgcgtccaagagacgtcactttcgacccggaactcgtggatccggtagtggccgctggcgcagtggtgacttcaagcggcattgtatttttcagtaaccctgcacatcccgagtttcgtgtgaacctgacgctgcggtggtccttcagcaacggcaccagctggcggaaagagaccgtgcaactgtggcctgggccttcaggatactcgtccctggccaccctcgagggctcaatggatggagaggagcaggctccccagctgtacgtcttgtacgagaaggggaggaatcattatacggagagtatttccgtcgcaaaaattagcgtttatggaacactctag

SEQ ID NO: 240514 - DNA, 1248 bp, synthetic construct
  misc_feature 1..1248: note = Description of Artificial Sequence: Synthetic coding sequence
  source 1..1248: mol_type = other DNA
atgaccggggaaaggccttccacagctctcccagaccgtcgttggggacctcgcatcttgggcttttgggggggttgcagagtgtgggtctttgccgctatatttttgctgctgtccctggccgcatcatggagcaaagccgagaacgattttggcttagtgcaacccttggttacaatggagcagctgctctgggtctcagggaggcagatcgggtcagttgatacttttcgcatccccctaattaccgctacaccccgtggaactctgctggcctttgcagaagctcgaaaaatgtcctcttccgacgaaggcgcaaaattcatcgccttgagacggagcatggatcagggctccacatggtcaccaacagcttttattgtgaacgatggagatgtccctgacgggctgaatctgggggcagtagttagcgacgtagagacaggagtggtgtttctgttctactctttgtgcgcacacaaggccggatgtcaagtcgctagcaccatgctggtttggagtaaagacgacggagtcagttggagcacccctaggaacctatctctggacatcggaaccgaggtcttcgctccaggaccaggcagcggtatccagaagcagagagagcctcgaaaggggagactgattgtctgtgggcacggcacactcgaacgggatggcgtgttctgcctgctgtccgatgaccacggagcttcttggcggtacggttcaggggtgagcggtattccttacggccagcctaagcaggagaacgatttcaaccccgacgaatgccagccctatgagttgcctgatggatccgtggtgattaatgccaggaatcagaacaattatcactgccactgccgaattgtgctgcggagctacgacgcctgtgataccctgcgacccagagatgtgacattcgatcctgagttggtagaccccgtcgtcgcagccggtgccgtggtgacttcctctggcatcgtatttttttcaaatccagcgcaccctgagtttagagttaatttgacactgaggtggtccttttctaatggcacttcctggagaaaggaaacagtgcagctctggcccggtcccagtggatactcatctctggctactctcgaaggctctatggatggggaggagcaggcccctcaactctatgtgctgtatgagaagggacgcaaccattataccgaatccatctctgtggcaaagatctccgtgtacgggacactgtag

SEQ ID NO: 240515 - DNA, 1248 bp, synthetic construct
  misc_feature 1..1248: note = Description of Artificial Sequence: Synthetic coding sequence
  source 1..1248: mol_type = other DNA
atgacgggagaaaggccctcgaccgctctgcccgaccgtagatggggtcctagaatcctggggttttggggcggttgccgggtgtgggttttcgccgctatctttctacttctgtcactggccgcatcctggtctaaggcagaaaacgactttggcctcgtacagcctttggtaactatggagcagctgctatgggtgagtggacgccaaattggatctgtggacaccttcagaatccccttaatcacagccacgcctcgcggaacattattggccttcgcagaagctaggaagatgagctcctctgatgagggtgccaagtttatagccctcaggcgctcaatggaccaagggagcacctggtctcctacagcatttatcgtgaatgacggggacgtcccagatggactgaacctcggcgcagtagtgtctgacgtggaaaccggggtggtgtttttattttattctctctgtgctcacaaggcaggctgccaggtggcaagcacaatgctcgtgtggtctaaagatgatggcgttagttggtcaactccacgaaacctgtctctggatatcggcaccgaagtcttcgctcctggccctggctcaggtattcagaaacagagggagccacggaaggggcgacttatcgtttgtggccatggaactcttgagcgagacggcgtgttttgcttgttatctgacgaccacggagcatcatggcggtacggctccggagtgtctggcattccttacggacaacctaaacaagaaaacgatttcaaccccgacgagtgccagccttacgagcttcctgatggtagcgtggtcataaatgctaggaaccagaacaactatcactgtcattgcaggatcgtcctgcgctcttatgatgcctgcgataccctgagaccgagggacgtgacatttgaccccgagttggtggatcctgtggtcgctgctggagcggtggtgacatcctctggaatcgtttttttcagtaatcctgctcacccggagttccgagtaaaccttaccttgcggtggagtttttctaacgggacaagttggcgcaaggagacggtccagctctggccaggcccatcaggctatagtagtctggcaaccctcgagggatctatggacggcgaagaacaagccccacagttatacgtcctgtatgagaagggacgcaatcattacacagaatcaatttccgttgctaaaatctctgtctacggaactctgtag

SEQ ID NO: 240516 - DNA, 2277 bp, synthetic construct
  misc_feature 1..2277: note = Description of Artificial Sequence: Synthetic coding sequence
  source 1..2277: mol_type = other DNA
atggcagtcagtgccggatctgcccgaacgagtccaagctccgataaagtccagaaggataaggccgagttaattagcgggccacggcaggattccaggatcggtaaattgctggggttcgagtggactgacctcagctcatggagaaggttggtgacacttcttaatcgccctaccgaccctgcatcactggcagtatttcgctttctattcggcttcctgatggtgctggacatcccgcaggaaagggggctgagctccttagacaggaaatacttggatggcctggatgtatgcagattcccattacttgacgccctaagacccctgccattagactggatgtatctggtttatacgataatgttcttgggcgctctaggaatgatgctggggctctgctatcggatcagttgtgtgctgtttttgcttccttactggtacgtttttctgctggataaaacatcctggaacaatcattcatatctgtacggtctcctagcgtttcaactcaccttcatggacgccaaccattattggagcgttgacgggctgctgaacgctcacagacgcaacgcacacgtgcccctgtggaattatgcagtgctcaggggacagatattcatagtgtatttcatcgcaggggttaaaaagctggatgctgattgggtggagggttactcaatggaatacctgagtcgccactggctgttctccccatttaagcttctactttccgaggagttaacaagccttctggtagtgcattggggtgggctactattggatttgtcagccggttttctcttgttcttcgacgtatctagatctatcggcctgttcttcgtgtcctactttcattgcatgaactctcaactgttttccattggtatgttttcctacgtgatgctggctagtagccccttgttttgctccccagaatggccacggaagttggtaagctactgcccacgaagactgcagcagctgctgccattgaaggccgctccccagccatctgtgtcttgtgtgtataagagatctcgcggaaagtcaggacaaaaaccagggctacgtcaccagctcggagctgccttcaccctgctctatcttctggagcaactcttccttccgtacagtcattttctgacacaagggtataataactggaccaacggtctatatggatatagttgggacatgatggtacacagccgctctcaccagcacgtcaaaattacctatcgagatgggaggactggagagctaggatatctcaatccaggagtgttcacacagtcgcgacgttggaaggatcatgctgatatgcttaaacaatacgcaacatgcctgtcgcggctgctcccaaaatataacgtgactgagccccagatttatttcgatatttgggtgtctatcaatgatcggttccagcagcgcatctttgacccccgagtcgatattgttcaagccgcatggagcccgtttcagcgcacctcctgggtacagcccctgctaatggacctgtccccttggagagcaaaactccaggagatcaagtcctccctggataaccacaccgaggtggtgttcattgcagacttcccgggtctgcacctggagaactttgtttctgaggatctcggcaacacgtcaatacagttgttgcagggcgaagtgactgtagagcttgtggcagagcagaagaaccagacactgcgggagggtgagaaaatgcagctcccggcaggggaatatcacaaagtttatactaccagtcccagcccttcatgctacatgtacgtttatgtgaatactactgagctggcgctggaacaagatcttgcctacttacaggaactcaaggaaaaagtggaaaatggatccgagacaggccctctcccaccggagctgcagccccttcttgagggggaggttaaggggggaccggagccaacacccttagtgcagacgtttctgcggagacaacagagacttcaggagattgagcggagacgtaataccccctttcacgagcgattttttcgctttttgctaaggaagctgtacgtctttagaaggtcttttctcatgacctgtatttctctgcggaacctcatcttgggcaggccctcacttgagcagctcgctcaggaggttacctatgctaatctacggccttttgaagccgtcggtgagttgaatccctctaacacagacagctcgcactccaaccccccagagtcaaaccccgaccccgtgcattcggagttctag

SEQ ID NO: 240517 - DNA, 1386 bp, synthetic construct
  misc_feature 1..1386: note = Description of Artificial Sequence: Synthetic coding sequence
  source 1..1386: mol_type = other DNA
atgcgcccagcagatctgcccccacggcctatggaggaaagccctgcaagcagcagcgcccctactgagactgaggagccaggaagtagcgctgaagtgatggaagaagtgaccacttgttcgttcaactctccactgttcagacaggaagacgaccggggaatcacatacagaatccccgcattgctgtatatcccaccaactcacactttccttgcatttgccgaaaaacgcagcacacgacgcgatgaagatgccctgcacttagtgctgaggcgcggtcttcgaatcggacagctcgtgcagtggggccctctcaaaccgctaatggaagccacattacccggtcaccggacgatgaacccatgccctgtgtgggagcagaaatccggctgtgtgttccttttcttcatatgcgtgcgcggacatgtgacagaacggcagcagattgtctctggccgtaatgctgccagattgtgcttcatttactcccaggatgccggttgttcgtggtcagaagtccgagatctcactgaagaggtcatcggctccgaactgaaacactgggccactttcgcagtgggacccggacatggaatccagctccaatcgggcaggctagtgatccccgcttatacatattacataccctcctggttcttctgctttcagctgccatgcaagaccagacctcactccctaatgatctactcggatgatttaggagtaacctggcaccacggaagactgatcagacccatggttacagttgagtgtgaggtggctgaagtgactgggagggccggacaccctgtgctttactgctcggccaggacccccaaccgctgtagggccgaggccctttccactgaccatggtgaggggttccaacgcttagctctctctaggcagctctgcgagcccccacatggttgccagggatctgtcgtgagctttagacctctagagatccctcatcggtgccaggactcatcatccaaggacgcacctacaattcagcaatcctccccaggaagttcactgcgtctggaggaggaagcgggtactcctagcgaatcatggctcctttacagccaccctacttcgcgcaaacagagagtggacctgggtatttatctgaaccagacacctttggaggctgcgtgttggtcacgcccatggattttgcattgcgggccatgtggatactcagatctggctgcactggaagaggagggactattcgggtgtctattcgagtgtggcacgaagcaggagtgcgaacagattgctttcagactcttcacccatcgggaaatcctgtcccatctgcaaggggattgcactagcccagggagaaatcctagccagttcaagtccaactag

SEQ ID NO: 240518 - DNA, 1386 bp, synthetic construct
  misc_feature 1..1386: note = Description of Artificial Sequence: Synthetic coding sequence
  source 1..1386: mol_type = other DNA
atgaggcccgcagacttgccccctcggcctatggaagagtcccccgcaagcagtagtgctcccactgagaccgaggaacctggttccagcgccgaagtcatggaggaagtcaccacctgttcatttaattcaccactctttagacaggaggacgaccgcggtataacataccggatcccggctttactgtacattccgcctacccacacattcctggccttcgctgagaaacgctccacgcggagggacgaagatgctttgcacctggtgctacgacgcggtttgcggattggccagctcgtgcagtggggccctctcaaacctctgatggaggctaccctgcctggccataggaccatgaatccctgtcctgtttgggaacagaaatcgggctgtgtttttctgttcttcatctgtgtcaggggtcatgttaccgagcgccaacagattgtttctgggaggaacgctgcgagactatgttttatttacagtcaggacgcgggttgctcctggagcgaagtgcgcgatctaacagaggaggttatcggcagcgaacttaaacattgggccacatttgccgtcgggcctggacacggtattcaacttcagtccggtaggcttgtgattcccgcatatacatactacatcccctcatggtttttctgtttccagcttccctgtaaaactagacctcattctctgatgatctactcagatgacctgggggtaacgtggcatcatggacgtctcatccggcctatggttaccgtagagtgcgaagtggctgaagtgaccggcagagccggtcatcccgtgctgtattgctccgccagaacccccaacagatgccgggctgaagcccttagcactgatcacggtgaggggttccagagactagcgctgagtagacagctgtgcgagccaccacacggctgtcagggctccgtggtctcatttcgacccttagagatcccacatcggtgccaggactcatccagtaaggatgctccaacgatccagcagagcagccctggaagtagcctgcggcttgaggaagaggccggtacaccctcggaaagctggcttctgtacagccatcccactagtcgtaaacagagagtcgatctaggtatttaccttaatcagaccccacttgaggccgcttgctggtcacgtccgtggatcttgcactgcggcccatgcggctattctgacctggccgcactggaggaagaaggcctgttcggatgcctcttcgagtgtggtactaagcaagaatgcgagcagattgcctttagactgttcacccatcgcgaaattctgtctcacctccagggcgattgtactagccctggtcgcaatccctcccagttcaaatcaaactag

SEQ ID NO: 240519 - DNA, 1287 bp, synthetic construct
  misc_feature 1..1287: note = Description of Artificial Sequence: Synthetic coding sequence
  source 1..1287: mol_type = other DNA
atggaggaggtcactacttgctccttcaactctcccctattccgccaggaggatgatcggggaataacctacaggattcctgccctgctatacataccccctactcatactttcttggcctttgcagaaaagaggagtaccagaagggatgaagacgctctgcatcttgtgctgcgacgcggtctgagaattggccagttagtacaatggggaccgctgaagccattgatggaggccacgctgcccggtcatcggacgatgaatccctgccctgtgtgggaacagaaaagcggttgcgtttttcttttcttcatctgcgtgagggggcacgtgaccgaacgtcagcagatcgtcagcgggaggaacgctgctagactgtgttttatctattcccaggacgccggttgtagctggagcgaagtcagagacctcaccgaagaggtgattggatccgaattgaaacactgggcaaccttcgccgtgggcccagggcatggcattcagctgcagtccgggaggctggttatcccagcctatacctactatattccttcttggtttttctgcttccagctgccctgcaagacacgccctcacagcctgatgatctactcagatgatttgggggtcacttggcatcacggcagactgatacggcctatggttaccgtcgaatgcgaggttgctgaggttaccggcagagccggtcacccggtcctgtactgttccgctaggacaccgaataggtgtagggccgaggcactgagcacagaccacggagaaggattccaaaggctcgcactgtcaagacaactgtgtgagcctcctcatggatgccagggtagcgtagtgtcatttcgccctctggagattcctcataggtgtcaggattcctcctctaaggatgcacctaccatccaacagagtagcccaggaagttcccttagattagaagaggaggccggtactccttcagaatcttggctgctatactcccacccaacctcccgaaagcagcgtgttgatttaggcatttatctgaaccagacaccacttgaggccgcttgctggtctcgcccatggatcttgcattgcggtccctgcggctactcggacttggcggctttggaggaggaggggctcttcggctgcttatttgaatgtggaactaaacaagaatgcgagcaaatcgctttcagactttttactcatagagaaattctttcccatcttcaaggagattgtacgtcccctggcaggaatccctcccagttcaaatcaaactag

SEQ ID NO: 240520 - DNA, 1059 bp, synthetic construct
  misc_feature 1..1059: note = Description of Artificial Sequence: Synthetic coding sequence
  source 1..1059: mol_type = other DNA
atggaagcgaccctacccggacatagaacgatgaatccttgtcccgtatgggagcagaagagtggctgcgtgttcctgtttttcatttgtgttcgaggacatgtcactgaacggcaacagatcgtgtccgggaggaacgctgcccgactctgctttatctattcacaggatgcgggatgcagctggtcagaggttcgcgaccttactgaggaagtgatcggaagcgaactgaagcactgggcgacctttgccgtgggacctgggcacggaatacagcttcagtccgggaggctggtgatccccgcttacacctattacataccaagttggttcttctgctttcagcttccatgcaaaacgcggcctcattccctgatgatctatagcgatgatctcggcgtcacatggcaccatggccgtttgattaggccaatggttactgtcgaatgtgaggtagctgaagtcaccgggagggcgggacacccagtactgtactgcagtgctcgcactccaaacagatgtcgggctgaagctttgtctacagatcatggtgagggctttcagcgcctggcactgtcgagacagctgtgcgagccccctcacgggtgtcagggctctgtggttagcttcaggccactcgagatcccccacagatgccaggattcgagctctaaggatgcccctacgattcagcagtccagccctggcagtagtctgcgcctggaagaggaagctggtacaccgagcgaaagttggctgctctattcacatcctaccagcaggaagcaacgagtggatctgggtatttacctgaaccagaccccacttgaagcagcatgttggtcaaggccctggatccttcattgcgggccatgtggatacagcgatctggctgcactcgaggaagagggactgttcggatgcctctttgagtgtggcactaagcaggagtgcgagcagatcgccttccggctgtttactcaccgagagattctgagtcacctgcaaggagactgtacttctcctggtaggaatccgagtcaattcaagtctaactag

SEQ ID NO: 240521 - DNA, 1203 bp, synthetic construct
  misc_feature 1..1203: note = Description of Artificial Sequence: Synthetic coding sequence
  source 1..1203: mol_type = other DNA
atggctactcttttgctcctgctcggtgtcctggtcgtgagtccagatgctctaggatcaaccacagctgtgcagactcccactagtggagagccactagtgtcaacttctgaaccattatcttccaagatgtatactaccagtatcacttccgatcctaaggccgattccacgggagaccagacgagcgcacttccgccttctacctccatcaatgaagggtcacccctgtggacatccatcggcgcatcaactggatcacctctcccagaacccactacctaccaagaagtaagcatcaagatgagctcagtgccccaggagacaccccatgccacctcccatcccgctgtgccaatcactgccaactctctcgggagccacaccgtgacagggggaactataacgacaaattctcccgagacttcctcgagaacttctggtgcgccagtgaccactgccgcatccagcttggagacaagtagaggcaccagcggcccaccacttaccatggccaccgtatcgctcgagaccagcaaaggtacaagcgggcctccagttaccatggcaaccgatagtcttgagacctccacaggaactacaggtccacccgtcaccatgaccaccggctccttagagccatcctctggcgcaagcggacctcaggtctcctcagtgaaactgagcactatgatgagccccaccacctcaactaatgcgtcaaccgtgccgttccggaaccctgatgaaaattctcgcggaatgctgcctgttgcagtgctggtagccctgctggccgttatcgtgctggtcgcattgctgctgctatggcggcgtaggcagaagagacggacaggggcactggttctgtcaagaggagggaaaagaaatggggtggtggacgcttgggctggccctgcacaggtaccagaggagggagcagtcaccgtgacggtaggaggaagtggaggtgataaggggagcggatttccagacggggagggatccagtcgcagaccaaccctgacaacattctttgggaggcgaaaatctcgtcaggggtccctggccatggaggagttgaaatccggaagcggaccaagtttaaaaggagaagaagaaccactcgtggcctcagaggacggtgcagtggacgctccagctcccgatgaaccagaggggggtgacggcgctgcaccttag

SEQ ID NO: 240522 - DNA, 1203 bp, synthetic construct
  misc_feature 1..1203: note = Description of Artificial Sequence: Synthetic coding sequence
  source 1..1203: mol_type = other DNA
atggccactttactgctgctgctgggcgttcttgtggtctcgcccgatgcgctcgggagtactaccgcggtccagacccctacatctggggagcctttggtaagcacatccgaacccctcagctcaaagatgtacaccactagcatcaccagcgaccccaaggccgacagtacaggcgatcagacaagtgcattacccccttccaccagcatcaatgagggctctcccctgtggacaagcattggcgctagcacagggtcccctttgccagagccaaccacataccaagaggtcagcattaagatgagcagcgtgccacaggagaccccccacgcaacatcacatcccgcagtgccaattaccgcaaactcgttaggaagtcacacagtgactggaggaactataaccaccaatagtccagagacaagttcaagaacctcgggagccccagttacaacagcagcgagcagcttggaaacctctagggggactagtggacccccactgaccatggccacagtgtcacttgagaccagcaagggaaccagcggacctcccgttaccatggctacggactccctggagacttcaacagggacaaccggtcctcccgtgacgatgactaccggatctctggagccctcttcaggagcttctggcccacaggtctctagtgtgaagttaagtaccatgatgagtccaacaacctccaccaatgcctcaaccgtgcctttccgcaaccctgatgaaaactctcgcggaatgcttcctgtggccgtactagtggctctgctggctgtgatagttttggtggccctcttattactttggagacggcgtcagaagcgcaggacaggagcgctggttctgtctagggggggaaaaaggaatggtgtagtcgatgcatgggccggtccagcacaggtgcccgaagaaggtgctgtgacagttacggtgggcggatctggcggtgacaaaggaagtggcttccctgacggtgaagggtctagtcgaaggcctacccttacgacctttttcgggaggcgaaaatcacgccaaggctccttagcaatggaggaactgaagagcggatcggggccatctcttaagggagaagaggagcccctggtggccagcgaagacggcgcagtggacgcgcctgcccctgatgaaccagaaggcggtgacggtgccgcaccctag

SEQ ID NO: 240523 - DNA, 1068 bp, synthetic construct
  misc_feature 1..1068: note = Description of Artificial Sequence: Synthetic coding sequence
  source 1..1068: mol_type = other DNA
atggccaccctgctcctactattgggcgtactggttgtgtcacccgatgctctcggctcgacaaccgccgtgcagacccccacatccggggaacccctggtttcgacgagcgaaccattatccagtaagatgtataccaccagcataacaagtgaccccaaggcggactctacaggcgatcagacttcagccttacctccttcaacatcaatcaatgagggaagtcccctgtggactagcattggagcaagtactggctcacccctgccagagcctacaacttaccaggaagtaagtattaagatgtcctcagtgccccaagagacccctcatgccacaagccatcctgcggtcccgattactgccaacagcttgggcagccacacggtgactggcggtacgatcactaccaacagccccgaaacttcttctcgcacatcgggcgcacccgtcaccactgctgcgtcctctcttgagacctctcggggaacgtccggacctcctctgaccatggccactgtctctctggagactagcaaaggaacgtctggacctcctgtgacaatggctaccgacagcctggaaactagtacagggaccacggggcctcctgtaacaatgacaaccggcagcctcgagccttcatccggagcgtctgggcctcaggtgtcatcagtgaagctctcgacaatgatgtctcccaccacatccacaaatgcaagcacagtgcccttccgcaatcctgacgaaaatagtagagggatgctccccgtcgctgtgttagttgcattactggccgtaattgtgctcgtggcccttttgctgctgtggcgcagaagacagaagcgacggacgggagcccttgttctgagtagagggggaaagcggaacggggtggttgatgcttgggccggtcctgcacaggtacctgaggaaggggctgtgacagtcacagttggaggctctggcggagataagggatccggcttccccgacggtgaaggctccagccgcaggcctactttgaccaccttttttgggagaaggaaatcccgacaaggatcatag

SEQ ID NO: 240524 - DNA, 672 bp, synthetic construct
  misc_feature 1..672: note = Description of Artificial Sequence: Synthetic coding sequence
  source 1..672: mol_type = other DNA
atgcaatgggccgtcggacggagatgggcctgggctgccctgctgctggctgtggctgcagtgctgacgcaggttgtgtggttgtggctaggaacccagagcttcgttttccagcgagaagaaatcgcgcagctggcaaggcaatatgcaggcctggatcatgagctggccttctcccgcctgatcgtggaacttcgcaggctccacccaggacatgtactgccggatgaggagctccaatgggtgttcgtgaacgcaggcggatggatgggcgcaatgtgcttattgcatgcttccctttctgagtacgtgctgctcttcggcacggccctgggttcaaggggccacagcggtcgttattgggctgaaatctccgacactatcatctcaggcactttccaccagtggcgcgaaggaacgacaaagtccgaagttttttaccccggagagaccgtggtgcatggacctggggaggctacggccgtcgagtgggggccaaatacctggatggttgaatacgggaggggagtcattcctagcacgctagcttttgccctcgccgacaccgtgttttcaacccaggactttctgacactgttctacaccctgcggtcctacgctcgcggtttgcggctagagttaactacatatttgttcggccaggatccatag

SEQ ID NO: 240525 - DNA, 570 bp, synthetic construct
  misc_feature 1..570: note = Description of Artificial Sequence: Synthetic coding sequence
  source 1..570: mol_type = other DNA
atgcagtgggcggtcgggagacggtgggcttgggctgctctgctgcttgccgtagccgctgtcctgacacaggtcgtatggctgtggcttggcttggaccacgagctggcattcagcaggctgattgaggaattgcagtgggttttcgtgaacgcgggtgggtggatgggcgctatgtgccttctccatgcctcactgtctgagtatgttcttctttttggaaccgctttaggctcccgcggtcatagcggcaggtactgggcggagatctccgacactattatatcaggaacttttcatcagtggagagagggtacaacaaaaagcgaggtcttttatccaggcgagaccgttgtgcatggccctggtgaggcgaccgcagtggagtggggcccaaacacgtggatggtggaatacggcagaggcgttattccatctactctagcgtttgctttggcagacactgtgttcagcacacaggattttctcactctattttataccctgagatcctatgccagaggacttcgcctggagctaactacatacctgttcggccaagacccgtag

SEQ ID NO: 240526 - DNA, 405 bp, synthetic construct
  misc_feature 1..405: note = Description of Artificial Sequence: Synthetic coding sequence
  source 1..405: mol_type = other DNA
atgggcgcaatgtgtctgctgcatgcttctttaagtgagtatgtcctactttttggaaccgcattgggatcacggggacactcaggtaggtactgggctgaaataagcgataccattattagtggtacctttcaccagtggcgggaggggacaacaaaaagcgaggtgttctacccgggagagaccgtggtgcacggacccggagaagcaactgcagtggagtggggaccaaacacttggatggtcgaatacgggaggggggtcatccccagtacattagcatttgcactagctgataccgtattcagcactcaggacttcctgaccctgttttacactctgcgttcctatgcaaggggcttgagacttgagctgaccacatacctgtttggacaggacccttag

SEQ ID NO: 240527 - DNA, 579 bp, synthetic construct
  misc_feature 1..579: note = Description of Artificial Sequence: Synthetic coding sequence
  source 1..579: mol_type = other DNA
atgcagtgggccgtcggcagacgctgggcgtgggctgcgctacttttggccgttgccgctgttctcacacaggtggtgtggttgtggctggggactcaaagtttcgtgttccaacgcgaagaaatcgctcagctggccagacagtacgcgggactcgaccatgaactcgcttttagccgacttatcgttgaactgagaaggctgcaccctgggcacgtgttaccagacgaggaactgcaatgggtgttcgtgaacgcaggcggatggatgggtgcgatgtgtttgctgcatgcatccctgagtgaatacgtcctgctcttcggtacggcactgggctctaggggtcactctggggagaccgtggtacatggacctggagaggctacagccgtcgagtgggggccaaacacttggatggttgaatacggtcggggagttattccttctactttggctttcgctctagctgacaccgtgttttcgacgcaagattttttgacactgttttacacgctacggtcttacgccaggggactacgccttgaactaaccacttatctttttgggcaggacccttag

SEQ ID NO: 240528 - DNA, 2916 bp, synthetic construct
  misc_feature 1..2916: note = Description of Artificial Sequence: Synthetic coding sequence
  source 1..2916: mol_type = other DNA
atgggtgtggcagggagaaacagaccgggtgctgcttgggccgtcttgcttttgctgctgctgctgccgccactactcctgcttgccggagcggttccacctggcaggggaagggctgcagggccacaggaggacgtggacgagtgcgcccagggcctcgacgactgccacgccgacgcactatgtcagaacacccctactagctacaaatgcagctgtaagccaggctaccagggagagggacgacagtgtgaggacattgacgagtgtggaaacgagctgaatggaggctgcgtgcacgattgcttgaacatccccggtaattaccgatgcacatgctttgacggattcatgctcgcccacgatggacacaattgcttggacgtcgatgagtgtttggaaaataatggaggctgtcagcacacgtgcgtcaacgtaatggggagctacgagtgctgctgcaaggaagggttttttctctcggataaccagcacacatgcatccacaggtctgaggagggactgtcatgcatgaacaaggatcacgggtgtagccacatatgtaaggaggcacctaggggatctgtcgcctgtgagtgccgcccaggcttcgaattagccaagaaccagcgcgattgcattctcacatgtaatcatggaaacggaggttgccagcactcgtgcgacgataccgcagacgggcctgagtgttcctgccatccgcagtacaaaatgcacacagacgggaggagctgcctggagagagaagataccgtgctagaagtgacggagagtaacactacgtccgtggtcgatggggacaagagggtcaagcgtcgcctgctgatggagacctgcgctgtgaataacggaggttgtgaccggacatgtaaggacaccagtacaggcgtgcattgtagctgcccggtgggcttcacccttcagctggacgggaagacatgtaaggatatcgatgaatgtcagacgcgaaatggaggatgtgatcatttctgtaagaacattgtggggagctttgattgtgggtgtaaaaagggcttcaaattgctgaccgacgagaagtcctgccaggatgttgacgagtgtagcctagatagaacctgcgatcattcctgcatcaaccatccaggtacatttgcgtgtgcctgcaacagaggctataccctgtacggtttcacgcattgcggcgatacaaatgagtgcagcataaacaatggcggatgtcagcaggtttgcgtcaatacagtcggatcctatgagtgccaatgtcatccaggatacaagctccattggaataagaaggattgcgttgaggttaaaggtcttctccccaccagcgtgagcccaagagtgtcgctgcactgcggaaagtccgggggaggggatggctgttttctgcggtgtcactctggtattcatctgagttcaggactccagggagcatacagcgttacctgtgggtcgtcctccccattgagaaataagcagcagaaaagcaatgactcagctttcggggatgtgaccactatacgaacaagtgtgacgttcaagcttaatgaggggaagtgctcacttaagaatgccgagctgtttcctgaaggcctgcgccctgctttacccgaaaagcactcgagtgtcaaggagtcttttcgctatgtgaatctcacttgttcttcaggcaaacaggtgcccggtgcacctggccgaccttccacccccaaagagatgttcatcaccgtagagttcgaacttgagaccaaccaaaaggaagtgactgcgagctgtgacttgtcttgcatcgtcaagcgcaccgaaaaacgactgcggaaggccatccggactttacgaaaggcagtccatcgtgaacagttccacttgcagttatcagggatgaacctggatgtggccaagaagcccccaaggacttctgaacgtcaggccgagtcctgcggggttggccaggggcacgcagagaatcaatgcggattgtgtcagccaggagaatactccgccgatggattcgcaccatgccacttgtgtgccctgggtacctttcaacctgaagccggtcgaaccagctgcttcccatgcgggggtgggctagccaccaaacatcagggcgcaaccagctttcaggattgtgaaacacgcgtgcagtgctcacctgggcacttttataatactaccactcaccgatgtatcagatgccccgtaggtacatatcagcctgaattcggcaaaaacaattgcgttagctgccctggaaataccaccacagactttgatggtagcacgaatatcacccagtgcaagaataggcgatgtgggggtgagcttggagactttacaggatatatcgaatctccgaactacccgggaaactaccccgctaacaccgaatgcacatggactattaatcctccacccaaacgtaggatattgattgtggtccctgaaatcttcttgccgatcgaagacgactgcggcgactatctggtcatgcgcaagacgtcaagctccaactctgttacaacgtatgagacatgtcagacttatgagcggccaatcgctttcaccagccggagtaaaaagctgtggattcagtttaagagcaatgaaggcaacagtgctcgaggttttcaagtgccatatgtaacctacgatgaagactatcaggagctgatagaggacattgtcagggacggcaggctgtacgcctcggaaaatcaccaagagattctaaaggataagaagctcatcaaggcactgttcgacgtgttggctcacccccagaattactttaagtatacagcacaagagtcgagagagatgtttcctcggtcatttatccgactgctccgtagcaaagtttccagattcctgagaccctataagtag

SEQ ID NO: 240529 - DNA, 1044 bp, synthetic construct
  misc_feature 1..1044: note = Description of Artificial Sequence: Synthetic coding sequence
  source 1..1044: mol_type = other DNA
atgggagccgcagccgttaggtggcacctctgtgttctacttgccctggggaccagaggcagacttgccggaggaagcggactgcccggttctgttgacgtagatgaatgctccgaaggcacagatgactgccatatcgacgctatctgccagaacacccccaaatcttataaatgtctgtgtaagcctggatataaaggagagggaaagcagtgtgaagacatcgacgaatgcgaaaatgattattacaatggcggatgtgttcacgaatgcattaatatccccggtaattatagatgcacctgcttcgatggatttatgcttgcccatgacgggcataactgtctggatgtggatgaatgccaggataataatggtggctgccagcagatttgtgtcaacgctatggggagttacgaatgccaatgccacagcggatttttcttgtcagacaaccaacacacgtgcatacatcgctccaatgaaggaatgaattgtatgaataaggatcatggctgcgcccatatctgcagggagacaccaaagggcggagttgcatgcgattgccggccaggattcgatcttgctcagaaccagaaagattgcacgctgacttgtaattatgggaatgggggatgccaacactcatgtgaagacacagacactggaccgacctgcggatgtcatcagaagtacgctctgcattctgatggaagaacatgtattgagaaagatgaagccgcaatcgagcgaagccaattcaatgcgaccagcgtcgccgacgttgacaaacgggttaaaaggaggctcctcatggagacatgcgcggtgaataatggcggttgcgaccggacctgtaaggacaccgcgacaggagtgaggtgctcttgccccgtgggtttcacgctgcaaccagatggcaagacttgcaaagggcagcacgtggagctgtgcggttgtccttgcctttactggcccggacaagagcccccatgcgcgtgtatagctggacctagagctggcctgaacggcggtcatgtttag

SEQ ID NO: 240530 - DNA, 2967 bp, synthetic construct
  misc_feature 1..2967: note = Description of Artificial Sequence: Synthetic coding sequence
  source 1..2967: mol_type = other DNA
atgggggctgctgccgtgcgatggcatctgtgcgtgctgcttgcgttaggcacgcgagggagactcgctggtggttctggcctcccaggtagcgtagacgtcgacgaatgttcggaggggaccgacgattgccacattgacgcaatctgtcagaacacacccaaaagctataaatgcctgtgcaagccaggatacaaaggtgaaggcaaacaatgcgaggacatcgatgagtgcgaaaatgattattataatggtggctgcgttcacgagtgtattaatatccccggaaattatagatgcacgtgttttgacggcttcatgctcgcacacgacggccacaattgtcttgacgtcgatgagtgtcaagacaataacggtgggtgccagcagatctgcgttaatgcaatgggtagctacgagtgccaatgccactccggctttttcctgtccgacaatcaacatacatgtattcataggagtaacgaagggatgaattgcatgaataaggatcatgggtgcgcacatatctgccgggagacccccaagggaggcgtagcctgtgactgtcgacccggattcgatctggcgcagaaccagaaagattgcacactcacgtgcaattacggcaatggcggatgccagcacagctgtgaggatactgatacagggccaacctgtgggtgccaccaaaagtatgctctgcacagcgacggtcgcacctgcatcgaaacatgcgctgtgaacaatggaggctgcgaccggacttgcaaagacactgctacgggagtaaggtgttcctgcccggtaggctttactcttcaaccggacggcaagacctgtaaagacataaatgagtgtctcgtgaataatggaggatgcgatcatttttgtagaaacacagtgggcagttttgagtgcggctgccgcaaaggatacaaattgcttaccgacgagaggacctgccaagacatcgatgagtgcagcttcgaacgcacttgcgaccacatctgcatcaacagccctggctccttccagtgcttgtgccatcgtggttacatcttgtatgggacaactcattgtggtgacgtggatgagtgctcaatgagtaacggaagttgtgatcaggggtgtgtcaatacgaagggaagctacgagtgtgtgtgcccacccggaagacgactgcattggaacgggaaggattgcgtcgaaacagggaaatgtctgtccagagccaaaacctctcccagagcacagctctcctgttccaaggcagggggagtggagagctgctttctctcatgccctgcccacacattatttgttcccgattctgagaactcgtatgtgctttcctgtggcgtccccggaccacaaggaaaagctctacagaaaaggaacgggacctcaagtgggctcggtccctcctgctctgatgcacccactacgccgatcaagcagaaggcccgttttaaaattcgggatgctaagtgccacctcagacctcattctcaggcaagggccaaagaaaccgccagacagcctctgcttgatcactgtcatgtgacattcgtgaccctgaagtgcgattctagcaagaagagacggaggggacggaagtccccgagcaaggaagtgagtcatattacagccgaattcgaaatcgagaccaaaatggaggaagcgtcggatacctgtgaggcagactgtctgcgcaaaagggctgaacagagtctgcaagccgctatcaagaccttgcgaaaatccataggcagacagcagttctatgtgcaggtgtccgggacggagtatgaggtggcacagcggcctgctaaggctctcgagggccagggcgcatgtggcgctggtcaagtgttgcaagactctaaatgcgtagcttgcgggccaggcacgcacttcgggggtgagctcggtcagtgcgtctcctgcatgcctggcacctaccaggacatggaaggacagctgtcatgcacgccatgtccaagctcagacggcctgggacttccgggtgccaggaatgtgtcggagtgcggcggacagtgtagccctggcttcttctctgcagatgggttcaagccctgtcaagcatgccctgtggggacttaccagcccgaacccggaaggaccgggtgctttccctgcggaggcggactgctcactaagcatgaggggaccacctcttttcaggattgcgaggccaaagtgcattgtagtccaggccatcattataataccactacccatagatgcattagatgccccgtcggaacctaccagcctgagttcgggcagaaccactgcatcacctgtcctggcaatacttccacggactttgatggttccacaaatgtcacccactgcaagaatcagcactgtgggggtgaacttggagattacacaggatatatcgaaagccctaactacccaggagattatccagctaacgccgaatgtgtgtggcatattgcccctcccccaaagcgcagaatactcatagtggtgccagagatttttctgccgatcgaggacgagtgcggcgacgtactggtcatgagaaagtctgcctctcccacatctatcaccacctatgaaacttgccagacatacgagcggccaattgcatttaccagccgctctagaaagttgtggatccagttcaaatcaaacgagggaaactcgggtaagggttttcaggtaccctatgtcacctatgatgaagactatcagcagttaattgaagatattgtccgagacggtcgactatatgcttcagaaaatcaccaggagatcctcaaggacaagaagctcatcaaagccctattcgatgtgctggcgcacccccagaactatttcaaatataccgcccaagagtccaaagaaatgttcccgaggtcctttatcaaactgctgcggagtaaggtgtcccgtttcctccgtccttataaatag

SEQ ID NO: 240531 - DNA, 1857 bp, synthetic construct
  misc_feature 1..1857: note = Description of Artificial Sequence: Synthetic coding sequence
  source 1..1857: mol_type = other DNA
atggagacggaggcggcttccactgcagtcagaactcagacgcaggccccaagggtggtggcgaccagatcaacccctagcactcagacggttgccagggcctccaggagagcccagtcaatcactgaggccgcaaccggccacgcacggacgcagcctctggcctgcgatgcggctgccccactagactcgcattgttcacgcacaggtcgccacgccaagacctctacttctgcttggtctacaaccgaggccgcaaccacttccgctgctactccatgggcagcttccagcgccgctgccggacgagcaacatcctgcagtcccacttccgcccctgctcggaccagtacatcggccccatcgtccgggccagtgacaacttctgcatcaacccctcaggctagagccaaggagacagcacgacaacctctgctagatcactgtcacgtgactttcgtcacactaaagtgcgacagttccaagaaaagaagaagaggtaggaaaagtccctccaaagaagtgagtcatatcactgccgaatttgagatcgaaacgaaaatggaagaagcttctgacacttgcgaagccgattgcttgcgtaaacgcgctgagcagtccctccaggctgccatcaagacactgagaaagagcattgggagacagcagttctacgttcaagtttctggtaccgaatatgaggtggcacaacgaccagcgaaggccctggaaggccaaggggcatgcggggctggacaagtgttacaagattcaaagtgtgtggcgtgcgggcctggcactcacttcggcggagaactgggccagtgcgtgagttgtatgcccggtacgtaccaggatatggaaggtcaactctcttgcaccccgtgtccctcctcagatggactggggctgcctggtgcccgaaacgtgagcgagtgtggtggtcaatgctctcctggctttttttcggccgatggattcaagccgtgtcaagcttgccccgttggtacttaccagcccgaaccagggcgaacaggctgctttccatgcggtggcggacttttgaccaaacatgagggtacaacttcttttcaggactgcgaggcaaaggtccattgtagtccagggcaccactataatactaccactcatcgctgcattaggtgcccagtgggcacctatcagcctgagtttggccaaaaccactgtatcacctgccccggaaacaccagtacagactttgacgggagcaccaatgtgacgcattgcaagaatcagcattgtggcggagagctcggagactacactggctatattgaatcgcctaactatccaggcgattatcctgccaatgcagagtgtgtgtggcatattgcccctccacctaaacgacgcatcctgattgtcgtgcccgagatctttctgccgatagaggacgaatgtggcgatgtgctcgtcatgcgtaaatccgccagcccgacttcaatcacaacttacgagacgtgccagacatatgaaagaccaatcgcctttacaagcagaagcaggaagctgtggattcaatttaaatccaatgaaggaaatagtggcaaggggttccaggttccttacgtaacgtacgacgaggactaccagcaactgatcgaggatattgtgagagacggcaggctgtacgctagtgagaatcaccaggagattctaaaggacaaaaagctcatcaaggccctcttcgacgtcctggctcatcctcagaactattttaaatacactgctcaggagtcgaaggagatgtttccgagaagcttcattaaactgctgcggtccaaggtgagcagattcttgcgtccctacaagtag

SEQ ID NO: 240532 - DNA, 1092 bp, synthetic construct
  misc_feature 1..1092: note = Description of Artificial Sequence: Synthetic coding sequence
  source 1..1092: mol_type = other DNA
atgggcgctgccgctgtgaggtggcatctgtgtgtacttttggccttaggcaccagaggacggctggctgggggtagcgggcttccgggatcagtagacgtagatgaatgtagtgaaggcacggacgattgccacatcgatgcaatttgccagaacaccccaaaatcttataaatgtctctgtaaacctggatacaaaggtgagggaaagcagtgcgaggatattgacgagtgtgaaaatgactactataacggaggatgcgtgcacgagtgtattaacatccctggaaactaccgttgtacctgtttcgacgggttcatgctggctcatgacggccacaattgccttgacgtggatgaatgccaggacaataatggaggctgccaacagatttgcgtgaacgcgatggggtcatacgaatgccagtgccattctggcttttttcttagtgataatcagcatacatgtatccaccggtccaatgaagggatgaattgtatgaataaggaccatggctgcgcacatatttgccgggagacccccaagggaggcgtcgcctgcgattgccgccctggattcgatctagctcagaaccagaaagattgtactcttacatgtaactacggaaatggcggatgtcagcattcttgcgaggacacggacacaggaccaacttgtgggtgtcatcagaagtacgcactgcatagtgatggcaggacctgcatcgagacctgcgcagtgaataacggcggatgtgatcgaacctgcaaggatactgcaaccggtgtgcgctgctcttgcccagttggcttcacgctgcagcctgacggcaagacatgtaaagacataaatgaatgtctggtgaataacgggggatgcgaccacttctgtaggaatacggttggtagctttgagtgcggatgccggaaagggtataagttgctgaccgatgaacgaacatgtcaggacattgacgagtgtagcttcgaacgcacttgcgaccacatttgcattaattctcctggaagctttcaatgcctgattaaacttctcagatcaaaggttagccgatttctccgaccttacaagtag

SEQ ID NO: 240533 - DNA, 528 bp, synthetic construct
  misc_feature 1..528: note = Description of Artificial Sequence: Synthetic coding sequence
  source 1..528: mol_type = other DNA
taacgcgaaaccccgaaaggaggtgtggcgtgcgactgtcgcccaggattcgacctcgctcaaaaccaaaaagactgtactcttacttgtaattatgggaatgggggatgtcagcactcttgtgaggacacagacaccggcccaacctgcggctgccaccagaaatacgcacttcactcagatgggagaacctgcatcgagaaagacgaagccgctatagagcgctctcagttcaatgccacatccgtggcagatgtcgataaacgggtgaaacgtcgattactgatggagacctgtgccgtgaataacggcggatgcgacaggacttgcaaagatacagccacaggggttcgctgctcatgtcctgtaggctttacactgcagcccgacgggaagacctgtaaagatatcaatgagtgcctggttaataatggtggctgcgaccacttttgccgtaacacagtggggtcattcgagtgcggctgccgcaaaggttataaacttcttactgacgagagaacgtgctag

SEQ ID NO: 240534 - DNA, 3000 bp, synthetic construct
  misc_feature 1..3000: note = Description of Artificial Sequence: Synthetic coding sequence
  source 1..3000: mol_type = other DNA
atgggcgtggctggtcgaaaccgacccggtgcagcatgggccgtacttttgcttctcctcctcctgccacctctgcttttgctggccggtgcagtcccaccaggaagaggccgtgcagctggtccccaagaagatgtagatgagtgcgctcaggggctcgatgactgtcacgcagatgcgctgtgtcagaatacacctacctcttacaagtgtagctgcaaacccggttaccagggagaggggaggcagtgtgaggatattgacgaatgtggaaatgagctaaatggcggttgcgtccatgattgtttgaatattcctgggaattatcgctgtacctgttttgacggtttcatgctcgcccacgacgggcacaattgtcttgacgtggacgagtgcctggagaataacggagggtgtcagcatacatgtgtcaatgtgatgggcagttatgaatgctgttgtaaagagggcttcttcctttccgacaatcagcatacttgcatccaccgctccgaagaaggattatcgtgtatgaataaggaccacgggtgctcacacatctgcaaggaagctccccgaggctccgtggcgtgcgaatgtcggccaggtttcgaactggctaaaaaccagcgggattgtatcctgacatgtaaccacggcaacggtgggtgtcagcattcatgtgatgacaccgcggatggaccagagtgttcttgtcatccccagtataagatgcatacggacggaaggagctgcctggagcgcgaagacaccgtgctggaggtcaccgagagcaataccacctctgtagtggacggcgacaaaagggtgaaacgcagactgctcatggagacgtgcgctgtgaacaacggagggtgcgacaggacatgcaaggacacaagcactggagtgcattgtagctgcccagtgggcttcacacttcaattagacggcaaaacatgcaaggacatcgacgaatgtcagacaagaaatggtggttgcgaccacttctgtaagaatattgttggcagcttcgactgtggttgcaagaaggggtttaagctgctcacggatgagaagtcctgtcaggatgtagacgaatgctcactggatagaacctgtgaccactcttgcataaaccaccccggaacatttgcctgtgcttgcaaccggggttacacgttgtatggattcacccactgcggagacaccaacgagtgctccatcaacaacggagggtgccaacaagtgtgtgtgaacactgtgggctcgtacgagtgccagtgccatcctggctacaagctccactggaacaagaaggactgtgtagaagtgaagggtctactacccacaagtgttagtcctcgggtctcgctacactgcggcaaaagcggtggcggagacggatgcttccttcgctgccacagcggaatccatttgtcaagtgacgtgactactatccggacttcagtgaccttcaagctgaacgaggggaagtgtagcctgaaaaacgcggaactctttccagagggactcagaccggctttgccggagaagcacagctcagtcaaggaaagctttagatacgtgaacctcacttgctcatccggaaagcaggttcccggtgctcccggtaggccctcaactccgaaggagatgtttattacagttgaatttgagctagaaaccaatcaaaaggaagtcacagcaagctgcgacttgtcctgtatagttaagcgtaccgagaaacgcctgaggaaggctatccggacccttcgtaaagccgtgcacagagaacagttccacctgcagctgtctggcatgaatctggacgtggccaagaaacccccacggactagcgaacggcaggccgagagctgcggtgttgggcagggccatgccgagaatcagtgcgtttcctgtcgcgctggtacttattatgacggcgctcgagagcggtgcattttgtgtccaaacggcacgtttcagaatgaggagggccaaatgacatgtgaaccctgtcctaggccaggcaatagcggggcactgaagacccctgaggcttggaatatgtctgagtgtggtggtctgtgccagcctggtgagtactctgccgatggcttcgccccatgtcatctctgcgccctcggtacatttcagccagaggctggcaggacttcctgcttcccatgtggcggtggacttgcaacaaaacaccaaggggctacatcatttcaggactgtgaaacgcgggtgcagtgctctccaggtcacttttacaataccaccacacatcgctgtataagatgccccgtgggcacctaccagccagagtttgggaagaataactgtgtctcatgtcccggtaatacaactacagacttcgacggttccaccaacattacccagtgtaagaaccggaggtgcgggggtgagttgggcgattttacggggtatatcgaaagcccaaattatcccggaaattatcctgcaaatactgagtgcacatggactatcaaccccccacccaaacggagaatcctcatcgttgtccccgagatttttctgccgatcgaggacgattgtggagactaccttgtaatgcgcaagacttccagctccaattctgtaacaacatacgagacatgccagacttacgagcggccaattgcattcacatcccgttctaagaagctgtggattcagtttaaaagtaacgaagggaatagtgccagaggcttccaggttccttacgttacctacgatgaagattaccaggaactgatcgaagacatcgtcagagatggccgactatacgccagtgagaatcaccaggagatactgaaggataagaaactcatcaaagccctctttgatgtgctggctcaccctcagaactatttcaagtacacggcccaagagtcaagggagatgttcccgcgtagcttcatccgcctgctcagaagtaaagttagccgatttctccgtccatataaatag

SEQ ID NO: 240535 - DNA, 2424 bp, synthetic construct
  misc_feature 1..2424: note = Description of Artificial Sequence: Synthetic coding sequence
  source 1..2424: mol_type = other DNA
atgggagtggccggacgaaaccggccaggcgctgcttgggcagtcctcctcctgctgctactcctcccccctctgctcctgttggcaggagcagtgcccccagggagaggaagagctgccggtccacaggaggatgtcgacgaatgcgcgcaaggacttgatgattgccatgcggacgccctctgccaaaatacaccgactagctacaaatgctcctgcaaaccaggctatcagggagagggaagacaatgtgaagacatcgacgaatgtggtaacgaactgaatggaggctgtgttcatgactgcctaaatattccaggaaactaccggtgcacctgcttcgacggatttatgctggcccacgacgggcacaactgcctggacgtggacgagtgcctagagaacaatgggggatgtcaacacacgtgtgtgaacgtgatgggttcctatgaatgttgttgcaaggaaggctttttcctgagcgataatcagcacacttgcatccaccggtctgaagagggactgagctgcatgaataaggatcacggttgctcacacatctgtaaggaggcccctaggggatcggttgcctgtgaatgtagacccggttttgaactggctaaaaaccagcgtgactgcattttgacctgtaatcatgggaacggcggatgccagcacagttgtgacgacactgctgatggccctgagtgttcatgccaccctcagtacaagatgcataccgacggccgtagttgcttggaaagggaggacacagtgctagaagttaccgagagcaacaccactagtgtggtggatggcgataaacgggtcaaaagacggctgttgatggagacatgtgctgtcaacaacggcggatgtgaccggacgtgtaaggatacatccactggcgttcattgcagctgtcctgtgggttttaccttgcagctcgacgggaaaacgtgcaaggatatagatgaatgccagactaggaacggcggatgcgaccatttctgcaaaaacattgtgggatccttcgactgtggatgcaaaaaagggttcaaactgttgaccgacgaaaaatcctgtcaagatgtagacgagtgcagtttagacagaacttgtgatcattcttgtatcaaccatccaggcaccttcgcgtgcgcatgcaatcgaggttacaccttgtacggtttcacgcactgtggcgacaccaacgagtgctctattaacaatgggggttgccaacaagtttgtgtgaataccgtcggcagttacgaatgccaatgtcacccaggctacaagctccattggaataaaaaagactgcgtagccagctgtgacctgtcttgcattgttaaacggaccgagaaaagactccgaaaggccatacgcacactacggaaagcagtgcaccgggagcagttccacctccaactctccggcatgaacctggatgtggcaaaaaagccgccaagaacctccgagcgccaggctgagtcttgcggcgtcggacagggtcacgcagagaatcagtgcgtttcatgcagggccggtacatactatgacggcgcacgagaacgatgcattctgtgtcctaatggaacctttcaaaacgaggagggtcaaatgacttgtgagccatgcccccgtcctgggaacagcggagccttaaaaacccccgaggcatggaacatgtcagagtgtggaggattgtgtcagcctggtgagtactccgccgacgggttcgccccttgccacctgtgcgcgctgggtaccttccagcctgaggctgggcgaacctcttgctttccatgcgggggaggcctagcaaccaagcaccagggcgctaccagtttccaggattgtgagacaagagttcaatgttcacccggacacttttacaacacgaccacccatagatgcatccggtgcccggtcggaacctaccaacccgagttcggaaagaacaattgtgtttcgtgtcctggtaatacaactactgacttcgatggtagtactaacatcactcaatgtaagacgtcaagtaactccgttaccacatacgagacttgtcaaacctatgagcgcccaattgcattcacgagccgcagcaagaagctgtggatccaattcaagagcaacgaaggaaatagtgccaggggatttcaggtaccctatgtaacgtatgatgaggactatcaggaacttattgaagatatcgtaagagatggcagactctacgcctccgagaaccatcaggaaatattaaaagataagaaactgatcaaggcattattcgacgtgttagcccacccacagaattactttaagtacacagctcaggagagccgtgagatgttcccaagatctttcatcaggttgctgaggtccaaggtgtctcgttttctgcgaccttacaagtag

SEQ ID NO: 240536 - DNA, 3087 bp, synthetic construct
  misc_feature 1..3087: note = Description of Artificial Sequence: Synthetic coding sequence
  source 1..3087: mol_type = other DNA
atgggggtggccggacgcaataggcctggcgcagcctgggctgtcctgcttctgcttcttcttcttcctccattgctcctccttgcaggagccgtgcccccaggtcgaggccgagctgcgggaccccaggaagacgtcgatgagtgtgctcaaggtttagacgattgccacgccgacgccctgtgtcaaaacacacccacttcctacaagtgtagctgtaagccaggataccaaggggaggggcgacagtgcgaggacattgatgaatgtgggaatgaactgaacggcggttgtgtgcatgattgtctcaacatccccggtaactataggtgcacatgtttcgatggattcatgcttgcccatgatggccacaactgtctggacgttgatgagtgtttggaaaataacggcggatgccagcacacatgcgtcaatgtgatgggcagctacgaatgttgctgcaaggaaggattttttcttagtgacaaccaacatacgtgtatccacaggtccgaagagggcttatcgtgtatgaacaaagatcatggctgcagccatatctgcaaagaggcccctcgtgggtcagtagcatgtgagtgtcgccctggcttcgagctggctaaaaatcagagagattgtatcctgacctgtaaccacggaaatgggggatgtcaacacagctgcgatgacactgccgatgggcctgagtgtagctgtcacccgcaatataaaatgcacacggacggccgatcctgtctggaaagggaagatacagtgctcgaggttactgaatcaaacacaacctccgttgtcgacggcgataaacgcgtgaagcgccgactgctgatggaaacgtgcgccgttaacaacggtggctgcgaccggacatgtaaagatacctcaacaggagttcattgctcatgcccagtggggtttacactccagcttgatgggaaaacatgcaaagatattgacgagtgtcagaccaggaatggaggatgcgatcatttctgcaaaaatatcgtgggatcattcgattgcggctgcaagaaaggttttaaactgttgacagatgaaaaatcctgccaagatgtagatgaatgctcactagaccggacctgtgatcattcctgcattaaccaccctggaacctttgcgtgcgcttgcaataggggatatacactctatggctttacccattgtggcgatacgaatgaatgctccatcaacaatggcggatgtcagcaggtgtgcgtcaacactgtgggtagttatgagtgccaatgccatcccggatacaagttgcactggaacaagaaagattgtgtcgaggtgaaagggctcttaccaacgagcgtcagtcccagggtgagcctccattgtgggaagagcggtgggggagatggatgttttctgcgctgccattctggaatccatttgtccagcggtcttcagggagcctattccgtcacatgtggcagcagctcccctctacgaaataaacagcaaaagtcaaacgactctgccttcggagacgttactacaatccgaaccagcgtgacttttaagctgaacgaggggaagtgcagcttgaagaacgcagaattgttccctgagggcttgagacctgctctgccggagaaacattcgagcgtgaaggaatcatttaggtatgtcaacctgacttgttcgtctggaaagcaagtccccggtgcccctgggcgacccagtactccaaaagagatgttcatcacagtagaatttgagctcgagacaaaccaaaaggaagtaactgcaagctgtgatctgtcatgcatcgttaaacgaaccgagaaaaggctcaggaaagctattcgaacactgcgaaaggctgtgcaccgggaacagtttcatctgcagttgtcaggcatgaacctggacgtcgccaagaagcccccacggacatcggagagacaggccgagagctgcggagttgggcagggccacgcggagaaccagtgcgtgtcctgtagggcgggtacctattatgacggggcaagggagcgctgcattctatgcccgaacggtactttccaaaacgaggagggacagatgacttgtgagccctgcccccgacctggcaactcgggagcactgaaaacaccagaggcttggaacatgagcgaatgtggaggcctgtgtcagcccggagagtactccgcagacgggtttgccccttgtcatctttgtgccctcggaacctttcagcccgaggcagggcgtacatcttgttttccttgtggcggaggcttggctaccaagcatcagggagctacgagtttccaggattgtgagactagggtccaatgtagtcctggacatttctataatactaccacacatagatgcattcggtgtcctgttggaacttatcagcctgagttcggaaagaacaattgcgtatcctgtccgggaaacaccacgacagacttcgatggatccacgaatatcacacaatgcaagaatcggcgatgcggaggagaacttggggatttcacaggatacatcgaaagccctaactatcccggaaattaccccgctaacaccgagtgtacttggacaatcaatcccccacctaaacgccgaatcctgattgttgtacctgaaatcttcctccctatagaagatgattgtggcgattaccttgtgatgcgtaagacatcctcctccaactccgtcaccacttatgaaacctgtcagacgtatgagcggccaattgcgttcaccagtaggagtaaaaagctttggatccagtttaagtccaatgagggaaacagcgctcgcggatttcaggtgccatacgtgacctatgacgaagattatcaagagcttattgaggacattgttagagatggcagattatatgcctctgaaaatcaccaggagatcctaaaggataaaaaactcattaaagccctgtttgatgtgttagcccacccccagaattattttaagtacaccgcccaggagagcagggagatgtttccgaggagcttcatacgtcttcttaggtccaaggtatcacgattcctcaggccgtataaatag

SEQ ID NO: 240537 - DNA, 411 bp, synthetic construct
  misc_feature 1..411: note = Description of Artificial Sequence: Synthetic coding sequence
  source 1..411: mol_type = other DNA
atggtcctgctggagagcgagcagttcctgacagaactaacgcggctgttccaaaagtgtcgtacgtccggcagcgtgtatatcacactaaagaaatacgacggcaggaccaaaccaatcccgaagaaaggcactgtagagggctttgagcccgcagataataagtgcctgctgcgggctaccgatggaaagaaaaagatcagtacagtggtgtcttctaaggaggtaaataagtttcagatggcttactccaacctcctcagggctaatatggatggccttaaaaaacgggataaaaaaaataaaactaagaaaacaaaggccgctgctgctgcagccgctgccgctcctgccgctgccgcaaccgcccctacaaccgctgcaacgacagccgctaccgcagcccaatag

SEQ ID NO: 240538 - DNA, 333 bp, synthetic construct
  misc_feature 1..333: note = Description of Artificial Sequence: Synthetic coding sequence
  source 1..333: mol_type = other DNA
atggcatgtgccgcagcgaggagccccgctgaccaggatagatttatttgcatttatccagcctatctcaacaacaagaagaccatcgctgaaggacgcagaatccctataagcaaggcagtcgaaaacccaaccgcgacagagatccaagatgtgtgtagcgctgttggactgaacgtgttcctggagaaaaacaagatgtatagtcgggagtggaatcgggatgtgcagtatagaggacgagttcgagtgcagctgaagcaagaggatgggtcactgtgtctggtgcagtttccctctcactatacgttgagtctgacttcaggttcttag

SEQ ID NO: 240539 - DNA, 435 bp, synthetic construct
  misc_feature 1..435: note = Description of Artificial Sequence: Synthetic coding sequence
  source 1..435: mol_type = other DNA
atggcatgtgccgctgccaggtcccccgcagaccaggacagatttatatgcatctatcccgcatatctcaacaacaagaaaaccattgctgaggggagaagaatccccatctcaaaggctgtggagaaccctaccgccaccgaaatccaggacgtgtgcagtgccgtgggcttaaacgtctttctagaaaagaacaagatgtactcccgtgaatggaaccgagacgtccagtatcgcggaagggtgagggttcaactgaagcaagaagacggaagtctgtgcttggtgcagttcccttccaggaagtctgtaatgctatatgctgcagaaatgattccgaagctgaagacgagaacccagaaaacaggcggagccgatcaaagtctgcagcaaggagaaggctccaaaaagggtaaaggaaaaaagaaaaagtag

SEQ ID NO: 240540 - DNA, 237 bp, synthetic construct
  misc_feature 1..237: note = Description of Artificial Sequence: Synthetic coding sequence
  source 1..237: mol_type = other DNA
atggcatgcgccgctgctagaagccctgcagaccaagacaggcttctgaaaattctccaattacagcggttcaagatgtacgtgcaacagttggatctcacttattttcttcggaagatcaagtgcactcttgaaaatgggatcgttatgtctaacacggaggccgaaagcggcagttcatctaaccggaagatgggggcatccgccctctacagcagccaccacgtgagccagtag

SEQ ID NO: 240541 - DNA, 639 bp, synthetic construct
  misc_feature 1..639: note = Description of Artificial Sequence: Synthetic coding sequence
  source 1..639: mol_type = other DNA
atggaggctaagacactcggcactgtaacccccaggaaacccgtgctgtcagtttccgccagaaagattaaagataacgccgcagactggcacaatctgatcctaaagtgggagaccctgaatgacgccggttttacgaccgctaataatatcgccaacctgaagatctccttattgaacaaagacaagatagagttggacagtagcagccctgcttcaaaggagaatgaagagaaggtgtgcctggaatacaacgaagaacttgagaagttatgtgaagaactgcaagccacgcttgacgggctgacaaaaattcaggtcaagatggagaagctgtccagcaccacaaaaggcatctgcgagctggagaactaccactatggggaagagtccaaacgacctcccctctttcacacgtggccaacaacacatttttatgaagttagccataagctgcttgagatgtacagaaaggaactgctcttaaagcggactgttgccaaggagttggcccatacaggcgacccagacttgactctctcctacctgagtatgtggcttcaccaaccctacgtggaaagcgacagtagacttcacctggagagcatgcttctcgagacaggacacagagccctctag

SEQ ID NO: 240542 - DNA, 1368 bp, synthetic construct
  misc_feature 1..1368: note = Description of Artificial Sequence: Synthetic coding sequence
  source 1..1368: mol_type = other DNA
atgccacccctctcaatgaaacgatcagccatcgatctggaggaaatggcaagtgggctgaacaaaagaaaaatgatccagcacgctgtctttaaggagctggtcaagttggtggaccccggtgtcaaggcctggactccaaccaaaggaaagcagaatgttataatgtttgtaggactgcaggggagcggaaagaccaccacttgttccaagctggcgtattactaccaaaggaaaggttggaaaacctgtctgatctgcgctgacacgtttagggccggtgcctttgaccagctgaaacagaatgctaccaaagctaggattcccttttatgggtcgtacacggaaatggacccggtcatcatcgccagtgaaggcgtggaaaaattcaaaaatgaaaacttcgaaataattatcgtcgacacctctggacgacacaagcaagaagatagcctatttgaggaaatgctgcaggttgcaaatgctatacagcccgacaatatcgtgtatgtgatggatgcttctatcggacaggcctgcgaggctcaagcgaaagcgtttaaggataaggtcgatgtggcctcagtcatagtcacaaaactggatggccacgctaaaggaggaggggcactgtccgcggtggccgcaacgaagtcacctattatcttcatcggaacaggcgagcacattgatgactttgaaccctttaaaacccagcccttcatttcaaaactcctgggtatgggcgacatcgagggtctcatagataaggtaaacgaacttaaactcgacgacaatgaggcccttatcgagaagctcaagcacggccaatttactctccgcgacatgtatgagcaattccagaacattatgaagatggggccattttcccagattcttgggatgatccctgggtttggcacagacttcatgtcaaaaggtaatgagcaggagagtatggcacgactgaagaagctgatgacaatcatggacagcatgaatgatcaggagttggacagcactgacggagccaaggtgttctccaagcaaccgggtcgcatccagcgagtcgccagaggcagtggagtctctaccagggatgttcaagaattgcttacccagtacactaagtttgctcagatggttaaaaagatgggtggcatcaaggggctcttcaaagggggagacatgtcgaaaaacgtgtctcagagtcagatggccaagcttaatcaacagatggcaaaaatgatggaccccagggtgttacaccacatgggtggcatggccggtttacagtctatgatgcggcagtttcaacagggcgcagcagggaatatgaagggcatgatgggctttaacaacatgtag

SEQ ID NO: 240543 - DNA, 135 bp, synthetic construct
  misc_feature 1..135: note = Description of Artificial Sequence: Synthetic coding sequence
  source 1..135: mol_type = other DNA
atggtactggctgaccttgggagaaagatcacctccgcactgaggagtctgtccaacgcaaccatcataaacgaggaggtccttaatgcaatgttaaaggaggtctgcaccgcacttctagaggcagacgtgtag

SEQ ID NO: 240544 - DNA, 225 bp, synthetic construct
  misc_feature 1..225: note = Description of Artificial Sequence: Synthetic coding sequence
  source 1..225: mol_type = other DNA
atggtgcttgctgatttggggagaaagattacgagtgcactgagaagtctaagcaacgccaccataatcaacgaagaggtgttaaacgctatgctgaaagaagtgtgcactgcactgttggaagcagatgtgaacatcaagcttgtgaagcagctgcgggaaaatgttaagtccgcaatcgatctggaagaaatggcttctggacttaacaagcggaaaatgtag

SEQ ID NO: 240545 - DNA, 1515 bp, synthetic construct
  misc_feature 1..1515: note = Description of Artificial Sequence: Synthetic coding sequence
  source 1..1515: mol_type = other DNA
atggtgttggctgatttaggccgtaaaattacctctgctctgaggtcactttcaaatgccaccattatcaacgaggaggttttgaatgctatgctgaaggaagtttgcaccgccctgttggaggccgacgtcaacatcaagctggtgaaacaattgcgcgagaatgtgaaatctgccatcgacctcgaagagatggccagcggcttgaacaagcgcaagatgattcagcacgccgttttcaaggaactcgtgaagctggttgatcccggagttaaggcttggactccgacgaagggcaaacagaatgtaattatgttcgtgggactccaaggctcagggaagacgacaacgtgtagcaaacttgcttattattaccagaggaaggggtggaagacctgtctgatctgtgcggacacattccgtgctggggcttttgaccagctgaaacaaaacgccactaaggccagaattccattttacggctcatacacagaaatggacccagtaatcatcgcatccgagggagtcgaaaaattcaaaaacgaaaacttcgagatcataattgtggacacgagtggcagacacaaacaggaagactcgctattcgaggaaatgctgcaagttgccaacgccatccagccggacaacatagtctacgtaatggacgcaagtattggacaggcctgtgaagcacaggctaaagccttcaaggataaagtagacgtcgcatcagtgatcgtcacaaaactggacggccacgctaaaggcggaggcgcactttccgctgtcgccgctaccaagtcccccatcatcttcataggtacaggcgagcacatagatgactttgagcctttcaaaacccaaccatttatctctaaactgcttggaatgggcgacatcgagggactaattgataaagtgaacgaactgaaactggatgacaacgaggctctaatagaaaaactcaagcacggccagtttaccctccgggatatgtatgagcagtttcaaaatatcatgaagatgggacccttttcccagattctcggaatgattcctggattcggcaccgacttcatgagcaaaggcaatgagcaagagagcatggctagattgaagaaactaatgaccatcatggacagcatgaacgaccaggagcttgactctacagacggggctaaggtgttcagcaagcagccgggaagaatccagcgtgtcgcacgcggttccggggtctctacaagggatgttcaggagctgctaacccagtatacaaagtttgctcagatggtcaaaaaaatgggcggtattaagggactcttcaagggcggtgacatgtcaaaaaatgtatcccagtcccagatggctaaactcaaccaacagatggccaaaatgatggatccaagggtgctgcaccacatgggaggcatggcaggtctccagagtatgatgcggcagttccagcaaggagcggcaggcaacatgaaaggtatgatgggatttaacaacatgtag

SEQ ID NO: 240546 - DNA, 1791 bp, synthetic construct
  misc_feature 1..1791: note = Description of Artificial Sequence: Synthetic coding sequence
  source 1..1791: mol_type = other DNA
atggccgcagaaaaacaagtccccggaggtgggggtggagggggatcaggcggaggtggcggttccggaggtggtggatccggtggagggagaggagctgggggagaagagaacaaggagaatgagcggccttctgccggttctaaggctaataaggaattcggggatagcctatcacttgagatactgcagattatcaaggaaagtcagcagcagcacggcctgagacatggcgactttcaacgttatagaggctactgttcgagacgacagcgccgactgcgcaaaacgctgaatttcaagatgggcaaccgtcacaaatttactggcaagaaagttaccgaggagctactcactgataacagataccttctgctcgttctgatggatgccgagcgcgcatggtcatacgctatgcagttaaagcaggaggccaacacggaaccccgtaagaggtttcacctgttgtcacggctgcggaaagcagtgaagcacgccgaagaactggagagactgtgcgagtccaatagggttgatgcaaaaaccaagttggaggctcaggcctataccgcttatctttctggcatgcttaggtttgaacatcaggagtggaaggctgctatcgaggctttcaataagtgtaagactatctacgagaaactcgcttctgcttttacggaggaacaggccgtgctgtacaaccagcgcgtcgaggaaattagtcctaatatcagatattgcgcatataacatcggggaaacgcgcgcaaaacaggcagctaccatgtccgaagttgagtggcgcggacgcacagtccctgttaagatagataaagtacgcattttcctgctcggcctggcagataatgaagcagcaatcgtccaagcagagagcgaagagaccaaggagagattgttcgaaagtatgttgagcgagtgtcgcgatgccattcaggtcgtcagagaggaactcaagcctgaccagaaacagcgcgactatatactggagggggagcccggaaaagtttccaatctacagtatttgcacagttatctaacatacatcaagctcagcactgcaattaaaagaaatgagaacatggcaaaaggcctccaacgcgcactgctccagcagcaaccagaagacgacagcaagcgcagcccccgtccgcaagatctcatccgtctgtacgatataatactccagaatctggttgagttgttgcagcttccaggcctggaagaggacaaggccttccagaaagaaattggcctgaagacgcttgtctttaaagcttatcgatgtttcttcatcgctcagtcctacgtcctggtcaagaagtggtccgaggccctcgttctatacgaccgcgttctgaaatacgccaatgaagtgaatagtgatgccggagcctttaaaaacagcctgaaggatctcccagatgtgcaggagctcatcacccaggtccgttctgaaaaatgttcattacaggccgcagctatcttagacgcgaacgatgcccatcagaccgagacttcctcttctcaggtgaaagacaataagcctctcgtggagaggtttgagactttctgcttggatccgtctcttgtgactaagcaggcgaacctggtccattttcccccagggtttcaacctatcccctgcaaacctttattcttcgacctcgctctaaatcacgtggcttttcctcccttggaggacaagctcgaacaaaaaaccaagagtggtctcactggatatataaagggcatttttggctttcgatcatag

SEQ ID NO: 240547 - DNA, 1884 bp, synthetic construct
  misc_feature 1..1884: note = Description of Artificial Sequence: Synthetic coding sequence
  source 1..1884: mol_type = other DNA
atggctgccgaaaagcaagttcccggtggagggggtgggggaggctctggagggggtggcggttccggcggaggcggatccggaggcggacggggtgccggaggcgaggaaaacaaagagaatgaacgccctagtgcaggatctaaggcaaacaaagagttcggggattcactcagcctggaaattctgcagattataaaggagtctcagcaacaacacgggctgcggcatggggatttccagcgatatcgagggtattgtagccgaaggcagaggcgtctgcgaaaaacgctgaacttcaagatggggaacaggcataaatttactggaaagaaagtgacagaggagctgctgaccgataaccgctatcttttgctggtgctgatggatgccgagagggcctggagctatgccatgcaactgaaacaggaagctaacaccgaacccaggaaacgctttcaccttcttagccgcctgcgcaaggccgtgaagcatgctgaagagctggaacgactgtgcgagtccaatcgagtggatgccaaaaccaagcttgaagcacaggcttatacagcttacctgagtggcatgctccgttttgagcaccaggaatggaaggccgctattgaggcttttaataagtgtaagaccatttacgaaaaactcgcctccgcattcaccgaggaacaagccgtcctctacaaccaaagggttgaggaaatttctccaaacatccggtactgtgcatataacattggcgatcagtccgcaataaatgaactcatgcaaatgagactcaggagcgggggaactgaaggtctgttagccgagaaactcgaagcattgatcactcaaacccgggcaaaacaggccgctaccatgagcgaggtggaatggcggggaaggaccgttccagtcaaaatagacaaggtacggatattcctcctgggactagcagacaatgaggctgccatagtgcaggcggagtctgaggagaccaaggaacggttgttcgaatctatgcttagcgagtgtagggatgccattcaggtagttcgcgaggagctgaagcctgatcagaagcagagagactacatacttgaaggagagcccggtaaagtgtctaacctgcagtacctacatagctacctcacatacattaagctaagtactgcaatcaagcgcaatgaaaacatggctaaggggctccagcgagccctccttcagcaacaacccgaagacgatagcaagcggagcccaagaccacaagacctgatccgcctgtatgacatcattttgcagaatcttgtggaactgctccagttacccggactggaggaggataaggcctttcagaaggaaattgggctgaaaactctggtgttcaaggcctaccgctgtttcttcatcgcacaaagctatgtgttggtcaagaaatggtcagaggccctagtcctgtatgaccgggtgttgaaatacgccaacgaggtcaacagtgacgctggcgcttttaagaatagtttaaaggatctccctgatgtgcaggaactcattactcaggtaaggtcagaaaagtgctctctgcaggcagccgctattctggatgcgaacgatgctcaccagacggagacatccagctcccaagtgaaagacaataagccactggttgagaggttcgaaactttttgtctcgacccctccctcgtgacaaaacaggcaaatctcgttcattttccaccagggtttcagccaatcccctgcaaacctttattcttcgatctggctttgaatcatgttgctttccctccactggaggacaaactcgagcagaaaactaagagcggcctaaccgggtacatcaagggaattttcggcttccggagctag

SEQ ID NO: 240548 - DNA, 1581 bp, synthetic construct
  misc_feature 1..1581: note = Description of Artificial Sequence: Synthetic coding sequence
  source 1..1581: mol_type = other DNA
atggggaacaggcataaattcacagggaagaaggtcaccgaagagctcctcactgacaataggtatctattgctggtgcttatggatgcagagcgtgcctggtcgtatgccatgcagctgaagcaagaggcgaacacagagccacggaaaaggtttcatctgctgtccagactccggaaagcagtgaaacacgcagaggaactggagcggttatgcgaaagtaacagggtggacgccaaaactaagctggaggcccaggcctacacagcatatctatctggaatgctgcgttttgaacatcaagagtggaaagccgcaatcgaagcttttaacaagtgcaaaaccatttacgagaagctggcctccgccttcacagaagagcaagcagtcctgtataaccagcgtgtcgaggagatttcccccaatattagatattgcgcctacaacattggggatcagtcagctatcaatgagttgatgcaaatgcgtcttcgatctggaggcaccgaaggtcttctggcggaaaaactggaagccctcattacacagacgagggcaaagcaggcggctaccatgtcagaggtcgagtggcgtgggcgaacagtgcctgttaaaattgataaagtacgtattttcctactcggcctcgccgataacgaagctgctatcgtgcaggcagaatcagaggagacgaaagaaaggttgttcgagtccatgctaagtgagtgccgagatgcaatccaagttgtgcgcgaagaactgaaacctgatcagaagcagcgcgactacatcctcgagggcgaacccggtaaggtctctaacctgcagtacctccatagctatctcacttacattaagctgtcaacggcaatcaagcggaacgaaaacatggcaaaggggctgcaacgggctttactgcaacagcagcctgaggatgattccaagagatcacccaggcctcaggatctgatccgtctgtacgacattatcctgcagaatttggttgagctactacaattgccgggtttggaagaggataaagctttccagaaggaaattggccttaaaacgttggtctttaaagcctatcgctgtttttttattgcccagtcgtatgtcctcgtaaagaagtggtccgaggcactggtgctgtatgatagagtgctgaagtacgcgaacgaggtaaactctgatgctggcgcttttaagaactctctcaaggatctccccgacgtgcaggagctcataactcaggtcagatcagaaaaatgctccctgcaggctgcggctattctggacgccaacgatgctcaccaaacggaaacgtcaagcagccaggtgaaagataataagcctctggtggagcgcttcgaaacgttttgtctggatcccagcctagtgactaaacaagccaacctggtacatttcccccctggcttccagcccatcccctgcaaaccgctgttcttcgacttggcactaaatcacgtagccttcccgcctttggaggataagctagaacagaagactaagtccgggctgacagggtatataaaaggcatcttcggtttccgatcatag

SEQ ID NO: 240549 - DNA, 984 bp, synthetic construct
  misc_feature 1..984: note = Description of Artificial Sequence: Synthetic coding sequence
  source 1..984: mol_type = other DNA
atgcagatgaggttaaggagcgggggaactgagggactgttggcggagaagctggaggcccttatcactcaaacacgggctaagcaggcggcaaccatgagcgaggtggagtggcgtgggaggactgtccccgtgaaaatcgataaggtaaggatcttccttctgggcctcgctgacaatgaagccgctattgtccaggccgagagtgaggagactaaggagagactgtttgagtcaatgctgtcggaatgtcgagacgctatacaggtagtgagagaggagttgaaacccgaccagaaacagcgagactacatcctggaaggagaacccggaaaggtgtccaacctgcagtatctccacagttaccttacctacattaaactgtccaccgcgatcaagcggaacgagaatatggcaaagggcctccagcgcgcactccttcagcagcagcctgaggacgatagcaagcgaagccccaggccccaggatctgatcaggctgtacgatatcatactgcaaaatctagtcgagctactgcagttacccggtttagaagaagataaggcttttcagaaagagattggccttaaaacactggtcttcaaggcttacagatgtttcttcatcgcacagagttatgtactggtgaaaaagtggagcgaagcacttgttctttacgacagagtgctaaagtacgccaatgaggtgaactctgatgccggagcttttaaaaactccctaaaagatctgcctgacgtgcaggagctcattacccaggtgcgcagcgagaagtgttctttacaggcagcagcaattttggatgcaaatgatgcccaccagaccgagacttcttccagccaagtcaaagacaataaaccacttgtggaacgcttcgaaagtacgcctgggactgacggtgcccttaagagattcgtgatgcttttgcagtatcatggcttcgagatgaatagctccttattatag

SEQ ID NO: 240550 - DNA, 1770 bp, synthetic construct
  misc_feature 1..1770: note = Description of Artificial Sequence: Synthetic coding sequence
  source 1..1770: mol_type = other DNA
atggcagccgaaaagcaggtacctggcggaggcggaggaggcggaagtgggggtgggggaggctccggaggtggaggctcgggcggaggacgtggagcgggaggcgaagagaacaaagagaacgaacgaccatccgccggtagcaaggcgaacaaggagttcggtgactccctgtctcttgagattttacaaatcattaaagagtcacagcagcaacacggactgagacacggtgatttccagagatatcgctatctcctcttagtgttgatggatgcggagcgtgcgtggtcctacgcaatgcagctgaaacaggaggccaatacagagcctcggaaaaggtttcatctgctgtcccgacttagaaaggccgttaagcacgctgaggaattggaaagactatgtgaaagcaaccgtgtggacgccaagacgaagttggaagcccaagcttatacagcctacctctcagggatgctgaggttcgaacaccaggagtggaaggccgcaatcgaggcctttaacaaatgcaaaactatttacgaaaagctcgcctctgcatttactgaggaacaagccgtgctgtacaaccagcgtgtcgaagagatctccccgaacatacggtattgcgcttacaacatcggagatcagtccgccattaacgaactcatgcagatgcgcttacgtagcggcggaacggagggcttgctggcagagaagctggaggccctgatcacccagacccgggctaagcaagcagctactatgagcgaggtggagtggagggggagaaccgtccccgttaaaattgacaaggtgagaatttttctcctgggcctggctgacaacgaagccgcaatagtgcaggcagagtcagaggagactaaagaaagattgtttgaaagcatgctcagcgaatgccgagatgctatccaggtggtgcgcgaggagctgaagccagatcagaagcagcgtgattacatcctggaaggcgaacctggtaaggtgagcaacttacagtatctccactcttatctcacctacatcaagcttagcacagcaatcaagagaaacgagaacatggccaagggcctccagagggccctgctgcaacaacagcccgaagatgactcgaaacgttctcctcgtcctcaggatctcatccgactctacgacattatcttacaaaatctggtcgagttactgcagttgcccggtcttgaggaggataaggcattccaaaaagagatcgggctcaagaccctcgtttttaaggcatatcgctgctttttcatcgcacaatcctacgtgctggtcaaaaagtggtcagaggctttggtgctttacgatcgggttctgaaatatgccaacgaggtaaacagcgatgccggagctttcaagaattctctgaaggacctacccgacgttcaggagcttattactcaggtacgaagcgagaagtgtagtctgcaggcggctgccattctcgatgccaatgatgcccatcagacggaaacatccagctcacaggtgaaggataacaagcccttggtcgaacgtttcgaaactttctgcctcgacccaagtctcgtcaccaagcaggccaacctggtgcatttccctcccggttttcagcctatcccgtgtaaaccattgttcttcgacctggctcttaaccacgtagcgttccccccactcgaggataaacttgaacagaaaaccaaatcagggctgactggatatattaaaggtatattcggtttccggtcatag

SEQ ID NO: 240551 - DNA, 1110 bp, synthetic construct
  misc_feature 1..1110: note = Description of Artificial Sequence: Synthetic coding sequence
  source 1..1110: mol_type = other DNA
atggcggcagagaagcaggtgccaggcggaggagggggaggaggaagcggtggcggtggcggtagtggcggaggcggttcggggggaggcagaggagcaggcggtgaggagaataaagagaacgagcggccttctgccggatccaaagctaacaaagagtttggcgacagcctcagccttgagatactgcagataattaaggagagccagcagcaacatggactgaggcacggggactttcagaggtatagaggctactgctcgcgaagacagcgtcgcctgaggaaaaccctgaactttaaaatgggaaaccggcacaagtttaccggaaagaaggtgacagaggaacttctgacagataataggtatctattgcttgtgctaatggacgccgagagggcctggtcatatgcgatgcaactgaaacaggaagccaacactgaacctaggaaaaggtttcatttgctaagtaggctaaggaaggcagtcaagcacgcagaggaacttgaacggctctgtgaatctaaccgggtggatgccaagaccaagctcgaagctcaagcttataccgcttacctgtctgggatgctccgattcgaacaccaggagtggaaggccgcaatcgaggcgttcaataagtgcaagaccatctatgaaaaactggccagcgcctttaccgaggaacaagcggtcctgtacaatcagagggtggaagaaataagccccaatatacgctactgcgcttacaatattggcgatcagtccgccatcaacgagttgatgcagatgcgtctgcgaagcgggggaaccgaggggctgctggccgaaaagttggaggccctgatcacacaaactagagcgaagcaggctgccaccatgtcggaggtcgaatggcgcggacgcacagtgcccgtgaaaatcgacaaagtcaggatcttcctcctggggcttgctgataacgaagcagccattgtccaagctgaatctgaggagaccaaggaaagactctttgaatccatgctgagcgaatgccgcgacgctattcaggtggtgcgcgaggagctgaagccggatcagcgagaccttctccttccctctcagggccaatag

SEQ ID NO: 240552 - DNA, 867 bp, synthetic construct
  misc_feature 1..867: note = Description of Artificial Sequence: Synthetic coding sequence
  source 1..867: mol_type = other DNA
atgctatctgagtgtcgagacgccattcaggtagtccgggaagagttgaagcctgaccagaagcagagggactatatcctcgaaggcgaacctggcaaagtgtcgaatctgcaatacctgcacagttacctcacttatatcaaactgagtacagcaatcaagcgtaacgagaatatggccaagggactgcagcgggcattactccaacagcagccagaggatgacagcaagcgctcccctcgcccacaggacctgattagattgtatgacattatactgcagaacttggtcgagctacttcagctcccaggattggaggaggacaaagcgttccagaaggaaatcggtcttaagacattggtattcaaagcatacaggtgcttttttattgcacagtcctacgtgttggttaagaaatggtccgaggccctggtcctttatgatagagtgctgaagtatgccaacgaagtgaattccgatgctggagccttcaaaaactcacttaaagacttacctgacgtccaagagttaattacccaggtcaggtcggaaaagtgcagtcttcaggcggcagccatcctggacgctaacgacgcccatcaaacagagacgagttccagccaggtgaaagacaacaaacccctagtggagcggtttgagaccttttgtctggatccctctctagtgaccaagcaagctaatttagtgcactttccacctgggtttcagcctattccatgcaaacctcttttttttgatctagcacttaaccatgtggcgtttccacctctcgaagataagctggagcagaaaactaaatccggcctcaccggatatattaaggggatatttggatttcgatcatag

SEQ ID NO: 240553 - DNA, 2016 bp, synthetic construct
  misc_feature 1..2016: note = Description of Artificial Sequence: Synthetic coding sequence
  source 1..2016: mol_type = other DNA
atggccagcgggggatccgggggagtgtctgtgccagccctgtggagtgaagtcaaccgatacggacagaacggcgactttacacgcgcactgaaaactgttaataagattctccagatcaacaaagatgacgtcacagccctgcactgtaaggtagtctgtcttatccagaatggctcgtttaaggaagccctgaacgtgattaatactcacaccaaggtcctggccaacaacagcctgagcttcgagaaagcgtattgcgaataccggctgaacagaatagagaatgcgctgaaaaccatcgaaagtgccaaccagcagactgataaattgaaggagctatacggacaggtactgtataggctggaacgctatgatgaatgcctggctgtgtacagggatttagtgcgaaattctcaggatgattatgacgaggagaggaagaccaatctttccgctgtggtggccgctcagagcaattgggagaaggtggtgccagaaaatttaggtctgcaggaaggcacacacgagctgtgctacaataccgcgtgcgcattaataggccagggccaactgaatcaggccatgaaaatccttcagaaagccgaggacctctgtagacggtctcttagcgaagatactgatggcactgaggaagatcctcaggctgagcttgctatcattcacggacagatggcttacatccttcaacttcagggaaggactgaggaggccttacaactgtacaatcaaattatcaaattaaagcctactgatgtgggtttactcgcagtaatcgcgaacaatatcatcactatcaataaagaccagaatgtgtttgattcaaaaaaaaaagtcaagctgacaaacgcagaaggagtggaatttaaactgtccaagaaacagctccaagccattgaattcaacaaggcactgctagcgatgtatacgaatcaggccgaacaatgcagaaaaataagcgcctctctgcaaagtcaaagccccgaacacttacttccagttttgatccaggctgcacaactttgtcgagaaaagcagcacaccaaggccatcgaacttctgcaagagttcagtgatcagcatcctgaaaatgcagcagaaataaagctaactatggcacagctgaaaatatcccagggaaacatcagtaaagcctgcctgatcctcagatccatcgaagagttgaaacataagcccggaatggtgtccgccctggtcacgatgtattcccatgaagaagatatcgactctgcaatcgaagtatttacacaggcaatccagtggtatcaaaaccaccagccgaaatctcctgcccatctaagtcttatacgagaggcagccaatttcaaattgaagtatggacgtaagaaggaggctatttctgatttacagcagctgtggaaacagaatcctaaggacatccatacccttgcccagctcatctcagcatacagcttagtggacccagagaaagccaaggccctgagtaaacacttgccttcctctgactcgatgtccctgaaagttgatgtagaagcactggagaattcagccggtgccacctacatccggaagaaagggggtaaggtgaccggcgattcacagcccaaggaacaaggtcagggagacctgaagaaaaagaagaagaaaaagaagggcaaactacccaaaaattacgatcctaaagttaccccggatccagagcgctggctgcctatgcgggagcgctcttactaccgcggtagaaaaaaagggaagaagaaggaccagataggcaaaggaacacagggtgccacggcaggggcaagtagtgaactcgacgcatctaagaccgtgtccagtcccccaacttcacctcgccctggatctgccgctacggtgtcagcaagcacaagtaacatcattccaccacgacaccagaagcccgctggagcccctgctacaaagaaaaagcaacaacagaaaaaaaagaagggcggtaaaggcggatggtag

SEQ ID NO: 240554 - DNA, 1878 bp, synthetic construct
  misc_feature 1..1878: note = Description of Artificial Sequence: Synthetic coding sequence
  source 1..1878: mol_type = other DNA
ccactggtctcaagcaagatggccagcggtggaagtggcggtgtctcagtgcccgctctgtggtccgaggtcaaccgctatgggcagaacggagacttcactagggccctgaagaccgtgaacaaaatcctgcagatcaacaaggacgatgtgaccgcattgcactgtaaggtcgtgtgcttaatccagaatggttcttttaaggaggcactcaatgtgatcaatacccatacaaaagttctggccaacaacagtctctcttttgagaaagcctattgtgaataccgcctcaacaggatcgaaaatgcccttaagacaattgagtccgcaaatcagcaaacagacaaactcaaggagctgtatgggcaggtactctatcgacttgaacggtatgatgagtgcttagcagtataccgggatctagttaggaatagtcaagatgactacgacgaggagcggaagaccaatctcagcgccgtcgtggcagcacaatctaactgggagaaggtggtgcccgagaatctggggctgcaggagggaactcatgagctttgctacaacaccgcctgtgcattgatcgggcagggccaactcaatcaagcgatgaagatccttcaaaaggccgaagacctgtgtcgcagatccctgtcagaagataccgaccagaatgtgttcgactccaagaaaaaagttaaactgaccaatgccgagggtgtagagtttaagctttctaagaagcaactgcaggctattgaatttaataaagccctgctggccatgtacaccaatcaggcggagcagtgtaggaagatctctgccagtcttcagtcccagtcccccgaacacctcctgccagtgctgatacaagcagctcaactgtgtcgcgagaaacagcacacgaaggcaatcgagctcctccaggagttttcagatcagcaccctgaaaacgccgcagaaatcaagctaactatggcccaactgaagatcagtcagggaaacatcagcaaggcatgcctcatcttacgttccatagaagaactgaagcataagccaggtatggtcagtgctcttgttacaatgtactcacacgaagaagatatcgatagcgctattgaagtgtttacacaggccattcagtggtatcagaaccaccagccaaagtctccggctcatctgagtttgatcagagaagcagcgaacttcaagcttaaatacggcagaaaaaaggaagccatttcagacctgcagcagctgtggaaacagaaccccaaggacatccacactcttgcccagctcatttcagcctatagtctcgtggaccctgaaaaggccaaggctttgtctaaacacctgccttcatctgacagcatgtccctgaaagtcgacgttgaagcgctggaaaactccgcaggagcaacttacattagaaagaagggagggaaggtcaccggggattcgcagcccaaggaacaaggacagggggatctgaaaaagaagaagaagaagaagaaaggtaaactgcccaagaattacgatccaaaggtgacacccgatcccgagcggtggctgccaatgcgagaaagaagctattataggggacggaaaaaggggaaaaagaaggatcagattggcaaaggcacccagggagccactgctggagcttcgagtgaattggacgctagcaagacagtttcaagccctcccactcaagacctagccgtactgcagcagtatctgcctctgcaggtcacttcttacccccaggatacaaggaaccttcaggggctgcaacagcagaaacggaacagcaataggaaaaggcgaaaagtcgagaaggtggctggtgacgaaaatatcctggtagcgggttgcttttag

SEQ ID NO: 240555 - DNA, 1833 bp, synthetic construct
  misc_feature 1..1833: note = Description of Artificial Sequence: Synthetic coding sequence
  source 1..1833: mol_type = other DNA
atggcctcagggggaagcggcggagtgtctgtcccagcactgtggtctgaggtaaatcgctacggtcagaatggggacttcacacgcgctctgaagaccgtgaacaaaatcctacagatcaacaaggacgacgtcacagccctgcactgtaaggtggtgtgtctgatacagaacggtagcttcaaagaggccctgaatgtgatcaacacgcacaccaaggtcctcgctaataactccctgagtttcgagaaggcttactgcgagtacaggctgaataggatcgagaatgctttaaagactatcgaatcagctaaccagcagactgataaacttaaagaactttacggccaggtgctgtaccgactcgaacgatatgacgaatgccttgccgtgtaccgcgacctggtgagaaactcacaggatgactatgatgaagaacggaagaccaacctgagcgccgttgtcgctgcccagtccaattgggagaaagtggtaccagagaacttagggctgcaggaaggcacacacgagctctgctacaatacggcctgcgctctaattggacagggacagctgaaccaggcgatgaaaatactccagaaggcagaggacctgtgtcgccgaagcctatccgaggacaccgaccagaatgtatttgactctaaaaaaaaggtgaaacttacaaacgccgaaggtgttgaattcaagctctctaagaagcaacttcaagccatcgagttcaacaaagctcttctggccatgtacacgaatcaggcggagcagtgtcggaagattagcgcctcactgcagtcacagtctccggaacatctgctgccagtgctcattcaagcagctcagttatgtagagagaagcagcacaccaaggctatagaactgctccaggagtttagtgaccagcatccagagaacgctgccgagatcaaactcactatggcacaattgaagattagccaggggaacataagcaaggcttgcttgatcctacgctccattgaagagctaaaacacaaacccggaatggtcagtgctctggtgaccatgtattctcatgaggaagacatcgactccgcaattgaagtgtttacacaggccattcagtggtaccaaaatcaccagccaaaaagtccagctcacctcagcctgattagagaggcagcaaacttcaaactgaaatacgggagaaagaaggaggccatcagcgacttgcagcaactctggaagcagaatcccaaagacatccatactctagcacagttaatttcggcctattcacttgtggatcccgaaaaggctaaagccctctctaaacacttaccaagctccgattctatgtctctgaaggttgatgtcgaagctctggaaaactccgcgggtgccacttacatacgaaagaagggcggtaaagtaaccggggactcccagcctaaggagcaagggcaaggagacctaaagaagaagaagaagaagaaaaaagggaagctgccaaagaattatgatccgaaggtcacccccgatcccgaacgctggttacccatgcgtgaacgaagctattatcggggacgtaaaaagggtaagaaaaaagatcagataggaaagggcacgcagggagccacggcgggtgcttcaagtgagctcgacgcatctaagactgtgtctagcccccctacaagcccgcgacctggcagcgcagcgactgtctccgccagcacttccaacatcattcccccacgccaccagaagcctgcaggtgccccagccaccaagaagaagcagcaacagaaaaagaagaagggcggtaagggcggttggtag

SEQ ID NO: 240556 - DNA, 1917 bp, synthetic construct
  misc_feature 1..1917: note = Description of Artificial Sequence: Synthetic coding sequence
  source 1..1917: mol_type = other DNA
atgttagactttttcactatattcagtaagggaggccttgtgctgtggtgttttcagggcgtgagcgattcttgcacaggcccagtcaacgcacttatacgctccgtcctcctgcaggaaagaggcggtaataattctttcacccacgaagcactaaccttgaagtacaaacttgacaaccagttcgagctagtcttcgtggtgggatttcagaaaattctgaccctaacctacgtagataaattaatagacgacgttcatcgcttatttcgcgacaagtaccgcaccgagatacagcagcagagcgctctgagtctgctcaacggaacgttcgacttccagaacgatttcttgcgcctgctgcgggaagctgaagaaagctccaaaattcgtgcccctactactatgaaaaagtttgaggatagcgaaaaggctaaaaaacctgtgcgatccatgatcgagacacgcggtgagaagccaaaggagaaggctaaaaacagcaaaaagaagggcgcaaagaaggaaggctcagacggcccactcgctacaagcaaaccagtacctgcagagaagtccgggctgccggtgggcccagaaaatggggtggagctgtctaaagaagaactgatacgtagaaagagggaagaatttattcagaagcatggaagaggcatggaaaagagcaacaaatccacaaagagcgacgcccctaaggaaaaaggaaaaaaggcccctagagtgtgggagctcgggggatgtgctaacaaagaagtgttagactactccacgccaaccacaaatggcacacctgaggcagccctgtctgaggatataaatttgatcagagggacaggtagcgggggtcagctgcaggacctagactgtagttcaagcgacgacgagggcgctgcacagaattctactaaaccaagtgcgactaagggcaccctcggtgggatgtttggtatgctgaaagggcttgtcggctccaagagcctgtcgcgggaagacatggagtctgtgcttgacaaaatgcgtgaccatcttattgccaagaacgttgcagcagatattgccgtccaattgtgcgagtctgttgctaacaaactggaaggcaaggtaatggggaccttttccacagtgacatctaccgtgaagcaagctttgcaagaaagcctggtccagatacttcaaccgcaacgccgagtagatatgttaagagacattatggatgcccagagaaggcagcgcccttatgtcgtgaccttctgtggagtaaacggtgtcggaaagtctaccaatctggccaagatctccttttggctgctcgaaaacggcttctctgtgctcatagctgcatgtgacacattccgcgctggcgcagttgaacaactgcgcacacacacaaggcgcctatctgccctgcacccacctgaaaaacacgggggacgcactatggttcagctcttcgagaaaggctatgggaaggacgcagccggaattgctatggaggcaatagctttcgcaagaaaccagggttttgatgtggtgctggtggataccgcgggtaggatgcaggataatgctccgctgatgactgccttggcgaagctgatcaccgtcaacaccccggacttggttctgttcgtgggagaggccctggtgggcaacgaggccgtcgaccagcttgtgaagttcaatcgagcattggcggaccactcaatggcccagaccccgaggctgatagatggcatcgttctcactaaatttgataccattgacgataaagtgggtgcagccatcagcatgacatacatcacatccaaacccattgtgtttgtcggaactggacagacgtattgcgacctgaggagcctgaacgccaaggctgtggtggctgccttgatgaaggcatag

SEQ ID NO: 240557 - DNA, 552 bp, synthetic construct
  misc_feature 1..552: note = Description of Artificial Sequence: Synthetic coding sequence
  source 1..552: mol_type = other DNA
atgcgtctgttaagttttgtggtcctagctctgtttgcagtcactcaggccgaggaaggtgcgagacttttagcaagcaagtcgctgctgaacagatacgccgtggagggacgggatttgaccctgcagtacaacatctacaatgttggctctagtgctgcgctggatgttgaactgagcgacgatagctttccgcctgaggattttggcatagtgtccggaatgctgaatgtgaagtgggatagaatagccccagccagtaacgtgtcacacactgtggtacttcgacccctaaaagcagggtatttcaactttacaagtgcaacgattacatacctggctcaggaagacgggccagtcgtcatcggttctacgtctgctcctggccaggggggaattctggcccagcgggagttcgatcgaaggttcagcccgcattttctggactgggctgcattcggggtcatgacactgcctagtatcggaatccctctgctactttggtattcctcaaaacggaagtacgatacccctaagactaaaaagaattag

SEQ ID NO: 240558 - DNA, 552 bp, synthetic construct
  misc_feature 1..552: note = Description of Artificial Sequence: Synthetic coding sequence
  source 1..552: mol_type = other DNA
atgagactgctgagctttgtcgtcctcgcgttgttcgctgtgactcaagctgaggagggcgctcggttattagcctccaagagccttctcaaccgctatgccgttgagggtcgcgacttgactctgcaatacaacatatataacgtgggctcctcagcggctctggatgtagagttgtcagacgatagcttcccacctgaggatttcggcattgtgagtgggatgctgaacgttaagtgggacagaatagccccagctagtaatgtctcccacaccgtagtccttagacctcttaaggcgggttactttaacttcacatccgcgaccatcacatatctcgcacaagaagacggccctgttgtgatcggttctactagcgcaccaggacaggggggaattcttgcccaaagggagttcgatcggagattctcccctcacttcctggattgggcggcttttggcgtgatgactctgcctagcattggcatccccctccttctgtggtacagctccaaaagaaaatatgacaccccaaaaaccaagaagaactag

SEQ ID NO: 240559 - DNA, 258 bp, synthetic construct
  misc_feature 1..258: note = Description of Artificial Sequence: Synthetic coding sequence
  source 1..258: mol_type = other DNA
atgaggctgttgtcttttgtggttctggctctgtttgctgtcacacaggccgaggaaggggctaggctcctcgctagtaaatccctattaaacagatatgccgtggaaggacgggatctgacacttcagtacaacatctacaacgttggaagctctgctgcattagacgtggagttgtccgacgacagcttcccgccagaggattttggaatcgtgtccggaatgcttaacgtcaaatgggacagaatagccccttag

SEQ ID NO: 240560 - DNA, 444 bp, synthetic construct
  misc_feature 1..444: note = Description of Artificial Sequence: Synthetic coding sequence
  source 1..444: mol_type = other DNA
atgcggctgctttccttcgtggtgctagcactatttgccgttacacaagctgaggagggagccagattgctggcatccaagtctcttctgaatcggtacgccgtggagggacgggatctaactctccagtacaatatctataatgtgggctcttccgctgcattggacgtggagctttctgacgactcttttccacctgaggacttcgggattgtttccggtatgctcaacgtgaaatgggaccgcatagcgcctgcctcaaatgtgagccatactgtcgtgctgcgccctctgaaagctggctattttaacttcacctccgctacgattacatatctagcccaagaggacggaccagttgtgattggcagcacatccgctcccggtcagggtggtatcctggctcagcgcgaattcgatcggaggttcagccctcatttctag

SEQ ID NO: 240561 - DNA, 522 bp, synthetic construct
  misc_feature 1..522: note = Description of Artificial Sequence: Synthetic coding sequence
  source 1..522: mol_type = other DNA
atggccgcaatggcctccttaggcgctctggcactgcttctcctgtcaagtctgtccagatgcagcgctgaggcttgcctggagccacaaattaccccctcctattataccaccagtgacgcagtgatttccaccgaaactgtgtttatcgtcgaaatttcgctgacttgcaagaaccgcgtgcagaacatggcactctacgctgacgtgggcggaaagcagttccccgttacccgcggacaagatgtgggtaggtaccaggttagctggagccttgatcataagtcagcacacgcaggcacgtacgaggtcagattcttcgacgaagaaagttactcgctgctgcgcaaggctcagcgaaataacgaagatatttctatcatcccccctctgttcacagtaagtgtggaccaccggggtacttggaatggtccctgggtatctacagaggttcttgcggcagctatcggattggtgatttactacttggcattctcagcaaaatcacatatccaagcctag

SEQ ID NO: 240562 - DNA, 447 bp, synthetic construct
  misc_feature 1..447: note = Description of Artificial Sequence: Synthetic coding sequence
  source 1..447: mol_type = other DNA
atggcggctatggcatcccttggagctctggcactgctgttactgagcagtctgtctcgctgttcagccgaagcctgtctggaacctcagatcacaccaagttattacaccaccagtgacgctgtgatctccacagaaaccgtgtttatagtggaaataagccttacttgtaaaaacagagtgcaggtgagctggagcctggaccacaagtctgctcacgcgggaacgtacgaagtgcggttcttcgatgaagaatcgtactccttgcttcgaaaggcccaacgaaataatgaagacatctccatcatacctccacttttcactgtaagcgtggaccatcggggaacctggaacggaccgtgggtgtcaacagaagtgctggcggcagccattgggctagtgatttactatctggcgttttctgcaaagtcacatatacaggcttag

SEQ ID NO: 240563 - DNA, 522 bp, synthetic construct
  misc_feature 1..522: note = Description of Artificial Sequence: Synthetic coding sequence
  source 1..522: mol_type = other DNA
atggccgcaatggcctctctcggtgccttggcgctcctgttgttgtccagtttatccaggtgttctgctgaggcctgtcttgagccacagatcaccccaagttactataccacttcagatgcagtcatatccacagagaccgttttcattgtagaaatcagccttacgtgcaagaatagggtccagaatatggccctctatgccgatgtgggtggcaagcagttccccgtgacccggggtcaggatgtgggaaggtaccaggtttcctggagcctggatcacaaatccgctcatgcaggcacatacgaggttcggttctttgatgaggagagctactctctgctccgaaaagcccagcgcaacaatgaggacatctctataatccctcccttgttcacagtgtcagtggaccacagagggacatggaacggtccttgggtgtccacggaggtgctggccgctgccatcggactggtgatctactatctggctttcagtgctaagagccacatccaggcatag

SEQ ID NO: 240564 - DNA, 522 bp, synthetic construct
  misc_feature 1..522: note = Description of Artificial Sequence: Synthetic coding sequence
  source 1..522: mol_type = other DNA
atggcagccatggcatccctgggagcactggcgttactcctcctttcatctctctcaaggtgttcagctgaggcatgtctagagccacaaattacccctagctactacaccaccagtgatgctgtaatatcaaccgagacagtctttatcgtggagatttcgcttacatgcaagaaccgcgtgcagaacatggcgctgtacgccgacgtaggaggaaagcagttcccagtgactcgaggtcaggatgtcggcaggtatcaagtgtcctggagtctggatcacaagagcgcacatgctggcacgtatgaggtacggtttttcgacgaggaatcttatagcctgctcaggaaagcccagcggaataacgaagatatcagtattattcctccattgtttactgtgtcagtggatcatcgtggaacttggaacggaccgtgggtgagtactgaagtacttgcagccgcaattggccttgttatctactatctggctttttctgcgaaatcacatattcaagcctag

SEQ ID NO: 240565 - DNA, 363 bp, synthetic construct
  misc_feature 1..363: note = Description of Artificial Sequence: Synthetic coding sequence
  source 1..363: mol_type = other DNA
tgagtgggctctgggtgtagaagcgccgctgtgtctgcactggttgtgagagtggcacccccttgtccactatgtcctcactctgcccagcacccaacccaggtgtcttggagcttggatcacaaaagcgcccacgctgggacatatgaggtcagattcttcgacgaggagagctactcccttttacgaaaggcacaacgaaataacgaagatatctctataatccctccattattcacagtctcagtggatcacagaggcacatggaacggaccatgggtgagcactgaggtcctcgccgctgctataggtctcgtcatatactatctcgcctttagcgctaagtcccatattcaggcttag

SEQ ID NO: 240566 - DNA, 2544 bp, synthetic construct
  misc_feature 1..2544: note = Description of Artificial Sequence: Synthetic coding sequence
  source 1..2544: mol_type = other DNA
atgagtttgtggggtctggtgtccaagatgccccctgaaaaggtgcagagattgtacgtcgattttccgcagcatctgcgacatctgctgggcgactggctggaaagtcagccttgggagttcctggtcggctcggatgcgttctgctgcaatcttgcatccgccctactctctgatactgtgcaacacttgcaggcctccgtgggcgagcagggggaaggaagtacgatcctgcagcacatttccaccttggagtccatctaccaaagagatcctttaaagctcgtggctacattcaggcaaatcttgcagggggagaagaaggcagtgatggaacagttccggcatctgcccatgccatttcactggaaacaggaagagctgaagttcaaaactggactgcggagactccagcatcgtgtgggggagatccacctgctaagagaagctctgcagaagggcgcagaggctggtcaggtatccttacattctttgatagaaactcctgcgaacggtaccggacccagtgaggctctggcaatgcttctccaggaaaccactggtgaacttgaagctgcaaaggcccttgtcctgaaacggatccagatctggaagaggcagcaacagttggcaggcaacggcgcaccatttgaagagagcctggcacccttacaagaacgatgcgaaagcctggtcgatatatatagccagctgcagcaggaggttggtgccgctggcggagaactggagcccaagaccagagccagtcttaccgggaggctcgacgaagtgctgcgaactttagttacttcatgctttctggttgagaagcaacctccccaggtattgaagacgcagacaaaatttcaagctggcgtaagattcctgctcggcttaaggtttctgggcgcacctgcaaagccaccgcttgtgcgggcagacatggtcactgaaaagcaggccagagagctctccgtgccacagggcccaggagccggtgcagagagtaccggagaaattatcaacaataccgtgcccttggaaaactccatcccaggaaattgctgtagtgcgttgtttaaaaatctcctactgaagaagatcaaacggtgcgagaggaaaggcacagagtctgttaccgaggaaaaatgtgcagtgctgttcagtgcctcatttactttaggacccggaaagttgccaatccaattacaagctctcagcctgccactggtggtaatagtccatggcaatcaggataacaatgccaaggcaacaattctttgggacaacgctttttctgagatggatcgggtgccattcgtagtagcagaaagagtcccatgggagaagatgtgtgaaacgctgaacctgaaatttatggctgaagtgggaaccaatcgcggactgcttcccgagcatttcctgtttctcgcccagaaaatctttaatgacaactccctcagtatggaggctttccaacatcgaagcgtgtcatggtcccagtttaacaaggagattctcctggggcgtggcttcacgttctggcagtggtttgatggagtgctggatctgactaagcgctgcctcagatcctactggagtgataggttgataattggatttatcagcaagcagtacgttacgagcctgctgttgaatgaacccgatggtacctttctgctacgtttttcagatagcgagatagggggaattacaattgctcacgtcatccggggacaggatggatctccccaaattgagaatatccagcctttcagcgccaaggacctatctatccgctccctcggggaccgcataagggacctggcgcagctcaaaaacctgtatccgaaaaagccaaaggacgaagctttccggtcacattacaaaccagaacaaatgggcaaggacggcagggggtatgtgcctgcaactatcaagatgaccgtagagcgtgaccagccactcccgacaccggaactgcagatgcccaccatggtgccttcttacgacctcggaatggctcctgattcctccatgtctatgcagctgggcccagacatggtgcctcaggtgtaccccccacacagccacagcatccccccttatcagggtctgagtcccgaggagtcggtcaatgtgttgtctgcgttccaggaaccccaccttcagatgccaccatccctgggccagatgagtctaccatttgatcagccacatcctcagggactcctgccctgtcagcctcaggagcacgctgtctcctccccggaccccttattgtgcagcgatgtgaccatggtggaggactcctgtctgagtcaaccagtgaccgcgtttcctcagggcacatggatcggggaggacattttccccccactcttgcccccaacagaacaggaccttaccaaacttctgctggaaggtcagggggagagcggagggggatctctcggagcacagcccctgctccagcctagtcactatggccaatctgggatctccatgagccacatggacctgcgtgcaaaccccagctggtag

SEQ ID NO: 240567 - DNA, 2544 bp, synthetic construct
  misc_feature 1..2544: note = Description of Artificial Sequence: Synthetic coding sequence
  source 1..2544: mol_type = other DNA
atgtcactgtgggggctggtcagcaagatgccccctgagaaagtgcagaggctgtacgtcgattttccacaacacctgcgccatctattaggtgactggttggagtcacaaccgtgggagtttctcgtaggctccgacgccttttgttgtaacctcgcctcagcattgttgtctgacacagtgcaacatcttcaggcgtcggtgggcgagcagggcgaagggtcgactatcttgcagcatatttctacccttgagtccatttaccagagggatcctctgaaacttgtggcaacattccggcagatcctgcagggagagaagaaggccgtaatggaacaatttagacacctgcctatgccgttccattggaagcaggaggaactgaaattcaaaactgggctacgcagactccagcaccgagttggcgaaatccatcttctgagggaggctctgcagaaaggggcagaggccggtcaggtgtcattacattcacttatcgagacccccgctaatggcacaggaccctccgaggccttggctatgttgctgcaagaaacgactggagaactggaggctgctaaggccctggtactcaagcgaatccaaatttggaaacggcagcagcaactcgctggtaatggtgcaccttttgaggagtccctggccccactacaggagaggtgcgagagcctggttgacatctattcgcagcttcagcaggaggtcggggcagctggtggcgaactggagcccaagacccgggctagcctcaccgggagacttgatgaggttctgcggactctggtaacaagctgctttctagttgagaaacagcctccacaagtacttaaaacgcagaccaaattccaggctggcgtgaggttcctgctggggttgagatttcttggcgcacctgcaaaaccccctctggtccgggcagacatggtaacagaaaagcaagctagggagttgagtgtgccccagggcccaggtgcgggtgccgaatcaactggagagattatcaacaacacggttcccctggaaaactccattcccggaaactgttgcagtgccctttttaagaatctcctgctcaaaaaaatcaagcgttgcgagcggaagggaaccgaatccgtcacagaggagaagtgtgctgtgctgttcagtgcttcatttactctcggaccaggcaaactacctattcaactgcaggcattgtccctgcctctagttgtgatcgttcatggaaatcaggacaataatgctaaggctaccattctctgggacaatgcgttcagcgagatggaccgagtgccattcgtggtggccgaaagggtgccttgggaaaagatgtgcgaaacgctgaatctcaagttcatggccgaagtcggaactaaccggggactgctgcctgagcacttcctgttcttagcccagaagatttttaacgacaattctttgagcatggaggccttccagcaccgatctgtcagctggtcccagttcaacaaagagattctgctcggccgaggcttcactttttggcagtggtttgatggcgtgttggacttgaccaaacggtgtttgaggtcctattggagcgaccggctcattatcggatttatttccaaacagtacgtcacttcactgctgctgaacgaaccggacggcacattcttgctgaggtttagcgacagcgagatagggggaatcacaattgctcatgtcattagaggccaagatggaagtccccagattgaaaacatccaaccatttagcgccaaagatttgagcattcgatctttaggtgacaggatcagggatcttgcacagctaaagaatctataccccaagaagcccaaggatgaggcgtttcggtcgcactataagcctgagcagatgggcaaagatggaagagggtacgtaccagctaccattaagatgacagtggaaagagaccagcccctgcctactccagaactgcagatgcctactatggtccccagttatgatttgggaatggctcccgattcttcgatgtcaatgcagctcggtcctgatatggtccctcaggtttaccctcctcattctcacagcattcccccttaccaagggctgagtccggaggagtctgtgaacgtattgagtgcctttcaagaaccgcatcttcagatgcctccgagcctaggccagatgtcccttccctttgaccaaccccacccgcagggtctgctgccttgccaaccacaggaacatgccgttagctcccctgaccctctgctgtgttctgacgtcaccatggttgaagattcttgcctgtcacaaccggtaactgctttcccccaggggacctggatcggtgaggacatcttccctcctttgttgccacccactgaacaggacctgaccaaactgcttttagagggccagggggagtccggaggtggaagtcttggagctcagccgctgctgcaaccatcccactatgggcagtccggaattagcatgtcccacatggaccttcgtgcgaatcccagttggtag

SEQ ID NO: 240568 - DNA, 2214 bp, synthetic construct
  misc_feature 1..2214: note = Description of Artificial Sequence: Synthetic coding sequence
  source 1..2214: mol_type = other DNA
atggagcaattccgtcacctgcccatgccctttcattggaagcaggaggagctcaaattcaagaccggcctgcgccgactgcagcaccgcgtaggcgaaatccatctgctcagggaagcattacaaaaaggcgctgaggctgggcaggtcagtctccattctctaattgagaccccagccaatggcactggcccttccgaggcactcgccatgctactgcaggaaaccactggggagctggaggccgctaaagccctggtgttgaagagaattcagatctggaagaggcaacagcagctcgccggtaatggcgcaccatttgaagagagcctggcgccactccaagagagatgcgagtcactagtggacatttactctcagctacagcaggaggttggtgccgctggcggtgaactggagccaaaaacacgcgctagtttgactggtagacttgacgaagtcctgcgcaccctcgtgacatcctgttttctcgtcgaaaagcagccgccacaggttttgaagactcagaccaagttccaggcaggcgtaagatttctgctgggcttaagattcctcggggctccggctaagccacctctggtcagagctgacatggtcacagaaaaacaggcaagggagcttagcgtgccacaaggccctggggcaggagcagagtctaccggagagatcatcaataataccgtccccctggaaaattccataccagggaattgctgttcagctctcttcaaaaacttactgctgaaaaagataaagcgctgcgaacggaaaggtaccgaatctgtgaccgaggagaagtgcgctgtattattcagtgccagttttacactcgggcctggcaaactgcccatacagctgcaggccttaagcctccccctggtggtgatagtgcatggtaaccaggataataacgctaaagccaccattctctgggataatgcctttagtgaaatggacagggtgcccttcgtggttgctgaacgcgtgccttgggaaaaaatgtgcgaaacactcaacctcaagttcatggccgaggtgggcaccaatagagggcttctccctgaacatttcctctttctggcacagaagatcttcaacgataactcactcagtatggaagccttccagcaccgatccgtgtcatggagccagttcaacaaggaaattctcctaggccgtgggtttaccttctggcagtggttcgatggggtattggatctgacaaaacgctgcctgcgcagctattggagtgataggttgattattggatttatttccaaacagtacgtgaccagcctacttctgaatgaacccgatggtacatttttgcttcgattcagtgacagtgagatcggcggtatcactatagcgcatgtgatacggggacaggatgggtccccgcagatagagaatatacagccattttcagccaaagatctctctataaggtcattaggagatcgaattcgagatttggcccagttgaaaaatctctacccgaagaagcccaaggacgaagcgtttaggtcacactacaagcccgagcagatggggaaagacggcaggggctatgtgcctgccaccataaagatgacagtggaacgagaccagccattgcccactcccgagctgcaaatgcccaccatggttccctcatatgacctcggaatggcccctgatagttccatgtccatgcaacttgggccagacatggtaccacaggtgtacccgccacattctcacagtattcccccatatcagggcttgagcccagaggaatccgttaatgtgctgtcagcctttcaagaaccccaccttcagatgccaccgagcttaggtcagatgtcactgcccttcgaccagccacaccctcaaggacttctcccgtgccagccccaggaacacgcggtgtcttcacctgaccctctgctgtgttcagacgtgactatggtggaggacagttgcttgtcccagccagtaaccgcgttcccccagggcacttggataggcgaggacatattccctcctctgctgccacccacagaacaggatctcactaaactccttctagaggggcagggggaatccggaggcggttccctgggcgctcagcccctgctgcagccaagccattacggtcagtctgggatttctatgtctcacatggatctgcgggcaaacccttcctggtag

SEQ ID NO: 240569 - DNA, 2214 bp, synthetic construct
  misc_feature 1..2214: note = Description of Artificial Sequence: Synthetic coding sequence
  source 1..2214: mol_type = other DNA
atggaacagttccgacaccttccaatgcccttccactggaagcaagaagagctgaaatttaagaccgggctccgcaggctgcagcatagagtaggagagattcatcttctgagggaggcgctgcagaagggtgccgaagcaggtcaggtcagcttgcattccctgatcgagacccccgcaaacggaaccggcccttctgaagcgctggccatgctactccaggagaccacaggtgaactggaagccgcaaaggccctcgttttaaagcggattcagatttggaaaaggcagcagcagctcgcaggaaacggcgcaccctttgaggaatctctggcaccactgcaagagcggtgcgagagcctagtggatatctatagccagctccaacaggaggtaggcgctgcaggaggcgagctagagccaaagacccgagccagtctcactgggaggctagacgaggttcttaggactctcgtgacttcatgttttttagtggagaaacagccgccacaggtgctgaaaacccagacaaaatttcaagcaggcgtcagatttttactgggcctccggtttctcggggcacccgctaagcctccgctcgtgcgggcagatatggtgactgaaaaacaggctagagaactgtctgtcccgcagggcccaggggcaggagctgaaagcactggcgagataattaataacacagtgccactagagaactccatcccaggcaactgctgtagcgcactgttcaagaatctcctcctgaagaagattaagcgttgtgaacgaaagggaacagaatccgtgacagaggagaagtgcgccgtgctgttctccgccagcttcacactgggcccagggaagctccctattcagctccaggccctgagtcttccattggtggttatcgtacacggcaaccaggataacaacgcgaaggcaacaattttatgggacaatgcttttagtgagatggaccgggtgccttttgtagtcgctgaaagagtgccatgggaaaaaatgtgtgaaacactcaacctgaaattcatggcagaggtgggaacgaatcgcggtttgctgccggaacactttctcttcctggctcagaaaatttttaacgacaattcgctctctatggaggctttccagcataggagtgtctcgtggagtcagtttaataaggagattttactgggacggggttttactttctggcagtggtttgatggggtgctcgacctcaccaaaaggtgcctgaggagctactggagcgataggctgatcatcggtttcatctccaaacagtacgtaacatctctccttctaaacgaacccgatggcacctttctgctgcgattctccgactctgaaatcggcggaataacgatagctcatgttatccgcggacaggatggttctccccaaatagagaacatccaacctttcagcgccaaggacctctctattcgctcattgggggacagaattcgggatctggctcagttgaaaaacctgtatcccaagaaaccaaaagatgaagcttttaggtcccactataagcccgagcagatggggaaagacggacgcggatacgtgccagctacaatcaagatgacggttgaacgggatcagcccctgccaactccagagctgcagatgccaaccatggtgccgagttacgacctcggaatggcaccagatagctctatgtccatgcagctcggcccagacatggtcccacaggtttatcctccacactcccacagtatcccgccttaccagggtctctccccagaagagagtgtaaatgtactgagtgcattccaggagccgcacctccagatgccccctagccttgggcagatgagcctgccttttgatcagccacatccacaaggtcttctcccatgccagccgcaggaacatgcagtttcatcccctgacccgctgttgtgtagtgacgtaaccatggtagaggattcgtgcctgagccagcctgtcaccgcattcccccagggcacttggatcggcgaggacatcttcccaccacttctacccccaactgaacaggacctgacaaaactgctactggagggacagggagaatccgggggaggatccttgggcgctcagcctctgcttcagccatctcactacggccaaagcggaataagcatgtcccacatggatctgcgggctaacccgagttggtag

SEQ ID NO: 240570 - DNA, 2214 bp, synthetic construct
  misc_feature 1..2214: note = Description of Artificial Sequence: Synthetic coding sequence
  source 1..2214: mol_type = other DNA
atggaacagttcaggcatcttcctatgccctttcactggaaacaggaggaattaaagtttaagacagggttacgcaggctgcaacatcgagttggggagatccacctgctgcgagaggccttgcagaaaggagcagaggctggccaggtttccctgcactccttgattgagacacccgcaaatgggaccggacccagcgaggcactggcaatgctgctccaggagaccaccggggagctagaggccgcaaaggcccttgtgctgaagcggatccagatctggaaaaggcagcaacagctcgccggaaatggggctccctttgaggagtctttggctcccttgcaggaacgatgcgaatccctcgtggatatttactcacagctgcagcaggaggttggtgccgctggcggagagctggagccaaagacaagggcttccctaaccggtagattggacgaggtgctcaggacattagtaacctcatgtttccttgtagagaaacagccaccccaggttctgaagactcagactaagtttcaggccggtgtgagatttttactcggcttgagattcctaggagcgccagcaaaaccacctctcgtgcgcgctgacatggttacggagaagcaagcaagagaactgagcgtccctcagggacccggagccggagctgagagcactggggaaataattaataatacagtgccccttgaaaatagcatcccaggcaattgctgtagcgccttgtttaagaatcttctgctgaagaagattaagcgctgcgagcgcaaagggaccgagtcagtgactgaagaaaagtgtgccgtactgttctccgcttccttcacccttggccctgggaagctgcctattcaattgcaggccctcagcctgcctttggtcgtgatcgtgcatggtaaccaggataacaatgctaaagccaccattctgtgggacaacgcattcagcgaaatggaccgcgtgccctttgtcgtggccgaaagggtgccctgggagaaaatgtgtgagactctgaacttaaaattcatggctgaagtaggaaccaacaggggcctgttgccagagcacttcttatttcttgcacagaagatctttaacgacaattccctgtccatggaggcctttcagcacaggagcgtgtcctggagtcagtttaataaagagatcttgctaggccgaggattcacattctggcagtggtttgacggagtgttggacctgacaaagaggtgcctgcggagctattggtcggaccgactaattattggatttatatcaaaacagtatgtgactagtctcctactaaacgaaccggacgggactttcctcctaagattttcggatagtgagattggcggaattaccatagcccacgtgatcaggggacaggacggctctcctcaaattgaaaacattcaaccatttagtgctaaggatttgtctattagaagcctcggggatcggattcgcgatctcgctcagctgaaaaacctctacccgaagaagcccaaagacgaggcctttcgctcacactataagcctgagcaaatgggaaaggacggccgtgggtacgtgcccgcaactatcaaaatgacggttgagcgggaccaaccactaccaactcccgaattacagatgccaaccatggtgccttcctacgacctggggatggccccagattcatcaatgagtatgcagctggggcctgacatggtgccccaagtctaccccccacactcacactcaatccccccttaccagggcctgtctccagaggaaagcgtcaatgtactgagtgccttccaggagccccacttgcagatgcctccgagtctggggcagatgtccttgccattcgatcaacctcatcctcagggactgctcccgtgccagccccaggaacacgctgtgtcaagtcctgacccgctactgtgctcagacgtgacaatggtcgaggattcttgcctttctcagcccgtcacagccttccctcagggaacatggatcggtgaagacatttttcctcccctgctccctcccactgagcaagatctgacaaagctcttgttggaaggacagggtgagtctgggggagggtccctgggggcacagcctctgctgcagccctctcactatgggcagtccgggatttcaatgagccatatggaccttcgagccaacccatcctggtag

SEQ ID NO: 240571 - DNA, 2040 bp, synthetic construct
  misc_feature 1..2040: note = Description of Artificial Sequence: Synthetic coding sequence
  source 1..2040: mol_type = other DNA
atgtcactgtgggggctcgtgagcaaaatgccccctgagaaggtccagcggctctacgttgatttccctcaacacctgaggcacctgttgggcgactggttggagagccagccttgggaattcctggtgggttcagacgctttctgctgcaacctcgcaagcgctcttctgagtgacactgtccagcatctccaagcatctgtgggggaacagggagagggtagcacaattttacagcatattagcactctagaatcaatctaccagcgagaccctctgaagctcgtggcaaccttcagacagatcctgcagggagaaaagaaagcagttatggagcagttccgccacctgcccatgcccttccactggaagcaggaggagctcaagttcaagactggtttgaggcgccttcagcatcgagtaggcgagatccacttactccgcgaagctctacagaagggtgcagaagcagggcaggtatccttgcactcactgatcgagacacccgcaaacggtaccggtccgagtgaggccctagctatgcttctccaggagaccaccggagagctcgaagcggcaaaagccctcgttctcaaaaggatccagatctggaaacgacagcagcagctggccggaaacggcgcaccattcgaggagagtttggcacccttacaggaacgttgtgagtctcttgtagatatttacagccaactccaacaagaggttggcgcagccggtggtgagctcgagcctaagacacgggctagcctgacagggaggctagatgaggtgttacgcacattagtgacatcttgttttctggtggagaagcagccccctcaggtcttaaaaactcaaactaaattccaggcaggagtgagatttctgttaggtctccgatttctgggagcaccggcaaaaccacccctggtgcgcgcagacatggtcacagagaagcaggccagggagctgtccgtgccccagggtcccggtgccggagctgagagcacgggcgagatcataaacaataccgtccccctggaaaatagcattccaggcaattgctgttccgcactgttcaagaacctgttgttaaaaaaaattaagagatgcgagagaaaaggtacagaaagtgtgacagaggagaagtgcgccgtgctgttcagcgccagtttcacactcgggccaggaaaattgccaattcaactgcaagccctctccctgcccttggtagtaatcgtgcatggaaaccaggacaacaatgctaaagctactattctctgggataatgcttttagtgaaatggaccgagtgccatttgtcgtggctgagcgtgttccctgggaaaagatgtgcgagacactgaaccttaagttcatggccgaagtgggtacaaaccggggtctgctcccagagcactttctttttctcgcacagaagatcttcaacgacaactctctgtctatggaggcatttcagcacagaagcgtttcctggtcccaatttaacaaagagatactgctgggcagaggattcactttctggcaatggttcgatggtgtgctcgatctgactaaacgatgcctgcggtcatactggtctgacagactgataattggctttatcagtaagcagtacgtaacgagcctgctattaaacgagcccgacggtacattcctgctgcggttttcagactcggaaatcggaggtataacaattgcccacgttattcggggacaggatggctcaccccagatcgagaacatacagcctttttctgctaaagacctctcaattcgaagtctgggcgaccgtatcagggacttggcgcaactgaagaatctgtatcctaaaaaaccaaaagacgaggcttttcgatctcactacaaacctgaacagatgggcaaggacggtagagggtacgtgcccgcaacaatcaaaatgacggtcgagcgtgatcagccgttgcctacgcctgagttgcaaatgcccaccatggtaccctcttacgatcttgggatggccctcattcccccatag

SEQ ID NO: 240572 - DNA, 2193 bp, synthetic construct
  misc_feature 1..2193: note = Description of Artificial Sequence: Synthetic coding sequence
  source 1..2193: mol_type = other DNA
atggagcagtttcggcatctgcccatgccctttcactggaaacaggaagaactgaagttcaagacagggctgaggcgattgcagcatagggttggggagattcatcttctgagagaggccttgcagaagggggcagaagccggtcaggtttctctgcacagccttattgagacccctgcaaacggcactggaccctccgaagctttggctatgcttctgcaggaaactacgggagaactggaggccgctaaagccctcgtcttaaagaggatccagatctggaagaggcagcagcagctggccggaaacggggcaccgttcgaggagtcccttgctccccttcaggaacgctgcgaatccctcgtcgacatctactcccagctccagcaggaagtaggggctgctggtggagagctggagcctaagaccagagcctcccttacgggaagactggacgaggtcctgcgaaccctggtgactagctgtttcctggtggagaagcagccccctcaggtgctcaaaacccagaccaaattccaggcaggagtaagatttctcttgggcctgaggtttcttggtgcccctgctaagcccccactcgtccgggctgacatggtgacagagaagcaggcgagagagctttctgtaccacagggtcccggagctggtgccgagtcaaccggtgagattataaataacactgttcccctcgaaaatagtatccctggcaattgttgctccgctctgtttaagaaccttctgctgaagaagatcaagcgttgtgagaggaagggcaccgagtcagtaactgaggagaagtgtgccgtcctgttttccgcatccttcaccctgggaccgggaaagcttccaattcagcttcaggccctttctctccctcttgttgtcattgtgcacggtaaccaggataacaatgcaaaagccactatactctgggacaatgctttttctgaaatggatagggtaccgtttgtagtcgcagaacgggtgccatgggaaaagatgtgcgagacgctgaacttgaaatttatggctgaagtaggtacgaatcgcggtcttctaccagagcatttcctttttctggctcagaagatttttaatgataacagtctttcaatggaggctttccagcacagaagcgtctcatggtctcagttcaacaaagagatcctgctgggaaggggctttacattttggcagtggttcgacggcgtgctggatttaactaagaggtgcctgaggtcatattggagcgaccgcctcattatcggctttatctccaaacaatacgtgaccagcttgctcttgaatgagcctgatggtaccttcctcttgcgcttttctgactccgagattgggggaatcaccatcgctcatgtgatccgcggtcaagacggaagtcctcagatcgagaacattcagccattctctgctaaagacctgtccattcgctccctgggtgatcggataagggacttggctcaattgaaaaacctataccctaagaaaccaaaggacgaagcttttcgctctcactacaagccagagcaaatgggaaaagatgggcgaggctatgtgcccgctactatcaaaatgacagtggagcgagaccagccacttccaacccctgaattgcagatgccaaccatggtaccaagttatgatctgggtatggcgcctgattccagtatgtccatgcagctcggcccagacatggtgcctcaggtctatcccccacatagtcactctatccctccataccaaggtctctctcctgaagaatctgtaaacgtgctctcggcattccaagagcctcatctccagatgcctccctcccttggacagatgtcactaccattcgaccagccccaccctcagggattgctaccttgtcaacctcaggaacacgcagtgagctctccagaccctctgctgtgtagcgatgtcacaatggtggaggattcttgcctgagtcagccagtaactgccttccctcagggtacatggatcggagaggacatcttcccaccattattgcctcccaccgaacaggatctgactaagttgctgctggagggccagggtgagagtggagggggatcacttggccattctccatcgtgctcaccccctacaatgggcaacctggggtcccaatgtcctacttggacgtag

SEQ ID NO: 240573 - DNA, 2544 bp, synthetic construct
  misc_feature 1..2544: note = Description of Artificial Sequence: Synthetic coding sequence
  source 1..2544: mol_type = other DNA
atgagcttgtggggccttgtgagcaagatgcctccagaaaaggtgcagaggctgtacgttgattttccacagcacctgaggcatttgcttggagactggctggaatctcagccctgggaatttctggtggggtctgatgctttttgctgcaaccttgcatctgctcttctttccgataccgtccagcacctgcaggcgagcgtcggggagcaaggggagggcagtacgattttgcagcacatctccaccttggaatccatctatcagcgtgatcccctgaagctagttgctacattccgccagatcctgcaaggagaaaagaaagccgtcatggaacagttccgccatctgccaatgccattccactggaagcaggaagagttgaaattcaagaccggccttagacgtctccagcatcgagtcggcgagattcacctcctgcgcgaagccttacagaaaggcgctgaagccggtcaagtcagcctgcacagcctgatcgagaccccggctaacggcacaggccctagtgaggcattggccatgctactccaggaaacaactggcgagttggaagccgcaaaggctctagtactaaaacgaatccagatctggaaacgtcagcagcagctggccggaaacggagcccctttcgaggagtctctcgctcccttgcaggaacggtgtgaatccctggttgacatctattctcaattgcaacaagaggtgggtgccgcaggcggtgaactggaacccaagacgcgggcaagccttaccgggagactggacgaggtgttgaggacgctcgtgactagttgctttcttgttgagaagcagcccccacaggtcctcaagacccaaacgaagttccaggctggagtgcgcttcctcctgggcctccgctttctcggagcaccagctaagccaccattggtccgggcagatatggtgacggagaaacaagcccgagagctgagcgttcctcagggccctggggctggcgctgaaagtactggagaaattattaacaacactgttccactcgagaactctataccagggaattgctgctccgcattgtttaagaatttgttgctgaagaagatcaagcgctgtgaaaggaaggggaccgagagtgttaccgaagaaaagtgtgccgtactgttttctgcctcatttacgctggggcctgggaagttaccaattcagcttcaggccctgtccttgccactggttgtgatcgtccatggaaatcaggataataacgcaaaagctactatcctgtgggacaatgctttctctgaaatggacagggtaccttttgtggtggccgagagagttccctgggaaaagatgtgcgaaactctcaatcttaaattcatggccgaggttggcaccaatcggggtctgctccccgagcacttcctatttttagcacaaaaaatttttaatgataatagtctttccatggaggcgtttcagcatcggtcagtgtcctggtcccaatttaacaaggagatccttctggggaggggcttcactttctggcagtggttcgacggcgtcctggatctgactaagaggtgtctccgaagctactggagtgacaggcttattattggattcatttctaagcagtatgtgacctcactgctgttgaacgagcctgacgggacatttctcctgcggttctccgacagcgagatcgggggaataactatcgcacacgtgatcagaggccaagacgggagccctcagattgagaatattcaaccgttttctgccaaggatctatccatccgctccctaggtgatagaatccgggacttggcacagctgaaaaacctctaccccaaaaagccgaaggatgaagcattcaggtcacactacaaaccggaacaaatggggaaagatggcagagggtacgtgcctgccacaatcaagatgacggtagaacgggaccaacccttgcctacccccgaattacagatgccaacaatggtgccttcctacgacctggggatggccccagacagcagtatgtccatgcagctggggccagacatggtgccccaagtgtaccctccccacagccattccatcccaccttaccagggcctaagccccgaggagagtgtgaacgtgctctccgccttccaggagccacacctccagatgcccccatccttgggtcagatgagtctaccatttgaccagcctcatccgcagggcctcctaccgtgtcagccccaggaacacgctgtttccagtccggaccctctgctgtgcagtgacgtaactatggtagaagactcatgcctctctcaacccgtgactgctttcccgcaggggacatggatcggagaggatattttccctccactgttgccaccaaccgagcaggacctcacaaagttgctccttgagggccagggcgaatctggcggaggctctctcggggcacagccgctgctgcagccctcacactatggacagagtggcatttcaatgtctcacatggatctcagggcaaacccatcctggtag

SEQ ID NO: 240574 - DNA, 195 bp, synthetic construct
  misc_feature 1..195: note = Description of Artificial Sequence: Synthetic coding sequence
  source 1..195: mol_type = other DNA
atgtcactttgggggttggtgtcaaaaatgccccctgaaaaagtgcagaggctgtacgtcgacttcccacagcatcttcgacacctgttaggcgactggttggaaagccagccatgggagtttctcgtgggctccgacgctttttgttgtaatttagcgtccgccctgctttccgacaccgtacaacatctatag

SEQ ID NO: 240575 - DNA, 435 bp, synthetic construct
  misc_feature 1..435: note = Description of Artificial Sequence: Synthetic coding sequence
  source 1..435: mol_type = other DNA
atgagcctttggggactagtgtcaaagatgccccctgagaaggttcaacgtctatatgtggattttccccaacacttgcgccacctgctgggcgattggttggagtcacaaccatgggaatttctcgtcggttcagatgctttctgctgtaacctggcatcggctctcctctctgacacagtgcaacacttgcaggcgagcgttggggagcaaggggaaggttctactatcctgcagcacataagtacactggagagcatttaccaacgcgatcctctgaagctggtggccacctttagacagatccttcagggagagaagaaagccgttatggagcagtttcgccacctccctatgcccttccactggaagcaggaggagctgaagtttaaaactggtttgcggaggctgcagcacagggttggagagatttag

SEQ ID NO: 240576 - DNA, 465 bp, synthetic construct
  misc_feature 1..465: note = Description of Artificial Sequence: Synthetic coding sequence
  source 1..465: mol_type = other DNA
atgtctttatggggattggttagtaagatgcctcctgaaaaggtccagaggctctacgtagactttccccagcacttgaggcacctgctcggagattggctggaaagccagccttgggagtttttagtcggcagcgatgctttttgctgcaatctggcatcagccctgttatccgatacagtacagcacctgcaggcctccgttggcgaacaaggagaaggctccaccattctgcagcacatctccacgctggagtccatttatcagagggacccactcaaattggtggccacgttccggcagatattgcagggtgagaagaaagcagtgatggagcagttccgacacctgcccatgcctttccattggaaacaggaggagctgaaattcaagaccggactgcggagattgcagcacagagtgggcgagatccatctcctccgggaggcattgcaaaagggctag

SEQ ID NO: 240577 - DNA, 318 bp, synthetic construct
  misc_feature 1..318: note = Description of Artificial Sequence: Synthetic coding sequence
  source 1..318: mol_type = other DNA
atgtccctatggggccttgtgtccaagatgccgccagaaaaggttcagaggctgtatgtagactttccgcagcatttgcgccatctgcttggagactggcttgagagccagccctgggagttccttgtgggcagcgatgccttttgctgcaacttggccagcgccctgctctctgacacagtgcagcacttacaagcctctgttggagaacagggagaaggctcgaccatcctacaacatatttccactctagagtccatctatcaacgtgaccctctaaagttggtggctactttccgccagatactgcagggctag

SEQ ID NO: 240578 - DNA, 312 bp, synthetic construct
  misc_feature 1..312: note = Description of Artificial Sequence: Synthetic coding sequence
  source 1..312: mol_type = other DNA
atgagtttatggggactcgtcagtaagatgccaccagaaaaagttcagcggctctacgtggatttcccgcagcacctccggcacctattgggcgattggttagagagccaaccctgggagttcctagtgggatccgatgccttttgctgtaacctggcttcagcactgttgtcagacaccgttcagcatctgcaggcctctgtgggcgaacaaggcgagggatctaccatcctccagcatatctcaactttggaatccatctatcagagagacccactgaaattggttgctactttccgccagattttatag

SEQ ID NO: 240579 - DNA, 480 bp, synthetic construct
  misc_feature 1..480: note = Description of Artificial Sequence: Synthetic coding sequence
  source 1..480: mol_type = other DNA
atgagcctgtggggactggtgagtaagatgcccccagaaaaggtgcagagattatacgtggactttccccaacacctgagacacctgttgggagactggctggaatcccagccatgggagttcttggtgggcagcgacgctttttgctgcaatctggcctcggcccttctttctgatacggttcagcatctccaagcctcggttggagagcagggcgaaggaagcaccatcttgcagcatatttcaaccttggagagtatttatcagagggaccccctaaagctggtggccacgttcaggcagattctgcagggggagaaaaaggccgtaatggaacaatttcgccaccttccaatgcccttccattggaaacaagaagagcttaagtttaagacaggactgaggcgactgcaacatagagtgggtgagattcacctactgcgcgaggcccttcagaagggagcagaagccggacagtag

SEQ ID NO: 240580 - DNA, 2544 bp, synthetic construct
  misc_feature 1..2544: note = Description of Artificial Sequence: Synthetic coding sequence
  source 1..2544: mol_type = other DNA
atgtctctttgggggctggtgtcgaaaatgccaccagagaaggtccagaggctctatgtcgatttcccacagcacctgcgtcacctgctcggggattggctggagtctcagccttgggagtttctggtgggttccgatgccttctgttgtaatctcgcatccgctctgttgtccgacaccgtgcagcatttacaggcgagcgtcggtgagcagggagaagggtccacaatccttcagcatattagtacacttgaatcaatttaccagcgcgatccacttaagctcgtagcaacgttccgacagatcctgcagggtgagaaaaaggcagtaatggaacagtttaggcatctgcctatgcccttccactggaagcaagaggagctaaaattcaaaaccgggctgagacgactgcagcatcgagtaggtgaaattcatcttctgcgcgaagccttgcagaaaggagctgaggcaggccaagtgagccttcacagtctgatagagacccccgcaaatggcacagggccttcagaagccctcgccatgttgctgcaggagacaaccggagaactcgaagcagcaaaggcattggtgcttaaacgcattcaaatatggaaaagacaacagcagctggccggtaatggcgctccatttgaggagtctttagcacctttacaggaacggtgtgaaagcctggtcgatatatatagtcaactgcagcaagaagtgggtgccgctggaggggagctagagcccaagactcgggcatccctcacaggcagactcgacgaagtgcttaggaccctcgtcacgagctgttttctggttgagaagcagccgcctcaggtcttaaaaactcaaacaaagttccaagccggtgtccggttccttcttggcctgcgattcttgggcgcacctgccaagccaccattagtccgcgctgacatggttactgagaaacaggccagggagctcagcgtcccacaggggccaggtgccggtgcggaatccaccggagagatcattaataatacggtccccctggaaaactccattccaggaaactgctgtagcgcgctttttaaaaacctcttgcttaagaaaatcaaacgctgtgagaggaaaggcaccgagtccgtgacagaggagaagtgtgcagttctgttcagcgctagtttcacgctcggcccaggtaaacttcccattcagctccaggccctgtcactgcctttggtagttatcgtgcacggaaatcaggacaacaacgcgaaggctaccattctgtgggacaatgccttctctgaaatggaccgggtcccatttgtagtggcggaacgggtaccatgggagaaaatgtgtgagacgctcaatctcaaattcatggccgaggtcggaaccaaccggggactgcttcccgaacacttcctgttcttggcgcagaagatatttaatgacaattcgctgtcgatggaggcattccagcacaggtctgtgtcctggagccagttcaacaaggagattctgttgggtaggggctttacattttggcagtggttcgatggcgtgctggacctgacaaagagatgcctgaggtcatattggagcgataggctaatcatcggatttatctccaaacagtatgtgacttctcttctgctgaatgagcctgacgggacctttctgctgagattcagtgactccgagatcggtggcattacaatcgcgcacgttattcgcggtcaggatggtagcccacagatcgagaacatccaacctttctctgctaaagacttgtcaatccgatcactgggtgaccgaatccgcgacctcgcacaactgaagaacctttaccctaagaagcctaaggacgaggcatttaggtctcactacaagccggagcagatgggtaaagacggcagaggatatgtgccagctaccatcaagatgaccgtggagagagaccaacctttgcctacacccgagctgcaaatgccaactatggtgccctcatacgacctgggcatggcaccagactcctcaatgagcatgcagctgggtcctgacatggtccctcaggtgtatcctcctcactcacattccataccgccttatcagggtttgtctcccgaagagtccgtaaatgtgcttagcgccttccaagaacctcacctgcaaatgcctccgtcactgggacagatgtccctgcccttcgaccagcctcaccctcagggcttactcccatgtcagccccaagagcatgccgtgtccagtcccgacccattgctgtgtagtgatgtgaccatggtggaggactcttgtcttagtcaacccgtgaccgcattcccacagggaacttggatcggcgaggatatcttccctcccctacttccgcctacagagcaggacctcactaagttactgctggagggacagggggaaagcggcggaggtagtctaggagcccagcccctcttgcagccttcacattatggtcagtctggtatttccatgtcccatatggatctccgtgccaatccaagttggtag

SEQ ID NO: 240581 - DNA, 225 bp, synthetic construct
  misc_feature 1..225: note = Description of Artificial Sequence: Synthetic coding sequence
  source 1..225: mol_type = other DNA
atgtcactgtgggggctcgtctctaaaatgcctcctgaaaaagtgcagagattgtacgtggacttccctcaacacttgcggcaccttctgggcgactggctagagtctcagccctgggagttcttggtcggttcagatgcgttctgctgtaaccttgcctctgccttattgagtgacactgtgcagcatcttcaggccagtgtgggcgagcagggagagggctag

SEQ ID NO: 240582 - DNA, 564 bp, synthetic construct
  misc_feature 1..564: note = Description of Artificial Sequence: Synthetic coding sequence
  source 1..564: mol_type = other DNA
atgctgggccaccctaaggtttgcgaaaaactcaaggctctgatggtggaatggactgacgaattcaagaatgacccacaactgagcctgattagcgctatgattaaaaatctgaaagagcagggggtgacgttcccggctatcggttcccaggccgcagagcaagccaaagcctcccccgctcttgtggcaaaagaccccggaactgtggcaaacaagaaggaggaggaggacttagctaaagcaatcgaactttcccttaaagagcagagacagcagagcacgaccctctctaccctgtacccgtccacaagttctctcctgacaaaccaccagcatgaaggaagaaaagttagggcgatctatgatttcgaggccgcagaagataatgaacttacattcaaggccggagaaattatcactgtccttgacgactcggatccaaactggtggaagggtgaaactcatcagggcatcggtttatttcctagcaatttcgtgactgccgacttgaccgccgaacccgagatgattaagactgagaagaaaaccgtccaattttag

SEQ ID NO: 240583 - DNA, 1623 bp, synthetic construct
  misc_feature 1..1623: note = Description of Artificial Sequence: Synthetic coding sequence
  source 1..1623: mol_type = other DNA
atgcctctcttcgctactaacccgttcgatcaggacgtggaaaaagccacctccgagatgaatactgcagaggattgggggctgatcctcgacatctgcgataaagtcggacagagccgaactgggcctaaggattgcctgcgttcaattatgcggagagtgaatcacaaagatccccatgtggccatgcaggccttgacgttactcggggcatgtgtgagcaactgtggtaaaatcttccatcttgaggtttgttctagagattttgcttccgaggtgtctaacgtgctgaataagggacacccaaaagtgtgcgagaagctgaaagccctgatggtggaatggacggacgagttcaagaacgatccccagctctcactgattagtgcaatgatcaagaacctgaaggaacagggcgtgactttccctgctatcggcagtcaggcagcagaacaagccaaggcaagcccagcgctcgtggctaaggacccagggactgtagccaacaagaaggaggaggaagacctggcgaaagcaattgagttaagcctcaaagaacagcgccagcagtccaccacactaagcacgttgtacccctcaacaagcagccttctgaccaaccatcaacacgaagggagaaaggtgcgcgctatctatgactttgaggctgctgaggataatgagctaacattcaaggcaggagaaattatcactgtgctggatgactctgacccaaactggtggaagggcgagacccaccaggggattggtttattcccatcgaatttcgtgaccgcggacctgaccgcagaacccgagatgattaagacagaaaagaagactgtgcagttcagcgatgatgtccaggttgaaacaatagaacctgagccggaaccagcatttatcgacgaggacaagatggaccaattactacagatgctgcaaagcacagatccaagcgacgaccagcccgacctgccggagctgcttcacctagaagctatgtgccaccagatgggacctctaattgatgaaaagctggaggatatcgatcgtaagcattcagagctatcagagctaaacgttaaagtcatggaagccctcagcctctacactaaactgatgaatgaggatccgatgtactctatgtacgctaagctgcagaaccaaccatactacatgcagtcatctggagtctccggaagtcaggtctatgcagggccaccaccgtccggagcttacctggtcgcaggcaatgctcagatgtcacacctccagagctactcacttccacccgaacaactcagctccctgtcgcaggctgtggtccccccttccgccaaccccgcactgccatctcaacaaacccaggcagcctacccgaatacaatggtttctagcgtgcaagggaacacgtatcctagtcaggcgccagtttactcgccgccaccagctgccacagccgcagccgctacagcagacgtgactctgtaccagaatgccggtcccaacatgccacaggtacctaactataacctaaccagctctactctcccgcagccaggcggttcacagcagccacctcaaccacagcagccatattcccagaaagccctcctgtag

SEQ ID NO: 240584 - DNA, 357 bp, synthetic construct
  misc_feature 1..357: note = Description of Artificial Sequence: Synthetic coding sequence
  source 1..357: mol_type = other DNA
atgagaagggtgaaccataaggaccctcacgtggctatgcaggcactgactctcttgggtgcctgcgtcagtaactgtggcaaaatcttccacttggaggtctgctcccgggactttgccagtgaggtatctaatgtgttgaacaaggggcacccaaaggtttgcgagaaacttaaagccctgatggtggagtggacagacgagttcaaaaacgacccccagctttccctgatttcagctatgatcaagaatctaaaggaacagggtgtcacattcccggctattggctcccaagccgctgagcaagctaaggcaagcccagctctggtagccaaggatcccggtaccgtggcctag

SEQ ID NO: 240585 - DNA, 1290 bp, synthetic construct
  misc_feature 1..1290: note = Description of Artificial Sequence: Synthetic coding sequence
  source 1..1290: mol_type = other DNA
atggtcgaatggacggatgagttcaaaaacgacccacagctgagtctaatttccgcaatgatcaagaaccttaaggaacagggcgtgactttccccgcaatcggctctcaggccgcagaacaggcaaaggcctctcccgctctagttgcaaaggacccagggactgtcgccaataagaaggaggaggaggacttggcaaaggcgatcgagctgtctctaaaagaacagcggcagcagtctaccacattaagcactctgtacccgtctacctcctccttattgacaaaccaccagcatgaggggaggaaggtgcgcgctatttacgatttcgaggcagccgaggataatgaattgacattcaaggccggtgaaattattaccgttctcgatgacagcgaccctaattggtggaagggcgagacacatcagggaatcgggctgtttccaagcaactttgtgacagcagatttgacagcggagccagaaatgataaagacggaaaagaaaaccgtacaattctctgacgatgtgcaggtggaaactatagaaccagaacctgagccagcctttattgacgaagacaaaatggaccagctgcttcagatgctgcaaagcaccgaccctagcgacgaccagccggatctgccggaattgctgcacttggaagctatgtgtcatcagatgggaccactgatagatgaaaaactggaggacattgacaggaaacattccgaactgagtgaactgaacgtgaaggtcatggaagcgctctctctgtacacaaaacttatgaacgaagatcctatgtatagtatgtacgctaagctccagaatcagccttactatatgcaatcatctggagtgagtggcagccaggtgtatgccggtcctcctcctagcggtgcttacctagtcgctggcaatgcacaaatgtctcacctgcagagctactctctgcctcccgagcagctgtcttcgctatctcaggcagtggtcccaccctccgcgaacccagccctgccctctcagcagactcaggcagcttatcctaatacaatggtatcttctgtgcaagggaacacatacccttctcaggcccctgtgtattcaccccctccggctgctactgccgcagccgcaacagctgatgtgacattgtaccaaaatgccggacccaacatgccccaggtccccaattataatctgacctcttctactttgccgcaaccaggagggagccaacagccccctcaaccacagcagccatattcccagaaagccctgctctag

SEQ ID NO: 240586 - DNA, 1578 bp, synthetic construct
  misc_feature 1..1578: note = Description of Artificial Sequence: Synthetic coding sequence
  source 1..1578: mol_type = other DNA
atgcctttgtttaccgccaacccatttgaacaagacgttgaaaaggcaacgaacgaatacaataccacagaggattggagcctcatcatggacatttgcgacaaggtgggctctactcccaacggtgcaaaggactgcttaaaagcaatcatgaagcgcgtaaatcacaaggtcccacatgttgccctgcaggccctgacattgttgggggcatgcgtcgccaactgtggcaagattttccacctggaggtctgttctagggacttcgcgacagaagtaagagctgttattaaaaataaagcccacccaaaagtctgcgagaaacttaaatctctcatggtggaatggtccgaagaatttcagaaagaccctcagttttctttaatcagcgccacaatcaagagcatgaaggaggaaggcatcactttcccccctgccggatctcagacagtgagcgccgctgctaaaaatggcacctccagtaacaaaaacaaggaagacgaagatatcgccaaggctatcgagctgtctctgcaagaacagaagcaacagcacactgagacaaagtccctgtaccccagtagtgaaattcagctgaacaacaaagtcgccagaaaagtgcgggcattgtatgacttcgaagcggtagaggacaatgaattgacctttaagcacggggagatcatcatcgttctggatgactcagatgccaactggtggaagggagaaaaccaccggggaatcgggctgtttcctagtaatttcgtcaccacaaatcttaatattgaaactgaagcagcagctgtcgataaactgaacgtgatagatgatgacgtggaagagattaaaaagtctgagcccgagccggtgtacatcgatgaagataagatggatagagcccttcaagttctgcaaagtatagacccaacagattccaagccggatagtcaggatcttttagatttagaggacatctgtcagcagatgggtccaatgattgatgagaagctggaagaaattgaccggaagcatagcgagctgtctgaattaaatgtcaaggtattagaggcgttggagctgtacaacaagctcgttaatgaagctcctgtgtattccgtctactcaaagttgcaccccccagctcactatccgccagcttcatcaggcgttcccatgcagacatatccagtgcagtctcacggaggtaactacatgggtcagagcattcaccaggtcacagtggcgcagtcatactccttagggcctgatcagatcggcccactgcgctccctcccccctaatgtgaattcaagcgtcacggctcagcccgctcaaacgtcatatttatcaactggccaggatacagtgagtaaccctacttatatgaatcagaattctaacttacagagtgccacagggacaacagcctacacacagcaaatgggcatgagcgtggacatgtccagttaccaaaacacgacgtccaatctgcctcagctagcaggattccccgtgacggtgccagcccatcctgtagcacaacagcacacaaactaccatcaacagcctctgttgtag

SEQ ID NO: 240587 - DNA, 3129 bp, synthetic construct
  misc_feature 1..3129: note = Description of Artificial Sequence: Synthetic coding sequence
  source 1..3129: mol_type = other DNA
atgccaatgtgggctgggggagtggggtctcccagacgcggaatggcccctgcttccacagacgacttgttcgcccgaaagttacgccagcccgctagacctccactgacacctcacacttttgaacctcggccagtgaggggacctctcctacgttcagggagcgatgccggagaagcgcgtcctccgaccccagcatcccctagagccagagctcatagtcacgaagaagccagtaggcctgccgctacctcaactcgcttatttaccgatcctcttgcacttttgggtttgccagcggaggaacctgagcctgctttcccgccagtgctagaacccaggtggtttgcacactacgacgttcagtctcttctgttcgactgggcccctcgctcccagggcatgggtagccactccgaagcaagtagcggcacattggcctctgccgaagatcaggccgctagttccgatcttctccatggcgctcctggctttgtgtgcgaattgggaggcgaaggcgaacttgggttgggagggccagcaagccccccagtcccacccgctttacctaacgcagctgtgtccattcttgaagaaccacagaacagaactagcgcttactcgcttgagcatgccgatctgggggctgggtactaccgaaagtatttctatgggaaggagcaccaaaacttctttggcatggatgagtcactggggcctgtcgccgtgagcctgcgccgtgaggagaaggaaggttctgggggaggcacactgcacagctatcgagtaatcgtgcggaccacacagctacgtaccctgcggggaactatctccgaagacgccttgccaccgggaccccctcgcggactgtctccacgcaagctgttagaacacgttgccccacagctgagtcccagttgtctgcgcctggggtccgcaagtcccaaggtgcccagaacgctacttaccttggacgaacaggtactctcctttcaacggaaggttggtatcctctattgcagagccggacaaggatccgaggaggagatgtacaataaccaggaggctggtcccgcatttatgcagtttctgaccctacttggagacgtcgtgagattaaaaggcttcgagtcatatcgagcacagctggacactaagacagactctaccggcacccatagcctgtacaccacttaccaggaccacgaaatcatgtttcacgttagtacaatgctgccatataccccaaacaaccaacagcagctgttgcggaaacggcacatcggtaatgacatcgtaactattgtcttccaggagcccggttccaagcccttctgccctactaccattcgctctcacttccagcacgttttcttggtggtgagagctcacaccccttgtaccccacataccacatacagggtcgctgtgtcacggacacaagatacaccagctttcggaccagccttacccgctggcggtggcccttttgccgcaaatgctgacttccgagcctttctgctcgcgaaggccctgaacggcgagcaggctgctggccatgccagacagtttcatgcgatggcaaccaggacccgacagcagtacctgcaggatttggccacgaatgaggtgacaacgacatcactggattctgcatccagattcggactgcccagtctaggcggaagacggagagcagctcctagaggccctggcgcagagcttcaggccgcagggagtctggtctggggggtgcgggcagcgcctggcgcaagggtcgctgccggtgctcaagcttcaggaccagagggcatagaggttccatgtttgctcgggattagcgcagaggcgttggtgctagtcgctccccgagacggcagggttgtgttcaattgcgcatgccgagatgtgctggcctggactttcagcgagcaacagctggatttatatcacggacgcggagaagcgatcacccttcgtttcgatggcagtccagggcaggccgtcggtgaggttgtggcgagactgcagctagtgtcccgcggatgcgaaactcgcgagctcgcacttcctagggacggtcagggtcgtctgggctttgaggtggatgccgaggggttcgtcacacacgtggagaggttcacatttgccgagactgccggtctacgcccaggcgcaagactcttgagggtctgtggccagaccctgccatcactgcggcctgaggcggctgcacagctcctgcgctcggcccctaaggtttgcgtgaccgtcctcccccctgacgagagtgggagacctagacgatctttctccgagctctatactctgagcctgcaggagccaagccggagaggagcccctgacccagtccaagatgaggtccaaggagttacgctcctgccgacaacaaaacaactgttgcatttgtgtctgcaagatgggggaagtcctcccggaccaggcgacctggcagaagagagaactgagttccttcacagtcagaatagtctttctcctcgctcatccctcagcgatgaggcccctgtgctccctaatacaacccccgatctccttctcgcaacaacagctaagccgagtgtgccctctgccgactctgagacaccactgacgcaagaccgacctggctctcctagtgggtccgaagacaaggggaatcccgcaccagagttgcgcgcatcctttctcccccgtacgttgtcacttcggaactcaatttcacgaatcatgtccgaagccggaagcggaactctggaggacgaatggcaggcaatcagtgaaattgcctctacttgtaataccatcctggagagcctgagccgcgaggggcaacctatcccagagtcgggtgaccctaagggcacccccaaatctgatgccgaaccagagccaggaaatcttagtgagaaggtgtctcacctggaatctatgttacgcaaattacaagaggacttgcagaaggaaaaagcggacagagccgctttggaggaagaggtcagatctttaaggcacaacaaccgccgtttacaggctgagtccgaatcagcagctactaggcttcttctggctagtaaacaactgggttctcccacagctgatctcgcttag

SEQ ID NO: 240588 - DNA, 2823 bp, synthetic construct
  misc_feature 1..2823: note = Description of Artificial Sequence: Synthetic coding sequence
  source 1..2823: mol_type = other DNA
atgcccatgtgggcaggcggtgtcggatctcctcgaagaggaatggcgcctgccagcaccgacgacctctttgcccgtaagctacgccagcccgcacgtccacctctgacgccacacacctttgagccacgcccagtgcggggaccattactgcgaagtggctccgatgctggggaagctaggccccctacccccgcatcaccaagagcaagagctcacagtcacgaagaagcctcccgaccggcagcaacatctactcgtttattcaccgatccgctggctctgctgggtttacccgctgaggagcccgagccagccttccctcccgtgctcgaacccaggtggttcgcgcattacgacgtacagtctttgttgtttgactgggcacccaggagccagggcatgggcagccacagcgaagcaagtagcggtacgctggcctccgctgaagaccaagccgcatcctcagatctgttgcatggcgctcccggttttgtttgcgaactgggcggagagggagagctaggtctgggcggtcctgcatcacccccagtgcctcccgcactgccaaatgccgctgtttccatccttgaggaaccccagaataggacctcggcatacagcctggaacacgctgatttaggggctggatactaccgcaagtacttttacggcaaagagcaccaaaacttcttcggtatggacgaaagtctgggccctgtcgcggttagcttacggagggaggaaaaagaaggtagcgggggtggaaccctgcattcctaccgggtgattgtaaggaccacacagctcaggaccctaaggggaactatctcggaagacgccttgcctcctgggcctccacgcggacttagccctcgcaagttgctggagcatgtcgcccctcagctatcaccctcttgccttaggctgggctctgccagtcctaaggtgccacggaccctcctcacgctggacgagcaggtcctttcatttcagaggaaagttggtattctgtactgtcgagccggacaggggagcgaggaggaaatgtacaataaccaggaagctggacccgcatttatgcagtttttgactttgctgggcgacgtagtgcgcctgaagggattcgaatcttacagagcccagttggatacaaagacagattcaaccggtactcactctctttatactacctaccaagatcacgaaattatgttccacgtttcgaccatgctcccttatactcctaacaaccaacagcagctgcttcggaagagacatatagggaatgatattgttactattgtctttcaggagcctgggagtaagccgttttgccctactacaattcgatcccactttcagcacgtgtttttggtcgttcgggcacatacaccctgcaccccgcacaccacctaccgggtagccgtaagtagaactcaggacactccggctttcggtcctgcactgcccgcaggcggaggaccttttgctgctaatgcggacttcagagctttccttctcgctaaggcgctgaacggcgaacaagcggctggccatgctcgacagttccatgcaatggccaccagaacaaggcagcagtacttacaggacctggcaacgaatgagcagctcgacctttaccatgggcgaggcgaggcaataacgctccgttttgacggctcaccaggtcaggccgtcggggaggtagtggcgaggttgcagctggtgagcaggggctgcgagactagggagctcgcactcccaagggacgggcagggccgacttggctttgaggtggatgccgagggatttgtgactcacgtcgaaagattcaccttcgccgaaaccgcaggcctacggcctggggcacgtctgttaagggtctgtggacaaaccttgccctccttgcggcctgaagctgctgctcaactactgaggtccgcacccaaggtgtgtgtcaccgttctaccccctgacgagagtggcagacctcgaagaagcttttctgagctctacactctctccttgcaggagcccagcagaaggggcgctcctgatccagtccaagatgaggtgcaaggcgtgaccctgctgcccacaacaaaacagctgctacacctgtgcctgcaagatggtgggagccctccaggcccaggtgacctggctgaggagcgtactgagttcctccacagccaaaattctctatcgcccaggagctcacttagcgatgaggctcctgtgctccctaacacaacacctgacctgctgttggccacaactgcaaagccttctgtgcctagtgctgactccgagacgcctttgacacaggacagacccggatcacctagtgggagcgaggacaaagggaatccagcgccagaactcagggcttccttcctgccgagaacgctgagcttgcgaaactccataagtcggatcatgtcagaagccggatccgggaccttggaggatgagtggcaggccatttcagagattgcgtccacgtgtaatactatcctggaatcactatcaagagaaggccagccaatccccgagtccggagacccaaaaggcaccccgaaaagcgatgccgagcccgagcctgggaacttgtccgaaaaagtttctcatcttgagagcatgctacggaagctgcaggaggacctccaaaaggaaaaagcagacagagccgctctcgaggaagaagtgaggtccttgcgccacaacaaccggaggttgcaggctgagtccgaatcggcagccaccagactgctgctggcttcaaagcagttaggcagccccacagcggatctggcctag

SEQ ID NO: 240589 - DNA, 21 bp, synthetic construct
  misc_feature 1..21: note = Description of Artificial Sequence: Synthetic coding sequence
  source 1..21: mol_type = other DNA
atgccaatgtgggccggatag

SEQ ID NO: 240590 - DNA, 312 bp, synthetic construct
  misc_feature 1..312: note = Description of Artificial Sequence: Synthetic coding sequence
  source 1..312: mol_type = other DNA
atgccaatgtgggcaggaggtgtaggctctccacgtagaggcatggcgccagcatcgactgatgatctattcgcaagaaaactgagacagccagctcggcctccccttacccctcatacctttgaaccgcgacctgtgcgaggtccacttcttcgcagtggaagtgacgcgggagaggcacgcccaccgacaccggcatctcctcgcgctcgggcacactcccacgaagaggcaagccgcccagccgctacttctactcgtctcttcactgatcctctggccttgctcggcctccccgctgaagagccgtag

SEQ ID NO: 240591 - DNA, 3129 bp, synthetic construct
  misc_feature 1..3129: note = Description of Artificial Sequence: Synthetic coding sequence
  source 1..3129: mol_type = other DNA
atgccaatgtgggccggtggtgtcgggtccccaaggagaggtatggctccagcctctacagatgacctgtttgcccgaaagttgcgtcagcccgctcgccctcccctgacccctcataccttcgagccacgccctgtgagaggacctctgttgagaagcggctccgatgccggtgaggccagacctcccactccagcctctcccagggcacgcgcacatagccacgaagaagcctctagaccagctgccacatccacaaggctgttcaccgaccccttggccctgctgggcctgcccgcagaggagcccgaacctgcatttccaccagtgctcgagcccaggtggttcgcccattacgatgtgcagtcactacttttcgattgggcaccgcgttcccaaggtatgggctcgcacagtgaagctagtagcggcaccctcgctagcgccgaagatcaggccgcaagctccgacctcctgcatggggcacccggattcgtgtgcgaactaggaggcgaaggtgaactgggtctgggaggtcccgcttctcctcccgtgccgccagctcttcctaacgctgcagtgtcgatcttagaggaacctcagaatcggacatctgcctacagcctggagcacgcagacctgggcgctggatattaccgcaagtatttctatggcaaggagcatcagaacttttttgggatggatgaatcgctggggccagtggctgtgtcgcttcgacgagaggaaaaagaaggctccggcggaggcaccctccactcctaccgagtgatagttcgaacgactcagttgcggaccctgcggggaacaatatcagaagacgccctgccacctggaccaccgcgaggactttcccccaggaaactgctcgagcatgtggcaccccaactgtccccttcttgcctccgccttggatccgctagcccaaaggttccacgaacattgctgacactcgacgaacaggtgttgtctttccagcggaaagtcggcatactttactgtcgcgcaggccaggggtccgaggaagagatgtacaacaaccaggaggccggaccagcgttcatgcagtttttaaccctccttggagacgttgtgaggctaaagggctttgagtcctatcgtgcccagctggacactaagacagacagcaccggcacccattccctgtacaccacctaccaagaccacgagatcatgttccacgtttccactatgctgccttatacaccgaataatcaacagcagctcctacgcaagaggcacatcggcaacgacatcgttaccatcgttttccaagagcccggttcgaagccgttttgccctaccacgattcggtctcactttcaacatgtttttttagttgtacgcgctcatactccctgcaccccccacactacatatagggtggcagttagtaggactcaggataccccagcattcggccctgctctgccggctgggggaggcccattcgcagcaaacgccgacttccgtgccttcttgttagccaaggccctcaatggcgagcaggctgccggtcacgcaaggcagttccacgctatggccacaaggacgagacagcagtatctacaggacctggcaactaatgaggtgaccacgacctcattggattctgcatctagatttggactcccctccctcggaggacgacgcagggcagcccctagaggcccaggcgctgagctgcaggcggcaggatctctcgtttggggagttagggccgctccaggtgcccgtgtggccgcaggggctcaggcctctgggccagaggggatcgaagtaccgtgcctgctcggcatctccgctgaggcattggtactggtcgctccgagagatggcagagtcgtttttaattgtgcttgccgcgatgtacttgcatggaccttctcggaacaacaattggacctgtatcatgggaggggggaagctattacactccgattcgatggctcaccgggacaagccgtcggggaggtggtggcacgcctgcaactcgtgagcaggggttgcgaaactagagaactcgctctgccgcgtgacgggcagggtcgcctgggtttcgaggtcgacgctgagggctttgtaacacacgtggaaaggtttacgttcgctgagaccgccggtctgcgccctggcgctagacttcttcgggtgtgcggccagaccctaccatccctgagacccgaggccgctgctcagctccttcggtccgcgccaaaggtgtgcgtgactgtgctcccaccggatgagagcgggcgaccaagaaggagtttcagcgagctatataccctgagtttacaggaaccttcacggaggggcgcacctgatcctgtacaggacgaagttcagggcgtgactcttctgccgacaacaaagcagctacttcatctttgtttgcaggacggtggtagcccacctggtccgggagacctcgccgaggaacgcactgagtttcttcattcgcaaaactctttatcccccagatctagtctgtctgatgaggcaccagtgttgcctaataccaccccagatcttttgctggctaccacagccaagccatccgtgcccagcgccgattccgaaacgccactgacccaggataggccgggatctcccagcggatctgaggacaagggcaatcctgcacctgaactgagagcctcctttctgccacgaacactctcactgcgcaacagcatctcacgaatcatgtctgaggctggttcaggcactctcgaggacgaatggcaggccatctctgagatcgcttcaacatgtaacacaatcttagagtcgctgagccgagagggacagccaattccagaatccggcgacccaaaaggtaccccaaagtcagacgctgaaccagaacccggtaatttgtctgagaaggtgtctcacttagagagcatgctgagaaaactacaggaggacctccagaaggaaaaagccgaccgcgctgctctggaggaggaggtgcgttcactgaggcataacaaccggaggcttcaggccgagagcgagagcgccgcaacacggcttttactggccagcaagcaactagggtcccctaccgccgatctggcctag

SEQ ID NO: 240592 - DNA, 5169 bp, synthetic construct
  misc_feature 1..5169: note = Description of Artificial Sequence: Synthetic coding sequence
  source 1..5169: mol_type = other DNA
atgtctgacccacggcaatctcaggaggaaaagcacaagctcggtcgtgcctcaagcaaatttaaggatcctccccgaattatgcagtcagatgattacttcgcacggaagttcaaggccataaacggaaacatggggcctacaacctccctgaatgcctcaaatagtaatgagacgggcggtgggggtcccgctaacggcacacctgcagtgcctaaaatgggcgtgcgcgctagagtaagtgagtggcccccaaagaaggattgcagcaaagagctcacatgtaaggctctctgggagtcaaggtctcagacctcctacgagtcaatcacgtccgtgttacagaacggccagtctgaccaatcagaggggcagcaggatgagcaactggatcttgatttcgtggaggcaaaatatacaatcggcgacatcttcgtgcatagtccgcagcgtggcctccatcccattaggcaacgctcaaactccgacgtcacaatctccgacatagatgctgaggacgtcctcgatcagaatgccgttaatccaaacacgggagcggcactgcatcgtgaatatgggtccacctcctccatcgatagacagggactgtcaggcgaaaatttcttcgccatgctgcgcggttatagagtagaaaattatgaccataaggcgatggtcccttttggatttccagaattcttcagatgtgatcccgcaatttctccttccctgcatgctgcggctcagatttcccgcggagaattcgtaaggattagcggcctggactatgtcgattctgcgcttcttatgggcagagatcgggataaacccttcaaacggaggttaaagagcgagagcgtagaaacctctctgttccgcaagctgcgcacagtcaaatctgaacatgaaaccttcaaattcaccagcgagctggaggaatcccggctggagagaggtattaggccctggaactgccagagatgcttcgctcactacgacgtgcagtcaatactgttcaatatcaacgaggccatggccacacgggcaaatgttggtaagcggaagaacattacaaccggagccagtgcagccagtcagacgcagatgccaacggggcagactggcaattgcgaatcacccctgggatctaaggaggacttaaacagcaaagagaatctggatgccgacgagggcgacggcaaaagcaatgacctcgttctgtcatgtccctacttcagaaatgaaactgggggtgagggagataggcggattgctctgagtagggccaatagcagcagtttctcctctggggagagctgttcgtttgaatcctctctgagctcccattgcacaaacgccggtgtgtcagtgctagaggtgccacgagaaaaccaacccatccatcgagaaaaagtaaagcggtatatcattgagcatatcgacttaggtgcctactattacagaaagttcttctacgggaaggagcatcaaaattacttcgggatcgacgaaaacttgggccctgttgctgtgtccatacggagggaaaaggtggaggatgccaaggaaaaggaagggtctcagttcaactatagagtggcattcagaacgtcagagctgacaactcttcggggtgccatcctggaagacgctatcccctctactgctagacacggaactgcccgaggtctgccactgaaagaggtgttggagtacgtaatcccagagttgagcattcagtgcctccggcaggctagcaacagccctaaggtctccgaacaactgttgaaactcgatgaacagggactatccttccagcataagatcggaatcctgtattgcaaagcgggtcagagcacagaggaagagatgtacaataacgaaacggcaggaccagccttcgaggaatttttggaccttttgggccagagagtcaggctgaagggtttttccaaatatagggcacagctggataataagactgattcaactgggacccattctttatatacaacttataaagattacgagttaatgttccatgtctccacacttttgccatatatgcctaacaatcggcagcagctactgcgcaaacggcacatcggtaacgacatcgtgacaatcgttttccaggagcccggagcgctgccttttacccctaaatccatccgatcccacttccagcatgtttttgtcatcgtgaaagtacacaacccttgcacagagaacgtgtgctacagtgttggagtttctcggagcaaagacgtccccccattcgggcctccgattccaaaaggagtgacatttcccaagtctgcagtttttcgcgacttcctgctggccaaagttatcaacgccgagaacgctgcacacaagagtgagaagtttagggcgatggcgaccaggacaagacaggagtacttgaaagatcttgccgaaaacttcgtcacaaccgcaactgtcgacacatctgtcaaattctcctttattaccctgggagccaaaaagaaggagaaggtgaagccacgaaaggacgcccatcttttcagcattggcgcaataatgtggcatgtgattgctcgggactttggccagtccgccgacattgaatgcctgttaggaattagcaacgagtttataatgctgattgagaaggactccaagaatgtggtgtttaactgtagctgcagggacgtcataggctggacgtctggattggtgagtattaaagtgttttacgagaggggcgagtgtgtgctcctttcctcagtggacaactgtgcagaagacattcgcgaaatcgtgcagagattggttattgtgactcgcggatgcgagactgtcgagatgactcttagacggaatggcctgggccagctgggctttcacgtgaacttcgagggcatagtagccgacgtcgagccctttggatttgcttggaaagctgggttacgccagggctcgaggcttgtggaaatttgtaaggttgccgtcgccactctcacgcacgaacagatgattgacctgctgcggacgagcgttacagtcaaggtggttattatccaaccccacgatgacggcagtccgagacgcggatgttctgaactctgtagaattcccatggtggagtataagttagattctgagggcacaccatgcgaatataagacaccttttcgcagaaacacaacatggcaccgcgtccccacaccagctctacagccgctgtcacgcgcttcacctatcccaggcactccagatcgccttccctgccaacagttactgcagcaagcccaagccgcaattccacgctctacctcctttgatcgcaagctgcctgatggcactagatcaagccctagcaatcagagttcttcttcagacccaggcccagggggatctggcccatggcggcctcaagttggctacgatggttgtcagtctcctttgctgctcgagcaccagggcagcggccctttagagtgtgatggagcccgagaacgcgaggatactatggaggcgagtaggcacccggaaacgaagtggcacggaccccctagtaaagtgctcgggtcttataaagagcgggcactgcagaaagacgggtcttgcaaagattccccaaataagctgagccacatcggtgataagagctgcagcagccactcctcaagtaacacactcagttctaatacgtcttctaattcggacgacaaacattttgggtccggcgatcttatggaccctgagctgctgggcctcacttatatcaagggtgcttcaactgattccggcatcgacaccgcaccatgcatgcccgctacaattctgggcccagtgcaccttgccggtagccggtctcttatacactcaagggctgaacagtgggcagatgcagcagatgttagcggacctgacgacgagcctgctaaactgtactccgtccacggatacgccagtacaatctccgccggttccgctgcagagggttctatgggcgatttgtctgagattagcagccatagttccggcagccaccattccggaagcccttcagcgcattgtagtaagtcctcggggtcacttgactcttccaaagtgtatatcgtaagccactcatctggccagcaggtccccggatcaatgtctaagccctaccacagacaaggagctgtcaacaagtatgtcatcggttggaaaaagtcggagggatcgccgccacccgaggaacctgaggtcacagagtgtccagggatgtacagcgagatggacgtaatgagtactgccactcagcatcagaccgtcgtaggcgatgcagtcgccgaaacccagcacgtcctcagcaaagaagactttctaaaactgatgctgcctgacagtcctttggtggaggaagggagacgaaaattctcattctacggaaatctgtccccaagacgtagcctgtatagaacattgtccgatgaaagcatttgctctaacaggcggggtagcagcttcgggagttctaggagttctgtcttggaccaggccctacctaatgacatcttgttctccacaacaccaccctatcatagtaccctgccccctcgtgcccaccccgcaccttccatggggagtctgaggaatgaattttggtttagtgatggaagtctgtccgataaatccaagtgcgctgatcccggactgatgcctcttccagatacagccaccgggttggattggacccatctggtcgacgcggcacgcgcatttgaaggtctcgactccgatgaagagttgggcttgctttgtcaccacacttcctatctggaccagcgagtggcgagcttctgtactctcacagatatgcagcatggccaagacctagagggagcacaggagcttccgctctgcgtggatcctggtagcggtaaggagtttatggacactactggcgaaaggagccccagcccgttaactggcaaagttaaccaactggagctgatcttacgacagctgcaaaccgacctaagaaaggagaagcaggacaaggctgtgctacaggccgaagttcagcacctgcgtcaggataacatgcgtttacaggaagagtcccagacagctaccgcccagctccggaagttcactgagtggttttttaccaccattgacaagaagtcctat

SEQ ID NO: 240593 - DNA, 2337 bp, synthetic construct
  misc_feature 1..2337: note = Description of Artificial Sequence: Synthetic coding sequence
  source 1..2337: mol_type = other DNA
atgtccccgtgcttcagctttattggctgcaaactgtgctccattgtgactcgcggttgtgaaacagtggaaatgaccctcaggagaaatggtctgggacagctgggattccatgtgaatttcgaagggattgttgccgatgtggaaccatttgggttcgcatggaaggcaggtctgagacagggcagccgtttggttgaaatctgcaaggtagcggtcgctacgctaacacatgaacaaatgattgacctcctcagaacttcagtgactgtgaaagtagtcataatacaaccccatgatgacggctcccctcgtcggggatgtagcgaactgtgtagaatccctatggtcgagtataaactggacagcgagggcactccatgcgaatataaaaccccgtttaggagaaatacaacatggcacagggtgcccactcccgcacttcagcccctatcaagggcatctcctatccccggtacgcctgatcggcttccatgtcagcagctgctgcagcaggcccaggctgcaattccccgatcaacctcttttgataggaagctcccagatggcacgcggtcatctcctagtaaccagtccagttctagcgacccaggtccaggtggatccgggccatggcgaccacaagtcggctacgacggctgccagtcccccctcttactggagcatcagggttctgggccattggagtgtgatggcgctcgggagcgagaggacactatggaagcaagcagacatcctgaaacgaagtggcatggccctcctagcaaagttttggggagttacaaggagcgggctctgcagaaagacgggtcctgtaaggatagccctaacaagctatctcatatcggagacaagtcctgttcttcccattctagcagcaatactctctcttctaatacgagtagtaatagtgacgacaaacacttcggaagcggagacctgatggatccagagctcctcggacttacttacataaaaggagccagcaccgacagcgggattgataccgccccttgcatgcctgcaaccattctgggacctgtccatctggccggatccagaagcctgatccattcccgggcagaacaatgggccgacgcagccgatgtctccggcccagacgacgaacccgcaaaactatactctgtccacgggtacgcatctaccatcagtgccggaagcgcagctgaaggttcaatgggtgacttatcagagataagttcacactcctctggatcacaccactctgggtctccatccgcacactgtagcaaatcttcgggtagcctcgattcatccaaagtttatattgttagccacagctctgggcagcaggtgcccggaagcatgtccaaaccttaccaccgacagggcgctgtgaataaatatgtgatagggtggaagaaatccgaaggcagcccacctcctgaggagcctgaagtgactgaatgccctggaatgtattcagagatggacgtgatgtcaacagctacacagcaccagacagtggttggggatgctgttgccgagacacagcatgttctctccaaggaggacttcttaaagctgatgctgccggacagccccctcgtggaagagggcagacgcaagtttagtttttatggaaacctctcacccaggcgatccctctaccgaacactatcagacgagagcatttgctcgaatcgacgaggctcgtcctttggaagctccaggtcatcagtgcttgatcaggcgctaccgaatgacatactgttcagtacgacaccgccataccactccaccctgcctccgagggcccacccagccccatccatgggaagtctcaggaacgagttctggttctctgacggctctctgtctgacaagagtaaatgcgctgatcctggtctgatgccactcccagacacagccacagggcttgactggacccacctggtggacgccgcacgcgcatttgaagaccaacgagtcgctagtttttgtacactcaccgatatgcagcatggacaggacctcgagggtgcacaggagctgccactctgtgttgacccaggatcaggaaaggagtttatggacaccaccggcgagagatccccttcaccactgactggcaaggtgaatcaattagagctgatactgcgacagttacaaacagacctgagaaaggagaagcaggacaaggccgtactccaagccgaggtgcagcatctacgccaagataacatgaggctgcaggaagaaagccaaaccgcgacggcacagttaaggaagtttacggagtggttctttacaacaatcgataaaaaaagttag

SEQ ID NO: 240594 - DNA, 5168 bp, synthetic construct
  misc_feature 1..5168: note = Description of Artificial Sequence: Synthetic coding sequence
  source 1..5168: mol_type = other DNA
atgtcagaccccagacagagccaggaggaaaaacacaagctcgggagagcgtctagtaagttcaaagaccccccaaggattatgcaatctgatgactacttcgcgaggaagttcaaagcaattaacggcaacatgggcccaacaacttcactgaatgcttcaaattccaatgagacagggggagggggtcccgctaatgggactcctgccgttccgaaaatgggggtgagagctcgcgtcagtgaatggcctccgaagaaggattgttcgaaggagcttacctgtaaagctctttgggagtccagatcccaaacatcctacgagagcattacatccgtcctacagaacggccagtccgaccagtccgagggacagcaggacgaacagctggatcttgattttgtcgaagcaaagtacaccatcggggacatcttcgtacacagccctcagaggggtctccatcccattaggcagcggtccaatagtgacgttacaatttccgacattgacgccgaggatgtactggaccagaatgccgttaacccgaatacaggcgctgctcttcaccgcgagtatggaagtacgagcagcatagacaggcaaggtttgtctggggaaaatttcttcgcgatgttgagagggtatcgcgtggaaaactacgaccataaggccatggtacctttcggtttccccgagttttttagatgtgacccggcaatctctccgtcgttgcacgcggctgctcagatcagtaggggcgaatttgttcgcatttccggcctggattacgtggactcggctcttctgatgggtcgggatcgtgacaaaccgttcaaacggcgactcaagtcagaaagcgtcgagacttccttgtttagaaagcttcgcactgttaagtcagaacatgagaccttcaagttcacatctgagctagaggagtctagactggaaagaggtatacgcccttggaattgccaaaggtgtttcgcccactacgatgtccaatccatcctgtttaacatcaacgaggcaatggcaacccgcgcaaatgtcggaaaacggaaaaatattacgacgggagcatctgccgcatcacagacccagatgcctacgggtcagaccggaaactgtgaatccccacttggaagcaaagaggacctgaactccaaggagaacctcgatgctgatgagggcgacggtaaatctaatgatctggtactatcttgcccctactttcgcaatgagaccggcggagaaggcgatcgaagaattgccctgtccagagcaaactcgagcagcttctcctccggagaatcctgcagctttgagagctcattgtccagccactgcaccaatgctggagtgagcgtgctggaggttccaagggagaatcagcccatacatcgcgagaaagtgaagcgttacattatagaacatatcgatctgggtgcctattattatcgcaagtttttctatgggaaggaacaccagaactacttcgggatcgatgaaaacctaggtcctgtggcggtctctatccgcagagaaaaagtagaagacgctaaagagaaggaaggctcacagtttaattaccgggtggcatttaggactagcgaactcactaccctgaggggcgctatcttagaagatgctattccctcgacagcgaggcatggtaccgccagaggcctgcctctgaaggaagttttggagtacgtcatccctgagctttccatccaatgtctgaggcaggcgagtaactctcctaaggtctctgaacagctactcaaattagacgagcaaggactgtctttccagcataagatagggatcctctattgtaaagcaggccagtcaacagaagaagaaatgtacaacaatgaaaccgccggacccgcattcgaggaattcttggatctgctcggacagagagtgcggttaaagggtttttcaaagtacagggcgcaactggataacaagaccgattcaaccggaacccattcgttgtataccacctataaagactacgaacttatgttccatgtcagcacactccttccctacatgccaaacaaccgccagcagcttttacgtaagagacatattgggaacgatattgtgacgatagtgttccaggagccgggagctttaccttttacaccgaaatccataaggagccactttcaacacgtgttcgtcatcgtaaaagtccacaacccttgtactgagaacgtatgttattctgttggcgtctcacggagcaaagatgtgcccccattcggcccacccatccccaagggagtcacctttcccaaaagtgccgtgttccgtgattttttgctggccaaagttatcaacgccgaaaacgcggcacataagagtgaaaaattccgggctatggcaacacgcacaaggcaagaatacctgaaggaccttgcagaaaacttcgtaacgaccgcaaccgtcgacaccagcgtgaagttctcatttataacactgggagccaagaaaaaggaaaaggtgaagccgaggaaagacgcacacctcttttccattggcgcaatcatgtggcatgttattgcgagagatttcgggcagtctgcagatatcgaatgtctgctgggcatatctaatgagtttataatgctgattgagaaagactccaagaacgtggtcttcaactgctcttgcagggacgtcatcggatggacttctggacttgtaagcatcaaggtgttttatgaaaggggagagtgtgtgcttttgagcagcgttgacaactgcgctgaggatattcgggaaatcgtgcaaagactggtgattgtcaccagaggttgcgagacagtggagatgacattgaggagaaacggactagggcagcttgggtttcacgtcaactttgaggggattgtcgcggacgtggaacccttcgggttcgcttggaaggccggattgcggcaaggcagcaggctcgtcgagatatgtaaagtcgctgtagccacactgacccatgagcagatgatagatctgcttagaacctcagtgacagttaaagtcgtgataatacagccccacgatgacgggtctcccagacgagggtgttccgagctatgtcggatacccatggtggaatataaactcgattctgaaggcactccttgtgaatacaaaacccccttcagacgcaatacaacatggcatcgagtcccaactcccgctcttcaacctttgtctcgggctagtccgatacccggaactccggatagactcccctgccagcagctgctgcagcaggcacaagctgcaatccccaggtccaccagcttcgaccggaaattgcctgacggaactcgttcgagtccttccaaccagtcatcatcatctgaccctggaccaggaggatctggaccttggaggccacaggtcggctatgacggatgccaatcgccactgttactggagcatcagggtagcggtcctttggagtgtgacggcgctagagagcgggaggacaccatggaggcaagtcggcatcccgaaacaaagtggcatgggcctcccagtaaggtgctcggatcctacaaggagcgcgctctccaaaaggacggctcatgcaaggactcaccaaataagctctcacacataggagataagtcgtgttcatctcatagtagtagcaacacgctcagctccaataccagctcaaactctgatgataagcacttcggttccggagatctgatggatcccgaacttctagggcttacatacattaagggtgcttcaacggacagcggcatcgacactgcaccatgtatgcctgctaccatcctcggccctgtccacttggctggatcccgatctctgatacatagtagggccgaacagtgggccgatgcagcggacgtctcaggccctgatgacgagcccgcaaagttgtacagcgtacacggttacgcctctacgatatcagcgggatccgcagccgagggctcaatgggtgatctgagcgaaatatcaagccactcttcggggtcccaccattccggatcccccagcgcccattgttcaaagtcaagcggaagtctggacagtagcaaggtatacattgtgtcccatagttccgggcaacaggtaccaggaagcatgagcaagccttaccataggcaaggcgctgtgaataaatatgtcatagggtggaagaagtcagagggatctcctccaccagaggagcccgaggtcactgagtgcccaggcatgtattctgaaatggacgtaatgtccaccgcaacccagcatcaaacggtcgtcggggatgcggtggctgaaacacaacacgtcctttccaaggaggactttctgaagcttatgttgccggatagcccacttgtggaggaaggcaggcgcaagttcagtttttatggcaatctgtctcctaggagaagtctctatcggaccctgagcgatgagtctatttgcagcaacaggaggggaagttcatttggaagttcacggtctagcgtcctcgaccaggccctgccgaatgacatcctcttctcgaccacaccgccatatcattctaccctgccacctcgcgcacatccagccccaagcatgggcagcctgcggaacgagttttggttttctgacggctctttgtctgataagtcaaaatgtgccgaccccggactcatgcccctaccagacactgctacaggccttgactggacccacttggtggacgccgctcgggcatttgaagggcttgacagcgatgaagaattgggtctgctctgccaccatactagctatctggaccaaagagttgcatccttctgtacactgacggacatgcaacatggccaggacctggagggggcacaggagttgcctctctgcgtggatcccggatcaggaaaggaattcatggacactactggtgaaagaagcccatcacctcttacagggaaggtgaatcagctggaactcatactccggcagctccaaactgacctacggaaggagaagcaggataaggctgtactgcaggccgaggtgcaacaccttagacaagacaacatgagactccaggaggaatctcagacggccacagcccaactgcgaaagttcacagagtggtttttcaccacaatcgacaagaagtcata

SEQ ID NO: 240595 - DNA, 918 bp, synthetic construct
  misc_feature 1..918: note = Description of Artificial Sequence: Synthetic coding sequence
  source 1..918: mol_type = other DNA
atggacccaaagggccttctttccctcaccttcgtgctgtttctatctctcgcatttggcgcatcttacgggacagggggtagaatgatgaactgtccaaagatattgagacagttgggatccaaagtgctattacccctcacatatgaaagaattaacaaaagtatgaacaagagcatccacattgtagtcacaatggcgaaatccttagaaaactcggtggaaaacaagatagtgagcctggatccctcagaagcaggccctccccgatacctaggcgacagatacaagttctatctggaaaatctgactctgggcatcagagaatctcgcaaggaggatgaagggtggtacttgatgaccctcgaaaagaacgtgtccgttcaacgcttctgtctccagcttaggttgtatgaacaggttagcacgccggagattaaggtgctgaataagacgcaggaaaacggaacttgcactctcattctcggttgtaccgtggagaagggcgaccatgtggcctatagttggtccgagaaggccggaacacaccccctgaacccagcgaatagttcacacctgttgagcctcactctgggccctcagcatgccgataacatttatatttgtactgtgagcaaccccatctcgaataattcacagacgttctccccctggcccggatgcagaacagatccttcaggcaagacaaaccactatcaaaccaccgtggaaaaaaagagcctaacaatctacgcccaggtccagaagcccggacctctgcagaaaaagctcgactccttcccggcacaggatccttgtacaaccatatatgtcgccgctaccgaacctgtgcccgaatccgtgcaggagaccaactccattacagtgtacgcttcagtcacgcttcctgagagctag

SEQ ID NO: 240596 - DNA, 1008 bp, synthetic construct
  misc_feature 1..1008: note = Description of Artificial Sequence: Synthetic coding sequence
  source 1..1008: mol_type = other DNA
atggaccctaaagggctactctcactgacttttgtgctgttcttaagcctggccttcggagcaagttacggcaccgggggtagaatgatgaattgtccaaaaattctgagacagctggggtccaaggtacttctacccctgacatacgaacgcatcaacaagagcatgaataagagcatccatatcgtcgtgacaatggcaaaatccctcgagaattccgtggaaaataaaattgttagtttagacccatcagaagcgggacctcctcggtacctgggggatcgttataagttctacttggaaaacctcactttgggtattcgggagagcagaaaagaggacgaagggtggtacctgatgacactggaaaagaacgtgagtgtacagagattctgcctgcaactgagactctatgagcaagtaagtacacctgagataaaggtactgaacaagacacaagagaatggaacctgcaccctgattctgggatgtaccgtcgagaagggagaccatgtagcttattcatggtctgagaaagctggaacacatcccttgaatcctgcaaattctagccatttgttatcactgacactgggtccgcagcacgcagacaatatctatatatgcactgtttctaacccgatctctaacaattctcagaccttttccccatggccagggtgcagaaccgatcccagcgagactaagccttgggcagtatatgctggcctccttgggggagtcattatgattttgatcatggtcgtgatcctgcagctccgtagaagagggaaaacaaaccattatcagactaccgtagaaaaaaaatctctaaccatctacgcccaggtgcagaagccaggacctcttcaaaagaaactggatagtttcccagcccaggatccatgtactacgatctacgtggctgctacagagcctgtcccagagagtgttcaggaaaccaattcgatcacagtctatgcttctgttaccctgcctgagtcctag

SEQ ID NO: 240597 - DNA, 897 bp, synthetic construct
  misc_feature 1..897: note = Description of Artificial Sequence: Synthetic coding sequence
  source 1..897: mol_type = other DNA
atggaccccaaggggctgctgagcctgacttttgtgctgttcctctcgcttgcattcggagctagctacgggaccggaggacggatgatgaactgtccaaagattctacggcaactaggaagcaaggttctgctgccgctgacttatgaaaggattaacaagtccatgaacaagagcatccacatagtggtgacgatggcgaagtcactggagaatagcgtggagaataagatcgtctccctcgatcctagtgaagctggtcccccacggtacttgggcgaccgatacaagttctatctcgaaaacttaaccctggggatcagagagtccagaaaggaagacgagggctggtaccttatgactctggagaaaaatgtgtcagtgcagcgcttttgccttcagttaaggctttacgagcaagtttccacacccgagataaaagttctgaataagactcaggagaacggaacttgtacgttgatccttggatgcaccgtggagaaaggtgaccacgttgcctacagttggtccgaaaaagccggaacccatcctctcaaccctgcaaactcttctcacttgctgagtctaaccctgggcccacagcacgccgacaatatctatatctgtaccgttagtaatcctataagcaataattcccagaccttctcaccttggccaggctgtcgcaccgatccgtccgaaacaaagccatgggcggtatacgcgggacttctgggtggcgttataatgatccttatcatggttgtcatcctgcaattgcggcgacgagggaaaaccaaccattatcaaacaaccgtggaaaaaaagtccctcaccatttacgcccaggttcagaaacctggcgacagtcaccaccagacttcagacttgttttag

SEQ ID NO: 240598 - DNA, 435 bp, synthetic construct
  misc_feature 1..435: note = Description of Artificial Sequence: Synthetic coding sequence
  source 1..435: mol_type = other DNA
atggatccaaaagggctgctgtcactcacgttcgtgctgttcctaagtctggcgtttggcgcatcctatggcactgggggaagaatgatgaattgccccaaaatcttgagacaactcggctccaaagtgctgttacccctgacatatgagcggatcaacaaatctatgaacaaaagcatccacattgtcgtcacaatggcaaagtccctggagaacagtgtggagaataaaatcgtgtcattggatccatctgaagccggacctccaaggtatctcggtgatcgttacaagttctacctcgagaacctgacactgggtatcagggaatcgcgcaaagaggacgagggttggtatctgatgacgctcgagaaaagtctccatttcggctacctctacttcgtcctcggcgctgaccatgacaacttacagacttag

SEQ ID NO: 240599 - DNA, 810 bp, synthetic construct
  misc_feature 1..810: note = Description of Artificial Sequence: Synthetic coding sequence
  source 1..810: mol_type = other DNA
atggatccaaagggcctgttaagcttaacgttcgtgttgttcctgtctctggcttttggggcttcctatggcacagggggaaggatgatgaattgccccaagattctgcgacagctgggatccaaggtcctgctcccactaacatacgaacgcataaacaagtcaatgaacaaatcgatccacattgtcgtcaccatggctaagagcctggaaaattcagtggagaataagattgtatcactcgatccgtcagaagctggacctcccagatatctcggtgatagatataagttttacctggagaatcttactctggggattcgcgagtctaggaaagaagatgaaggctggtatctaatgacactcgagaagaatgttagcgtacagcggttctgtctgcagctccggttgtacgaacaggtctcgacccctgagattaaagtcctgaacaagacacaggagaatggcacatgcacacttattcttggatgcactgtcgaaaagggtgatcacgtagcgtactcatggtccgaaaaagcgggaacccatcctctcaaccccgcaaacagcagccacctccttagtctgactctgggtcctcagcacgcagacaacatctatatctgtaccgtgtctaaccccatctcaaacaattcccagactttctctccctggcccggttgccgtaccgacccttccgagactaagccctgggctgtatacgcgggactcctaggaggggttatcatgatcttaattatggttgtaatactccagttgcggaggagggccagtagcgaggagacatag

SEQ ID NO: 240600 - DNA, 1029 bp, synthetic construct
  misc_feature 1..1029: note = Description of Artificial Sequence: Synthetic coding sequence
  source 1..1029: mol_type = other DNA
atgtgctccactatgtccgccccaacctgcctggcccacttacccccttgcttcctcctgcttgctctggtgctcgtgccatccgacgcctcaggacagtctagtcggaatgactggcaagtgctgcagcccgagggccctatgctggtggctgaaggcgagaccctgttgctgcggtgcatggtcgtgggtagttgtacagatgggatgatcaagtgggttaaggtttccacccaagaccagcaagaaatttacaatttcaagcgagggtcattcccgggtgtaatgccaatgattcaaagaacaagtgagccactgaattgtgattattcaatctacattcacaacgtcactagagaacacacagggacctatcactgcgtcaggtttgacggattgtcagaacactctgagatgaagtccgatgaagggacatccgtgctggtgaaaggtgcaggcgatcccgagcccgacctctggataatccagccccaggagttggttctaggaactacgggcgacaccgtgtttctgaattgcactgtgctcggagacgggccacccggtcccatacgctggtttcagggggctgggctttccagggaggcaatctataattttggcggaataagccatcccaaagagacggcggtgcaggcctctaataatgacttctcaatcctcctgcagaacgtgagttccgaggatgcgggaacgtactattgtgtcaagtttcagaggaagccaaacagacagtatctcagcggacagggcacaagcttgaaggttaaggctaaatccacaagctccaaggaggccgaattcacctccgagccagctactgaaatgtctccaactggtctgttggttgtgtttgcacctgtcgtgctgggactcaaagcaatcactctcgcagcgttgctcctcgctttagctacatctcggaggagcccgggacaggaagacgtgaagactaccggacctgccggagcgatgaacaccttagcatggagtaagggacaggagtag

SEQ ID NO: 240601 - DNA, 624 bp, synthetic construct
  misc_feature 1..624: note = Description of Artificial Sequence: Synthetic coding sequence
  source 1..624: mol_type = other DNA
atgtgctccaccatgagcgctcccacttgcttagctcacttacccccatgctttctgttactagcactagtgcttgtcccaagcgatgccagtgggcagagtagccgcaacgactggcaagtgctgcagcctgagggccctatgctggtcgccgaaggggcaggcgatcccgaacctgacttgtggataattcagccacaggagctggtgctaggtaccaccggggacactgtgttcctcaattgcaccgtattaggcgatggcccaccaggccctatccgatggtttcagggtgccggactcagcagagaggcaatctacaactttggaggtatctcacatccgaaggaaaccgccgtgcaagcctccaataacgatttttcaatcctcctgcagaatgtgtcttctgaggatgcaggaacctattactgcgtaaaatttcagaggaagcccaatagacagtatctttctggacaagggacatcattgaaagtgaaggaacagaatctccctctccccaagcggcagaactccccagtcaacttgcagttaagatgcctgcagcaagtctcagtacctacaagcgtggagagtatgtcacccccacaggctcgtggaccttag

SEQ ID NO: 240602 - DNA, 624 bp, synthetic construct
  misc_feature 1..624: note = Description of Artificial Sequence: Synthetic coding sequence
  source 1..624: mol_type = other DNA
atgtgcagcactatgtcagctccaacatgcttggcacatctgcccccttgtttcctgctgctcgctctcgtgctggttccttctgatgcgtccggccaaagctcccgtaatgactggcaagtgctacagccggagggcccaatgctggtggccgagggtgccggtgatcccgaaccggacctatggatcattcagccacaagagctcgtgctcggcacgaccggcgataccgtatttttgaactgcactgtattgggcgacggccctcctggcccaatcaggtggttccagggagctggcctcagtcgagaggccatttacaacttcggcggaataagtcacccaaaggaaactgcagtgcaggcctccaacaatgacttctctatcctactacagaatgtctcctcggaggacgccggaacatactactgtgtcaaattccaacgcaagccaaaccggcagtacctgagcggacagggtacaagccttaaggtcaaagagcagaacctgcctcttcctaagaggcaaaatagcccagtgaatctgcagctacgctgtctgcagcaggtctccgttcccacttcggttgagagcatgtcaccgcctcaagccaggggaccctag

SEQ ID NO: 240603 - DNA, 735 bp, synthetic construct
  misc_feature 1..735: note = Description of Artificial Sequence: Synthetic coding sequence
  source 1..735: mol_type = other DNA
atgtgctccactatgtccgccccaacatgtctggcccacctccctccctgcttccttttgctggctctggtgctcgtgccatccgatgcaagcggtcagtcatctcgaaatgattggcaggtcctacagcccgaagggcctatgctggtggctgagggcgctggggatcccgaacccgacttgtggatcatacagccgcaggagctggtcctcgggaccaccggagacacagtattcctaaattgcactgtcctcggtgacgggccaccgggtcctatccgctggttccagggagctggactgtctcgcgaggccatttacaacttcggcggtatttcacacccaaaagagacggcagttcaggcgtcaaataatgatttcagtattctcctccaaaatgtgagcagcgaagacgccggaacatactactgcgtaaaatttcagaggaagcctaaccggcagtatctgtccggccagggcacctccctcaaagttaaggcaaaaagtacaagttcaaaggaggccgagtttacatccgagcctgccacagagatgagcccaaccgggttactcgtggtgtttgcgcctgtggtcctcgggctgaaggctatcactctggccgcactgctgttggcattagccaccagccggcgatctcccggacaggaggatgttaagactacaggcccagccggtgccatgaacactctagcctggtccaaagggcaggaatag

SEQ ID NO: 240604 - DNA, 633 bp, synthetic construct
  misc_feature 1..633: note = Description of Artificial Sequence: Synthetic coding sequence
  source 1..633: mol_type = other DNA
atgaaatctgatgaaggaaccagtgtgctggtaaagggcgcaggagatcctgagccagatctgtggatcatccagcctcaagagttagtcctgggtacaactggcgacacggtctttttgaactgtaccgtgctgggtgatgggccacccggacctatcaggtggtttcaaggagcaggcttatcccgcgaagccatctataatttcgggggtattagccatcccaaagagactgctgtgcaggcttcgaataatgacttctcaattcttctccaaaatgtgtcatccgaggatgccggtacctattactgcgtgaagttccagaggaaaccaaatcgccaatatctctcggggcagggcacaagtcttaaggtgaaggctaaaagcacaagtagtaaggaggctgagtttacatccgagcccgctacggagatgtcccccacaggggagagaactcatttatcaggggtgaatgaaagtcctactgggaagggcgctatgaacggattagtcatggggagagaacagtctcagactcctggagccaatctgcccccaaggatgctccctggacttcatctcaactgtcgcacccggacacccgaaaaccacgtgataacagcacaattatag

SEQ ID NO: 240605 - DNA, 2046 bp, synthetic construct
  misc_feature 1..2046: note = Description of Artificial Sequence: Synthetic coding sequence
  source 1..2046: mol_type = other DNA
atgaatgcctccagcgaaggggagagtttcgctggatccgtccagatccctggtgggaccaccgtgctggttgaactcacacctgacatccatatctgcgggatttgtaagcaacagtttaataatctggacgctttcgtggcccacaagcaaagtggttgccagctgacaggaacaagcgcagctgcgccatctaccgtacaatttgtctcagaggaaaccgtgccggcaacccaaactcagaccaccacccgcaccattacgagcgagacccaaactataactgtttctgccccagagttcgtttttgaacatggctatcaaacttatctgcccaccgagagcaatgagaatcagacagccaccgtgatctccctgcccgctaaaagcaggacaaagaaaccaacaactccacctgcccagaagcggctgaactgttgttacccgggttgtcagttcaagacggcgtacggaatgaaggacatggagagacacctgaagatccacacgggagacaagccacacaaatgcgaggtgtgcggtaagtgtttttcaagaaaagacaaactaaagacacacatgaggtgccatactggggtgaagccttataaatgtaaaacttgcgactatgcagccgctgatagcagcagtctcaacaaacacctgaggattcatagcgatgagagaccctttaaatgccaaatctgcccttacgcgtctaggaatagctcacaattgacggtacacttgcggtctcatacaggggatgcaccgttccagtgctggctgtgcagtgccaagttcaagatctccagcgatctcaaacggcatatgagagttcactccggcgagaagccgtttaaatgtgagttctgcaacgtgcgctgtaccatgaagggaaacttaaaaagtcatatacgcataaagcattccgggaacaatttcaagtgtccacactgcgattttttgggcgattcaaaagcgactctgagaaaacactcaagagtgcaccaatccgagcacccggagaaatgcagtgaatgtagttattcctgtagcagcaaggctgctttaagaattcatgaacggatccactgcactgatcggccattcaaatgtaactattgtagtttcgacaccaagcaaccctctaacctatctaaacacatgaagaaattccacggtgacatggtgaagaccgaggccctggaacgcaaagatactggtaggcagagcagccgccaggtggcaaagctggatgctaagaagtctttccactgcgacatatgcgacgcttcctttatgagagaggactcacttaggtcacataaacgccaacacagcgaatatagtgagtccaagaattcagacgtgacagttttacagttccagattgaccctagcaagcagccagccaccccactgaccgtgggtcacctgcaggtgccgctgcaaccctcgcaggtgccccagtttagtgagggccgtgtgaagattatcgtgggacaccaggttccccaggccaataccatcgtccaagctgcggcagccgcagtaaatattgtaccacctgcacttgtcgcccaaaatccggaggaactgcctggaaacagtcggctgcagattttgcgacaggtaagccttatcgctcccccacagagcagccgctgcccaagcgaagccggtgctatgacccagccagccgtgctcctcactacccatgagcaaacggatggggcaacactgcaccagaccctgattcctaccgcgtccggagggccacaggaaggttcaggcaaccaaacctttatcacttcatccggtatcacctgcacagattttgagggtctgaatgccctcatacaagagggcactgccgaagttaccgttgtgtctgatggcggtcagaatattgcagttgccacaaccgctcctcccgtcttttctagttcatctcagcaagaactacctaagcagacctattcaataatccagggggcagcccaccctgctctgctttgtccagctgactccattccggactag

SEQ ID NO: 240606 - DNA, 1164 bp, synthetic construct
  misc_feature 1..1164: note = Description of Artificial Sequence: Synthetic coding sequence
  source 1..1164: mol_type = other DNA
atgccagtgccggcaagctggccgcaccctcctggcccttttttactccttacactgttgctcggtctgacagaagttgcaggagaagaggagctgcagatgatccagccagaaaagctgttactagtgacggtgggcaagactgcaacactccactgtaccgtaacttcactactgccagttggacctgtgctgtggttccgaggtgtggggcctggccgagagctcatatacaatcaaaaggaaggccatttcccaagggtaacaaccgtatctgacctgacgaagaggaataacatggacttcagtatacgaatctcatccataactcccgctgacgtcggtacctattattgtgtaaaattcaggaagggcagccccgagaacgtggaatttaaaagcggccctggaactgagatggccctgggggctaagcccagcgcccctgtggtactgggccctgccgctcgcactacccctgaacacactgtgagctttacatgtgagagccacggcttctctccgagagacatcactctgaaatggtttaagaacgggaatgagttgtctgacttccagaccaacgtggaccctacaggccagagtgtcgcgtatagcatccggtccaccgccagggtggtgctagacccctgggacgtccggagtcaagttatctgtgaggtggcacatgtgaccctccagggggatccgctccgtggtacggcaaacctgtccgaagctattcgagtcccccctacactcgaggttacacagcagcccatgcgagtggggaatcaggtgaacgtcacgtgtcaggtaaggaaattctaccctcaatccttacagcttacgtggtccgagaacggcaatgtgtgtcagcgggaaacagcctctacgctcaccgagaataaagacggcacatataattggacttcctggtttttggtgaatatttccgatcagagggatgatgtggttttgacttgtcaagtaaagcacgacggtcagcttgccgtgtccaagagactggctctggaggtcactgtgcaccagaaagatcaatcctcagatgcaactccgggacccgcttcatcactcactgcacttcttctgattgccgtgttactgggacccatctacgtaccttggaaacagaagacatag

SEQ ID NO: 240607 - DNA, 513 bp, synthetic construct
  misc_feature 1..513: note = Description of Artificial Sequence: Synthetic coding sequence
  source 1..513: mol_type = other DNA
atgcctgtacccgcatcctggccccatccacccggaccattcctgttactgaccctcctcctcggattaaccgaagttgccggagaggaggaactacagatgatacaaccggaaaagctcttgttagttacggtgggaaaaaccgccacactacactgcacagttacatccctgctgcccgtgggaccagttctttggttcagaggcgtcggtcccggaagggagctcatatataatcagaaggaaggacactttcctagagtgactacagtcagcgacctgaccaagcgcaacaacatggatttcagcatacgcatttcttctattacccctgcggatgtcggaacatactattgcgtcaagttccgcaaaggttcgcctgagaacgtcgagttcaagagtggcccaggcaccgagatggctctgggtgggccagcgagctcattgaccgctctccttcttattgcagtcctcctcggacccatttacgtaccctggaaacaaaagacctag

SEQ ID NO: 240608 - DNA, 1065 bp, synthetic construct
  misc_feature 1..1065: note = Description of Artificial Sequence: Synthetic coding sequence
  source 1..1065: mol_type = other DNA
atgatccagccggaaaagttactgctggttaccgtcggcaaaacggcaactctacactgtactgtgacttctctgttaccagttgggcctgtgctgtggttcagaggagtggggcctgggagggaactcatctataaccaaaaagaagggcattttccacgggtgactaccgtcagcgacctcaccaagcggaataacatggacttttcaatacgcataagtagtatcacaccagccgatgtgggcacctactactgtgttaagttccgtaagggaagcccagaaaacgttgaattcaagagcggcccaggaactgaaatggcacttggagccaaaccatctgctcccgtcgtcctcggacccgctgccagaaccacccctgagcatacggtgagtttcacttgtgagtcccacgggttctcgccaagagatatcacccttaagtggtttaagaacggtaacgagctgtccgattttcagacaaacgtcgaccccacaggccaatctgtggcgtactccatacgctctacggcgcgagtggtccttgacccttgggatgtaagatctcaagtcatctgcgaggttgcccacgttactctgcagggggaccctcttcgagggacagctaacctttctgaggcgattagagtgccacccactctggaagtgactcagcagcctatgcgggttggaaaccaagtgaacgtgacgtgccaagtcaggaaattctacccccagtctcttcagttgacgtggtccgaaaatgggaatgtatgccaaagggagaccgcaagcactctcaccgaaaacaaggatggcacctacaactggacgagctggtttctggtgaatatttcagaccaacgcgacgacgtcgttctgacttgtcaggtgaaacatgatggccaactggccgtgtcgaagcggctggcactcgaagtgacagttcatcagaaggatcaatcttctgacgccacgcccggtcctgcctccagcttaaccgccctcctactcatcgcagttctgttagggccaatatacgtcccctggaagcagaagacctag

SEQ ID NO: 240609 - DNA, 831 bp, synthetic construct
  misc_feature 1..831: note = Description of Artificial Sequence: Synthetic coding sequence
  source 1..831: mol_type = other DNA
atgccagtccccgcatcttggccccatcctcctggcccatttctgctgcttactctcttgctgggcctgaccgaggtagcgggagaggaagagctccagatgatccagcccgaaaaactgctcctcgtgactgtcgggaagaccgccacacttcattgcacagtgacctcattactgcccgttggtcctgtgctttggtttagaggcgtggggcctggccgagagcttatatataatcaaaaagagggccacttcccgcgagtaacaaccgtttctgatctaaccaagagaaataacatggatttcagcataagaattagcagcatcacccccgcagacgtgggtacgtattactgcgtgaagttccgaaagggctccccggagaatgttgaatttaagtctggccctggtacagaaatggcactaggcgctaagccctcagccccagtggtgctgggacctgccgctagaactacccccgagcacacagtgagctttacttgtgagtctcacggtttttctccgagggacataacacttaaatggtttaaaaacgggaacgaactgtcagactttcaaacaaacgtcgatcctaccggacagagcgtcgcttattcgattcgatctacggccagggtcgttctggacccatgggacgtgcgctcacaagtgatttgcgaagtcgcccatgtgactctccaaggggaccccctgagaggcacagcgaatttgtccgaggcgatccgaggcccagcatcctcccttaccgcactgctgctgatcgccgtgttgctaggcccaatttacgtcccatggaagcagaaaacttag

SEQ ID NO: 240610 - DNA, 1386 bp, synthetic construct
  misc_feature 1..1386: note = Description of Artificial Sequence: Synthetic coding sequence
  source 1..1386: mol_type = other DNA
atggccccacagagtctaccaagttcacgcatggcccctctggggatgctgctggggctgctcatggctgcctgtttcaccttttgtctttctcaccagaacctgaaggagttcgccttgaccaaccccgaaaagtctagtacaaaagagaccgagcgcaaggagaccaaggccgaggaagagctggacgctgaggttctggaagtgttccacccaacacatgagtggcaagcactccagccgggtcaagcagtgcccgctggcagtcacgtgaggctcaatctgcagaccggggagcgagaggcaaaacttcagtatgaagacaagtttcgtaacaacctgaagggaaaacgcttggacataaacactaatacctatactagtcaggatctcaaaagcgccctggctaagttcaaagaaggcgctgaaatggaaagtagtaaagaggataaagcgcgtcaggctgaggtaaaaagattgttcagacctattgaggagcttaagaaggactttgatgagctgaacgtggtgatcgagacggacatgcagatcatggtgcggttgatcaataagtttaacagtagctcctcatcacttgaggagaaaatcgcggcactattcgatttggagtattatgtgcaccagatggacaacgctcaagatctgctgagctttggaggactacaggtcgtaataaacgggctgaacagcactgagccgctggtgaaggagtatgctgccttcgtgctcggcgcagccttctcctcaaaccccaaggtgcaggttgaagccattgagggaggagctctccagaagctgctggttattctggccactgaacagcctcttactgccaagaagaaggtgctttttgccttatgtagcctgctcagacatttcccctacgcacagcgacagttcctgaaattggggggacttcaagttctccgcacactcgtccaagagaagggcacggaggtgctggccgtgcgagtggtgaccctgttgtatgacctggtgaccgaaaagatgttcgctgaagaagaagctgaactgacccaggagatgagccctgaaaaactccagcagtatcgccaagtacacctgctgccgggtttgtgggaacaaggctggtgcgaaatcacagcccacctgctggctttaccagagcatgatgccagagaaaaagtgctccagactttgggggtactgctcaccacctgcagagacagatatcgacaagatccacaactgggccgaacactggcctccctgcaggccgagtatcaggtgctagcttcactcgagttacaggacggagaggacgaggggtattttcaggagctattggggtcagttaacagtctgcttaaagaactacggtag

SEQ ID NO: 240611 - DNA, 1386 bp, synthetic construct
  misc_feature 1..1386: note = Description of Artificial Sequence: Synthetic coding sequence
  source 1..1386: mol_type = other DNA
atggcaccccaaagtctgccgtcatctagaatggcacccctcggtatgctcctggggctgcttatggctgcatgctttaccttttgcctgagtcaccagaacctcaaggagttcgctctgacgaatccggaaaaatcttcaacgaaggaaactgagagaaaagaaacaaaggcagaggaggagttagacgccgaagtcctggaagtgtttcatcctacgcacgaatggcaggcgctccaaccaggccaagcagtcccagccggttcacacgtgcgccttaatctccagacaggagagcgggaagccaagctgcagtacgaggataaattccgtaataaccttaaaggcaagcggcttgacatcaacactaacacttacacatcccaggatctgaagtctgcccttgctaagtttaaagagggagccgagatggaaagtagcaaggaggataaagctaggcaagctgaggttaaaaggttgtttcgcccaatcgaggagttgaagaaagatttcgacgagttgaatgtggtcatcgagacagatatgcagattatggtccgtcttatcaataaattcaatagctcttcatcaagtctggaggagaaaattgcagcactctttgacttggagtattacgtgcatcagatggataacgctcaggaccttctgtctttcggcggtctgcaggtggtcataaatggtctgaactcaaccgaaccactagtcaaagaatatgccgcattcgtcctgggagcagcattctcctcaaacccaaaagtgcaggtcgaggctatcgagggtggtgcgctgcagaagctgctagtcatcttggcaacagagcagcctttaactgcgaagaagaaggtgctctttgccctgtgctcactgttgcgccactttccctatgcccagaggcagttcttaaagctcggaggattacaggttctgagaactctggtgcaggagaaaggcaccgaggtgttagcagtgagggtcgtgacactgttatatgacctagtcacggagaagatgtttgccgaggaggaagctgaactgacccaggagatgagcccagaaaagcttcagcaataccggcaggtgcacttgcttccaggcctgtgggagcaaggctggtgcgagatcaccgcccatctgcttgcactgccagagcacgatgctcgagaaaaagtactccagacacttggagtcctgctaacaacatgtcgggatcggtatcgacaggacccacaactcgggagaacccttgcgtccctccaggctgaatatcaagttctggcttcccttgaactgcaggatggtgaggacgagggatatttccaggagctcctgggaagcgtgaattcactgctaaaggaacttcggtag

SEQ ID NO: 240612 - DNA, 288 bp, synthetic construct
  misc_feature 1..288: note = Description of Artificial Sequence: Synthetic coding sequence
  source 1..288: mol_type = other DNA
atggcccctcaaagtctgccctccagcagaatggcgccactgggaatgcttttggggctgctgatggcagcttgtttcaccttttgcctgtcccaccaaaatctgaaagagtttgcacttacaaaccccgaaaagtctagcaccaaagagacagagcgaaaggaaaccaaagcggaggaggagctcgacgcagaggtgctggaagtgttccaccctactcatgaatggcaggccctgcagccaggccaagctgtgcccgcaggatcccacgtgcgactgaacctctag

SEQ ID NO: 240613 - DNA, 492 bp, synthetic construct
  misc_feature 1..492: note = Description of Artificial Sequence: Synthetic coding sequence
  source 1..492: mol_type = other DNA
atggcacctcagtccctgccgtcctcccgtatggcgcctctggggatgctgcttggcttgctcatggcagcctgcttcactttctgcctgtcacaccagaacttaaaagagtttgcattaacaaaccccgagaaatctagtacaaaagagactgaaagaaaggaaacaaaagctgaggaggagctcgacgccgaggtgctggaggttttccaccctacacacgagtggcaggcattacagccgggtcaggccgttcctgctggctctcatgtccgtctgaatctacagaccggtgaaagggaggcgaaactccaatatgaagataagtttcgcaataacctgaaaggtaaacgccttgatatcaacacgaacacctatacatcccaagatttaaaatccgctctcgcgaaatttaaagagggagcggagatggagtcgtcaaaagaagataaggcccgtcaggccgaggtgaaaagactcttccggccttag

SEQ ID NO: 240614 - DNA, 372 bp, synthetic construct
  misc_feature 1..372: note = Description of Artificial Sequence: Synthetic coding sequence
  source 1..372: mol_type = other DNA
atggccccacaatctctccctagctccaggatggcccctctgggtatgctgctcggcttgttaatggcagcctgctttacattctgtttgtctcatcaaaacctgaaggaattcgcactaaccaatccagaaaaatcttctaccaaggagacggaaagaaaggaaacgaaggccgaggaggagcttgatgccgaggtgctggaggtattccaccctacccacgaatggcaggcgctgcagcccggacaggctgtaccagccggaagtcacgttagactgaatctccagacaggcgaaagggaggcaaaactacaatacgaggataaatttcggaacaatctgaaaggcaagcgcttggacattaatacgtag

SEQ ID NO: 240615 - DNA, 579 bp, synthetic construct
  misc_feature 1..579: note = Description of Artificial Sequence: Synthetic coding sequence
  source 1..579: mol_type = other DNA
atggcagcatgctttactttctgcctgtctcaccagaacttgaaggagttcgcacttactaatcccgagaaatctagtacaaaggaaaccgagagaaaagagactaaagcagaggaagagttggatgccgaggtgctcgaagtgtttcatcctacgcatgagtggcaggccctgcaaccgggtcaggcggtacccgctggatcccatgtgaggttgaacctgcagaccggcgagagagaggccaaactgcaatatgaagacaagttccgcaacaatttaaaaggtaagagattagacatcaatacgaacacgtataccagccaggacttgaaatccgccctggccaagtttaaagagggtgctgagatggaatcctccaaggaggataagatggataacgcccaggaccttctatcattcggtggcttgcaagtcgtaattaacggtctaaacagcacagagcccttagtcaaggagtacgccgcttttgtgctgggcgctgcattctcttccaaccctaaggtacaagtcgaggccatcgaaggtggggcattacagaagttgctcgtgattttgtag

SEQ ID NO: 240616 - DNA, 3822 bp, synthetic construct
  misc_feature 1..3822: note = Description of Artificial Sequence: Synthetic coding sequence
  source 1..3822: mol_type = other DNA
atgaaaagacgcctcgatgaccaggaatctcctgtgtatgcggcacagcaacggcgaattccgggaagcacagaagctttccctcatcaacaccgggttctcgccccagctccccctgtctatgaagctgtctctgagactatgcagtccgcaactggaattcaatattcagtgaccccgtcctaccaggtgagcgctatgcctcagagctccgggtcgcatggtcctgcgatcgctgcagtccacagttctcatcaccaccccaccgcagtgcagccacacgggggtcaggtggttcagagccacgcccatcccgcacctccagtggcccctgtgcagggccagcagcaatttcagaggctcaaggtggaagatgctctttcctacttagaccaggttaagctgcagttcgggtcacaaccacaggtttacaacgattttctggacattatgaaagaattcaagtctcagtcaatcgatacaccaggcgttatttcaagggtcagtcagctgttcaaagggcatccagatttgatcatggggtttaacacgttcctgcctcccggttacaaaatcgaagtgcagactaacgacatggttaatgtcaccaccccaggacaagtccatcaaattccaacacatggcatccagccccagccgcagcctccaccacagcaccccagccagccttctgcccagagtgccccagcacccgctcagccggcaccccagccaccacccgcaaaggtttccaagcccagtcagttgcaagcccacacccccgcttcacagcagaccccaccccttcctccatatgcaagtccacgatcaccaccggttcagccacacacacccgtcacaatctcactcggcacagccccttccctccagaataaccaaccagtcgaattcaaccacgctatcaactatgtcaataaaattaagaatcgatttcagggccaacccgatatctataaagctttcttggagatcttgcatacttaccaaaaggagcagcgcaacgcaaaagaggccggaggcaactacactcctgcccttactgagcaggaggtttacgcccaagtggctcggctcttcaaaaatcaggaggatctgttgtcagagttcggccagttcctgccagacgcgaattcaagtgtgttactgagtaagacaacggccgaaaaagttgattccgtgcggaacgatcatgggggtacagtgaaaaaaccccaactgaacaataagccacaaaggccaagtcaaaatggctgccagatacgcaggcacccaacagggactacaccccctgtgaaaaagaagcccaaactgctaaacctcaaggactcctctatggctgatgccagtaaacacgggggagggacggagtctctctttttcgataaagttcgaaaggcactgcggtcagctgaagcttacgagaactttctgcggtgcctcgtgatctttaaccaggaggtcatatctcgggctgaactggtccagttagtgagccccttcctgggcaaattccctgagctattcaactggttcaagaattttctaggatacaaagaaagtgtccacctggagacttatccaaaggagcgtgctacggagggaatcgccatggaaattgactatgcttcgtgtaagaggcttgggagttcctacagagcgcttccgaagtcctaccagcagcccaagtgcacgggacgcacccctctgtgcaaagaggtcctgaacgatacctgggtttccttcccttcctggagcgaagactccacttttgtgagttccaagaagactcaatacgaagagcacatctacagatgcgaggacgagaggttcgaactggacgtggtgttggaaactaatctggcaactatcagggtgctggaggctattcaaaagaaactgagtagattaagtgccgaagaacaagccaagttccgtctcgataacacccttggtgggacgtccgaagtgattcaccggaaagctcttcaacgtatctacgctgataaagctgctgacattattgacgggttgcgaaagaatccctccatcgccgtgcccatcgtcctcaaacgactgaaaatgaaggaggaggagtggagggaagcccaacgcggattcaacaaggtctggcgagaacagaatgagaagtattatctgaagagcctcgaccatcagggtataaacttcaagcagaacgacacgaaagtcctgaggtccaagtcactgctcaatgagatagaatcaatttacgatgaaaggcaggaacaagcgactgaagagaatgccggagtgccagtcggcccacacctgtctctagcatacgaggataaacagatcctggaggatgccgctgcattaataatccatcatgtaaagcggcaaaccggaatccaaaaagaggacaagtacaaaattaagcagatcatgcatcactttatacctgatctgctgtttgcccaacggggtgacctgtctgacgtggaagaggaagaggaggaggagatggacgtggacgaggccacaggagccgtcaaaaaacacaatggcgtgggtgggagcccacccaaatcaaagttgcttttcagcaatactgctgctcaaaagctgcgaggcatggatgaggtatacaatctgttctacgttaacaacaactggtatatttttatgcgcctgcaccagatcctgtgtctaagactgctgcggatctgctctcaggcagagcgacagattgaggaggagaacagggagcgggagtgggagcgagaggtgctgggtatcaagcgggataaatcagactcccccgcaattcagcttaggctcaaggaacctatggatgtcgacgttgaggattactacccagcattcctggacatggtgcgaagcctgctggacggcaatattgattcatctcagtatgaagactccttaagggaaatgttcacgattcatgcttacatcgctttcaccatggacaaactcatccagtccattgtgcggcaacttcagcacattgtcagcgatgagatctgtgtgcaagtaacagatctatacctggctgagaacaataacggcgctaccgggggtcagttgaacactcaaaattcaaggtctctgctcgaatcgacctatcaacgtaaagccgagcagctgatgtcagacgaaaactgctttaaactaatgttcattcaaagccaggggcaggttcaacttactatcgagctcctcgatacagaggaggagaactccgacgaccctgtggaggccgagcggtggtccgactacgtggaaagatatatgaacagcgatacaacaagcccggaattacgcgagcacctggcacagaagcctgtgtttctacctaggaatctgcggagaattcggaagtgtcagcgtggacgagaacagcaggagaaggaaggaaaggaggggaattcaaagaagactatggagaacgttgactctctggacaaacttgagtgtagatttaagcttaatagttacaaaatggtgtacgtcattaagtctgaagactacatgtataggcggacagccctcctgcgggctcaccagagccacgagagagtaagcaagaggctccaccagcggtttcaggcatgggtggataagtggacaaaagagcatgtgcctcgcgagatggcggcagagactagcaaatggttgatgggggaggggctagagggtctggtaccatgcacgacgacctgtgataccgagactcttcattttgtgtccattaacaagtatagagtgaagtatggcacagtctttaaagctccatag

SEQ ID NO: 240617 - DNA, 3822 bp, synthetic construct
  misc_feature 1..3822: note = Description of Artificial Sequence: Synthetic coding sequence
  source 1..3822: mol_type = other DNA
atgaagcgtcgccttgacgaccaagaaagtcccgtttacgcagctcagcaacgcagaatcccagggtcaaccgaagctttccctcaccagcacagggttctggctccggctccgcctgtgtacgaggccgtgtcagagacaatgcagtccgccaccggcattcagtattccgtaacaccaagttaccaggttagcgcgatgccacagagtagcgggagccacggccctgccatcgcggcagtacacagttcccatcaccaccctactgccgttcagcctcacggaggtcaggtggtacaaagccatgcacaccccgcacccccagtcgccccagtgcaggggcagcaacagtttcagaggttaaaggtagaggacgccctgtcctaccttgaccaggttaagctgcagttcggcagccaaccccaggtatacaacgactttttggatattatgaaagagttcaagtcccagtccatagacacaccaggggtaatttcacgcgtgtctcagctctttaaagggcatcctgatctgataatggggttcaacacattcttgcccccagggtataagattgaagttcagaccaatgatatggtgaatgtaaccactcccggacaggtccatcaaatccctacacacggtattcagcctcaaccacagcccccaccccagcacccctcccaacccagcgcccagtccgcgcctgccccagctcagccagctccccagcccccaccggcaaaagtttcaaaaccctcacagttgcaggcccatactcctgcttctcagcagactccacccctaccaccctatgcctctccacgttcacctccagttcagccgcacacgcctgtaaccatcagtctcggtacagcgccatctcttcagaataaccagcccgtcgagtttaatcatgccatcaactacgtaaacaaaattaaaaaccgatttcagggccagccagatatttacaaagcctttctggaaattctccacacctaccaaaaggagcagaggaatgccaaagaggccggtgggaactatacccccgcacttactgagcaggaagtctatgcgcaggttgctcgtctgttcaaaaatcaggaagatctcttgagtgagtttgggcagtttcttcccgatgcaaattcaagcgtgctgctgtctaagacaacagccgaaaaggtggatagcgtacggaacgaccacggcggtactgttaagaaaccacaactcaacaataaacctcagcgcccttcgcagaatggttgtcagattcgtcgtcaccctacagggaccacccccccagttaagaagaaacctaagctgctcaatctgaaagactcttctatggcggatgccagcaaacacggtgggggaacggaatctttgttctttgacaaggttcggaaggcgctgcggagcgcagaggcctacgagaatttcctgagatgtctggtaatcttcaatcaggaggtgatcagcagagccgagctggtgcaactggtaagcccatttctcgggaaattcccagagcttttcaactggtttaagaacttcctggggtataaagagagtgtgcatttggagacttacccaaaggaaagggccaccgaaggaatagccatggagattgactatgcttcatgtaaacggttagggtccagctatcgagccctccctaaatcttatcagcagcctaagtgtaccgggagaacgcccctgtgcaaagaagtcttaaacgatacctgggtgtcatttccatcctggtcagaagattctacttttgtttcctccaagaaaacacagtatgaggagcatatataccgatgcgaggacgagcgctttgagctggacgtcgttctcgagaccaatctggcaacgatccgcgtgctggaggcgattcagaagaagttgtctagattatctgctgaagaacaggctaaattcagactagacaataccctcggcggaacatcagaagtgatccatcgcaaggcactgcaaaggatctacgctgacaaggccgctgacataatcgacgggttgcggaaaaaccccagcatagccgttccaatagtgctaaaaaggctcaagatgaaggaagaagagtggagagaggcccagcgcggattcaacaaagtctggagggagcagaatgagaagtactacctgaaatcactcgatcaccaaggcatcaactttaagcagaacgatacgaaggtgctgaggtctaaatcacttcttaatgagatcgaatctatttatgacgagaggcaggagcaggcaacagaagaaaacgctggagtacctgtggggcctcacctgagtctggcctatgaagataaacaaattttggaggatgccgcagctcttatcatccaccacgtgaagcgtcagactggtattcagaaggaggacaagtacaagattaagcaaattatgcatcacttcatacctgacctgctatttgcccagcgcggtgacttaagcgacgtcgaggaagaagaagaagaagaaatggacgtggatgaagccacaggcgcagtgaaaaaacacaatggcgtgggtggatcccccccaaagagcaaactattgttttctaataccgccgcacagaagctcaggggcatggacgaggtatacaacctgttctatgttaataataattggtatatcttcatgagactgcaccagatcttgtgcctacggctgctgcgtatctgtagtcaggctgaaaggcagatcgaagaggaaaatagagagcgggagtgggaacgggaagtcctcggcataaaacgggacaaatctgattcaccagccatccagttgaggttgaaagaaccgatggatgtggatgtggaggattactaccccgcttttctcgacatggtgcgctccctgctggacggcaatatcgattcttcacagtatgaagacagcctgagagagatgtttacgattcatgcctacattgctttcactatggataaacttatccaaagcattgttcgccagctacagcacatcgtctcagacgagatttgcgtacaggtgaccgacctttaccttgcggaaaacaataatggggctactgggggtcagctcaacacccagaactcaagatccctgctggagagcacataccagagaaaagccgagcaacttatgagcgacgaaaattgctttaagcttatgttcatccagtcgcagggccaggtgcagctaaccatcgagttactggataccgaagaggagaacagcgatgatcctgtcgaagccgagcgttggagtgactacgtcgaaaggtacatgaattctgacaccacgtcacccgaactgcgcgagcaccttgctcaaaagccagtgtttctccccagaaacttacggagaattagaaaatgtcaaagaggacgcgaacagcaggagaaggaaggaaaggagggcaatagcaagaagaccatggaaaatgtggattcgctggataaactcgagtgtcggtttaagctgaacagctataagatggtgtacgtcatcaaatccgaagactatatgtacagacggacggccttgctacgcgctcaccagtcacacgaacgagtatccaagcgtcttcaccagaggttccaggcttgggtggacaaatggacaaaagaacatgtgccaagggagatggcagccgagacctctaaatggctgatgggggagggtctggagggactcgtcccatgcacgaccacatgtgacacagagactctacatttcgtcagtattaacaaatatagggttaagtacggcacagtgtttaaggcaccatag

SEQ ID NO: 240618 - DNA, 3822 bp, synthetic construct
  misc_feature 1..3822: note = Description of Artificial Sequence: Synthetic coding sequence
  source 1..3822: mol_type = other DNA
atgaagagacgcctcgacgaccaggaatctcccgtgtacgcggcacaacaaaggcgcatacctggatccactgaagcgttcccccatcagcatcgggttctggcgcctgctccacccgtatatgaggctgtgtcagaaacgatgcaatccgcaaccggaatacaatattctgtcaccccctcttatcaggtgtccgccatgccacaatccagcggaagccatgggcctgcaatcgccgctgtgcattcttcgcatcatcaccctaccgccgtgcagccacacggaggtcaggtcgttcagtcccatgcacacccagccccacctgtcgcgcctgtccagggtcaacagcaatttcagcgcctcaaagtcgaagatgctctttcatatttggatcaagtgaagctccagtttgggtctcagccacaggtttacaacgacttcctcgacattatgaaagagttcaaatctcagtcaatagacacccccggagtcatatctcgggtttctcagctgttcaaagggcaccccgacctgatcatgggttttaacaccttccttcctcccggatacaaaattgaggttcagactaatgatatggtcaacgtcacgacacctgggcaggtgcatcaaattccaacccatggcattcaacctcagccacagccccctcctcaacaccctagtcagccttcagcccagtccgctcccgctccggctcagccagctccccaaccccctccagcgaaggtttccaaacccagtcaactacaggcacacaccccagcctcccagcaaactcctcctctgccaccgtatgcttcacctcggtccccacctgtacaaccccacacacccgtcacaatcagtctggggaccgccccaagcctgcaaaataaccagccggttgaattcaatcatgccatcaactacgttaataaaataaaaaataggtttcagggccagcctgacatttacaaagctttcctcgagatactacacacctaccagaaagagcagaggaacgcaaaggaggccggtgggaactatactccagccctgactgaacaagaagtgtacgcacaggttgcccgtctgtttaagaatcaggaggacctcctcagcgaattcggccagttccttccagatgcgaatagcagtgtgcttctgagcaagaccaccgctgagaaagttgattctgttcgaaatgatcacggtggtacagtcaagaaaccccaactgaacaataagcctcagaggccttcgcagaatggatgtcagattcgaagacatccgacgggcacaactccacctgtgaaaaaaaagcccaagctgttgaatctcaaggatagttccatggcagatgctagtaagcatgggggaggcaccgaaagcctgttctttgataaagtcaggaaggcgctgcgaagtgcagaggcctatgagaactttctgagatgcctggttatctttaatcaggaggttatctcaagggcagaactggtccaactcgtgtctccattccttggcaagtttccagaactctttaattggtttaagaatttccttggatataaagaaagcgtgcatctggaaacatacccaaaagagcgtgcgacggagggcatcgccatggagatcgactatgcttcttgcaaaaggcttggcagttcataccgtgctctccctaagagctaccagcaaccaaagtgtaccggacggactccattgtgtaaagaagttctcaacgatacatgggtcagttttccatcttggtctgaggacagtacctttgtatcatcaaaaaagacccagtacgaagagcatatctataggtgtgaagacgagcgatttgagctcgatgtggtgttggaaacaaatttagcaaccattcgggtgcttgaagctatccagaagaagctctcaaggctgtccgctgaggagcaggccaaatttcgcctagacaacacacttgggggtacatctgaggtcattcaccggaaggctctgcagcgcatctacgcagacaaggccgctgacattatcgacggcctgaggaagaatcccagcattgccgttccgattgtgctgaaaaggctcaaaatgaaagaggaggagtggagagaggcccagcggggattcaacaaggtgtggagggagcagaatgagaagtactacctcaagtctttggatcaccaagggattaatttcaagcagaacgacacaaaggtcctgaggagcaaaagcctgctcaatgagatcgaaagtatttacgatgaacggcaggaacaggctacagaggagaacgccggtgttcctgtcggcccacatctgtccctcgcttacgaggacaaacagatactggaggatgccgctgctctgatcatccaccacgtgaagcgccagactgggatccagaaagaggataaatataaaattaagcagatcatgcaccacttcattccagatttgctctttgctcagcgcggtgacctctcggatgtggaggaagaagaggaagaagagatggacgtggatgaggcaaccggcgctgtgaaaaagcacaacggggtcgggggtagtcctcctaaatcaaagcttctctttagcaatactgccgcacagaaactccgaggaatggacgaggtgtataatctcttttacgtgaataacaattggtatattttcatgcgactacaccagatattatgcctcagactactcagaatctgctcccaggcagaaaggcagatcgaggaggaaaatagagagcgggagtgggaacgggaagtcctagggatcaagagagacaaatctgattctccagcaattcagttgagattgaaagagccgatggacgtggatgttgaagactactacccagccttcctggatatggtgcgctccctgctggacgggaatatagattcctctcagtatgaagacagcctgcgggaaatgtttactatccacgcttatatagccttcacaatggataaactgattcagtccattgtgaggcaactgcaacatattgttagcgatgagatttgcgttcaagtaacggacctttatcttgccgagaataacaacggagccacgggtgggcagcttaacactcagaattcccgcagcctcctggaatccacgtatcagagaaaagccgaacaactgatgtccgacgaaaattgcttcaagctaatgttcattcaatctcaaggccaggtgcagcttacaatcgaacttttggacactgaagaagagaactctgatgaccctgtggaggccgaaaggtggagtgattacgtggagcgctatatgaattctgacaccaccagcccagagctgagagaacatctcgcacagaagcctgtgttcctccccagaaacctgcgtcgtattcgaaagtgtcagcggggacgggaacagcaggagaaagaagggaaagagggcaactccaaaaaaacgatggagaacgtcgatagcctggataagctggagtgtagattcaagctgaattcatacaaaatggtgtatgtcatcaagtcagaggactatatgtatcgcagaacagcactcttgcgcgcacaccaaagccacgaaagagtatctaagaggctgcatcagagattccaggcatgggtcgataagtggaccaaagaacatgtccccagagagatggctgcagagacgtctaagtggttgatgggagagggactggaaggactcgtaccctgtaccacgacctgcgatacagagactctccatttcgtgtcgatcaacaaatatagggttaaatacggcacagtgttcaaggctccatag

SEQ ID NO: 240619 - DNA, 3393 bp, synthetic construct
  misc_feature 1..3393: note = Description of Artificial Sequence: Synthetic coding sequence
  source 1..3393: mol_type = other DNA
atggctcatgccggaggcggttccggtgggtccggagctggtggcccagctggtcgtggtttatcaggagctagatggggtcggagtgggagtgccggacacgagaagctgccagtgcacgtagaagacgccttgacttatctggaccaggtgaagatccgctttggctctgatccggcaacttacaatggtttcctggagatcatgaaggagttcaagtcacagtccatcgacacccctggggtcattaggcgtgtatcccaattattccatgagcaccctgatttaattgttggcttcaacgccttcttgcccttgggctacaggatagacatccccaaaaacggcaaactaaatatccagtctcccttaacttctcaggagaatagtcacaaccatggcgatggagctgaggatttcaagcagcaggtgccttacaaggaggacaagcctcaggttccactcgaaagtgactctgtggagttcaacaacgctatttcttacgttaataaaataaaaactcgattcctggaccaccccgagatttacagatctttcctagagattcttcatacttaccaaaaagaacagcttaacacaagaggaagaccattccggggaatgtcagaagaggaggtgttcaccgaagtcgctaacttgttcagaggacaggaagatctgctgagtgaatttggtcagtttcttccagaagccaaaaggtctctttttaccggaaacggaccctgtgagatgcactcagtccagaagaatgagcacgataagactccagagcacagcaggaaacggagccggccaagtctgctgcggccagtcagcgcccctgcgaagaagaagatgaagctgagggggacaaaggacttgtccattgccgcagtcgggaaatatggcactctgcaggagttcagttttttcgataaagtcagacgcgtgcttaagagccaggaggtgtacgaaaatttcctgaggtgtatcgctctcttcaatcaggagttggtgagcggaagcgaactcctccagcttgtgtcaccgttccttggaaagttccccgaactcttcgcccagtttaagagttttctgggcgtgaaagaactctcatttgcaccacctatgtcagaccgcagcggagacggaatttctcgagaaattgactatgctagttgcaaacgtatcggctcatcctacagggccctgccaaagacctaccagcagcctaaatgcagcggacggaccgccatctgcaaggaagtcttaaatgacacttgggttagcttcccatcttggtccgaggactctaccttcgtttcaagtaaaaaaacaccgtatgaggaacagttgcatcgctgtgaggacgagcgattcgagctagacgtggtgttagagactaacctcgctacaatccgcgttcttgagtccgtgcagaaaaaactgtcaagaatggctcccgaggaccaggagaagtttagactggacgactcccttggaggtacatcagaagtaattcagcgcagagccatttacagaatctacggcgacaaggctcccgaaatcatcgaatcactgaaaaaaaatcccgtgacagccgttccagtcgtgctcaaacgtctgaaagcaaaagaagaggagtggagagaagctcagcagggcttcaataaaatttggcgcgaacagtacgagaaagcttatctgaagagccttgatcaccaggcagttaactttaaacagaatgacaccaaagctcttagatcaaaatcactgctgaacgagatcgagagcgtgtatgacgagcatcaggagcaacatagtgaggggaggtctgcaccatcaagtgaaccacaccttatctttgtttacgaggaccggcaaatattggaggacgctgcagctctcattagctattatgtgaaacggcaacctgccattcaaaaagaagaccagggcacaatccaccagctcctgcaccaattcgttcccagcctgtttttctcgcaacagctggacctcggcgctagtgaggagagcgccgatgaagatcgcgatagtcctcaggggcaaacaacagatccatctgaaagaaagaaaccagcccctggaccacattccagtccaccagaggaaaaaggtgcctttggagatgcccctgccaccgaacagccgcctctgcctcctccagcacctcataaacctctggatgacgtctattccttattcttcgccaataacaattggtacttcttcctgagactgcaccagactctgtgctcacggctactcaagatctaccggcaggcccagaagcagctgctggagtacagaaccgagaaggagcgcgaaaagctgctgtgcgaggggcgacgggagaaaggcagtgaccccgctatggagctcaggctgaaacagcctagtgaagtggagttggaggaatattatcccgcatttctagatatggtccggagcctccttgaaggctccatcgaccccacacaatacgaggatactctgcgggagatgttcactatacacgcctatgtcgggtttaccatggacaagcttgttcagaatatagcacgtcagctgcaccacctcgtttctgatgatgtttgtctcaaggtggtagagctgtacctcaacgaaaaaaaacggggagccgctggcggtaacctctccagccgatgtgtgcgcgcagcccgagaaacttcctatcagtggaaagcggagcgatgtatggcagacgagaactgttttaaggtgatgtttctccagcgaaaaggtcaagtgatcatgacaattgaactgctcgatactgaagaagctcagaccgaagatcccgttgaggtccagcatttagcccgatacgttgaacaatacgtcggaacagaaggggcatcttcctcacctacggaaggctttctcctgaagccagtctttctgcaacggaatttaaaaaaattccgcaggagatggcagtcggagcaggccagggcgctgcggggagaagccagatcgtcttggaagagattggttggcgtggaaagcgcctgtgatgtcgactgccgcttcaagctgtccacacacaagatggtgtttatcgtaaattcagaagactatatgtacagaagaggaacgctctgccgcgctaagcaggtccagcctttggtgcttttgcgtcatcatcagcactttgaggagtggcactccaggtggctagaagataatgtcacggtagaagctgcttcactagttcaggactggctcatgggtgaggaggatgaagatatggttccatgtaaaactctgtgtgagactgtccatgtccacggcctcccggtgacgaggtaccgagtccaatactctcgaagaccagctagtccctag

SEQ ID NO: 240620 - DNA, 3489 bp, synthetic construct
  misc_feature 1..3489: note = Description of Artificial Sequence: Synthetic coding sequence
  source 1..3489: mol_type = other DNA
atggcacatgctgggggtgggtccgggggaagtggcgcaggagggccagccggacgcggattgtctggcgctaggtgggggaggagtggatctgccggacatgagaagctgccagttcacgttgaagacgcactgacctaccttgatcaggtgaaaattcgcttcggtagcgatccggctacttataatggattcctagaaataatgaaggagttcaagagtcagtcaatcgatacccctggcgtgatcaggcgggtaagccagctcttccacgaacatcctgatttaatcgtagggttcaacgcattcctacccctcggataccggatcgacattccaaaaaacgggaagctgaacattcagagccccttgacctcacaagagaatagtcacaaccatggcgatggagcagaagactttaagcagcaggtaccttacaaagaggacaagccgcaggttccactcgaatctgactccgtggagttcaataacgccatcagctatgtgaataaaattaagaccagattccttgaccaccctgagatctacaggagctttcttgagattctgcacacctaccagaaggaacagcttaatactcgcggtaggcccttccggggaatgagcgaagaggaagtttttaccgaagtggctaatctctttagagggcaagaagaccttctttcagaatttggccagtttctccccgaggccaagcggtcccttttcacaggaaacggaccttgcgagatgcactcggtccaaaaaaatgagcacgacaagacgccagagcacagccggaagcgcagccgcccttccttgctgagacccgtttcagcgccagccaaaaagaaaatgaaactgcggggtaccaaggatttgagtattgctgcagtcggtaagtacggaacactgcaagaattttctttctttgacaaagtgcgcagagtactaaagagccaggaagtgtatgaaaatttcctgcggtgcatcgctctattcaatcaggaactggtaagcggcagcgagctgctccagttagtgtctcccttcttagggaaatttccggaactgttcgcacagttcaagtcattcctgggggtgaaggaactgagcttcgcacctcccatgagcgacagaagcggagacgggatatcccgcgagatcgattacgcttcctgcaagaggattggaagcagttatcgtgctctgcccaagacctaccaacagcccaagtgcagcgggcgaactgcaatttgtaaagagctggaccactggaccctgctgcagggctcctggacagacgactattgtatgagcaaattcaagaacacttgctggatccccggttattccgcaggggttttgaacgatacctgggtgtcttttcccagttggtccgaagattcaaccttcgtgagttctaagaagaccccgtatgaggaacagctgcacagatgtgaagacgagcgatttgagcttgacgtggtcctggagaccaacttggccacaatccgggtgctcgaaagcgtccagaagaagctatcccgaatggctcctgaagaccaggaaaagttccggctcgatgactcactcggtgggacctcagaggtcattcagaggagagcgatatatagaatctacggtgataaggcaccagagattatcgaatcactgaagaagaaccctgttactgccgtgccagtggtgctgaaacgccttaaagccaaggaagaggagtggcgcgaagcccagcaaggcttcaataaaatatggagagaacagtacgagaaggcctacttgaagagcctggatcaccaggccgtgaattttaaacagaatgatactaaggcccttcggtctaagagtcttctaaatgaaattgagagcgtctacgatgaacaccaagagcagcatagcgaaggacgctcagcacctagtagcgaacctcacttgatctttgtctacgaggataggcagattctggaggacgcggctgccctgatctcatattacgtaaagagacagccagccatccagaaggaagatcaaggaacgatacatcagctactgcatcagtttgtcccatcactattcttctcgcagcagctcgaccttggggcttcagaagaaagcgcagatgaggaccgcgactcaccccagggacagaccaccgacccttccgagcggaagaagcctgctcccggtcctcacagctcaccccctgaagagaagggagccttcggggacgctcctgccaccgagcaaccacccctgccaccccctgctcctcataagccgctggacgacgtctactccctcttctttgctaacaacaattggtactttttccttagattgcaccagactctgtgttccaggctgctgaagatttacaggcaggcccagaaacagcttttagagtacaggacagaaaaagagagagaaaagctgttgtgcgagggacgtagggaaaaaggctccgaccctgcaatggaattgcgcctcaaacaaccatccgaggttgagctagaggaatactatcccgctttcctcgacatggtgaggagcctacttgagggaagcatcgaccccacacagtatgaggatacccttagagaaatgtttaccatacatgcttatgtcgggttcaccatggacaagctcgtgcaaaatatcgccagacagctccaccatctggtcagcgatgacgtctgccttaaggtcgtcgaactttatctcaatgaaaaaaagcgaggagccgctggtgggaatctgagttctaggtgtgtaagggctgctcgcgagacatcatatcagtggaaagcggaaaggtgcatggctgatgaaaactgcttcaaggtgatgttcctccaacggaaggggcaagtcataatgactatcgagcttctggacaccgaggaggctcaaactgaggacccagtagaagtccaacacctggctagatatgtggagcagtatgtggggaccgaaggcgcatcttcaagcccaacggaaggatttctactaaagcctgtgtttctgcagaggaatcttaaaaaattcagaaggagatggcaatcggaacaggccagagcgttgagaggggaggcaagaagctcatggaagcgtttagtcggcgtcgaatccgcctgtgacgtggattgtcgcttcaaactttctacccacaaaatggtgttcatcgtgaacagcgaggattatatgtatagacggggtaccctctgcagggcaaaacaggtgcagccactagtgctgctgcgtcaccaccagcatttcgaagaatggcactcgagatggctggaggacaacgtgactgtggaggccgctagtctcgtacaggactggctaatgggtgaggaggatgaggacatggtcccctgcaagacattgtgtgagacagtgcacgtgcacggactgcctgtgaccagatatcgggttcaatacagccggagacccgcatcaccatag

SEQ ID NO: 240621 - DNA, 3171 bp, synthetic construct
  misc_feature 1..3171: note = Description of Artificial Sequence: Synthetic coding sequence
  source 1..3171: mol_type = other DNA
atgtcatcccagcagtttcccagacttggggcaccgagtactgggctgtcacaagcccctagccagatcgcaaacagcggtagtgccggacttattaatccagccgctacagtgaacgatgagtccgggagagatagcgaggtctcagcgagggagcatatgtcttcttcctcctcgcttcagagtagggaggagaaacaagagcccgtggttgtgcggccatatcctcaggtgcagatgttatccactcatcacgccgtggcaagcgctacaccagtggcggtgacagcaccacctgcccacctgaccccagctgtacctctgtcgttcagcgagggactgatgaaacctccccctaagcccactatgccctccaggcccatagcgccagctcctccctcgacactctccctcccacccaaagtgccgggtcaggtcactgtcactatggaatcctctataccccaagcgtctgccattcctgtcgccacaattagtggacagcaggggcacccttccaacctgcaccatataatgacaacaaatgttcagatgagcatcattaggtcaaacgcccctggccctcccttgcacatcggggctagccacctacctaggggagcagccgctgctgcggttatgagctcaagtaaagtgaccacagtcctgcggccaacatcacaactgcccaatgcggcaacagcccagcctgccgtccagcatatcattcatcagcccatccaatcccggccacccgtgacaacgtccaatgcaattccacccgcagtggtggcaactgtatctgccacacgggcacagtctccagtcatcacaactactgccgcacacgccaccgactccgccctctcccgtcccactttgtctatccaacatccaccaagcgcagctatttctatccagaggcccgcacagtccagagacgtgacaactcgcatcacactaccctcacaccccgctcttggcaccccaaaacagcagcttcatacaatggctcagaaaaccatcttttctacgggtactcctgttgcggcagcaacagtggcccctatcttggccaccaataccatcccttcagcaacaaccgcagggagcgtctcccatacccaggcacccaccagcactatcgtcacaatgacagtgccatcgcattcttcacacgccacggcggtgacaacttcgaacatccccgtggccaaagtggtcccccaacagataacccatacctccccccgaatacagccggattaccctgccgaaaggagtagtctcatccccatcagtgggcaccgcgcaagcccgaacccagttgccatggagacccgttcagacaaccgtccctcagtcccagtgcagtttcagtatttcttaccaacataccccccatccgcctatccactggcggcacacacttacacccctatcaccagcagtgtgtcgacaatccgccagtacccagtgtctgcacaagccccaaacagtgcaattacggcacagacgggcgtgggcgtggcttctactgttcatctgaaccctatgcagcttatgaccgtcgacgctagccatgccaggcacatccagggaatacaacccgcaccgatctctactcagggcatccagccagcaccaatcggaacccccggtatccagcccgcacctctaggtactcagggtattcactctgcgacccccataaacacccagggactccagcccgcaccaatgggtactcagcagccacaacctgaaggaaaaacgagcgtggtgctagcagacggagccaccatagtagccaacccgatttcaaatcccttttcggctgcacccgcagcaaccaccgtggtgcagacccatagtcagtccgcaagcaccaacgctccagcccaaggttccagcccccgaccaagtattttgaggaagaaacccgcaaccgatgggatggccgtgcggaagacacttattcctccccagccaccagatgtagcttcccctagggtagaaagttccatgagatccactagcgggtctcctaggccagcgggagccaaaccaaagagcgaaatacacgtgagcatggccaccccagttaccgtttcaatggaaacggtgagcaatcagaataacgatcagcctacaattgctgtgccaccgacagcacagcagcccccacccaccatccctactatgatcgctgcggcatctccaccttcccagcctgccgtggccctaagcaccatacctggagctgttccaatcacgccccctatcacaacaattgccgcagctcccccacctagcgttacagtaggtggatccctctcttccgttttaggacctccagtgcccgagataaaggtgaaggaagaagtagagccgatggacatcatgcgacccgtgagcgctgtacctccactggcgacaaacacggtgtcccccagtctagctcttctggcgaataatcttagcatgccaacaagtgacctgcccccaggggcttcaccacgaaagaagcccaggaaacaacagcacgttatctccaccgaagagggagacatgatggagactaatagcactgacgatgagaaaagcaccgctaaatctctgctggtaaaggccgaaaaacgaaagtctcccccaaaggagtacatagacgaagagggcgtaagatacgtccctgtgcgccctaggccccctattactcttctgaggcactataggaatccttggaaagcagcctaccatcactttcagagatacagtgatgttcgcgtcaaggaggaaaagaaggccatgctgcaggagatcgccaatcaaaaaggcgtgtcctgcagggcgcaaggctggaaagtccacctttgtgcagctcaacttctgcagcttacgaacttggagcacgacgtgtacgagagattgacaaacctccaggaaggcatcatccccaagaaaaaggctgctacagatgatgacctgcaccgtataaacgaattaatccagggaaacatgcaaaggtgtaagctcgtgatggaccagatatctgaggctcgagattcaatgcttaaggttttagaccataaagaccgcgtgctgaaattgctgaacaaaaatgggactgtcaagaaggtgagcaaattgaagagaaaggaaaaggtgtag

SEQ ID NO: 240622 - DNA, 3147 bp, synthetic construct
  misc_feature 1..3147: note = Description of Artificial Sequence: Synthetic coding sequence
  source 1..3147: mol_type = other DNA
atgggccctcctcgacatcctcaggccggtgagatagaagccggtggcgcaggcggtggaagacggctacaagtggagatgtcaagtcagcagtttcctaggttgggagcccctagcacgggtttatcccaggcaccaagccagattgccaatagcggctcagctgggcttattaatccagccgctacagttaacgatgaaagcgggagagactcagaagtcagcgcaagagaacatatgagctccagctctagcctccagtcaagagaggagaaacaggagcctgtcgtcgtccggccataccctcaagtgcagatgttgtcaacccatcacgccgtcgcgagcgccaccccggtggctgttacagcaccacctgcacatctcaccccagcagttcccctcagcttcagcgagggtcttatgaagcccccacctaagccaaccatgcccagtaggcccattgcacctgcccctccctcgacacttagcctgcccccaaaggtgcctggccaggtgaccgttactatggaaagctccattccccaggccagtgctataccagtagcaacgatcagcggacagcaggggcaccccagcaacctccatcatatcatgaccactaatgtgcagatgtctatcataagaagtaacgcacctgggcctcccctccacattggggcatctcatctgcctaggggtgctgctgccgcagccgtgatgtcttcttcaaaggtgacaacagtgttacgcccaacgtctcagctgccaaatgccgctacagcacagccggcagtgcagcatattattcaccaacccatccagagccgacctcctgtgacaacttcaaacgctattcctcctgcagtggttgctacagtgtccgccaccagggcgcaatctcctgttattacgacgacagccgcacacgcaacggactctgccttatcaagacctaccctgagcatccaacacccaccctctgccgctattagtatccagcgccctgcgcagtctagagacgtcacaacccgaataaccctcccatctcatcccgcactcggcacacctaaacaacagctgcacacgatggcccaaaaaactatattctctacgggcacaccagtggctgcggcaactgtcgccccaatcctcgctacgaacacaatcccctccgctactaccgcaggctcagtgagtcacacacaagccccaacatcaactatagtgacaatgacagttccgtcccattcatcgcacgcgacagccgtgacaacctccaacattccagtcgccaaagtggtgcctcagcagatcacgcatacttcaccccgaatacagccagactacccagccgaacgatcatccctgatcccaatctcaggccaccgtgcctctcccaacccagtcgctatggaaacgcggtctgataaccggcctagcgtgccagtgcagtttcagtattttctgcctacgtacccgccaagtgcttaccccctggcagcccatacgtatacgcccattacttcctccgtgtctacgatccggcaatacccagtatccgcacaggccccaaattcagccatcacagctcaaaccggagtgggggtagcatccaccgtgcacctgaatcccatgcagcttatgactgtggacgccagccacgctcggcacattcagggaatacagccggctcctatcagtactcaggggatccagcccgcacctatcgggactccaggcattcagccggctcctctcggtacccagggcatccatagcgcaacccctatcaacacacagggactacagccggcacccatgggcacgcagcaaccgcagccagagggcaagacctcggctgtagtgttggctgacggtgcgactatcgtggcaaaccctatatccaaccccttcagcgctgcccctgcagcgaccacagtcgttcagacacatagccagtccgcttccactaacgccccagcgcaggggtcatcgccccgaccaagcatcctgcgcaagaagccggctaccgatggggctaaacccaaaagtgagatacacgtgtctatggccacgccagtgacggtgtcaatggagactgtttccaatcagaataacgaccagccaactattgctgtcccacccacagcacagcagcccccacccacaatcccaaccatgatagcagccgcatcccctccgtcccagccggcagttgctttgtctacgatcccgggagctgtaccgatcacgccaccaatcactacaattgcagccgcaccacctccgtcagtcaccgtcggcggttctttatcttcagtcctcggccctcctgtcccagagataaaagtgaaggaggaagtagaacccatggacataatgagacctgtatctgccgtgccaccgttagctactaataccgtgtccccgtccctggccctgctggctaacaacctgagtatgcccacgagcgacctcccccctggggcttcacccagaaagaaacctcgcaagcaacagcacgtgatctcaacagaggaaggtgacatgatggaaaccaatagtaccgatgacgagaaatcgaccgcaaaatcattattagtgaaggccgagaaaaggaaaagccctccgaaagagtatatcgatgaggagggcgtccggtatgtgccagtgcgtcctagaccccctatcaccctgctgcgccattatcgaaatccgtggaaggccgcatatcatcatttccagagatattctgatgttcgggttaaggaggaaaaaaaagccatgttgcaggagatcgccaatcagaaaggggtgtcctgtcgcgcacagggctggaaagtgcatttatgcgccgctcagctgttgcagcttaccaatcttgagcacgatgtgtacgaaagactcaccaatcttcaagaaggcataatcccaaagaaaaaggcagccacggacgatgacctccaccgcattaatgagttaatacaaggcaacatgcagcgttgcaagcttgtcatggatcaaatctccgaggccagagacagtatgctgaaggtgctcgaccataaagatcgggttcttaaacttctgaataagaatgggaccgttaagaaggtatcaaaactgaagcggaaggagaaagtgtag

SEQ ID NO: 240623 - DNA, 3252 bp, synthetic construct
  misc_feature 1..3252: note = Description of Artificial Sequence: Synthetic coding sequence
  source 1..3252: mol_type = other DNA
atgggaccaccaaggcatccacaggcaggcgaaatagaggcaggcggagctgggggtggtaggcggcttcaggtggagatgagttcccaacagttcccgagactgggtgccccatctaccggcttatctcaggcaccctcccaaattgctaactccggatctgctggtctaatcaatcccgctgccactgtaaatgatgaatctggaagagacagcgaggtcagcgcgcgagaacatatgtcgtcgtcttcatcgttacagagtagagaagaaaaacaggagcctgtggtggttaggccatatccacaggtgcaaatgttgtctacgcaccatgccgtggctagcgcgacccctgtggccgttaccgctccaccggcacaccttaccccagccgtccccttaagcttcagcgagggcttgatgaagccccctcccaaaccaaccatgccaagtcgcccaatcgcccctgccccaccatccaccctatcacttccaccaaaggtgcccggacaagtgactgtcacaatggagagcagtattccccaggctagtgcaatccctgtggcaacaatcagtggccagcagggccacccgtccaatcttcaccacatcatgaccaccaatgttcaaatgtctatcatcagatccaatgccccagggcctcccctccatattggagccagccatttgcccaggggagccgcagcagccgcagtcatgtcaagctccaaagtgactactgtcctccggccaaccagccagttgccgaatgccgcaactgcacagcctgccgtccagcacatcatccatcagcctattcagagccggcctcctgtaaccacctcaaacgccattcctccggcagtcgtcgccacagtttctgcgaccagagctcaatctccagtgatcaccaccacagccgctcatgcgaccgacagtgctctgtcaagaccaaccttatcgattcagcacccccctagcgccgctatttccattcaacgaccagcccagtcgagggacgtgaccacgcgcatcaccctgccctcacatccggctctcggtacgcccaagcagcagctccacaccatggctcagaagaccatcttttctaccggaacacccgtggctgctgccaccgtggccccaatcctggccacaaacaccatcccctcagccacaacagccggtagtgtttcacatactcaagctccgacaagcacaattgtcactatgactgttcccagtcattcgtcgcatgccaccgccgtcaccacatccaacattccagtagccaaagttgtcccacagcagataactcatacctcgccaaggatacagcccgattaccctgcagagagatcctccctgattcccatttccggccatcgggcatctccgaatcctgtcgccatggagacccgcagtgataacaggccatcagtccctgtgcagttccagtatttcttacccacgtacccaccatccgcatacccgttggcagcccacacatatacacccattacaagtagcgtgtctaccattaggcagtaccccgtatccgctcaggccccaaattccgccatcacagcgcagactggcgtaggggtcgcatccacagttcacctcaaccctatgcagctcatgacagtcgacgcttcgcacgctaggcatattcaaggaattcagccagcccctatcagtactcagggaatccaaccagcccctataggtacacctgggatacagcccgctcccctcggcactcaggggatccattcagccacacccatcaatacacagggactccagcccgctccaatgggcacccagcagcctcagccggagggcaagacctccgccgtggtgctcgctgatggcgcaacaatagtggccaaccccatatccaatccgttctcagcagcgccagctgctacgacagttgttcagactcattcccagtctgcctcgacaaatgctccagctcaggggtcttccccaagaccctctattctgcgcaagaagcccgctacggacggcatggcagtgcgcaagaccttaatacctccccagccccctgacgtggccagccctagggtggagtcctcaatgcgctctacctctggaagccctcggcctgcaggcgcaaagccaaagtccgagatccacgtgtcaatggctacgcctgtgaccgtgagcatggagactgtaagcaaccagaacaatgatcagcccacaattgccgtaccccctactgcacagcagccgccacctaccatcccaactatgatcgccgcagcctcgcctccttctcagcccgcagtggccttgtcgaccatcccgggagctgtgccgataaccccaccaatcactactattgccgcagcacccccaccttccgtcactgtgggcggttctctgtccagcgtgctggggccacccgtgccagagattaaggtcaaggaagaggtcgagcctatggatatcatgagacccgtaagcgctgtaccaccgctggctacaaacactgtcagcccctcattagctctgctcgccaacaacttgtctatgcccacatccgacctgccccctggcgctagtcctagaaagaagccacgcaagcaacagcatgttatcagcaccgaagagggggacatgatggaaaccaacagcaccgatgacgagaaatctaccgctaaatcactacttgtaaaggccgagaagcggaagagtcctcccaaggaatatattgatgaggagggagttcggtacgttccagtgaggcccagacccccaatcaccttgttgagacattatcggaacccatggaaggcagcctatcaccatttccaacgctactcggatgtgcgcgtcaaggaagaaaagaaagccatgttacaagagatcgcaaaccagaagggagtaagctgtcgggcacaaggttggaaggtccatctttgtgcggctcagttactgcaactgacgaatctcgagcacgacgtttatgagagacttacaaatctgcaggagggcatcattcccaagaagaaagcagctacagatgatgacctgcatcgaattaatgaacttattcaaggcaacatgcagcgttgcaagttggtcatggaccagatttccgaggcccgagattccatgctgaaggtgctcgaccacaaggaccgagtgctgaagttgcttaacaaaaacggcacggtgaagaaggtgtctaagcttaaaagaaaagagaaagtctag

SEQ ID NO: 240624 - DNA, 789 bp, synthetic construct
  misc_feature 1..789: note = Description of Artificial Sequence: Synthetic coding sequence
  source 1..789: mol_type = other DNA
atgagcagccaacagttcccacgccttggtgccccatcgaccggactgagtcaggctccttcacaaatcgccaatagcggctccgccggtttgatcaatcccgcagcaacagtaaacgatgagtccggccgagatagtgaagtttccgcccgagagcatatgtccagctctagtagcctgcagtccagggaagagaagcaggaaccagttgtggtccggccatacccccaggtgcagatgctgagcacccaccacgctgttgcttccgctacccccgtggcagtgactgcacccccagcccatctaactcctgccgtgcctttaagcttcagcgagggcctaatgaagccccctccaaaacctaccatgccaagcaggcccatagcccctgctcctccaagcacactctcactgccacctaaggtgccaggccaggttactgtgactatggaatcctcaatcccacaggccagtgccattccagtggccaccatctccggccagcagggccacccgtcaaacctgcatcacatcatgacaaccaacgtacaaatgtcaataatacggtctaacgcccctggtcccccacttcatatcggcgcatcccacttgcctcgaggcgctgccgctgcagccgtaatgagctcgtccaaagtaaccacagtattacggccaaccagtcaactgcccaacgctgcaactgcccagcctgccgtgcagcacatcatccaccaaccaatccaaagtaggcccccagttacaacatccaatgctatccccccagcttag

SEQ ID NO: 240625 - DNA, 630 bp, synthetic construct
  misc_feature 1..630: note = Description of Artificial Sequence: Synthetic coding sequence
  source 1..630: mol_type = other DNA
atgaatcccagcatgaaacagaaacaggaggagataaaagagaacataaagaattctagtgtgcccaggagaactcttaaaatgattcagcctagcgcatcaggctctctagtgggaagagaaaacgagctgtctgccggtctgtccaagagaaaacatagaaatgatcatctgacaagtaccaccagttctccaggcgtcattgtgcccgagagcagcgaaaacaagaacctcggaggggtgacccaagaatcttttgacttgatgattaaggaaaatccatcgagccagtactggaaagaggtcgcagaaaaaagaagaaaggcactctacgaggctctgaaagaaaacgagaagctgcataaggagattgaacagaaggataatgagatagcaagattgaagaaagagaataaggagctggcggaggtggcggagcatgtgcagtatatggcagagctaattgaacgattgaacggagaacctctcgataatttcgagagcttagataatcaggaatttgactctgaggaagagaccgttgaggactctctcgtggaagattctgagatcgggacttgcgctgaagggacggtgtccagtagcacagacgctaaaccttgcatttag

SEQ ID NO: 240626 - DNA, 2622 bp, synthetic construct
  misc_feature 1..2622: note = Description of Artificial Sequence: Synthetic coding sequence
  source 1..2622: mol_type = other DNA
atggccgaaatggagaaggagggacggccaccagagaataaacgatcacgtaaacccgctcacccggtcaagagagagattaacgaggagatgaagaactttgctgagaacacaatgaatgaattactcggatggtacggttatgacaaagtggagctgaaagatggagaagatattgagtttagatcataccccaccgatggagaatccaggcagcatatcagtgttctgaaggagaactcactgccgaaacctaagctgcctgaagactctgtcatttccccatataacattagcaccggatattcagggctagcgactggaaatggcctttcggattctcccgctgggtccaaggatcacggcagcgtgcctattatcgttccgctgattccgcctcctttcataaaacctcccgcagaagacgatgtgtctaatgttcagattatgtgtgcgtggtgccagaaggtgggtattaagagatattccctctccatgggaagcgaagtgaagagtttctgtagcgagaaatgtttcgccgcatgccgtagggcctacttcaagcgaaataaggccagggacgaggacgggcacgccgagaatttccctcagcaacactacgccaaggaaactccacggctagctttcaagaacaactgcgagctgctggtgtgcgattggtgcaagcacatacgccacactaaagaatatctggattttggggatggggagcggaggttacaattctgtagcgccaagtgcttgaatcagtacaaaatggatattttctataaagaaacacaagccaacctgcccgcaggcttgtgctcgaccttgcatcctcccatggaaaataaggccgagggcaccggcgtccagctgctgactccagactcatggaatatccccctcactgatgctaggcggaaagcaccttctccagtcgctacggcagggcagtcgcagggacctggcccttctgcctcaactacagtatcccctagcgacaccgctaactgtagtgtcaccaaaatacccacacccgttccgaaaagtatccctatatcagaaacccctaatatcccaccggtgagtgttcagcccccagccagcattggcccaccactcggggtgccccctagatctccccctatggttatgaccaatcgcggtccagtgcccctgcccatctttatggaacaacagatcatgcagcagataaggcccccattcattagagggcctccccatcacgcatccaatcctaatagccccttgtccaacccaatgctgccaggcattgggcctccgcctgggggtcctagaaacctcgggcctacatctagcccaatgcatagacccatgctcagtccccacattcacccaccaagcacgcccacaatgcctggtaacccccctggtctgttgccaccaccaccacccggagccccactgccctccctcccgtttccgccagtcagcatgatgcctaatgggccaatgcccgtgcctcagatgatgaattttgggttaccctctcttgctcctctcgtcccgccacccacccttctggtcccttatccggtcatagtgcctctaccggtgccgatacctataccaatcccaatcccacatgtctcagattcaaagccccctaatggatttagcagtaatggggaaaacttcatcccgaatgcccctggggattctgccgctgctggcggaaagccttccgggcactctctgtctcctcgggacagcaaacaagggtcatcgaaaagtgcagatagcccaccaggctgtagcggacaggccttatcactggcacccacccctgccgaacatggcaggtccgaagtggttgatttgaccagacgggcaggcagcccgccaggccctcctggtgctggcggacagttgggattccctggggttctgcagggacctcaggatggcgtgatcgaccttactgttggccacagggccaggctgcacaatgtgatccaccgcgctctccacgcccacgtaaaagccgagcgggaacctagtgccgctgagcggcgaacctgtgggggatgcagggatggtcactgcagtcctcccgcagccggtgatcctggcccaggagctccagcagggccagaagcagctgcggcatgcaatgtgatagtgaatggaactagaggcgctgcagctgagggagcgaagagtgcagagcctcctcccgagcagcctccacccccaccccctccagccccacccaaaaaactactgagccccgaggaacccgcagtgtctgagttggagagcgttaaagagaacaattgtgcctccaactgtcacctggatggagaagcagctaagaaattgatgggggaagaggccctggcaggcggtgacaagtcagatccgaacctaaataacccagccgatgaagaccacgcttatgctttgcggatgcttcctaagacaggatgtgtaatccaaccagtgccaaagcctgccgagaaagctgcaatggccccatgcataatctctagccccatgctgagtgcagggcctgaagacctggagcctccactgaagcggaggtgtttaaggattcgaaatcagaacaaatag

SEQ ID NO: 240627 - DNA, 1233 bp, synthetic construct
  misc_feature 1..1233: note = Description of Artificial Sequence: Synthetic coding sequence
  source 1..1233: mol_type = other DNA
atgcccggtgtgtgtgaccgggctcctgatttcctgagcccatctgaggaccaggtgctccgacccgcattggggagtagcgtggccctcaattgtactgcatgggtagtctctggtccccattgtagtctcccttccgtgcagtggctgaaagacggtctccccttaggcataggaggccactactcccttcacgaatacagttgggtgaaggccaacctcagcgaagtgctggtctcttccgttctgggggtgaacgtcacttcaactgaggtgtacggcgcattcacatgctctattcagaatatatctttttcttcttttacccttcaacgagccggacccaccagtcacgtggccgcagtgctcgcctcactcttggtactgctggcactcctgctcgcagccctgctgtacgtaaaatgtcggctgaatgtgctactgtggtaccaggacgcctatggtgaagtggagattaacgatgggaagctttatgatgcttacgtgtcctattctgactgccccgaggatcggaagtttgtcaatttcatcctgaagccacagcttgaaaggcgaagagggtataagctatttctggacgatcgcgacctgctccctcgagccgaaccctctgccgacctgttggtgaacctttcccgctgcaggcggcttatcgtggttctttctgatgctttcctgtcccgtgcatggtgctcccattccttccgtgagggtttatgtagactgctggaactgactcgcagacccatcttcattacatttgaagggcaacgtcgggatccagctcatccagcactgcgtctgctgcgacagcatcgtcacctggtgactttgctcctgtggcggcctgggtcagtgacaccctcttcagacttttggaaggaagtacagcttgccctgcctcggaaggtgcagtacagacctgtcgaaggtgatccccagacccaactgcaggacgacaaggaccccatgctgattctgcggggaagagtacccgagggccgtgcactggactcagaggtcgatccagatccagaaggggatctcggtgtgaggggtccggtgtttggcgaaccgagcgcgcctcctcacacctctggagtttcactgggcgaatctagatcctctgaagttgatgtgtccgacttgggcagccgcaactattctgcgagaaccgacttttattgcttggtgtctaaagacgacatgtag

SEQ ID NO: 240628 - DNA, 1515 bp, synthetic construct
  misc_feature 1..1515: note = Description of Artificial Sequence: Synthetic coding sequence
  source 1..1515: mol_type = other DNA
atgccgggtgtgtgtgatcgcgctccagactttcttagcccctctgaggaccaggtgttacggccagccctcggcagctccgtcgctctgaactgcacagcttgggtggtctcaggaccacactgtagcctgccaagtgtccagtggctgaaagacggacttccactaggcatcggagggcattattcgctgcatgaatattcgtgggtaaaggccaacctatcagaagtgcttgtgtcctccgttcttggggtgaatgtaacgagcacagaggtgtatggggctttcacatgtagtattcagaacatctctttctcatcattcactcttcaaagggccggacctacaagccacgttgcagcagtgttagcatcactgttagtactcctcgcgctgttgctcgccgctttactatacgtgaagtgccgcttgaacgttctgctatggtatcaggacgcatacggggaggtagaaataaacgatggaaagctctatgatgcatatgtgagctactctgactgtcccgaggataggaaatttgtgaacttcatcttgaaaccccagctcgagagaagacgcggatacaaactgtttctcgatgaccgcgatctcctcccccgtgccgagcccagcgctgacctgctggttaatctctctaggtgcaggagacttattgttgtgctgagcgacgcattcctgtcgagggcgtggtgttctcatagcttccgggaggggctctgccggctcctcgaattgacacggagacctatctttattactttcgaaggccaaagaagagatccagcccaccccgcactgagattgctgagacaacaccggcacctagtcaccctgctcctgtggaggccgggaagcgtaacaccttccagcgacttttggaaagaagttcagctggcattgccaagaaaggtgcagtataggcccgtagaaggagaccctcagacccagctgcaggatgataaagatcccatgctgattctacgcggtagggtccctgagggccgagctctggattccgaagtagaccccgaccccgagggggatctgggtatgccagcacagccgcatagtcctacaggtgaggcccaacaccgcgctgaatgggggcaggcacaaggaactggcccagggggagccccaggcgttgaggacagctccaggcatcgtgagcccctgcacggcctatgccctggtggcgctagaccgtcagtctgtctaggcacaagctgggcttcgcaagccattacagccggaggcgagcagggtcaacctctggccgttggcctgggccagggctgcggttggccccctcaggcttccagatccccacacccaagatgccctggcgcatgcttgtggagagctatttcctcaacagcacatcagtggggactcgccggacgggaaccggaacagaggtcaggcaggttggggtcacggctagccaagctccagtgtccacataggctgttgcttccaggtgttcaggggtag

SEQ ID NO: 240629 - DNA, 1233 bp, synthetic construct
  misc_feature 1..1233: note = Description of Artificial Sequence: Synthetic coding sequence
  source 1..1233: mol_type = other DNA
atgccaggcgtctgcgatcgtgcccctgattttctgtcgccgtctgaggatcaggtcctcagacccgcacttggcagcagtgtggcccttaactgcaccgcttgggtggtgtccggccctcactgttcactccctagtgtgcagtggctcaaggacgggctgcccttgggaatcggtggtcactattctctgcatgagtacagctgggtgaaggccaatctgtccgaggtgctcgtgagtagtgttctgggcgtgaacgtgacttcaaccgaggtgtacggcgctttcacctgcagcatccagaacatttctttctcaagctttacactgcagagggcaggtcctactagccatgtggccgctgtgttggctagcttgctggttctactcgcactgctgctcgccgctctgttgtacgtgaagtgtcggctgaacgtgttgctctggtatcaggatgcatatggtgaagtcgaaataaatgacggcaaattatacgacgcatatgtctcttactctgattgtcccgaggatcgcaagttcgtgaactttatcctcaagccacaactggagcggagacgaggttataagctttttctggatgacagagacttactccctagggcagaaccctctgcagaccttctcgtgaacctgagtaggtgtcggagattaatcgtcgtgttgtccgatgcattcctgagccgggcttggtgtagtcatagttttcgtgaaggcctgtgtaggctgctcgagctgaccagacgccctattttcatcacatttgagggtcagcggagggaccccgctcacccagcactacgtctgctgaggcagcataggcaccttgtgactctgttgctctggagaccaggaagcgtcaccccctcctccgatttttggaaagaagtgcagctggccctcccaaggaaggtgcagtatcgccctgttgagggggacccgcagactcaactgcaggatgacaaggaccctatgttgatattgcgcggtagagtccccgaaggcagggccctagactccgaagtggaccctgacccagagggcgacctgggtgtgagagggccagtctttggagaaccttcagctcctcctcatacatcaggtgtgtccttaggtgagagcagaagcagtgaggtagatgtgtccgacctcggaagtaggaactatagtgccaggacagatttttattgtttggtgtctaaagatgacatgtag

SEQ ID NO: 240630 - DNA, 1233 bp, synthetic construct
  misc_feature 1..1233: note = Description of Artificial Sequence: Synthetic coding sequence
  source 1..1233: mol_type = other DNA
atgcctggcgtgtgcgacagggcaccagacttcctgtctccttccgaggatcaagttctgagacctgccttagggtcatctgtggctctgaactgtactgcctgggttgtgagcgggccacattgttccttgccctcagtacagtggttgaaagatggattgcccttgggaattggcggacactattcactccacgagtattcctgggttaaggccaacctcagcgaggtgcttgttagtagtgtacttggtgtgaacgtgactagtacggaagtgtatggagcattcacgtgtagtatccagaatatttctttcagctcatttaccctgcagcgcgctggacctacatctcacgtggccgcagttctggcctctctgctcgttctactggcgctgctactcgccgctctgctgtacgtgaagtgtaggcttaatgtcctactgtggtaccaagatgcctatggcgaggtcgagatcaatgatggcaagctgtacgatgcctacgtgagctatagtgactgtccagaagaccggaagtttgtcaattttatccttaagcctcagttggagcggaggcggggttataaacttttcctggacgatcgcgatctcctaccgagagccgagccatcggccgatctgttggtaaatttatccagatgcaggcgactgatcgtcgtcctgtccgacgcctttctttccagagcctggtgtagtcactcatttagggaaggtctctgcagactgctggagcttacgcgacgaccgatattcattacctttgagggccagcgccgtgaccccgcacatcctgctctgcgcctcctgcgccagcatagacacttagtcacgcttctgttatggaggcctggttctgtgaccccatccagcgacttttggaaagaggtgcagctggctcttcctcgcaaggtacagtaccgccctgtggagggcgatccccagacccagctccaggatgacaaagaccccatgctgatcctgagaggacgcgtacccgaaggcagagcgctggacagtgaggtggaccccgatcctgagggtgatcttggagtcaggggcccagtgttcggggaacccagcgccccaccgcacaccagcggagtttcccttggtgagtccaggtccagcgaggtagatgtgagcgacctcgggagcagaaattactctgctcgaacagacttctattgtctagtgtccaaagacgacatgtag

SEQ ID NO: 240631 - DNA, 1515 bp, synthetic construct
  misc_feature 1..1515: note = Description of Artificial Sequence: Synthetic coding sequence
  source 1..1515: mol_type = other DNA
atgccaggagtgtgcgaccgggctcccgatttcttatcacccagcgaggaccaggtcctaagacccgctttggggagcagcgtggcgcttaactgcaccgcatgggtggtgtctgggccacattgttctctgcctagcgtgcaatggttgaaggacggattgccactcggcataggtgggcattacagcttgcacgagtattcttgggtcaaagccaacctgagtgaggttctggtatctagtgtactgggtgtgaacgtgaccagcacagaggtttacggcgcttttacctgctctatccagaatatcagcttcagcagtttcaccctacagcgggcaggacctacaagccatgtggccgctgtgctggccagcctgctggtcctattggcgttactcctcgcagccctgctgtacgtgaaatgtcggctcaacgtgctcctttggtatcaggacgcctacggcgaggtggaaatcaacgatggaaagctgtacgacgcttatgttagttactctgattgtcccgaggaccggaaattcgtgaattttatactgaagccacagctcgaaaggagaaggggctacaaactgtttctcgacgatagggatctgcttcccagggctgagccgtctgccgacctcctagttaatttaagccgctgccgacgtctgatcgtcgttctgagcgacgccttcctatccagggcgtggtgcagtcactcgttcagagagggcctttgcaggctgctggaattgactaggcgaccgatttttattacttttgaggggcaaaggcgcgatcccgctcaccccgctctaagattgctacgccagcaccgacatctcgttaccctcttactgtggaggcccggaagtgtaactcctagtagcgacttctggaaggaggtacagttagcgcttcctcgtaaggttcagtaccgacctgtggaaggtgacccacagacccaactacaggacgataaggatcccatgctcatccttagggggagagtgcctgagggcagagcgctggattccgaggtcgatcccgaccctgaaggagatcttgggatgcctgcccagccccatagccccaccggagaagcccagcatagggctgaatggggccaggctcaaggcaccggccctgggggtgcacccggagttgaagactcctctaggcacagggagcctttgcacgggctgtgcccgggtggagccagaccctccgtctgtctgggaaccagctgggcaagccaagcaattacagcgggtggcgagcaggggcagcctcttgctgtggggctcggccagggatgtggttggccccctcaggcttcacggtctccacacccgcgttgtcccggtgcgtgcctgtggagagcgatttcctctaccgcccaccagtggggattggctggccgagagcctgaacagaggtcgggtcggctgggcagccgtcttgcaaagctgcagtgtcctcatcggctgctgttgccaggcgtgcagggctag

SEQ ID NO: 240632 - DNA, 1107 bp, synthetic construct
  misc_feature 1..1107: note = Description of Artificial Sequence: Synthetic coding sequence
  source 1..1107: mol_type = other DNA
atgttcgcaaaagggaaagggtctgctgtcccaagcgacggacaggctagggagaaacttgccctttacgtctatgagtatctactgcacgtcggtgcccagaagagcgcacagacctttctctctgagatccgctgggagaagaatattaccctgggcgaacctcccggtttcctccattcttggtggtgcgtcttttgggatctttactgcgccgcacctgaacgccgtgacacgtgcgagcactcctccgaagctaaagctttccacgactattcagccgctgccgcacccagcccagtgcttggtaacattccccctaatgacggaatgcccggaggtccgatcccaccagggttcttccaggggcctccgggatcgcagccttccccacacgctcagccaccaccacataacccgtcgagtatgatgggcccacactctcagccaccgggaggggtaccaggaacacaacccctgctcccaaactcgatggacccgacacgccagcaaggccaccccaacatggggggttctatgcagcgtatgaatccaccacgaggcatgggcccaatgggccctgggcctcagaactacggctctgggatgcggcctccacctaatagtctgggtcctgctatgccgggtatcaatatgggccctggcgctggaaggccatggccgaaccctaacagcgctaattcgattccttattcctcatcttccccaggcacatacgtgggcccacccggaggaggagggccacctggcaccccaatcatgcctagccctgccgatagcacaaacagcagcgacaacatttatacgatgataaatcctgtaccacccggtggaagccgctcaaacttcccgatggggcctgggagcgacggacctatggggggtatgggcggtatggagcctcaccacatgaatggcagccttgggtctggagacatcgatggactccccaagaatagtccaaacaatatctctggcattagtaaccccccaggcaccccaagagatgacggcgaactgggcggaaactttctgcactcctttcaaaacgataactatagcccttctatgacaatgtccgtatag

SEQ ID NO: 240633 - DNA, 1086 bp, synthetic construct
  misc_feature 1..1086: note = Description of Artificial Sequence: Synthetic coding sequence
  source 1..1086: mol_type = other DNA
atgttcgctaagggaaagggctccgctgtgccaagcgacggacaggccagagagaaattggcgctctatgtctacgaatacctgcttcacgtgggcgcacaaaaaagcgcacaaacttttttgtctgaaatccgatgggaaaagaatattaccctgggagaacctcccggattcctgcactcctggtggtgtgtgttttgggatctctactgcgcggcacctgagcgtcgagacacttgtgaacacagctctgaggctaaggctttccacgactattccgcagccgcagcccctagccctgtcctgggcaacatcccaccgaatgacggaatgccaggcggaccgattccgccagggttcttccaacccttcatgagccctcggtatgccggaggaccccgtccgccaatacgaatgggaaaccaacctcctgggggagtgccaggaactcagcctttgcttccaaactccatggaccccaccaggcaacaaggacacccaaacatgggcggaagtatgcagcgaatgaatcctccgcgaggtatgggcccaatggggcctggtcctcagaattatggatctgggatgaggccccctcctaacagcctggggccagcgatgcccggaattaatatggggcctggggctggcaggccctggccaaaccccaacagcgcaaactctattccatattcctcctcaagcccgggaacttatgtagggccacctggtgggggaggacctcccggaacaccaatcatgccaagcccagccgacagtaccaactcttctgataacatttacaccatgattaatcctgtccccccagggggatccaggtcaaactttccaatgggaccgggaagcgacggacccatgggtggcatgggaggcatggaacctcatcacatgaatgggtctttgggctctggggatatcgacggtctcccaaagaactcgcctaacaatatttctgggataagcaacccacctggcactccccgtgacgatggggagttgggtggaaacttcctccacagctttcaaaatgacaactattccccctctatgacaatgagtgtgtag

SEQ ID NO: 240634 - DNA, 1167 bp, synthetic construct
  misc_feature 1..1167: note = Description of Artificial Sequence: Synthetic coding sequence
  source 1..1167: mol_type = other DNA
atgttcgctaaggggaagggctcagcagtgcccagcgacggccaggctcgggagaagcttgccctttacgtatacgaatatcttttacatgtgggagcacagaaaagcgctcagacctttctatcggagatcagatgggaaaagaacatcacgctgggagaaccccctggctttctgcattcctggtggtgcgtgttctgggacctttattgtgcagccccagagagaagggacacctgcgagcactctagtgaagctaaagcctttcatgactattccgctgcggctgcacctagtcccgtacttggaaacatcccgcctaacgacggcatgccaggaggaccaattcctcccggtttttttcagggaccccctggctctcagccctcgccacacgcccagcctccccctcacaatcctagcagcatgatgggacctcactctcaaccattcatgagcccgagatacgcaggcggaccacggcctccaatcaggatgggcaaccagcctcccggaggggtacctggtacccaacccctgcttcccaactccatggatcctacccgtcaacagggacaccccaacatggggggaagcatgcagaggatgaatccccctagaggaatgggacctatgggcccaggaccacagaactatggaagcggaatgagacccccacctaattcattggggccagccatgcctggaataaacatgggtccaggagctggtcggccatggcctaatcctaattctgccaactctatcccttacagcagctctagtccgggtacatacgttggaccaccaggcggaggaggacccccagggacacctatcatgcctagccccgctgatagtaccaactcatctgacaatatctatacaatgattaacccagtgcctcctggcggatcaagaagcaacttccccatggggcctggatccgatggcccaatggggggtatgggaggaatggaaccgcatcatatgaacggttcgcttgggtcaggagacattgacggtctgcctaaaaacagtccgaacaatattagcggcatctcgaacccacctggcacaccacgggacgacggtgagctcggcggtaacttcctgcactctttccaaaatgataactactctcctagcatgacaatgtcagtttag

SEQ ID NO: 240635 - DNA, 837 bp, synthetic construct
  misc_feature 1..837: note = Description of Artificial Sequence: Synthetic coding sequence
  source 1..837: mol_type = other DNA
atgccaggaggacctatacctcctggtttttttcaggggccacccggaagccaaccatcaccccacgcacagccacccccacacaatccctcatccatgatgggaccgcactcacagccgtttatgtcaccgaggtatgcgggaggcccaaggcctccgataaggatgggtaatcaaccacccggaggagtcccaggaacacaaccactgctacccaatagcatggatcccactaggcagcagggacatcctaatatggggggaagtatgcagaggatgaatccacctcggggaatgggccctatggggcctgggcctcagaactacgggagtgggatgagaccgcctccaaatagtctggggcctgccatgcccggtatcaacatgggccctggagccggtcggccttggccaaacccgaatagcgctaatagcataccatactcttccagttcacccggaacttatgtgggccctccaggaggtggtggaccacccggtacaccaattatgccatccccggctgattcaaccaactcttcagacaacatctacacaatgataaaccccgtgccccctggtggctcccgaagtaattttccaatgggccctggatcagacggacccatggggggaatgggtggtatggagccgcaccacatgaacggatctctcggtagcggcgacatcgatggcctgcccaagaattccccaaataatatcagcgggatctctaaccccccaggaacgcctagggacgacggggaactcggcggaaatttcctgcactcattccagaatgacaactactctcctagtatgacaatgtccgtctag

SEQ ID NO: 240636 - DNA, 471 bp, synthetic construct
  misc_feature 1..471: note = Description of Artificial Sequence: Synthetic coding sequence
  source 1..471: mol_type = other DNA
cccccaggcggagttcctggaacccaacccttactccctaattccatggaccctaccagacagcaggggcaccctaacatgggagggagcatgcagcgcatgaatcctccgagggggatgggcccaatggggcctggccctcaaaactacggatcaggtatgcggcctccgcctaactcactggggccagccatgccgggtataaatatgggacccggagctgggaggccatggcctaacccgaattcagcaaattcgatcccatatagcagtagctctcccggaacctacgtgggtcctcctggaggaggcggtcccccaggtaccccaataatgccttctcccgctgacagcacaaactcctcagacaacatttacaccatgataaatcccgtccctcccggagggtcaaggagtaatgtgtccttgctgagcaacaacctccacatccgtcaccataacaagagctag

SEQ ID NO: 240637 - DNA, 1158 bp, synthetic construct
  misc_feature 1..1158: note = Description of Artificial Sequence: Synthetic coding sequence
  source 1..1158: mol_type = other DNA
atgtacgccaaggggggaaaaggctctgcagtgccatccgactcccaggcgagagagaaactggccctctatgtgtatgagtatttgctccatattggcgcacagaaatcagcacaaacatttctctccgagattaggtgggaaaaaaacatcactctcggtgagcctccaggcttcttacactcttggtggtgtgtgttctgggatctttactgtgcagcaccagacaggcgggaggcatgcgaacactcaggagaggccaaggcttttcaggactactcagctgccgcagccccatcccccgtcatgggtagtatggcgcctggggataccatggccgcagggagcatggccgctggatttttccagggaccccctggctcccaaccgtctccccataacccaaacgcacctatgatgggaccacacgggcaaccattcatgtcccctcgcttccctggcggacctagacctactctgagaatgccatctcagccacccgctggcttgcccggttcccaaccccttctgccaggcgcaatggaaccctctccacgcgctcagggtcaccccagcatggggggtcccatgcagcgagttactccacccagagggatggcctcggtcgggccacagtcctacggcggaggaatgagaccaccacctaactctttggcgggacctggcctgcccgctatgaatatgggacctggcgtcagagggccatgggcatccccttctgggaactctataccttactccagcagctccccaggcagctacacaggccctcccggtggcggtggccctccaggtaccccaataatgccttcaccaggtgacagcaccaattctagtgaaaatatgtacaccatcatgaatcccataggtcagggggctggccgagctaactttcctttgggcccaggccctgagggtcctatggccgctatgtctgccatggaaccccaccatgtcaatgggagtcttggaagtggcgacatggatggtctgcctaagtcatcgccgggagcagtcgcaggtctctcaaacgcacctgggacaccaagagatgacggcgaaatggccgctgctggcacctttcttcacccattcccctccgaatcctactctccgggtatgacaatgtctgtttag

SEQ ID NO: 240638 - DNA, 1092 bp, synthetic construct
  misc_feature 1..1092: note = Description of Artificial Sequence: Synthetic coding sequence
  source 1..1092: mol_type = other DNA
atgtacgcaaaaggcggaaaaggatcggcagtaccttctgacagtcaagcccgtgagaagctggcactttacgtgtacgaatacctactgcatatcggggctcagaaaagcgcacaaactttcttgagcgagattcgctgggagaaaaacatcacactgggagagccacctggctttttgcacagctggtggtgtgtgttttgggacctctattgcgcagcacctgatcggagggaggcctgtgagcactccggcgaggctaaggcatttcaggattactccgctgccgctgctccgagtcctgttatgggatctatggcacccggtgataccatggctgctgggtccatggctgccggttttttccagcctttcatgagtccccgattccccggaggacccaggccgactcttcgcatgccctctcagccccctgccggtcttccaggctctcagccactacttccaggagctatggagccctctcctcgcgcacaagggcatccctccatgggaggacccatgcagagagtgacccctccaagaggtatggcatcagtcgggcctcagtcctacgggggtggaatgcgacctccaccaaactctctggccggacccggactgccggcaatgaacatgggccctggtgtgcgtgggccatgggcttcaccctccggcaactctatcccttattcatcatcgagtccagggagctacactggccctccaggcggtggtggtccccctggaacacctatcatgccaagtcctggcgattccactaattctagcgaaaacatgtatactattatgaaccctattggacaaggcgctggtcgagctaactttcccctgggccctggaccagaaggcccaatggcggctatgagtgccatggagcctcaccatgtcaatggcagtttaggctctggggacatggacggcctccccaaaagctctccgggagccgtcgctggattgagcaacgcccctggcactccccgagacgacggcgagatggccgcagccggaactttccttcacccttttccatcagagtcctacagccccggtatgactatgtctgtttag

SEQ ID NO: 240639 - DNA, 2301 bp, synthetic construct
  misc_feature 1..2301: note = Description of Artificial Sequence: Synthetic coding sequence
  source 1..2301: mol_type = other DNA
atgaaggagaagtccaagaatgcagcacgcactagacgcgagaaggaaaactccgaattttatgagttggccaagttactgcccctgccttcagcaattacaagtcaactcgacaaggcttcaattatccgcctcaccacctcctatctgaagatgcgggtggtgttccctgaggggctgggtgaagcttgggggcatagctccaggacgtccccattagacaacgttgggagagagctcggttctcatctgcttcaaaccttggacggatttattttcgtcgtggcccctgacgggaagattatgtacatctccgaaacagcgtcagtgcatttagggctgagccaggtagaactgaccggcaattcaatctatgagtatatccaccccgcagaccacgacgagatgaccgcagtcttgaccgctcaccagccataccacagccatttcgtccaggaatatgaaatcgaacgatcttttttcttacgcatgaagtgtgtactggccaagaggaacgctggtcttacctgcggcggatataaagtaatccactgctccggctatctgaagataagacaatactcgcttgatatgagcccatttgacgggtgctaccaaaacgtgggactggtagctgttggccattcgctgccaccgtctgctgttacggagattaaactgcactccaacatgtttatgttcagggccagcctggacatgaagctcatcttcctggactcgcgcgtggccgaactaaccgggtacgagcctcaggacctgattgagaagaccctatatcatcacgtgcacggttgtgatacattccacctgcggtgtgcacatcatttattgctcgtgaaaggacaggtgaccaccaagtattatagattcttggcaaaacacggaggatgggtgtgggtccagtcctacgcgacaatcgtccacaactcgcgcagtagccgacctcactgtatagtgtctgttaattacgttctgaccgacaccgaatacaaagggctgcagctcagtctagaccagatcagcgcgtctaaaccagctttctcttatacaagcagctccacgcccaccatgactgacaatagaaaaggtgccaaatctagactgtcttcttctaaatccaaatcaaggactagtccctatcctcaatactctggctttcacaccgaacggagcgagtcagaccatgatagccaatggggaggctcccccttgacagataccgcaagcccccagctgctcgatcctgccgacagacctgggagccaacacgatgctagttgtgcttacagacagttcagcgacagaagcagtctgtgctacggcttcgcacttgatcatagtagattggtggaggaaagacatttccatacacaggcttgtgagggcggacgttgcgaggccggaagatacttcctaggaacccctcaggcaggacgcgaaccctggtggggctctcgtgcagcgctgcctttaacaaaggcgtcccccgagagcagagaggcctacgaaaacagtatgcctcacatcgctagcgtgcatcgtatacacgggaggggtcactgggacgaggatagcgtcgttagcagccctgatccgggttccgcttcagaatctggtgaccggtacagaactgagcagtatcagtcctctccccacgagccttccaagatcgaaaccctgatacgagctactcagcaaatgatcaaggaagaggaaaaccgcctgcagctcagaaaggctcccagtgatcaactcgccagcatcaatggagccggaaagaagcactcattgtgcttcgcaaattatcagcagcctcccccaaccggagaagtgtgccacggatccgcactggcaaatacaagcccttgcgatcatattcagcagagagaaggaaagatgctgtctccacatgaaaatgactacgataactctcctactgcactatcccgaatctcctctcctaatagcgacagaatctccaagagttcccttatcctcgcaaaggactacctgcatagtgacatttcaccacaccaaaccgcaggagaccaccctactgtgagtcccaattgttttggctctcatcgacagtacttcgacaaacacgcttatacgttaaccggctatgcactcgagcacctgtacgactctgaaactattaggaactacagcctgggatgtaacggttcccactttgacgtgacttcccaccttcggatgcagcccgaccctgctcagggccacaaagggacaagtgtgattattacaaatggcagttag

SEQ ID NO: 240640 - DNA, 2301 bp, synthetic construct
  misc_feature 1..2301: note = Description of Artificial Sequence: Synthetic coding sequence
  source 1..2301: mol_type = other DNA
atgaaggaaaaatcgaagaacgccgctaggacgaggagggaaaaggaaaactccgaattttatgagctggccaagctactgccgctgccaagcgccatcacaagccagctggataaggcctcaatcatccggctcaccacatcatatctgaagatgcgcgtggtgttccctgagggactcggcgaggcctggggccatagtagcaggacctcacccctagacaacgtcggaagagaactcggatcacatttgttgcagacattggacggtttcatctttgtggtggcacccgatggcaagatcatgtatatatccgaaacagccagcgtccatctgggcctgagccaggtggagcttacaggcaactctatatatgagtatattcatcccgctgatcacgacgaaatgactgcagttctgactgcccaccagccttatcacagtcacttcgtacaagaatatgaaattgagcgtagtttcttcctcaggatgaagtgtgttctagcgaaaagaaatgcaggactgacctgcggaggttataaagttatccattgtagtggatatttgaagattaggcagtactccctggacatgagcccttttgatggatgttaccagaatgtgggcctggtcgcagtcggacactccttaccgccatcagccgtgactgaaatcaaacttcactctaacatgtttatgttccgcgcatctctagacatgaagctgattttcctggactcgcgggtggccgaactcacagggtatgagcctcaagatctcatagagaagactctctaccaccatgtgcacggatgtgacaccttccatctccgatgcgcacaccatctgctactggtaaaaggacaagtaactaccaagtattaccgctttctggctaaacacggcggttgggtttgggtgcaatcttacgcaacaatcgttcataacagtcggtcttcccgtccccattgcatcgttagtgtcaattacgtcctaacagacactgaatataaggggttacaattgagcctcgatcaaatcagcgctagcaaacctgccttctcatacaccagctcatctacccccacaatgacggataatcgcaagggagctaagtctaggctgtcaagctccaagtcaaaaagtcggactagtccctacccccagtattctggcttccatacggagaggagcgaaagtgaccatgacagtcaatggggcggttcacctctgactgatacagcctcaccgcagctacttgatccagccgaccggccaggctctcaacacgatgcatcgtgtgcctaccgtcagttctcagatcgttcctcactgtgttatgggttcgccctagaccattcccgcctggtggaggaaaggcactttcacacacaggcttgcgagggtggccgatgcgaggctgggagatattttctgggcacaccgcaggccggtagggagccatggtgggggagtcgcgctgcattgcctcttacaaaggctagccctgaaagccgcgaagcttatgagaactctatgcctcatatcgctagcgtccaccgaatccatggcagaggccactgggacgaagattcagtggtgagcagccctgacccaggctcagctagcgagtccggagatagatacagaactgagcagtatcagtctagcccccacgagcctagcaagatagagactttgattcgtgctactcagcagatgattaaagaggaagaaaacagactgcagttaagaaaggccccaagtgaccagctggcctcgatcaatggcgcagggaaaaagcactcattgtgttttgccaactaccagcagcctcctccaaccggcgaggtctgccatgggtcagcactggccaataccagcccttgcgaccacatccagcagcgtgagggtaaaatgctgtctccacacgagaacgattacgacaattcacctaccgctctgtctcgcatcagctcacccaattccgacagaatctctaagagcagcctgatcctggctaaggattacctgcactctgacatttcacctcatcagactgcaggtgatcatccaactgtgagcccaaactgttttggaagtcaccggcagtatttcgataaacatgcctatactcttaccgggtacgccctcgaacacctctatgactcagagaccatcaggaattattcactcggatgtaacggctcgcatttcgatgtcacttctcatctgcgaatgcaacctgaccccgcacaaggccacaaggggacaagtgttatcatcaccaatggctcctag

SEQ ID NO: 240641 - DNA, 2004 bp, synthetic construct
  misc_feature 1..2004: note = Description of Artificial Sequence: Synthetic coding sequence
  source 1..2004: mol_type = other DNA
atgaaagagaaaagcaagaatgctgctaaaactcgcagggagaaggagaacggtgaattttacgagctcgccaaacttttgccactgccttccgctattacgtcccagctagataaagcctcaataatccgcctaaccacctcttacctcaaaatgcgcgcagtttttcctgaaggcctcggcgacgcctggggtcagccaagtagggcagggcctctcgacggagtggcaaaggagctgggatcacatctcctccagacactggatggcttcgtgttcgtagtcgccagcgatggtaagatcatgtacatttccgaaacggcctcagtccacctgggcctcagtcaggtggaactgactgggaattccatttatgagtacattcacccatccgatcacgatgagatgactgcagtactcaccgcacaccaacccctccatcaccatttgctccaggagtacgagatcgagaggtctttctttttgaggatgaaatgcgtccttgccaaaaggaacgccggactcacatgcagtgggtacaaggttatccattgtagtggctatcttaaaattcggcaatatatgctcgatatgtctttgtatgactcttgctaccagatcgtcgggctggttgctgtcggccagagccttcctccgagcgcaattactgaaattaagttgtactctaatatgtttatgtttagggctagtttggacctgaagttgatctttctggattcgcgggtcacagaggtcacaggatacgagccccaagacctcattgagaaaacactttatcatcatgtacacggctgcgacgtattccacttgaggtatgcccatcacctcctgctggtaaaaggccaagtcacgacaaagtactacagattgctgtccaagagaggaggctgggtgtgggtccaatcatacgcaacagtggtgcataatagtagatcgtcgcgtccacactgtatcgtgtctgtgaactacgtactgaccgagatagagtacaaggaactccaattgtccctggagcaggtgagcacagccaaatcccaggactcatggcggaccgcactgtctacaagccaggagaccaggaaacttgtcaagcctaaaaacactaagatgaagacaaagctccgaaccaacccttatcctcctcagcaatattcaagttttcagatggacaagctggaatgcggccagctagggaattggcgggcaagtcctcctgcctccgcggctgcccctcctgagctacagcctcatagcgagtcctcagacttattatataccccgagctactcattacccttctcttaccactatggccattttcccttggactctcatgtttttagctctaagaaacccatgttgcctgcaaagtttggccagccacagggatctccctgcgaggtggcgagatttttcctgagtacacttcccgcttcaggagagtgtcagtggcattatgccaaccccctggtgccgagctccagtagcccagcgaagaaccctccagaacccccagccaacactgctcggcattcacttgtgccctcctacgaggcacccgcagccgcagtgagaaggtttggtgaggacaccgctcccccatcatttccatcatgtggacactaccgcgaggaacctgcactagggccagctaaagccgctcgccaggctgcgcgagatggcgctcggctcgctctggctagagcggctccggagtgctgtgcacccccaactccagaagcccctggagctcctgcacagctcccctttgtcctattaaattatcacagggtgctcgcccgtcgcggaccactgggaggggcagcacccgcagctagcggcctggcgtgcgcccctgggggtccggaagcagcgactggggcactaagactcaggcacccatctccagcggctaccagcccacctggtgcaccattaccacattatctcggcgctagtgtcattatcacgaacgggcgatag

SEQ ID NO: 240642 - DNA, 1713 bp, synthetic construct
  misc_feature 1..1713: note = Description of Artificial Sequence: Synthetic coding sequence
  source 1..1713: mol_type = other DNA
atgaaagaaaagagcaagaacgccgctaagacacggagggagaaggagaacggggagttctacgagctggctaagctgctccccctgccctccgctataacaagccaactggacaaggcgtctattatcagactcacaacaagctacctgaagatgagggcggtattccctgagggcttgggagacgcttggggtcagccgtcccgtgctggccctctcgatggagttgctaaggagcttggatcacatcttctccagacgcttgacggctttgtgttcgtggtggcctccgacggaaagatcatgtacattagcgaaacggcaagcgttcacctggggctgtctcaggtcgagctgaccggcaatagtatctacgaatacattcaccctagtgaccacgacgaaatgacagccgtgttaaccgcccaccagccactccatcatcacctgcttcaagaatatgaaatcgagcgtagtttctttttgcgcatgaaatgcgtgctggcgaagcggaacgctggtttgacatgttctggttacaaggtgatccattgtagtggatacttaaagatccgtcagtatatgctcgatatgtcactgtacgacagctgctatcagatcgtgggcttggtcgccgtcggacagagcctccccccatctgcaatcaccgagatcaaattgtatagtaacatgtttatgttcagggcttctctcgacttgaaactgatttttcttgatagtcgggtcaccgaggttacggggtacgaacctcaggatctgattgagaagactttgtaccatcacgtccatgggtgtgatgtttttcatctccgctacgcccaccatctactgctcgtcaagggacaggtcacaaccaaatactatcgactgctgtctaagcgcggtggttgggtatgggtgcagtcctacgccacagttgttcacaatagccgaagttcacggcctcactgcattgtatccgtgaattacgtactgaccgaaatagagtataaggagctccagctgagcctcgaacaagtctctacagcaaagagccaggatagctggcgcaccgccctctccaccagtcaggagactcggaaactcgtgaaaccgaagaacaccaagatgaagactaaattgagaaccaacccataccccccacaacagtactcgtcattccaaatggataagctggaatgtggacagctgggcaattggagagcctcacccccagccagcgctgccgctcctcctgaactgcagccccactctgaatcatctgatctgctgtacactccgtcctactctctacctttttcgtatcattacggccactttccactggatagtcacgtgttttcctccaagaagcctatgctgcctgccaaattcggccagcctcaaggttctccctgcgaagtggcaaggttctttctttccaccctacccgcttctggcgagtgccagtggcactacgcaaaccccttagtgccctctagctcctctcctgcgaagaacccgcctgagccaccagcaaacaccgctcgtcactctctcgtccccagctacgagggagggagcggcctgcttgtcggtaaggtgggagggctgcggaccgccggtagcaggtcctctcatggtgggggatggcagatggaaactgagccttcccgattcgggcagacctgcccactctccgcctccaagtag

SEQ ID NO: 240643 - DNA, 447 bp, synthetic construct
  misc_feature 1..447: note = Description of Artificial Sequence: Synthetic coding sequence
  source 1..447: mol_type = other DNA
atgtttcgacgtccagttctgcaggtgctgcgccagtttgttagacacgaatctgagaccaccactagcctggtcctggagagatcactgaacagggtgcacttattgggcagggtgggccaagaccccgtgttgcgccaagttgaaggtaaaaatcccgttacaatcttttcccttgccacgaatgaaatgtggcggtctggtgattctgaagtgtaccaactgggagacgtttcgcagaagacgacatggcatagaataagcgtattcaggcctggacttcgggatgtggcttatcaatacgttaagaaagggagcagaatctatttggagggcaaaatagattacggcgagtatatggacaagaacaacgtcagacgccaggctaccaccatcatcgctgataatattatctttctgtccgatcagacaaaggagaaggaatag

SEQ ID NO: 240644 - DNA, 366 bp, synthetic construct
  misc_feature 1..366: note = Description of Artificial Sequence: Synthetic coding sequence
  source 1..366: mol_type = other DNA
atgttccgcagacccgtgctgcaagtcctgagacagttcgtgcgccatgaatctgaaacaacaaccagcctagtgttagaaagatcacttaatagagtgcatcttttaggacgcgtgggccaggatccagtcctacgccaggttgaggggaaaaacccggtcacaatatttagcttagccactaatgagatgtggagaagtggcgattccgaagtgtatcagttaggtgacgtgtcacaaaagacaacatggcaccgaatatcagtgttccgcccagggctgagagatgttgcgtatcagtacgtgaaaaaaggcagccgcatatacttagagggcaaaatagattacggtgagtacatggactag

SEQ ID NO: 240645 - DNA, 447 bp, synthetic construct
  misc_feature 1..447: note = Description of Artificial Sequence: Synthetic coding sequence
  source 1..447: mol_type = other DNA
atgttccggagacccgtcttacaggttctgcgacagttcgttcgacatgaaagcgagactaccacttccttagtgctggagcgatcattaaaccgcgtgcacctgctcggacgggtggggcaagaccctgttctgcgtcaagttgaggggaagaacccagttaccatattttcactggctactaatgagatgtggagatcaggtgatagcgaggtgtaccagctgggggacgtgtcacagaagaccacatggcatagaatctctgtgtttagacccggactgcgcgatgtcgcctatcagtacgtcaaaaagggctctcggatatacctcgagggtaaaattgactacggcgaatacatggataaaaacaacgtgcgccgtcaggcaacaaccatcattgccgacaatataatcttccttagcgatcagactaaggagaaagagtag

SEQ ID NO: 240646 - DNA, 408 bp, synthetic construct
  misc_feature 1..408: note = Description of Artificial Sequence: Synthetic coding sequence
  source 1..408: mol_type = other DNA
atgtttcggagaccagtgttgcaggtccttcggcagttcgtgcgacatgaatctgagactacaaccagcctggtgctggagcgaagtctgaaccgggttcatctcctcggacgcgtggggcaggaccccgtgttacggcaggttgagggaaaaaatccagtaactattttttcacttgctacaaatgagatgtggcgatccggcgactccgaggtctaccagctcggagatgtctcacaaaagacaacttggcataggatatccgtgttccgtcccggtctgcgcgatgttgcctatcaatacgtgaagaagggatcacgtatttatctagagggcaaaatagattacggggagtacatggataaaaacaatgtgcgcaggcaggctaccacgattattgctgactag

SEQ ID NO: 240647 - DNA, 87 bp, synthetic construct
  misc_feature 1..87: note = Description of Artificial Sequence: Synthetic coding sequence
  source 1..87: mol_type = other DNA
atgttcagacgtccagttctgcaggtgctccgccagttcgtaagacacgaaagcgaaaccacaacgtcactcgttctggagcggtag

SEQ ID NO: 240648 - DNA, 447 bp, synthetic construct
  misc_feature 1..447: note = Description of Artificial Sequence: Synthetic coding sequence
  source 1..447: mol_type = other DNA
atgttccgtcggccagtcttacaggtgctgaggcagtttgttcgccatgagtctgagactaccacgagtctcgtactcgagcgttcactgaatcgggtgcatctgctcggcagggtgggacaggatccagtgcttcgccaggtcgaagggaagaacccagtgacaatcttttctctggcaactaatgagatgtggaggtcaggggactcagaggtttaccaactgggtgacgtgagccagaagactacctggcaccgtatcagtgtgttccgtcctggcctcagagacgtggcttaccaatacgtgaagaagggctcccggatttacctagagggtaagatcgactacggggagtacatggataaaaacaacgtgcggcgtcaggctaccaccatcattgctgacaacattattttcctcagtgatcagacaaaagagaaggagtag

SEQ ID NO: 240649 - DNA, 447 bp, synthetic construct
  misc_feature 1..447: note = Description of Artificial Sequence: Synthetic coding sequence
  source 1..447: mol_type = other DNA
atgttcaggcggcctgtactgcaagtcttacgccagttcgttcgacacgagagtgaaactaccacatctctggtgctggagcgctccctgaatagagtccacctgttggggagggtaggacaggatcctgtactgagacaggtagagggcaaaaaccctgtgactatattcagcctcgctacaaatgagatgtggagatccggggactcagaggtgtatcagttgggtgacgtgagccagaaaacgacctggcatcgcatcagtgtttttcgaccaggcctccgcgacgttgcctatcagtacgtaaaaaagggatcccgaatttacttggaggggaagatcgactatggggagtacatggacaaaaacaacgtgaggagacaggctacaaccatcattgccgacaacatcattttcctaagcgaccaaacaaaggaaaaggaatag

SEQ ID NO: 240650 - DNA, 447 bp, synthetic construct
  misc_feature 1..447: note = Description of Artificial Sequence: Synthetic coding sequence
  source 1..447: mol_type = other DNA
atgttcagacggcctgtgctccaagttctgcgacagttcgtgagacacgaatctgaaaccacgacgtccctagtcctcgaacggtccttgaatcgggtgcacctgctggggagggttggtcaggacccagtacttaggcaagtggaggggaaaaatcccgtaaccattttcagcctcgctaccaacgagatgtggcgttccggggacagcgaagtgtaccagttgggggacgtttcccaaaagacgacatggcaccgaatatctgtgttcagacccggattgcgcgacgtggcttaccagtatgtgaagaagggcagcaggatatatctggagggtaaaatcgactacggtgaatacatggacaaaaataatgttcggaggcaggcaacaacaatcatcgctgataacattatttttctcagcgatcagacaaaggagaaggagtag

SEQ ID NO: 240651 - DNA, 1086 bp, synthetic construct
  misc_feature 1..1086: note = Description of Artificial Sequence: Synthetic coding sequence
  source 1..1086: mol_type = other DNA
atgtacggaaaaggaaaaagcaactcatccgcagtgccttctgactcacaggcccgagaaaaacttgccctgtacgtatacgaatatctcctgcatgtcggtgctcagaagtctgcccagacatttctgtctgagatccggtgggaaaaaaacataacgcttggggagcctcctggcttcctgcatagttggtggtgcgtgttctgggacctgtattgtgccgctcccgagaggagggaaacgtgcgagcatagcagcgaggccaaggccttccacgactacagcgctgctgccgcaccatcaccagtcctgggtaatattcctcccggagatggaatgcctgtgggtccagtgccccctggcttcttccagcccttcatgtctcctcgataccccggaggccctagaccaccccttagaatcccaaaccaagcccttgggggtgtacccggttctcagccattgctccctagcggcatggatccaacccgccagcagggccacccgaatatgggcggtcctatgcagcggatgacgcctcccagagggatggtgccactgggacctcagaattatggtggagctatgcggcctcccctgaatgcacttggaggaccgggtatgcctggcatgaacatgggtcccggtggcggaagaccttggcctaacccaacaaatgccaactctatcccttacagttccgcctcccccggaaattacgtaggcccacccggaggaggaggacctccaggtacccccattatgcccagtccagcagactctaccaattcaggcgataatatgtataccctgatgaatgccgtgccccctggacctaatcgaccaaacttccccatgggcccaggctctgacgggcctatgggtggtttgggtggaatggagagtcaccatatgaatgggagcctgggatcgggtgatatggattcaatttctaagaacagtcccaacaacatgagcttatcaaaccagcctggcacccctcgcgatgacggagagatgggaggtaatttccttaacccgttccagagcgaatcttactcaccatccatgacaatgagtgtgtag

SEQ ID NO: 240652 - DNA, 945 bp, synthetic construct
  misc_feature 1..945: note = Description of Artificial Sequence: Synthetic coding sequence
  source 1..945: mol_type = other DNA
atgggcaaaaatatcacgttgggcgaaccacctggattcctccactcttggtggtgcgtgttctgggacctttattgtgcagccccagagcgcagagagacttgcgaacactctagcgaagcaaaggcctttcacgactactcggccgctgcggcaccctctcccgtcctggggaacattcccccaggcgacggtatgcctgtggggccagtgcccccaggatttttccaaccatttatgtctcctcggtatcccggaggacctaggcctccactccgtatcccgaatcaagcactcggaggggtgcctggtagtcagcccctgctcccaagtggcatggacccaacacgacaacaagggcaccctaacatgggtggacccatgcaacgcatgaccccacctagaggcatggtgcccttgggtccccagaactatggaggggctatgcgaccacctttaaacgctctgggcggtccgggtatgcctggtatgaatatgggtcccggaggcggtcgtccgtggccaaatccgaccaatgccaattcaatcccctattcttccgcttcaccgggaaactacgttggaccccctggtggtggtggccctcccggtacaccaattatgcccagccccgctgactccacaaactcaggggataatatgtacacccttatgaatgctgttcccccaggtcccaatcgccctaatttccccatggggcctggttctgatggacctatgggcggattgggaggtatggaaagccaccacatgaatgggtctcttggtagcggggatatggacagcatctcaaaaaattctccaaataatatgagcctctcaaaccagcctggcaccccacgagatgacggagagatgggcggaaacttcttgaatccttttcaatctgagtcgtacagtccatccatgacaatgagtgtctag

SEQ ID NO: 240653 - DNA, 1026 bp, synthetic construct
  misc_feature 1..1026: note = Description of Artificial Sequence: Synthetic coding sequence
  source 1..1026: mol_type = other DNA
atgtatggaaagggaaaaagcaatagcagtgccgttccatctgacagtcaggcaagggaaaaactggcattgtacgtctacgagtacctcttacatgtgggcgctcagaagagtgctcagacctttctctctgagatcaggtgggaaaaaaacattacattgggcgaacccccaggattccttcacagctggtggtgtgtgttttgggatctgtattgtgccgctcccgagcgtagggagacttgtgagcactcgtctgaagccaaggcattccatgactattctgccgctgccgctccatccccagtgttgggtaatattcctcccggtgacggcatgcctgtgggtcccgtaccacccggattctttcaggccctggggggtgtcccagggtctcagcctctgcttccgagcggcatggacccaacccggcagcagggccacccaaacatgggaggaccaatgcagcggatgacaccccctcgcggaatggtccctctggggccacagaattatgggggagccatgcggccaccactcaacgccctaggtggccctggcatgcccggaatgaatatggggccaggcggtggcagaccatggcccaacccaactaacgcgaacagcattccctactcctcagcgtcccccggaaactatgttggacccccaggcggaggaggcccacctggcacacccatcatgccctcacccgcagacagtaccaatagcggggataatatgtatacattgatgaatgcagtccctcctggtcctaatcgccctaactttcccatgggaccagggagcgatggacccatgggaggcctagggggaatggagagtcaccacatgaacgggtccctcggaagtggcgatatggattcaatctccaagaactcacccaacaacatgtctctgtctaatcaaccaggtacgcccagggacgatggagaaatggggggtaacttcctgaatccattccagagcgagagctattcccccagtatgacaatgtctgtgtag

SEQ ID NO: 240654 - DNA, 1200 bp, synthetic construct
  misc_feature 1..1200: note = Description of Artificial Sequence: Synthetic coding sequence
  source 1..1200: mol_type = other DNA
atggcattttggggatggagggctgctgctgcgctgcgcctgtggggcagagtggttgaacgcgtggaagccggagggggagtgggccctttccaggcgtgcgggtgcagactagtgctgggcggtcgagacgatgttagtgccggactgcgtgggtctcatggggctcggggagaacctctggaccccgctcgcccactccagcggcctcctagaccagaggtgccccgagcttttcgacggcaacctagagcggctgcccctagctttttttttagctcaattaaaggtggcaggcggtccatctcattcagcgtgggggcatcctctgtggtcggcagtggcggtagtagcgacaagggcaagctgtctctgcaggatgtggcggaactgatccgcgcacgggcatgccagagagtcgtcgtcatggtgggggcaggtatcagtactccttccggcatccctgacttccgcagccctgggagcggcctgtattccaatcttcaacagtacgatctgccttatcctgaagccatttttgagctgccctttttttttcataaccccaaaccttttttcactcttgcaaaagaactgtatccaggtaattataaacctaacgtgacccactatttcctgaggctgctccacgacaaaggactcctgctccgcctgtacacacaaaacatcgatgggctcgagagggtcagtgggatccccgctagtaaactcgtagaggctcacggaacttttgcttccgccacatgtaccgtgtgccaacggcctttccctggagaggacatcagggcagacgtcatggctgacagagtgcccagatgtcctgtgtgtaccggggtcgtgaagcctgacatagtattcttcggggagccactgccccaacgatttttgctgcatgtggtggacttcccaatggctgacctcctactgatcttgggcacaagcctggaagtggagccattcgcctctctgaccgaggccgtccgcagctctgtgccgcgattgctcattaatcgcgatttagtgggtccgctcgcctggcatccacgttcccgggatgtagctcagctcggcgatgtggtccacggggtggagtccctggttgagctgttgggatggactgaggaaatgagggacctagtacaacgggaaaccgggaaactggacggaccagataagtag

SEQ ID NO: 240655 - DNA, 957 bp, synthetic construct
  misc_feature 1..957: note = Description of Artificial Sequence: Synthetic coding sequence
  source 1..957: mol_type = other DNA
atggcattctggggctggagagcagctgccgctctaaggctttggggtagagttgtggagcgtgtagaggctggagggggagtcggcccttttcaggcatgcggttgtagactcgtgcttggaggccgagatgacgacgtggctgaattgattagagctcgggcttgtcagcgggtagtcgtgatggtgggagcaggcatttctacaccctcaggaatccctgactttcgttctccgggttccgggctgtacagcaatctacagcaatacgatctgccctaccctgaagccattttcgaattgccatttttcttccacaacccaaaaccattcttcaccctggccaaggaactatatccagggaactacaagcctaacgtgacccattattttctgcggctgctacacgacaaggggctactcctgcgcctctacactcagaatattgatggtctcgaaagggtttctgggatcccggcatcgaagctggtcgaagcccacgggaccttcgcgagcgccacatgtacagtctgtcagagacctttccctggcgaggatatccgggcagacgtaatggctgatagggtgccaagatgtcctgtctgcaccggcgtcgtgaaaccagatattgtttttttcggggagccactgcctcaaaggttcctcctccatgtcgtggactttcctatggctgacctgctgttgatactgggcacatctttagaagtggagccattcgcaagcttaaccgaggcagtccggagctccgttcctaggctgcttattaacagggacctggtcggacccctggcctggcacccgagaagcagagacgtggcacagttaggcgacgtggttcatggagtggaatctttggtggaacttcttgggtggactgaggaaatgagggatctagtccagcgtgagacgggcaagctggacggcccagacaaatag

SEQ ID NO: 240656 - DNA, 774 bp, synthetic construct
  misc_feature 1..774: note = Description of Artificial Sequence: Synthetic coding sequence
  source 1..774: mol_type = other DNA
atggtcggggctgggatttcaacgccatccggtatcccggactttcggagcccgggatcagggttatactcaaacctgcaacagtacgacctcccttatccagaagccatattcgagctcccattctttttccataaccccaagccattcttcacccttgccaaggagctataccctggaaattataagcctaatgtgacacactatttccttcgtctcctgcacgacaaaggtttgcttttgagactctacacccagaacatcgacgggttagagagggtgtccggcataccggcttccaagctggtggaggcgcatgggacttttgcctcagcaacttgtaccgtctgtcagcgcccttttcccggagaagacattcgcgcagatgttatggctgatagggtgccaagatgtccagtctgtactggggtggtcaaacccgatatcgtctttttcggtgagcctctgccacagcgttttctccttcacgtggtggacttccccatggccgatctgctgcttatccttggtacaagccttgaggtcgagccgtttgcttcattgaccgaggctgtccgttctagcgtaccgcgactgttaattaacagggatctggtaggacccctggcctggcacccccgttctcgggacgtcgcacaacttggcgacgtcgtgcacggagttgagagcctggtagagctgcttgggtggaccgaagaaatgcgcgatctagttcagcgtgagaccggcaaactcgatggccctgacaaatag

SEQ ID NO: 240657 - DNA, 945 bp, synthetic construct
  misc_feature 1..945: note = Description of Artificial Sequence: Synthetic coding sequence
  source 1..945: mol_type = other DNA
atgaagatgagcttcgccctgaccttcagaagcgctaaggggagatggatagccaatccttcgcagccttgctctaaggcatccatcgggctgtttgttcccgcatctccacccctcgacccagagaaggttaaggagctgcagaggttcattacactgtctaagaggcttttggtaatgaccggggcaggtatatcaaccgagagcgggatccccgattataggtcagagaaagtgggcctgtatgccaggacggataggcgtcccatccagcacggggacttcgtcaggagcgcacctatccgccagaggtattgggcacgcaattttgtagggtggccgcagtttagttcccaccagcctaatccagcccattgggcgctatccacctgggagaaattgggcaagctttactggctcgtgacgcaaaatgttgatgcgttgcacaccaaggccggtagtcgcaggctgacagagctgcatggctgtatggaccgcgtgctctgcttagactgcggagagcagacccccaggggagttctgcaggagcgctttcaggttctgaaccctacttggagcgccgaggctcatggactggcccctgatggagacgtgttcctgtccgaagaacaggttcgttcctttcaggtgcctacctgcgtccagtgcggtggacacctaaaacccgatgtcgtgttcttcggcgacacagtgaacccggacaaagtcgactttgtccataagagagttaaagaggctgacagcctcctagtggtgggatcctcgttacaggtgtactccggctatcgcttcatactgaccgcatgggaaaagaagctgccgattgctattctcaatataggtcccaccagaagcgacgatcttgcatgccttaagttgaattctcgatgcggtgagcttctgcctctgattgatccttgctag

SEQ ID NO: 240658 - DNA, 879 bp, synthetic construct
  misc_feature 1..879: note = Description of Artificial Sequence: Synthetic coding sequence
  source 1..879: mol_type = other DNA
atgcggccactccaaattgtcccttcacgcctgatttctcagctttactgcgggctcaagccaccagcctcaaccagaaatcagatatgcttgaagatggccaggccaagttcttccatggccgattttcggaaattctttgccaaggcgaagcatatagtcatcatttctggagcaggggtgtctgccgagtccggcgtcccaaccttccggggtgccggtggctactggcgcaaatggcaggcccaggacctggcaacacccttggccttcgcccacaatccctccagggtatgggaattctatcactacagacgcgaggttatgggttcaaaggagccaaacgcaggtcatcgagcaatcgcggagtgtgaaacacggctggggaagcagggaagacgagtggtggttatcacacaaaacattgatgagctccacagaaaggccggtaccaagaatctgctggagatacatggctccctgttcaagacaaggtgcacaagctgcggagtggtcgcagagaactacaaatccccaatatgtccagccctgagcggcaaagggtgcgaggaggcgggttgtggaggattgctgcgcccacatgtggtctggttcggcgagaatctggatccagcaatactcgaagaagtggatcgtgagcttgcacactgtgacctgtgtctcgtagtagggacaagctctgttgtatatcctgctgccatgtttgcaccacaagtcgctgccaggggcgtgcccgtggcagagtttaataccgaaaccactcccgcaaccaatagatttagattccacttccagggaccctgcggaactacactgcctgaggcacttgcctgtcacgaaaatgagacagtctcctag

SEQ ID NO: 240659 - DNA, 933 bp, synthetic construct
  misc_feature 1..933: note = Description of Artificial Sequence: Synthetic coding sequence
  source 1..933: mol_type = other DNA
atgaggccgcttcagattgtgccatccaggctgatttctcagctgtattgtgggttgaaacctcctgcttctacaagaaaccagatctgcctgaaaatggctcgtcctagcagtagcatggcagattttcgcaagttttttgccaaggccaaacacattgtgatcattagcggggcaggagtgtctgccgagtctggcgtccccacctttagaggcgcaggtggctactggaggaaatggcaggcacaggaccttgcaactcccctggcctttgcccacaatccatcccgcgtttgggagttttatcactatcggcgtgaagttatgggcagcaaagagcccaatgcaggtcaccgagctatagcagaatgcgaaactcgtctcggtaagcaggggagaagggtggttgtgataacccagaacattgatgaactgcatagaaaggctggtacaaagaatctgctcgaaatccatggcagcctgtttaagaccagatgcacatcttgcggggttgttgccgagaattacaagtcaccaatatgcccagcactgtcaggcaaaggagccccagagcctggtacacaggacgcaagcatccctgtagagaaactgcctcgatgtgaggaagccggttgtggtgggctgttgcgccctcacgtcgtgtggttcggcgaaaacctcgaccccgctattcttgaagaagtcgaccgcgaactcgctcactgcgacctttgccttgtggtgggtacgagctctgtggtgtatccagccgctatgttcgcaccgcaggtggctgcgaggggagtaccagtcgctgagtttaataccgagacaaccccagccactaacaggttccgctttcactttcaaggcccatgcgggactacgctgcccgaggcacttgcttgccacgaaaacgaaactgtctcatag

SEQ ID NO: 240660 - DNA, 900 bp, synthetic construct
  misc_feature 1..900: note = Description of Artificial Sequence: Synthetic coding sequence
  source 1..900: mol_type = other DNA
atgcggccactgcagatcgtgccatccaggctgatcagccagctatattgtggtctgaagcctccagcaagtactagaaatcagatctgtctgaagatggcccgaccatcatcatcaatggctgacttccgaaaattcttcgccaaagccaaacatattgtaattatttccggggctggcgtgagtgccgagtccggcgtaccgacgttccggggagctggtggatattggagaaagtggcaagcccaggaccttgccacaccacttgccttcgcccacaatccctctcgggtctgggaattctaccattatcgcagggaagtaatgggtagcaaggagcccaatgccggtcatagagcaatcgcggaatgtgagacacggctgggtaaacaaggcagacgggtggtggtcatcacccaaaatattgatgaattacataggaaggcaggaacaaagaatctattggagattcacggatccctgttcaagacgcggtgcacatcttgtggggtggtggctgagaattacaaatctccaatctgccctgcactatccggaaagggggctccagagcctgggacacaagatgctagcatcccagtggaaaaactgcccagatgtgaggaagccggatgcggcggattgctcaggcctcacgtagtgtggttcggagagaacctggatcccgcaatcctagaagaagtggaccgtgaactggcccactgtgacctctgtctcgtcgtggggacttccagcgtggtgtaccctgcagccatgttcgcaccccaagtggccgcacggggagtgcccgtagccgagttcaatactgagaccacccctgctacaaacaggttcagccatctgatctctataagctccctgatcattatcaaaaattag

SEQ ID NO: 240661 - DNA, 609 bp, synthetic construct
  misc_feature 1..609: note = Description of Artificial Sequence: Synthetic coding sequence
  source 1..609: mol_type = other DNA
atgggatcgaaggaacctaatgctggccatagagccatcgcagagtgtgaaacgcggctaggcaagcagggacgccgtgtggtggtcatcacacaaaacattgatgaactccaccgcaaagcaggcacaaagaacctgctagaaatacatggcagcctatttaagacccgatgcacttcctgcggagtggtggcggagaactataagagtcctatatgcccagccctctcgggaaaaggggcaccagagcctggcacacaggacgcaagcatccccgtggagaagctgccacgttgtgaagaagctggatgtggcggtctcctgcggccacatgtggtgtggttcggcgaaaacctggaccctgcgattctcgaggaagttgaccgcgagctggcacactgtgacttgtgcttggttgtcggtacaagcagcgtggtgtatcccgcagctatgttcgccccacaagtcgccgctaggggtgtaccagtagctgaatttaacacagaaacaactcccgcaacaaaccgcttccgattccatttccaaggaccgtgcggtacaacactgcctgaagcactggcatgtcacgagaatgaaacggtgagttag

SEQ ID NO: 240662 - DNA, 1203 bp, synthetic construct
  misc_feature 1..1203: note = Description of Artificial Sequence: Synthetic coding sequence
  source 1..1203: mol_type = other DNA
atggcggctgggggtctcagccgctctgagcgaaaggcagctgaaagagtccgaaggcttagggaagagcagcaaagagaaaggctccgtcaggtgtcgcgtattttgcgcaaggcggcagcagagagatccgccgaggagggtaggctgcttgccgagtcagccgatctggtgacagagttacaggggaggagccgccgtagggagggactcaagaggcggcaggaggaggtttgcgacgatcccgaagagctgagagggaaagtcagagaattagcgtctgcagtccgaaatgcgaaatacttagtggtctacaccggagcaggcatctcgaccgccgcatctatccctgactatagaggcccaaatggagtgtggaccctcttgcagaagggaaggtctgtctccgccgctgatctttctgaggccgaaccaacacttacacacatgtctataacccgtctccacgagcaaaagctcgtccaacacgtggtgtcacagaattgcgacggtctgcacctccgcagcgggctcccaagaacagccattagtgaactccatggcaacatgtatatcgaagtatgcactagttgcgttcccaatagggaatatgttagggtctttgacgtgacagagagaaccgctctccacaggcatcagactggccgaacctgccacaagtgtggtacacaattgagggatactattgtgcacttcggagagcgcggaacactaggccaacctctgaattgggaggccgctacggaggctgcctcccgggctgacactattctatgtctggggtcctctcttaaagttttaaagaagtatcccaggctctggtgcatgacaaaaccaccatcacgcagacccaagctgtacatcgttaatttgcaatggactccaaaagacgactgggccgcactgaagttacacggaaagtgcgatgacgtcatgagactgttgatggccgaactgggcctagagatccctgcttactcgcggtggcaggatcccatcttttcattggccacgcctctgcgggcaggagaggaaggttctcactctaggaagtctctgtgtcgctcccgcgaagaggcccctccaggtgatcgaggcgcaccactttcttccgcaccgatcctcggcggatggtttggcaggggctgcacaaaacgcaccaagaggaagaaggtgacctag

SEQ ID NO: 240663 - DNA, 963 bp, synthetic construct
  misc_feature 1..963: note = Description of Artificial Sequence: Synthetic coding sequence
  source 1..963: mol_type = other DNA
atgcccggtcctcggcgacgtagcccatcagcctgtcctcaggtctccaggatcctacgcaaagcggctgctgagcgaagcgcggaggagggacggctgctcgccgaatctgcagatttagtaaccgagctgcagggccgaagtagacgaagagaggggcttaagcgaaggcaggaggaagtatgtgacgatcctgaagagctccggggaaaagttcgagagctggcttccgccgtgagaaacgctaaatacctggttgtatataccggagcgggaatctccacagctgcctcgatacccgattaccgagggccaaacggagtctggaccctgcttcagaaggggcgatccgtctccgcagccgacctgagtgaggctgagccgaccctcacccatatgagtattacaagactccatgagcagaagctggtacagcacgtggtcagtcagaattgcgatggcctgcatctccgctccggactgccaagaacagccatctccgagttgcatggcaacatgtatatagaggtctgtacctcgtgcgtgccgaatagagaatacgtccgggtttttgatgtcacggaaagaaccgctttacacagacatcaaaccggccgtacctgccacaagtgtgggacacagctccgcgataccatcgttcattttggtgaacgtggaactcttggccagcccctgaattgggaagccgcaactgaagcagcctcaagggccgataccatcttatgcctgggatccagcctcaaggtcctgaagaagtatcctcggctttggtgtatgacaaaacccccaagtcggaggcccaagctgtacatcgtaaacttgcaatggactcccaaggacgactgggcggctcttaagctgcacggcaagtgcgatgatgtgatgaggctgcttatggccgaactgggcctagaaatccccgcttattctcgcgtgctgtag

SEQ ID NO: 240664 - DNA, 855 bp, synthetic construct
  misc_feature 1..855: note = Description of Artificial Sequence: Synthetic coding sequence
  source 1..855: mol_type = other DNA
atgagcatgttgcccagctttggatttactcaagagcaggtcgcctgcgtgtgcgaagttctacagcagggcggaaatctggagagattaggcaggttcctatggtctctccctgcatgcgatcacctacataaaaatgagagtgtcctgaaagcgaaagccgtggttgctttccaccggggaaatttcagagaactgtataagatcctcgaaagccaccagttttcacctcataaccatccaaagttacaacagctgtggctcaaggctcattacgtggaggcagagaagctgcggggtcggcctttgggtgctgtcggaaagtacagagtgcgtaggaagttccctctcccaaggacaatctgggacggtgaggaaacctcctattgctttaaagaaaaaagccgaggggtcctgagagagtggtacgcccacaacccatacccatccccgagagagaaaagagagctggcggaagccacaggcctgaccaccacacaggtctcaaattggttcaagaacaggcggcagcgggatcgcgcagccgaggccaaggaaagggagaataccgaaaacaacaacagcagcagcaacaagcagaaccagttgtcacctctcgaaggcggaaaacctctgatgagcagtagtgaggaagagttctccccaccccagtcccctgaccaaaatagtgtcctgcttctacagggcaatatgggccatgcccgttctagtaactacagcctgccagggctgacagctagccagccgagccatgggctgcagacacatcaacaccagttacaagatagcctgctgggaccattgaccagcagcttagtggacctgggtagttag

SEQ ID NO: 240665 - DNA, 876 bp, synthetic construct
  misc_feature 1..876: note = Description of Artificial Sequence: Synthetic coding sequence
  source 1..876: mol_type = other DNA
atgagcatgctgccaactttcggtttcacgcaggagcaggtggcctgcgtctgcgaggtactccaacagggcggtaacatcgagcggctgggcaggttcctgtggagcctgccagcatgtgaacacctgcataaaaatgaatctgttcttaaagctaaagctgttgttgctttccaccgaggcaatttcagagagctgtataagattcttgagtcacatcagttctcaccgcacaaccacgcaaagctgcagcagctatggttgaaggcacactatatagaagccgaaaagcttaggggacgtccccttggagctgttggaaagtatagagttcgcaggaagttcccacttccacgttccatttgggatggcgaggagaccagctattgttttaaggaaaagagcaggtcggtgctgagggaatggtatgcccataatccttacccatcgccacgagagaaacgcgagctcgctgaagcaacaggcctcaccaccacccaggtttccaactggtttaaaaaccggcgacagcgggacagagccgcagaggcgaaagagagggagaacaatgagaactccaatagcaactctcataaccccctcaatggttcgggcaagagtgtactgggatcttccgaagatgagaaaacaccctccggaacgcccgaccactccagcagttctcccgctcttctgctgtctccacctccgcctggactgccctccctccattccttgggccacccccctgggccttccgctgtgcccgttccagtaccaggcggtggcggagctgatccacttcagcatcatcatggtctgcaagatagcattttaaatcctatgtccgccaacctcgtagacctgggaagctag

SEQ ID NO: 240666 - DNA, 999 bp, synthetic construct
  misc_feature 1..999: note = Description of Artificial Sequence: Synthetic coding sequence
  source 1..999: mol_type = other DNA
atggtgttccgctcacccctggatctgtattcttctcactttctgctgcccaactttgccgactctcaccataggtcaatactgctcgcttcgtcagggggtggcaatggtgccggaggaggaggaggagcaggaggcggttccgggggaggaaacggagccggtgggggaggggctggcggtgctggaggtggtgggggaggaggctcccgcgctcctcccgaagagctctcaatgtttcagttacccacattaaatttttctcctgaacaagtcgccagcgtctgtgaaaccttggaggagactggcgatattgaacgtctgggcaggtttctctggtctctccctgtggctccaggagcttgtgaggcgatcaacaagcatgagtccatcctcagagctcgggcagtcgtcgcttttcatacagggaactttcgggatttataccacatactggagaatcacaaatttacaaaggagtcccacgggaagcttcaggctatgtggctggaggcacactaccaagaagctgagaagctccgcggtcgccctcttggtccggtggacaaatatcgggtccggaagaaattccccttgcccaggacaatatgggacggcgagcagaagacacattgctttaaagaaagaactcgatcgttactgagagagtggtatctgcaagatccctaccccaatccgagcaagaagagggagctggctcaggcaacaggtctgactcccacccaggttggcaattggtttaagaaccggagacagcgggacagagccgctgccgcaaagaaccggttgcagcatcaggcgatcggcccttccggaatgagatcgctggccgagcctggatgtcctactcatgggtcggcagagagcccttccacagccgcatcccctaccaccagcgtcagttcactgacggagcgcgctgacactggtacgtctattttatcagtgactagctcagattcagaatgcgatgtgtag

SEQ ID NO: 240667 - DNA, 1020 bp, synthetic construct
  misc_feature 1..1020: note = Description of Artificial Sequence: Synthetic coding sequence
  source 1..1020: mol_type = other DNA
atgaattgggagttactcctgtggctgttggtactttgcgcgttattgttgctgctggtccagttactgcgctttctgagggcagacggagatctcacactgttgtgggctgagtggcagggtcggaggccagaatgggaactgactgatatggtggtctgggtgacaggagcctcgtctggcataggagaagagctcgcttaccagctgtcaaaactgggggtgagcttggtcctgtccgccagacgggttcacgagctggagcgggtgaaaaggcgatgtctggagaacgggaacttgaaggaaaaagacatcttagtgctcccacttgatctgacagacacaggaagccatgaggctgccaccaaggccgtattgcaggaattcggacgaatcgacatcctcgtgaacaatggcggaatgtcacaacgatcactgtgtatggataccagcctggacgtgtatagaaagctaatcgaactcaactatctggggactgtctctctcacaaaatgtgtgctcccccatatgattgagcggaagcaaggcaagattgttacagtcaacagtatactaggaatcattagtgtgccactgagtattggatattgtgcctccaagcatgctctgagaggattctttaacgggctgcgcaccgagctggctacctacccgggaataatcgtgagcaacatctgtcctggacctgtgcagtccaacatcgtcgaaaattctctggccggtgaggtcacgaaaacaatcggaaataatggcgatcagtcgcataagatgaccacgtctcgatgtgtacggctgatgctgatttctatggccaacgatctgaaggaagtttggatttccgaacagccattcttgttggtcacctacctgtggcagtatatgcccacatgggcctggtggattacgaataagatggggaagaagcggattgaaaattttaaatcgggcgtagatgccgactcgagttacttcaaaatttttaaaacaaagcatgattag

SEQ ID NO: 240668 - DNA, 2220 bp, synthetic construct
  misc_feature 1..2220: note = Description of Artificial Sequence: Synthetic coding sequence
  source 1..2220: mol_type = other DNA
atggccacactgcccgcagagccttctgcaggacccgctgccggtggggaggcagtggcggcagctgccgcaaccgaagaagaggaggaagaggctagacaactgttgcagacgcttcaagcggcagaaggggaggccgcagctgctgcgggagcgggagctggtgcggctgctgctggcgctgagggtccaggctccccaggggtgcctgggtcgcctccggaagccgcttccgaacccccaactggattgcggttctcccctgaacaggttgcttgcgtctgcgaggcactgctccaagccggacatgccggaagactttcccggttccttggcgctctgccccctgcggaacgtcttcgcggttccgaccccgtcctgcgggctagagcactcgtggccttccaacggggagagtatgccgagctgtaccggctgctggagagcagaccattccctgcagcacaccatgcatttctgcaggacctgtacttgcgcgcacgttaccacgaggctgaacgcgctcggggaagggctttgggcgctgtagacaaatacaggctgcgaaagaaattccctttacccaaaacaatttgggatggtgaagagaccgtgtactgctttaaggagaggtccagagctgctctgaaggcatgctacaggggcaacaggtatccaacaccggacgagaagcggcgattggctactctgacaggactgtcgctaacacaggtaagcaactggttcaagaaccgaagacagcgcgaccggactggagccggaggaggcgctccatgtaaatcagaaagtgatggtaatcctaccaccgaggatgaaagcagccgatctcccgaagatctcgagcggggtgccgctcccgtcagcgctgaggctgccgcacaaggcagcatttttcttgccggaaccggaccgcctgccccatgtcctgcaagcagtagcattctggttaatggttctttcctagctgcctccggaagccctgccgttctacttaacgggggacccgtcattatcaacggcctggcactgggcgaggcgagtagcctgggcccacttttgctgacaggtggcggaggtgcccctcccccacagccttcaccccagggtgcttccgagaccaaaacctccctggtgctggaccctcagaccggtgaggtgcgacttgaagaggcccagtctgaagctccggagactaagggtgctcaggtcgccgctcccggtcctgccctcggcgaggaagtgctcggaccgctcgcgcaagtggtacccggacccccaaccgctgcaactttcccgttgcctcccggaccggtgccagcagtagcagcccctcaagttgtgccgttgagtccaccgccaggttatccaacggggctatcacctacaagtccccttctcaatctgccacaggtagttcccacttcccaggtcgtcacccttcctcaggctgtgggcccactccagcttttagcggctggtcctggttctccagtgaaagtggccgctgccgctggcccagctaacgtccatttgataaattctggtgtcggtgtgaccgcactccagttgccctcagccaccgcccctggaaattttttgctggccaacccggttagcggtagcccaatcgtgacaggggttgcccttcaacaaggtaagataatattgactgcaactttcccaacttccatgttggtctcgcaggtgctccccccagctcctggcctagccctgcctcttaagcccgagactgcaattagcgtccctgagggcggtctcccagtcgctccctccccagcattgcccgaagcgcacgcattgggcactttgtccgcacagcaaccccctcccgcagcggctaccacatcatcaaccagcctgccattcagtcctgattcccccggtctgctgcctaatttccccgctcctccaccagagggcctgatgctcagtcccgcagcggtgccagtgtggagtgctggtctggagctgtctgcgggtacggaggggctgctggaggctgagaaagggctcggaactcaagcaccccatacagtgcttagacttccggacccagatccagagggcctgctcttaggcgctacagcaggtggtgaggttgatgagggcctggaggccgaggctaaagtgctaacccaactgcagtccgtccctgtggaagagcccttggaactctag

SEQ ID NO: 240669 - DNA, 741 bp, synthetic construct
  misc_feature 1..741: note = Description of Artificial Sequence: Synthetic coding sequence
  source 1..741: mol_type = other DNA
atgttccagttgcctattctgaacttttccccacagcaggtggccggagtgtgcgaaaccttggaggaaagcggcgatgtcgaacgactcggccgatttctgtggagcttgcctgtggcccctgctgcatgtgaggcactgaacaaaaatgagtctgttctgagggcacgcgcaatagtggcattccacggaggtaattatagggaactctatcacatcctggagaatcataagtttacaaaggaatctcacgccaaactgcaagccctgtggctggaagcgcactaccaagaggctgaaaaactgcgcggacgtcctcttggcccagtcgataaataccgagttagaaagaaattcccgctgccacgcaccatatgggacggcgagcagaagacccactgtttcaaagagcgaacacggcatctacttcgagagtggtatctgcaagacccatatccgaacccaagtaaaaagcgagaactggcgcaagccactggtctgacaccaacgcaggtggggaactggtttaagaaccgccgacaaagggaccgggctgccgctgctaagaatcgcctgcagcagcaggttttgagccagggctcagggcgagctctgagagcagaaggcgacggcacccctgaggtcctgggagtagctacctcccctgcagcctctctttctagcaaagcagctacttccgctatctctattactagctccgactccgagtgcgacatctag

SEQ ID NO: 240670 - DNA, 360 bp, synthetic construct
  misc_feature 1..360: note = Description of Artificial Sequence: Synthetic coding sequence
  source 1..360: mol_type = other DNA
atgacacagcagggggctgctcttcagaactacaacaacgagctcgttaaatgtatagaagagctgtgtcagaaaagagaggaactgtgcaggcagatacaggaagaggaggacgagaaacaacgtctgcagaacgaagtgaggcagctcactgagaagctggccagggttaatgagaacttggcgagaaaaattgcatcacgtaacgaattcgataggactatagccgagactgaggccgcttatcttaagatcttggagagtagtcagactcttttaagcgtgctgaagagagaggccggtaatctgaccaaagcaaccgcacctgatcagaaaagctccggtgggagagattcatag

SEQ ID NO: 240671 - DNA, 666 bp, synthetic construct
  misc_feature 1..666: note = Description of Artificial Sequence: Synthetic coding sequence
  source 1..666: mol_type = other DNA
atgttgtggctctttcaatcgctcctgttcgtattttgctttggacctggtcagctccgcaacatccaggtcacgaatcactcacaactctttcagaacatgacatgcgagctgcacctaacatgtagtgtggaggatgcggacgacaacgtttcctttcgatgggaggccttaggaaacaccctgtccagtcagcctaacctgacggtcagctgggaccccaggatcagtagcgagcaggattacacgtgcatcgcggagaatgcagtttcgaacctatcattctccgtcagcgcccagaaactctgcgaagatgtgaagatccagtatacagacacaaagatgattttatttatggtaagcgggatctgcatcgtgttcggtttcatcatcctcctgcttcttgtactacgaaagaggcgagacagtctctcgttgtctacccagcgtacacaggggccagccgaaagcgcgcgtaatctggagtacgtatctgtgagtccaacaaacaacacagtgtatgcaagtgtaacccatagcaaccgggagacagagatatggaccccaagggaaaatgatactataaccatttactccacaatcaatcattcaaaggagtcgaagccaactttctcccgcgcaactgctctcgacaacgtggtgtag

SEQ ID NO: 240672 - DNA, 999 bp, synthetic construct
  misc_feature 1..999: note = Description of Artificial Sequence: Synthetic coding sequence
  source 1..999: mol_type = other DNA
atgctgtggttgttccagtcactactctttgtgttttgtttcggtcccggaaatgtggtttcgcagtcatccctgaccccacttatggttaatggtatccttggagaaagcgtaaccctccctctggagttccccgcaggcgaaaaggtgaattttatcacatggctttttaatgaaacttcactcgccttcattgtaccccatgagacaaagagccccgaaattcacgtcacgaatccaaaacagggaaagcgcttgaatttcacccagtcatatagccttcagctgtccaatcttaaaatggaggacacaggctcgtatcgagcccagatttcaaccaagacaagcgcgaagttaagttcatacacacttaggatactcaggcagctgagaaacatccaggtcactaaccacagccagctcttccagaatatgacctgcgagctgcatctgacttgctcagtagaagacgcggatgacaatgtgagcttcaggtgggaggccttgggcaacaccttgagttcacagcccaatctgacagtcagttgggatccacgtattagttccgaacaagactacacctgtattgctgaaaacgctgtgtctaatctttcgttttccgtctccgctcaaaagctctgcgaagacgtgaagattcaatacaccgacaccaaaatgattttgttcatggtctctgggatctgtattgtgttcggctttatcatcctgttactcttagtcctccggaagcgcagagatagcctgtccttgagtacccagcggacccaaggtcctgctgaatcggcgaggaacctggaatacgtgtcagtctcccccaccaataatacggtgtacgcttctgtgactcactccaacagagagacagaaatttggactcccagagaaaatgacacaatcactatttactccactataaaccattcaaaggagtccaaaccgactttttcccgtgctactgcactggacaacgtggtctag

SEQ ID NO: 240673 - DNA, 996 bp, synthetic construct
  misc_feature 1..996: note = Description of Artificial Sequence: Synthetic coding sequence
  source 1..996: mol_type = other DNA
atgctgtggttgtttcagagccttttgtttgtcttctgttttggacctggcaatgtggtgtcccaatcaagccttaccccattgatggtgaacggtatactcggtgagtccgtcacattgcctctagagttccctgccggagagaaggtgaatttcattacctggctctttaacgagacaagcctagccttcatcgtgccacacgagaccaaaagccctgaaatacatgttacaaacccaaaacagggaaaaaggcttaacttcacacagagttactcgctccaactttctaacttaaaaatggaagacaccggatcctaccgagcccaaatcagcacaaagacaagcgccaagctgtcctcgtatacactgcggatcttacggcagctgcgcaatattcaagtgactaaccattcccaacttttccagaacatgacatgcgagttgcacctcacctgtagcgtagaagatgccgacgataatgtctctttccgctgggaagctctcggcaacaccctctcctctcagcccaaccttactgtttcatgggaccccaggatatccagcgaacaagactatacgtgcattgccgagaacgcagtctctaacctttccttttccgtctctgcacagaaactgtgtgaggatgtcaaaatccaatataccgacaccaaaatgattctcttcatggtatcaggaatatgcatcgtgttcggcttcattatcttgctcttgctggtgcttcgaaagaggagagatagtctgtctctgagcacacagcgaacacagggccctgaaagtgcgaggaacctcgaatatgtgagtgtgagccccaccaacaacaccgtgtacgctagtgtcacacacagtaaccgggaaacagaaatatggaccccaagggagaacgataccattactatttactcgactatcaaccactcaaaggagtccaagcccaccttctctcgcgctacggctctggacaatgttgtgtag

SEQ ID NO: 240674 - DNA, 891 bp, synthetic construct
  misc_feature 1..891: note = Description of Artificial Sequence: Synthetic coding sequence
  source 1..891: mol_type = other DNA
atggcagggtctccgacatgcctgactctcatctacatactgtggcagctgacaggatctgccgcttccggaccggttaaggagctggttggttccgtaggcggagccgtcaccttccccttgaagtctaaagtcaaacaggtggactctatcgtctggacattcaatacaaccccgctggtgaccatccagcctgaagggggaactatcatagtgacccagaaccggaatagagagcgggtcgatttccctgatggcggatattccttgaaactttccaaactgaagaagaatgactccggtatctactacgttggcatctattctagctcgctccagcagccatctactcaggagtatgtcctccacgtgtacgagcatctcagcaaacctaaggttacaatgggcctgcagtctaacaagaacggcacatgtgtgactaaccttacatgctgcatggaacatggagaggaagacgtgatatacacgtggaaagcactcggacaggctgccaatgagtcccataatggctccattctgccaatttcgtggcggtggggcgagtccgatatgacttttatttgtgtcgcacgtaacccagtgagcagaaatttctcttcccccatactggcacgaaagttgtgtgagggcgctgccgatgatcccgattcaagtatggtgttactgtgtctcctcctcgtgccccttttactgtccctcttcgtgctgggcctgtttctgtggtttttgaagagagagagacaggaggagaacaacccaaaaggtagaagctctaagtatggcctcctccactgcggcaacacggaaaaggacggtaaaagtcctctgacagcacacgacgccaggcataccaaagccatttgtctgtag

SEQ ID NO: 240675 - DNA, 687 bp, synthetic construct
  misc_feature 1..687: note = Description of Artificial Sequence: Synthetic coding sequence
  source 1..687: mol_type = other DNA
atggccggatcaccaacgtgcctgaccctcatttatattctgtggcagctcacagaacatttgagcaaacccaaagttactatgggtcttcagagtaacaaaaacggcacttgcgtgaccaatctaacatgctgtatggagcacggcgaggaggacgtaatatacacatggaaggccctgggacaagcagccaatgagtctcacaatgggagtatactccccattagctggaggtggggggagtctgacatgacttttatctgcgttgcgcgtaatcctgtgtcacggaatttctcatctcctatacttgcccgtaagttgtgcgaaggtgccgcagatgacccagacagttctatggtgctgctgtgtctgctgcttgtgcctctgttactgagtctttttgtgctgggcctcttcctttggttcctgaagcgagaacgccaggaagaatacatcgaagaaaaaaagagggtggatatctgccgcgagacccccaacatctgcccccacagcggcgaaaacaccgaatacgacacgatcccgcacacaaaccggacaatcttgaaagaggaccccgctaataccgtgtattcaaccgtggagatcccaaagaagatggagaatcctcactcccttttaaccatgccggatactccacggctatttgcgtacgagaacgtgatatag

SEQ ID NO: 240676 - DNA, 1008 bp, synthetic construct
  misc_feature 1..1008: note = Description of Artificial Sequence: Synthetic coding sequence
  source 1..1008: mol_type = other DNA
atggcaggctctcccacgtgcttaaccctgatctatatcctgtggcagctgacgggctccgcggctagcggacccgttaaagagctggtgggtagtgtgggaggggcagtcactttccctctgaagtcaaaggtgaagcaggtggactctattgtgtggacctttaacaccaccccactcgttacaattcagcccgaaggcggaactatcatcgtgacccagaaccgaaaccgggagcgagtcgactttcctgacggcggttacagccttaaattaagcaagttgaaaaaaaatgactcaggcatttactacgtagggatttattcttcatcactgcagcagcccagtacacaagagtatgttcttcatgtctatgagcatctgtccaaacccaaagtgaccatgggcttacagtccaataagaatggaacgtgtgtcacaaacctcacctgctgcatggagcatggcgaagaagatgtcatttacacctggaaggccctggggcaggccgcaaacgagtcccacaatggatcaatactacctatttcgtggcgttggggcgaatccgacatgactttcatctgcgtagcacgtaatcctgtgagtcgaaacttttccagccctattttggcccgaaaattgtgtgagggtgccgctgatgatcctgacagtagcatggtgctcttgtgtctgttactggtaccactgctgctgagtctgtttgtgctcgggttattcctgtggtttctgaagcgtgagagacaggaagagtacatagaggagaaaaaacgagtagatatttgcagggagacacccaacatttgcccacactctggagaaaatactgagtacgataccattccccacaccaatcggactatactgaaagaagaccctgccaacactgtgtatagtacggtcgaaatccctaagaagatggagaatccccacagcctgctgaccatgcctgatactccgagattattcgcatacgagaatgtgatttag

SEQ ID NO: 240677 - DNA, 615 bp, synthetic construct
  misc_feature 1..615: note = Description of Artificial Sequence: Synthetic coding sequence
  source 1..615: mol_type = other DNA
atggccggatctcctacgtgcctcactctcatttacattttgtggcagctgactgggagtgccgcttctggtcccgtgaaggagctcgtgggcagtgttggaggcgcagttacatttccactcaagtctaaggtgaaacaggtagattccatagtgtggactttcaataccactccactggtcaccatccaacccgagggcggaactatcattgtgacgcagaatcgcaaccgcgagcgcgtcgatttccccgatggaggctacagtttgaaattgtccaagcttaaaaaaaacgactcaggtatctactacgtgggaatatatagcagctccctgcagcagccgtctacacaggagtacgtcctccacgtttacgaatacatcgaggaaaaaaagcgagtagatatatgccgagagaccccgaacatttgtccccactctggcgagaatacagagtatgacacgattccccacacaaatcggaccatcctgaaggaagatccagccaatacagtgtactcaacagtggagattccgaagaaaatggaaaatccacactctctgcttacaatgccggatacacctagactgttcgcatacgaaaatgtcatctag

SEQ ID NO: 240678 - DNA, 498 bp, synthetic construct
  misc_feature 1..498: note = Description of Artificial Sequence: Synthetic coding sequence
  source 1..498: mol_type = other DNA
atggctgggagccccacatgcctgactctgatatatatcttatggcagttaacagggtcagccgcatctggcccagtgaaggagctagtgggatctgtggggggagccgtaacttttccactaaagagtaaagtcaagcaggtagactccattgtgtggactttcaacactactcctctggtgaccatccaacctgaagggggaaccatcatcgtcactcagaaccggaacagagaaagggtcgactttcccgatgggggatacagccttaagttgagtaagctcaagaagaatgatagtggcatatactacgtgggcatctactcttcatcactgcagcagccatccacacaagagtatgtgctccatgtttatgaaaacaacccaaagggtcgctcttccaaatacggtctgttacattgcggtaatacagaaaaagatggcaagtcacccctgacagcccacgacgcacggcacactaaagccatttgcctgtag

SEQ ID NO: 240679 - DNA, 450 bp, synthetic construct
  misc_feature 1..450: note = Description of Artificial Sequence: Synthetic coding sequence
  source 1..450: mol_type = other DNA
atggccggtagtccgacgtgccttactcttatttacattttgtggcagttaaccgagcacctgtctaaacctaaggtgaccatgggtttgcagtcaaataaaaacggcacgtgtgtaacaaacctgacgtgctgtatggaacacggtgaagaagacgtgatttacacgtggaaagcattggggcaagctgctaatgagagccataacggtagtatactgccgatttcgtggaggtggggcgagagcgacatgacattcatctgtgtggccagaaatcccgtcagtagaaacttttcatctcctattctcgctaggaaactttgtgaagagaataatcctaaggggagaagttccaagtacggactgctccattgtggcaacacagagaaagatggaaagtctccactgacggctcacgacgctaggcataccaaggctatctgtctttag

SEQ ID NO: 240680 - DNA, 567 bp, synthetic construct
  misc_feature 1..567: note = Description of Artificial Sequence: Synthetic coding sequence
  source 1..567: mol_type = other DNA
atggccggatcacctacatgtctcaccctcatctatatcctctggcaacttactgagcacctctcgaagcctaaggtgaccatgggcctgcagagcaacaagaatgggacttgtgtgactaacctgacatgctgcatggagcacggagaagaggacgtgatttacacttggaaggctcttggtcaggctgccaacgagtcccacaatggaagcatactcccaatcagttggaggtggggcgaaagtgacatgaccttcatctgcgtggcgaggaatcccgtctcccggaactttagctcaccaatccttgctaggaaattgtgcgaagagtatatcgaggagaaaaagagggttgacatctgtagagagacgccaaacatctgtccacactccggcgagaacacagaatacgacacaattcctcacaccaacagaaccattttaaaagaagacccggctaacacagtgtattcgaccgtcgagatacccaaaaaaatggagaatccgcactcactgctgaccatgccagacacacccaggctgtttgcctacgagaatgtgatatag

SEQ ID NO: 240681 - DNA, 858 bp, synthetic construct
  misc_feature 1..858: note = Description of Artificial Sequence: Synthetic coding sequence
  source 1..858: mol_type = other DNA
atggtgatgagacccttatggtccctcttactgtgggaggctttgttgccaatcaccgtgaccggggcacaggtgttaagcaaggttgggggaagtgtcttgctagtcgctgcaaggccccctggcttccaggttcgggaggctatctggcgttccctctggccttcagaggaattacttgccactttcttccgcggttccctcgagacactctatcactccaggtttcttgggagggcccagctccacagcaatctttcactggagctgggacctctcgagagcggtgatagcggaaactttagcgtgctgatggttgacacacgcggacagccctggacacaaacattacagcttaaagtttatgatgcagttccacggccagtagtgcaggtatttattgctgtcgagcgggatgcgcagccaagcaagacatgccaagtgtttctctcctgctgggccccaaatatttctgagattacgtactcctggcggcgtgaaacaaccatggatttcggcatggaacctcacagtctctttactgatgggcaggtgctttccatttcccttggcccaggagacagggacgttgcctactcttgcatagtttctaatcctgtttcttgggacctggctactgtcacaccgtgggactcatgtcaccatgaagcggctcctggcaaagcttcatacaaggacgtgctgttagttgtcgtgcctgtgtcgctcctccttatgctcgtcactctgttctcagcctggcattggtgcccatgcagcgggaagaagaagaaggatgtccatgcagacagggtcggtcctgaaaccgaaaaccccttggtgcaggacttgccttag

SEQ ID NO: 240682 - DNA, 531 bp, synthetic construct
  misc_feature 1..531: note = Description of Artificial Sequence: Synthetic coding sequence
  source 1..531: mol_type = other DNA
atggtcatgcgtcctctgtggtcactcctgctgtgggaagatgccgtccctcgcccagtggtccaagtgttcattgcagtggagagagatgcacagccctccaaaacttgccaggtgttcctatcctgttgggcaccgaacatttccgaaatcacatactcctggaggcgggaaaccaccatggactttggcatggagccgcactctctgtttacagatgggcaggttctgtcaatttctctcggccctggggacagagatgtggcgtattcttgtatcgtcagcaatccagtgagctgggacctcgccacagtgaccccgtgggattcttgccaccatgaggcagctcccggtaaggctagttacaaagacgtcctcctagttgtcgtcccagtgagtcttctgctcatgcttgtcacactctttagcgcatggcattggtgcccatgttccgggaagaaaaagaaggacgtgcatgccgatagagtgggccctgaaacagagaatcccctagttcaggatctgccctag

SEQ ID NO: 240683 - DNA, 444 bp, synthetic construct
  misc_feature 1..444: note = Description of Artificial Sequence: Synthetic coding sequence
  source 1..444: mol_type = other DNA
atgggcggtcggcaccacctgcaacgacaggtgagcgagagcatgtctgctctattccaggcagtgcgtctcgagagcgcttgggcggaccgcgttcggtatatggttgtggtgtacagctctggcagacaagataccgaagaaaatatcttgctcggtgttgacttttcttcaaaagagtccggcttcagcgtcagcacagccggtcgaatgcacatttttaagccagttagcgtccaggctatgtggtccgctctgcaggttctgcataaagcttgtgaagtggccaggcggcacaattattttcccggaggcgtggccttgatctgggccacctactatgagtcctgcatatcaagtgagcagtcatgcattaatgagtggaatgcaatgcaagatctggagtcaacccgccctgactcaccagctctgttcgttgactag

SEQ ID NO: 240684 - DNA, 2112 bp, synthetic construct
  misc_feature 1..2112: note = Description of Artificial Sequence: Synthetic coding sequence
  source 1..2112: mol_type = other DNA
atggcccgagcacgtcgggcagtggtgggcagcgtgcgggacgtctcaactgcagcgaccaacttgttttacttcacagacttctgtatctttcttcagcctacccattgcttctgctgtccagaggttagtagctctaactacctgtctgagtctttcttcatggtaaagggagccgcactgttcctgcaacagggatcaagtccccaagggcaacgcagtctgcaacatccacacaaacacgccggagaccttcctcagcacctgcaggtaatgatcaaccttttgagatgcgaagataggataaagctggcagtcagattggagtccgcatgggccgacagggtgcgctatatggttgtagtatactcttccggcaggcaggacaccgaggagaatatcctgttaggtgtggacttttcctccaaggaatcaaagtcttgtaccattggaatggtactgaggttatggagtgatacgaagatccacctggacggcgacggtggctttagcgtttccaccgctggtcggatgcacatcttcaagcctgtatccgttcaggccatgtggtcagcccttcaggtcctgcacaaggcctgtgaagtcgcgcgacggcacaactattttcctggcggagtggccctgatttgggcaacatattatgaatcctgcatatcttctgaacagtcatgtatcaatgaatggaatgccatgcaagacttggagagcacccgacctgattctccagcgctttttgttgacaagcccactgaaggggaacgtactgaaaggctgatcaaagccaagttgcgctccatcatgatgtcgcaggacctggagaacgtgaccagcaaggaaatccggaatgagttggaaaaacaaatgaactgtaacttgaaggagctcaaggaatttatcgacaacgaaatgctcttgatcttgggccaaatggataaaccctctctcatattcgaccacctctacttggggagtgagtggaacgcctccaacttggaagaactccagggatcgggcgtggattatatcttgaatgtcacccgagagatcgataactttttccccggtctctttgcctaccacaatatacgagtctatgatgaagaaacgactgacctgttggctcactggaacgaggcctatcatttcatcaacaaggccaaaagaaatcactccaagtgcctagttcactgtaagatgggagtttcacgctcagcatccaccgttatcgcatacgcaatgaaggagtttggttggcctttggaaaaggcctataattacgtgaaacagaaacgttcaatcactaggccgaacgccggtttcatgcgccagctcagtgagtatgagggaatcttggatgctagcaaacagcggcacaataagttgtggagacaacagaccgacagctcattacagcagcccgtcgatgatccagctggcccaggagatttcctcccagaaacgcctgatggcacgcccgagagtcagctcccctttctggacgacgctgcccagccaggattaggacctcctctcccttgttgcttcaggcgcctgagtgacccacttctcccatcacctgaggatgaaactggttcattggttcacctcgaggatccggaaagagaggcccttctcgaggaggctgccccacctgccgaggtgcatcgaccagcacgccagccccagcagggctctgggctctgtgaaaaggacgtgaagaaaaaactcgagtttgggtctccgaaagggaggagcggatcactgctccaggttgaggagacagagcgcgaggaaggacttggggctgggagatgggggcagttgcctactcaactggaccagaacctgttgaattcagaaaacctcaataataatagcaaaaggtcatgcccaaacggcatggaggttggcagggcacggccagcgggttggcacacaccatccctcccatcacactcaaactggccgacctcagcttcagtggtggggaccaccggcacgcgccaccacacacagctcatttttttctactgcctcctttgggcgcctagtagccatctgcagggacctgaaggatccttcacaggatag

SEQ ID NO: 240685 - DNA, 3150 bp, synthetic construct
  misc_feature 1..3150: note = Description of Artificial Sequence: Synthetic coding sequence
  source 1..3150: mol_type = other DNA
atggccttggtgacgttgcagcgttcccctacacccagcgccgcatccagcagcgcttcaaacagtgagctggaagccggatctgaggaggatcgcaagctaaacctgtcattgtcggaaagcttctttatggtgaagggggcagctctgttccttcagcaaggctcgagcccccaaggtcagagaagtctgcagcatccccacaagcacgcaggagacttaccgcagcacctgcaggtgatgattaacttgcttcgatgcgaagacagaatcaagctcgcggtgcggttagagtctgcctgggctgaccgggttagatacatggtggtagtatactcatccgggagacaggatacagaggagaatatactgctaggcgtcgacttttcctccaaggagagcaagagttgtacaatcggcatggtgcttcgactgtggtccgatacgaaaattcacctggacggggacggaggctttagtgtctctactgccggtcggatgcatatctttaagcccgtctctgtgcaggcaatgtggagtgcactccaagttctgcacaaggcatgtgaggtggccagaaggcacaattattttccaggcggagtggctcttatctgggccacttactatgaaagctgcatctcgagcgaacagtcatgcatcaatgagtggaacgccatgcaagatcttgagagcacaaggccagacagtccagccctctttgtggacaagcctaccgagggtgagcggactgagcggctcatcaaggctaagctcagaagcatcatgatgtctcaggatctggaaaacgttaccagcaaggaaatccgcaacgagctggagaagcagatgaattgcaacctgaaagagcttaaagagttcatcgacaacgagatgctgttaatactgggccagatggacaaaccaagcctcatttttgatcacctatacctcggctccgaatggaacgcatcaaacctcgaagaattgcagggaagcggagtcgactatattctcaatgtaacgcgcgagattgacaattttttccctggactctttgcgtatcacaacatccgggtttacgatgaagagacaactgacctccttgcccactggaacgaggcctaccattttattaataaagccaagcgaaaccacagtaagtgcctggtacactgcaagatgggcgtatcaaggtctgctagcaccgttatagcctacgccatgaaagaatttgggtggccccttgaaaaagcctataactacgtgaagcaaaagagaagcatcacccgtcccaacgccggattcatgaggcagttatcggagtatgagggaatcctggacgcatcaaagcagagacataacaagctgtggcgtcagcagaccgacagctccctccagcagcctgtcgatgaccccgcaggccctggcgatttccttccggagacaccagacggcacgccagagagtcagctcccctttttggatgatgccgctcagcctggactgggacctccattaccttgctgttttcggagactgtccgaccccctgctgccaagccctgaggacgagaccggctccctcgtccacctggaggaccctgagagagaggcactcctggaggaggcggctccgcctgccgaggttcaccggccagcacgacagccccagcaggggtccgggttatgtgagaaagacgtgaaaaagaaacttgagttcggctctcctaaagggaggagcggatcactcctccaggtggaagaaactgaaagggaagagggcctgggggctggtcgatggggccagttgcctactcaactggatcagaacctcctcaatagtgaaaacctcaataacaactccaaacgatcttgtccaaatggaatggaagacgatgccatctttggcatcctcaataaggtcaagcctagttataaatcctgcgccgactgtatgtaccccaccgccagtggagcaccagaagcctctagggaaaggtgcgaagaccccaatgccccagccatctgcacccagcctgcattcctgcctcacatcaccagtagcccagtcgctcatctggcctctagatcccgggtccctgagaaacctgccagcggacccactgagcctccccctttcctcccgccagccggttcccgcagagctgacacgtctggccctggagccggagccgcattagagccacccgcatcccttctggagccatccagggagacgcccaaagtgcttccgaagtcactcctcctgaagaactcacactgtgacaagaatccaccgtccacagaggtcgttatcaaagaagaatcttcaccaaaaaaagatatgaagccggcaaaagacctgcgacttcttttttctaacgaatccgagaagccaaccaccaacagctatctcatgcaacaccaggagtccattattcagctgcaaaaggcgggtctagtcagaaagcatacgaaggagctcgagagactgaagtccgttccagccgaccctgcccctccctcccgcgatggccctgcatctcgactcgaggcctcaattcccgaagaatcccaggacccagctgctctccacgagttgggcccactggtcatgcccagccaggccggatcagacgaaaagagcgaggcggctcctgctagcctagaagggggatcactcaagtctcctcctccattcttttacagacttgaccatactagctcgttctctaaggacttcctgaagaccatctgctatacacctacctcaagctccatgagtagcaacctcacacgttcatcttcgagtgactcaattcattccgttcgcggaaaaccgggactcgttaagcagaggacccaggagatcgagaccaggctgcgactagccggtctcacagtgtcctcccctctgaagagatcacactcccttgccaagcttggttctctgaccttttccacggaggatctgagcagcgaagctgacccgtccacagttgctgactcccaggatactaccctgagcgaaagcagtttcctccacgagccccagggaacacctcgagatcccgcagctacgtccaagccttcaggcaaaccggctccagaaaaccttaagtcaccctcatggatgtcaaagtcttag

SEQ ID NO: 240686 - DNA, 2214 bp, synthetic construct
  misc_feature 1..2214: note = Description of Artificial Sequence: Synthetic coding sequence
  source 1..2214: mol_type = other DNA
atgcgctgttatcttagctgggatcggtggacttcacctccactgtcatcaatcatcttcatctctgtggattatatcctgaatgtgacgcgagaaatcgacaattttttccccggtctgttcgcctaccataatattagggtttatgatgaggaaactacggatcttctggcccattggaacgaggcctatcacttcataaacaaggccaagcgaaaccattccaaatgtttggtgcattgcaaaatgggcgtgtctcggtcggcttcaactgtgattgcatatgccatgaaggaatttgggtggccattagagaaagcctacaattatgtcaaacaaaaaaggtctatcacccgtccgaacgcagggttcatgaggcagctcagcgaatatgagggaatcttagacgcttccaagcagagacataacaaactgtggcggcaacaaacggacagctcattgcagcagccagtggatgaccctgctgggcctggagactttctgcccgagacccccgatggtactcctgagtcgcagctccccttcctggacgacgctgcccagcccggactcggaccccctctgccttgttgcttccgaagattgtctgatccattattaccctctcccgaggacgaaacagggtcacttgttcatctggaggacccagagagagaggcactactcgaagaagccgcacccccagccgaagtgcaccgtcctgcaagacagccacagcaagggtcgggtctgtgcgagaaggacgtgaagaaaaagctcgagttcggctcccctaaaggtcggagcggctcactcctccaggttgaggagacagagcgagaggagggcttgggcgcaggaagatgggggcagctacctactcaactggatcagaatctgctcaactccgaaaatctgaacaacaacagtaagcgatcctgtcctaatggaatggaggatgacgccatcttcggcatcctgaataaggtgaagcccagctacaagagctgtgccgattgtatgtaccccacggcctcaggggctccggaagcctccagagagagatgtgaggacccaaatgctccggcaatctgcactcagcccgcttttcttccccacattacttccagcccagtcgcccatctggcaagcaggtctcgggttcctgaaaagcccgctagcggaccaactgagccgcctcctttcctccctccagccggttccaggcgcgcagatacttcggggccaggcgcaggcgctgccctcgagcctccagcgagcctgctggagccaagccgggaaactcctaaggtgctgcctaagtccctgctgctgaagaacagccactgtgacaaaaaccccccaagcaccgaagtggttattaaagaggagtccagtcctaagaaggatatgaaaccggcaaaagatctgcgactgctgttcagcaatgaaagcgagaagcctaccactaatagctatctgatgcaacaccaggagtctattatccaactccagaaggcaggcctggttcggaaacacactaaagaactggaacgactgaaatccgtgccagccgacccggcaccccctagtcgagacgggccagccagcaggctcgaggccagtattccagaggagtcccaagacccggctgcactgcacgaactgggaccactggtgatgccatcccaggcaggatccgacgaaaagtccgaagctgccccagcaagcctggaggggggaagcttaaagagccctccccctttcttttatcggttagatcacacgtcatctttctcgaaggattttctgaagactatctgttacactcccaccagtagcagcatgtcttccaacctcacccgtagcagttcatctgattctatacactcagtgagaggcaaacctggcctcgtgaagcaaaggacacaggaaattgagaccagacttcggctcgcaggccttacagtctccagccctctgaagcggtcccactctctggccaaactgggctctctgaccttctccacagaagatctctcctcagaggcagacccttccaccgttgccgactctcaggacactactcttagcgaatcaagttttctccacgaaccccaaggtactcccagggatcccgctgctacatccaagccttcgggcaagcctgccccagagaacctgaaatcccccagttggatgtctaaatcctag

SEQ ID NO: 240687 - DNA, 2079 bp, synthetic construct
  misc_feature 1..2079: note = Description of Artificial Sequence: Synthetic coding sequence
  source 1..2079: mol_type = other DNA
atggctcttgtgaccctgcaacgcagtccgaccccatctgctgcttcctctagcgctagcaatagcgagcttgaagccggttccgaggaagacaggaagctcaacctctcactcagcgagtccttcttcatggtgaagggagccgcactattcctgcagcagggctcctccccacagggacagagaagtttacagcatcctcataaacacgctggcgacctcccccagcatttgcaggtcatgataaatctgcttcggtgtgaagacaggataaagctggcggttcggctggagtcagcatgggccgatagagtgcgctacatggtggttgtgtacagcagcggcaggcaagatacagaagaaaacattcttcttggcgtggacttctcgagtaaggagagcaagtcttgcaccattggcatggtcctccgcttgtggagtgatactaaaatccatctggatggcgacggaggtttttctgttagtacagcgggacgcatgcacatttttaaacctgtttctgtacaggcaatgtggtctgctctccaggtgttgcacaaggcctgtgaggtggcccgacgccataactatttccctgggggagtagccctcatctgggccacgtattatgaatcttgtatttccagcgaacagtcgtgtatcaacgagtggaatgccatgcaggacctcgagtccacacgtccagattcacctgccctttttgttgacaaacccaccgagggagagcggactgaaagactgatcaaagcaaaactgcgcagtatcatgatgtcccaggacctggagaatgtaacatctaaagagatccgaaacgaactggagaagcagatgaactgcaatcttaaggagttgaaggaatttatcgataatgagatgttgcttatcttagggcaaatggacaagccctcactgatattcgaccatttgtacctgggctccgaatggaacgcatccaacttggaagagctgcaggggagcggtgtggattatatcctgaacgtgactagagaaatcgacaacttttttcctggcctgttcgcttaccataatattagagtgtatgacgaggagacgaccgacctgcttgcacattggaacgaggcttaccacttcattaacaaagcaaagaggaatcattccaagtgtcttgtccactgtaagatgggcgtcagtcgctccgcgtcaaccgtgatcgcctatgccatgaaagaatttgggtggccgcttgagaaggcctacaattatgtaaagcagaaaaggtcaatcacccgaccaaatgctggttttatgcggcaactctctgagtacgaaggcattctcgacgcttcaaaacagaggcacaacaagctttggagacaacagacagatagcagcctgcagcagccagttgacgaccctgctgggccaggtgatttcttgcccgaaacacctgatggcacgcctgagtcccaacttcctttcttggatgatgcagctcaaccagggttgggaccacctctgccctgctgtttcagacgactgtccgatccactcctgcccagccccgaggacgaaactggaagcctcgttcatttggaggaccccgaaagggaagccttgctcgaggaagcagctcccccagccgaagtgcacaggcctgcacggcagcctcagcagggcagcggcttgtgcgagaaagacgtaaaaaagaaactggagttcggatcccctaagggacgctccggcagtcttttgcaggtagaggaaaccgagcgcgaggagggccttggagcgggtcgttggggacagctgccgacccaacttgaccagaatttgctgaactctgaaaatctcaataataatagcaaacgcagctgtccaaatggtatggaggtgggcagggccaggcctgctgggtggcacacaccctccttgccctcacatagcaattggcctacatccgcatctgtggttgggactaccgggacccggcaccatactcaactcatctttttttattgcctcctgtgggcaccatcttcccatctgcaggggcctgaggggtcctttacaggctag

SEQ ID NO: 240688 - DNA, 4272 bp, synthetic construct
  misc_feature 1..4272: note = Description of Artificial Sequence: Synthetic coding sequence
  source 1..4272: mol_type = other DNA
atggcactggtgacggtccaaaggtccccaaccccaagtacgacgagttcaccttgcgcttccgaggccgattctggcgaagaagaatgcagaagccagcctagaagtatcagtgagtcttttctcaccgtgaaaggcgctgcactgttccttccacgaggcaatggctccagtacccctcgcatttcacacaggaggaacaaacacgccggagatttgcagcagcatctccaggccatgttcattctgttaaggccagaggacaatattcgtctggccgtgcgtctggaaagcacataccaaaacagaacaaggtacatggtggtggtgtcgaccaatggcaggcaggataccgaagagtcgatagtcttaggcatggattttagttccaacgatagcagcacctgcaccatgggccttgtgctgcccctctggtccgataccttgattcaccttgatggcgacgggggattctctgttagtacagacaacagggtgcacatatttaaaccagtgtccgtgcaagccatgtggtctgctctgcaaagtctacacaaagcctgcgaggtggctcgcgcacataattattatcccggaagtctctttcttacgtgggtctcgtattacgaatcgcatattaacagcgatcagtcgtcggtaaatgagtggaatgccatgcaggacgttcaatcacaccggcctgactctcccgcactgtttactgatatacccacggaacgcgaacggaccgaacgcctcatcaagactaaactccgagaaatcatgatgcaaaaggacttggaaaacatcacctcaaaggaaatcaggactgagcttgagatgcagatggtatgcaacttgcgggagttcaaagagttcattgataacgagatgatcgtaatcctgggtcagatggactctcccactcaaatcttcgaacatgtttttcttggttcagagtggaatgcaagcaatcttgaagatctgcagaaccgaggcgtgcgctacatcttgaacgttacccgcgaaattgacaacttcttccctggagtgttcgaatatcataatattagggtctacgacgaggaggctaccgatcttcttgcgtactggaacgacacctacaagttcatctccaaggctaaaaagcatgggtcaaagtgcttagtacactgtaaaatgggcgtctctcggtccgcttcgactgtgattgcctacgccatgaaggaatatggatggaatcttgaccgtgcctacgattatgttaaggaaaggaggaccgtgaccaagcctaatccatccttcatgcggcagctcgaagaataccagggcatactcctagcttccaagcagagacacaacaagctgtggcgatcccactccgattccgacttgtcagatcatcacgagcccatttgtaagcccggacttgagctgaacaaaaaggatatcaccacctccgctgaccaaattgctgaagtcaaaaccatggaatcacaccctcccatcccgccagtgtttgtggagcatatggtccctcaggacgccaatcaaaaaggtctttgtacaaaggagaggatgatttgcctggaattcacgagtcgcgaattccatgccggacagatcgaggatgagttgaatcttaatgatatcaacggttgttcaagcggctgctgtctgaatgaatctaaatttccactcgacaactgtcatgcatcaaaagcgctgatccagcctggacatgtcccggagatggcaaacaaatttcctgatcttaccgtggaagacctggagactgacgcactcaaagcggatatgaacgtgcacctgctgccaatggaggagctgacttcccctctgaaggatcccccaatgtccccggaccccgaatctccaagcccgcagccctcctgccagaccgagatctctgacttttctaccgataggatcgactttttcagtgccctggaaaaatttgtcgagctgagccaagaaaccaggagccgctcattcagccactctcgaatggaggagcttggcggtgggcgtaatgaaagctgcaggttgtccgttgttgaggtggcacccagtaaggtgaccgcagatgaccagcggagcagctccctaagcaacaccccccacgcgagcgaagagtcttctatggacgaagaacagtcaaaggctataagcgagttggtctcaccggacatcttcatgcagagccactcagaaaacgctattagtgtaaaggaaatcgtaacagagattgagagcattagccagggtgtggggcaaatccaactgaaaggcgacattctgcccaacccgtgccatacaccgaaaaagaactctatccatgagctcctactagaacgcgcacagacaccggaaaataagcccggtcatatggagcaagacgaggactcctgtaccgcacagccagaattggcaaaagactccggtatgtgtaaccctgaagggtgcctcacgactcacagctcaattgctgatcttgaagaaggagaaccggcagagggagagcaagagttacagggttcagggatgcaccctggcgcaaaatggtatccaggcagcgtaaggcgtgcaaccctggagtttgaggaacgtcttcgtcaggaacaggagcatcacggggcagcaccgacttgcacaagcctttcaacgcgaaaaaatagcaaaaacgattcatctgtcgctgacttagctccaaaaggcaagtccgatgaggcacccccagaacatagcttcgtgcttaaggagccggaaatgtctaaaggaaaaggcaaatatagtggatccgaggccggttccctgagccactctgagcagaacgccaccgtgccggctccacgtgtcctcgagtttgatcacctacccgacccacaagaagggccaggttcggatacggggacccagcaagaaggcgttctgaaggacctgaggaccgtgatcccctaccaggaatctgagacccaagctgtcccactgccactacccaagagggtggaaatcatcgagtatacacacatcgtaacctccccgaatcatacaggcccaggctccgaaatagccacaagcgaaaagtctggagaacagggattaaggaaggtgaatatggagaagagcgtcaccgtattatgcaccttggacgaaaatctcaacaggacattggaccctaaccaggtttctctccaccctcaggtcctccccttgcctcacagtagtagtcctgagcacaatcggcctactgaccaccctactagtatcctgagctccccagaagaccgcggatcttccctgtctacagctcttgagactgctgccccatttgttagccacactacccacttgctgtcggcaagcttggactaccttcaccctcagactatggttcatcttgagggcttcactgagcagtccagtaccactgacgagccctccgcagagcaagtgtcctgggaagaaagtcaggaatccccccttagttccgggtccgaggtcccctataaagattcacagctgagctccgccgatctgagtcttatctccaagctcggcgataatacaggagagctccaggagaaaatggatcctctgcccgtggcctgcaggcttccccatagttctagtagcgaaaatatcaagtctttgagtcacagcccaggagttgtgaaggaacgagcaaaagagatcgagtcacgcgttgtgtttcaggctgggctgacgaagccatctcaaatgaggagaagcgcctctctggccaagctaggatatctcgatctgtgtaaggactgtctccctgaaagagagccagccagttgtgagagcccgcacctcaagctccttcaaccgttcctgaggacggactcaggtatgcatgcaatggaggaccaggagtctctcgaaaatcctggcgctccacataatccagaacccacaaagtctttcgtggagcagttaacgaccacagaatgtatcgtgcagtcaaaacctgtggagcgcccacttgtgcaatatgctaaagaattcggcagctctcagcagtacctcctcccccgtgcgggactggaattgacatcgagtgaagggggactgcccgtgcttcagactcagggcctccagtgcgcctgtcctgccccaggcctcgcggtagctcctcgccagcagcatggcagaacccatccgctccgacggctgaagaaagctaacgacaaaaaacgcacgaccaaccccttttacaacaccatgtag

SEQ ID NO: 240689 - DNA, 609 bp, synthetic construct
  misc_feature 1..609: note = Description of Artificial Sequence: Synthetic coding sequence
  source 1..609: mol_type = other DNA
atgactctgtccacattggcaaggaaacgcaaagcacctttagcctgcacttgcagcctgggagggccagatatgattccctatttctcagccaacgctgtgatctcgcagaacgccatcaatcagttaattagcgagtctttcctgacagttaagggggcagctctcttcctcccccgaggcaatggctcctccacccccagaatttcacacagacgaaataaacacgcgggtgacttacaacagcacctgcaggccatgttcatactcctcagaccggaagataatatccggctggccgtcagactcgaatcaacatatcagaatcgcactaggtacatggtagtcgtgagcacaaatggcagacaggatacagaggagtccatcgtgctgggcatggacttctcctccaacgactcatccacatgcaccatgggattagtgctgccactgtggtccgacaccctcatccatctggacggggatgggggtttttctgtttcgaccgacaatagagtccatatcttcaaacctgttagcgtacaggccatgtgggttgacagggactcaaggaacaagcactgcgatgtgctgctggttgaggaatag

SEQ ID NO: 240690 - DNA, 1350 bp, synthetic construct
  misc_feature 1..1350: note = Description of Artificial Sequence: Synthetic coding sequence
  source 1..1350: mol_type = other DNA
atggctttagtcaccgtgcagagatctcctaccccctcaacaacttccagcccatgtgccagcgaggccgactcaggtgaggaggaatgcaggtctcagccacggagcatcagtgagtctttcctaacagtgaaaggagcagcactgtttctgccacgcggaaatggcagttccacccctagaattagccaccggcgtaacaaacacgccggagaccttcagcagcatctccaggctatgtttatcttgttacggccagaggataacataagacttgccgtccgattggagtccacctaccagaaccggactcgctacatggttgtagttagtacaaatggtagacaggacacagaagagagcatcgtgttgggtatggatttcagctcaaacgactcctctacctgcacaatgggactggtcctgcctctctggtcggacactctcatccatctggatggagatggcggatttagcgtcagcaccgataaccgagtgcatatctttaagccagtttcagtccaggctatgtggtcagctttgcagagcctccacaaggcctgcgaggtggccagggcccacaactactatcctggatcccttttcttgacctgggtttcttattacgaaagccacataaatagcgaccagtcaagcgtcaacgaatggaacgcaatgcaggatgtacaatcacacagacccgactcgcccgcactgtttactgacattccaaccgaacgagaaaggacagagaggctaatcaaaactaagcttcgggaaattatgatgcagaaggacctggagaacatcaccagtaaagagattcggacagagcttgagatgcagatggtttgtaacctgagggaatttaaggaattcattgacaatgagatgatcgtgattctggggcagatggatagtccaacccagatcttcgagcacgtgtttttgggttcggagtggaacgcatctaatctagaagaccttcagaacagaggcgtgcgctacatactcaacgtgacgcgcgaaatcgataacttcttccctggcgtcttcgagtaccacaatatacgagtgtacgatgaggaagccacagatttactggcgtactggaatgatacatataaattcatcagcaaagctaagaaacacggtagcaaatgtctggtccattgtaagatgggtgtcagcaggagtgcaagcaccgtgattgcttacgccatgaaagaatacggctggaacctcgatagggcgtatgattatgtgaaggagcggagaactgtgacgaaaccaaatccatcgttcatgagacagctcgaggaataccagggcatcctgctggctagatag

SEQ ID NO: 240691 - DNA, 4353 bp, synthetic construct
  misc_feature 1..4353: note = Description of Artificial Sequence: Synthetic coding sequence
  source 1..4353: mol_type = other DNA
atggccctggtgaccgtccagcggtctcctactccatcaactacaagttcgccctgcgcttccagcagccatctcgaggactctgaatcggctgcattactgtgttgcgaatgcgaagagagcgaaatctttactgattccaatgaggcagattccggggaggaagagtgcaggtcccagcctcgctccatctctgagtcttttctgacagtaaagggagcggctctgttcctcccgcgagggaacggttcgtcaacccctagaataagccaccgcagaaataaacacgctggtgacctacaacagcacctgcaggcaatgttcattctgcttcgtcccgaggataacatccgtctggcagtgagacttgaatcaacttatcagaatagaacccgatacatggtcgtcgtatccacaaacggacgccaggatacagaagagtcaatagtcctgggaatggatttctcatctaacgactcctccacctgtactatgggtcttgtactccccttatggtccgacacactgatccacctggacggggacggcggttttagcgtctccacagacaacagggtacatattttcaagcctgtcagcgtccaggctatgtggtcagccctgcaaagtcttcacaaagcttgtgaggtggcgcgagcccacaactactaccctggtagcctgttccttacttgggtgtcctactacgagtcccatataaattccgaccagtcttctgtgaacgaatggaacgccatgcaggacgtgcagtctcatcgaccagatagtccagctctgtttacagatatcccaacagaacgggaaaggactgaaaggctcataaaaacgaaattgcgcgagattatgatgcagaaagacttggagaacattacttccaaggagatccgaaccgagcttgaaatgcagatggtgtgcaacctcagggagttcaaagaattcatcgacaatgaaatgatcgttatactcgggcagatggactcgcccacgcagatcttcgagcacgtatttttaggcagcgaatggaatgcatcaaatcttgaagatctgcagaaccggggagtacgctacatactgaacgtaaccagagagatcgataatttctttcccggagtcttcgaataccacaacatccgcgtttatgacgaggaagcgaccgacctgctcgcgtactggaacgatacgtacaagttcatttctaaagccaagaaacacggatctaagtgtctggtccactgcaaaatgggcgttagcaggtccgcaagcaccgtgattgcttacgccatgaaggaatatgggtggaatctggaccgggcttatgactacgtgaaggaacgacgtaccgtcacaaaaccaaacccatccttcatgaggcagctggaagaataccaggggatcctattggctagcaaacaacgccacaataaattgtggaggagtcacagcgatagcgatttgagtgatcatcacgagcccatttgtaaacctggtctggaactcaacaagaaggacattaccacctctgccgaccagatagcagaggtaaagacaatggagagtcacccaccaattcccccagttttcgtagagcacatggtgccccaagacgccaatcagaagggcttgtgtaccaaagagagaatgatctgtctagagtttacgagcagggaattccacgccggacagatcgaagatgaattaaacctgaacgacatcaacggctgttccagcggatgctgtctcaatgagtctaagtttcccctggataattgccacgcgagcaaggctttgattcaacccggacatgtccccgaaatggcaaacaagttccccgatctgaccgtagaggacctggagaccgatgccctgaaagctgatatgaacgtacacttgcttccgatggaggaattgaccagccctcttaaggaccctcccatgtctcctgacccggagagccccagcccacagcccagctgccaaaccgaaatctccgacttttccacagacaggatcgacttcttcagtgcccttgagaaattcgtcgagctatctcaagagacaaggagcaggtcctttagccacagcaggatggaagagctcgggggaggacgcaatgagagttgtcgccttagcgtggtggaggtagccccaagtaaagttaccgccgatgatcaaagatcctcttcactgtcaaacacccctcacgcttctgaggaatcctctatggacgaggaacagtcgaaagccatctctgaactcgtgagcccagacatctttatgcagtcccacagtgagaatgctattagtgtcaaggagatcgtgacggaaattgagtctatcagtcaaggcgttggtcagattcaactgaaaggggacatcctcccaaatccttgccatacccccaagaagaattcaattcacgaactactgctggaaagagctcagacacctgagaacaagccaggtcacatggagcaggatgaagacagttgtacagctcagcccgagttagccaaagacagcggtatgtgtaatcctgagggctgcctcacgacccactcctccatcgccgatctggaggaaggcgagcctgccgagggggaacaggagttacagggatctgggatgcatccaggcgctaagtggtatccgggatctgtccggcgtgcaaccctggaatttgaggagcgcctacgtcaggagcaggaacatcacggtgctgctcccacctgtacgtccctgtcaacaaggaagaatagtaagaacgattcctctgtcgctgatctcgctcccaaaggtaagagtgatgaagcacccccagaacactcttttgtgctaaaggagcccgagatgtccaaaggaaaaggcaagtatagtggttccgaagccggtagcttatcccactccgagcagaatgccaccgttcccgctcctcgggtgctggagtttgatcacttgccggacccacaggagggccctgggtctgataccgggacacagcaggaaggggtgctgaaggatctcaggaccgtcattccttaccaggagagcgagacgcaagctgtgcccctgcccctccccaagcgtgtggagataatcgaatacactcacatagttacttccccaaatcacactggcccagggtctgaaatcgctacctccgaaaagtccggcgagcaggggctgcgcaaggtgaacatggaaaaaagcgtcactgtcctctgcactctagacgagaacttgaatcgcactttggatcctaatcaggtgagcctccacccgcaggtcctcccactacctcatagctctagtccagagcataaccggccaacggatcacccaacctctattctctcttctcccgaagatagggggtcgtcactcagcaccgctctggaaaccgcggcaccgttcgttagccataccacccacctcttgtctgcctcattggactatttacaccctcaaacaatggtacatctcgaaggcttcactgagcagtctagcaccacagatgaaccaagtgccgagcaggtgagctgggaagagtcgcaggaaagccctttgagctctggctctgaagtgccatataaagacagtcaactgagctctgcagacctgagcctcatttccaaactgggggataacactggcgaactgcaggagaaaatggacccactgcctgtcgcctgccgcctgcctcacagcagttcttccgagaacattaaatccctgtcgcacagccctggagtggttaaggagcgagctaaggagatcgagtcacgggtggtcttccaggcgggactaactaaaccttcacaaatgagacgcagtgcaagcctggccaagttgggctatctcgacttatgcaaggattgcctccccgagcgggaacccgctagttgtgagtctcctcatctcaagctgctgcagccttttctgcgtactgactctgggatgcatgccatggaagaccaggagtccctggaaaacccaggagcccctcataatcctgagcctaccaaatcgtttgtggagcagttaactacaactgaatgtatcgtccagagtaaacccgtcgagaggcccttagtgcagtacgcaaaggagtttgggtcatcccagcaatacctattacctagagccggattagagctcacaagcagtgaggggggactgcctgtgttgcaaacacagggactgcagtgtgcctgccctgcgccagggttggcagttgccccacgccagcagcatgggaggactcaccccctgcggaggctcaaaaaagccaatgataaaaagcgcacaaccaacccattttataatacaatgtag

SEQ ID NO: 240692 - DNA, 1980 bp, synthetic construct
  misc_feature 1..1980: note = Description of Artificial Sequence: Synthetic coding sequence
  source 1..1980: mol_type = other DNA
atggccctcgtaaccgtctcaagaagtcccccagggtccggagcttccacacccgttggcccatgggatcaggcggttcagagacggtctaggctccagaggcgtcagtcatttgcagttctgcggggtgctgtcttgggtttacaggatgggggtgataatgacgacgcagccgaggcctcttccgagccaactgaaaaagcgcctagtgaagaagaactgcatggcgaccagacagacttcgggcagggatcccaatcaccacagaagcaggaagagcagcggcagcatctccacctgatggttcagctgctccgtccacaggacgacataagactggctgcgcagctggaggctcctcgtccccctaggctaaggtacttactagtggtgtctaccagggaaggggagggccttagccaagatgagacagtgctactaggagtagactttcctgacagctctagcccgtcttgcacattgggactggttctccccctgtggagtgacactcaagtgtacctcgacggcgacgggggttttagcgtaacaagcggcggacagtctcgaattttcaagcctattagcatccaaactatgtgggccacgctgcaggtgctacatcaagcctgtgaggccgcactgggttccggcctagttcccggaggatccgccttaacatgggccagtcattatcaggagagactgaattcggaacagtcttgtctcaacgaatggactgctatggctgatctcgaaagcctgaggccgccatctgccgagcctggtggatcctctgaacaggaacagatggaacaggccatccgggcagaattgtggaaagtgctggacgtctctgacctggaaagcgtgactagtaaggaaatccgccaggcactggaactcaggctgggactgcctctacagcagtatcgggattttattgacaatcaaatgctgctcctggtagcccagcgagaccgcgcttctaggatctttccgcatttgtacctgggtagcgaatggaacgcagccaatctggaggagctccagcgcaatcgcgtgacgcatattctgaacatggcccgagagatagacaacttctaccccgaaaggttcacatatcacaacgtaaggctgtgggatgaagaatccgcccagttactgccgcattggaaagagacccaccggttcatcgaagctgctagggctcaggggacccatgtcctagtccattgcaagatgggggtgtcgcgaagcgccgctacggtcctggcctatgctatgaagcagtacgagtgttccctcgagcaagcactccgacatgtccaagaattaagacctattgcccgacctaatccaggatttctacggcagctgcagatttaccaaggtatactcacggcttcccgccagtcccatgtttgggagcagaaagtgggaggagtgagccccgaggaacaccccgcacctgaagtgtcgactccttttccccctctgccacccgaaccagagggcggaggcgaggagaaagtggtgggcatggaggaatcgcaggcagctcctaaggaagagcccggtccccgtccaagaattaaccttaggggagtcatgcggtccatttctctgctggagccttcccttgaactggagtccacgagtgaaacttcagacatgcctgaagttttctcttcgcacgagtcttcccacgaggagccattgcagccatttccacagttggccaggacaaagggtgggcaacaagtggataggggacctcagcccgcactaaaatctaggcagtccgtggttactctgcagggatctgccgtggtggctaaccgcactcaagccttccaggaacaggagcagggtcaaggccagggccagggagaaccttgtatctcttccacaccacgtttcagaaaggtggttagacaggcatccgttcacgattccggagaagagggagaagcctag

SEQ ID NO: 240693 - DNA, 2091 bp, synthetic construct
  misc_feature 1..2091: note = Description of Artificial Sequence: Synthetic coding sequence
  source 1..2091: mol_type = other DNA
atgctgctctggatactgctactggaaacctctctctgcttcgccgctggcaatgtgacaggagatgtctgcaaggagaagatatgctcatgtaacgaaatcgaaggtgatctccatgtcgattgcgagaaaaagggctttacctcacttcaaaggttcaccgccccaacctctcagttctatcatctgttcctgcacgggaactccctcacaaggctgttcccaaacgagttcgcgaacttttataacgccgtgagcctgcacatggaaaataacggcttgcacgagatcgtgccgggagcttttttgggacttcagctggttaaacgattgcatatcaacaacaataaaatcaagtctttccgcaagcagacatttttaggcctggatgacctcgagtaccttcaggccgactttaatctgctgcgcgacatcgatccaggcgcattccaagaccttaacaagctagaagtcctcatcctaaatgacaatctcatctccacactgcccgctaatgtctttcagtacgtgcccatcacgcacctggatttgcgcggtaataggctcaagaccctgccatacgaggaggtgctcgagcaaattcctggcatcgcggagattctccttgaagataatccatgggattgcacttgtgatctactcagcctgaaagagtggctggagaatattccaaaaaacgctctcatcggccgagtggtctgtgaggctcctactaggctccaaggaaaagatttgaacgaaacaacagagcaggacctatgccccctgaagaatcgcgttgactcctctctgccagcccctcctgcacaggaggaaacattcgctcctgggcctcttccaaccccatttaagacaaatggccaggaggaccacgccacacccggttctgctcccaacgggggaacaaaaataccgggtaactggcaaataaagattcgccctactgctgccattgcgaccggcagtagtaggaataaacctctggctaattctttaccctgtcccggtggctgttcttgcgatcatattcctggaagtggactgaaaatgaattgcaacaaccgtaacgtgagcagcctggcagacctgaaaccgaagctttcaaatgtacaagagctgttcctcagagacaacaagattcacagtatcagaaaaagccacttcgtggactacaagaacttgatcctcctggacctcggcaataataatattgccactgtcgaaaataatacatttaagaacctgctggacttgagatggctctacatggatagtaattacctggatactctatcacgtgaaaagttcgctgggttacagaatcttgagtaccttaatgtagagtacaacgctatccagctgatactgccagggactttcaacgctatgcccaaactgcggatacttatcctgaacaacaacctgctccgctccctgcccgttgatgtttttgcaggtgtcagtctttccaaattgtccttgcataacaactactttatgtatctgcctgtggcaggtgttctcgatcagctgacatctatcatacaaatcgatcttcacggcaatccttgggagtgctcttgtaccatcgtcccttttaagcagtgggcagaaagactgggatcggaagtcctgatgtctgatttgaaatgcgagacacctgtaaatttctttaggaaggacttcatgctgcttagtaacgatgaaatctgtccccagctgtacgcaaggatttctcccactttgactagccacagtaaaaattccaccggactcgctgagaccggaacccatagtaactcctacctcgatacatcgcgcgtctctatttctgtgctggtgcccggtcttcttctcgtgttcgtgacgtcagccttcacagtcgtcggcatgcttgttttcattttacggaatcgtaaacggagtaaaagacgagacgccaattcatctgctagtgaaattaacagtctacaaaccgtctgtgattcttcatattggcacaacggcccatacaatgctgacggcgcacaccgcgtctacgattgcggctcacactctctgagcgactag

SEQ ID NO: 240694 - DNA, 2175 bp, synthetic construct
  misc_feature 1..2175: note = Description of Artificial Sequence: Synthetic coding sequence
  source 1..2175: mol_type = other DNA
atgctgtcgggcgtgtggtttctctctgtcctgactgtggctggtatcctgcaaacagaaagtaggaagactgccaaggacatttgtaaaatccgctgtttgtgtgaggagaaggagaacgtgcttaacattaactgcgaaaacaaaggcttcaccactgtgtcactgttgcagcccccacagtatagaatctaccagttattcctgaatgggaatctgttgaccagattgtatcctaacgagttcgttaattattccaacgctgtcaccctgcatctcgggaataatggcctgcaggagattcggactggggcattttctgggctcaaaaccctgaaacggttgcatctcaacaacaacaaactggaaatccttagagaggatacttttttgggactcgaaagtctggagtatttacaggcagactacaactatatttctgccatcgaagcgggagccttctctaagcttaataagctgaaggtacttattctcaacgacaacctgctgctgtcactgcccagtaacgtgtttcggttcgtgctcttgacccacctggacctacgtggtaatagactaaaagtaatgcccttcgcaggagtcctcgagcacataggaggcatcatggagatacagcttgaggagaatccgtggaactgtacatgtgacctcctacctttgaaagcctggctggataccatcaccgttttcgtgggagaaattgtgtgtgagactccttttcggctgcatggcaaagatgtgacacaactaacgcggcaagacctgtgccctcgcaagtctgctagtgacagctctcagcgcggttcccatgctgacacacatgtacagaggctgagccctacgatgaacccggctcttaatcccaccagagccccaaaagcttcccgaccaccgaagatgcgcaataggcccacgcccagggtcaccgtgtcaaaagatagacagtcttttggcccaatcatggtgtatcagaccaagtcccctgtgccattgacctgcccctccagttgtgtatgcacaagtcagtcctccgataacggtttaaacgttaattgtcaggaaagaaagttcaccaacatttcggaccttcaacccaagcctacctcccccaaaaagctatacctgactgggaattacctgcagactgtttataagaacgacctgcttgagtattcttctcttgatctgttgcatcttggtaacaaccgcatagctgtgatccaggagggggctttcaccaaccttacttccctgcgcaggctgtatctgaatggtaattaccttgaagttctttatccttcaatgttcgacgggctccagagtctacagtacttatatttggagtataatgtgatcaaggagatcaagccactgactttcgatgccttgatcaaccttcagctactgtttctaaacaacaatcttctgcgctccctgcctgataatatcttcgggggaacagccttaaccaggctgaacctgaggaataaccatttctctcacctgcccgtgaagggggtgttggatcagctgcctgctttcatccagattgatttacaggagaacccttgggactgcacctgtgatataatgggcctgaaagattggactgagcatgcaaactccccagtcattatcaatgaggtgacatgtgagtcacccgcaaagcacgccggagaaattctcaaattcttaggaagggaggcaatctgtcccgactcccccaacctctccgatgggactgtactgagtatgaatcacaacacggacacacctcgctctctctctgtttctccaagctcctatcctgaactgcacactgaagttccgttgagcgtgctgatcttgggcctgcttgtggtgttcattctcagtgtctgtttcggggctgggctgtttgtgttcgttctaaagcgccgaaagggtgtgcccagcgtgccacggaacacgaacaatctggacgtcagtagctttcagctccaatatggcagctacaacacggaaacccacgataagactgacgggcatgtttacaactacatcccccctccagtcggtcaaatgtgccaaaatcccatctatatgcagaaggagggtgatcccgtcgcgtactatagaaatctgcaggagtttagctactccaatcttgagtag

SEQ ID NO: 240695 - DNA, 2538 bp, synthetic construct
  misc_feature 1..2538: note = Description of Artificial Sequence: Synthetic coding sequence
  source 1..2538: mol_type = other DNA
atgctatccggggtgtggttcctgtccgtgctcaccgtagccggtatattgcagacagagtcacgcaagaccgcaaaagatatttgcaagatcagatgcctctgcgaggagaaagagaacgtcctcaatatcaactgcgagaacaaaggattcactaccgtgtcactgctgcagccccctcagtatcggatctaccaactgttcctgaacggaaatctgctgacacgcttatatccaaacgaatttgtgaactattctaacgctgtgactctccacctcggaaataatggattacaagagatcaggacaggtgctttcagcgggctgaagacactcaagcggctccacctgaataacaacaagctggagattctccgggaagacaccttcttggggctggaatcccttgagtacctccaggctgattacaactacatctccgctattgaggcgggtgcatttagtaagttgaacaaattgaaagtcctaattttgaatgataacctgctcctgagcctaccctccaatgtctttcggttcgttttgctgactcatctggatctacgcggaaacaggctcaaagttatgccttttgctggtgtgttggaacatattggaggcatcatggagatccagctcgaggaaaacccttggaactgcacatgtgacctgctgcctttgaaggcttggttggacaccatcaccgtcttcgttggggaaattgtgtgtgagactcctttccggctgcatggaaaggatgtgactcagttgactcgtcaggatctgtgccctcgcaagagcgcttcagactcaagtcagcggggttcccatgccgacacccacgtgcagagactaagtcctacgatgaatcccgcactgaaccctacccgggcacccaaggccagccgaccgccaaaaatgagaaaccgcccaactccacgcgtgaccgtgagcaaagatcggcagtcctttgggcctattatggtgtatcagaccaaaagcccagttcctctgacctgcccttccagctgtgtttgcacatctcagtccagtgataacggactaaacgttaactgccaagaaaggaaattcacaaatattagcgatctccagcctaagcccacctctcctaaaaagctctacttgaccgggaattatctccagaccgtttataagaatgacctgctagagtacagttctcttgacctgttgcatttgggcaataatagaatcgctgtaatacaggagggcgcattcactaatctgacctctctgaggcggctttatctgaatggaaactacctggaggtcctttatccctcgatgttcgacggccttcagagcttgcagtacctgtatctggagtataacgtcatcaaggaaattaagccgcttacctttgacgcgcttatcaatctacagctgctgttcctgaacaacaacttgctgcgcagcctcccagataatatattcgggggaaccgccttgaccaggctgaaccttagaaataatcatttctcacaccttcccgtgaagggggttctggaccagctgcctgcctttatccagattgacttgcaggagaacccctgggattgtacctgtgacatcatgggtctcaaagactggacagaacacgcgaactcaccagtaatcatcaacgaagttacttgcgaatctcccgctaaacacgccggagagattcttaaattcctgggcagggaggccatctgtcccgactccccgaatttatccgatggtactgtgctgtccatgaaccacaatactgacacgccgagatccctgtcagtgtcgccgagttcttacccagagctgcacacagaggtcccactttcagtgttgatcttggggttgctggtcgtgtttatcctaagcgtgtgttttggtgccggtctgttcgtgttcgtgctgaaacgtcgcaaaggagtacctagcgttccaaggaatactaataacctcgatgtctcctcttttcagcttcaatacggttcatacaacacagaaacacacgataagaccgacggccatgtttacaactacatccctccacccgtgggccaaatgtgtcagaatcccatctatatgcagaaagagggagatcccgtggcatattaccgcaatcttcaggaattttcatattcaaaccttgaggaaaagaaagaagagccggcaacccccgcatacactatttctgccacagagcttctagagaagcaggccactcctcgcgaaccggagctcctgtaccagaatattgccgagagggtcaaggagctgcccagcgcgggactggtgcactacaatttttgtaccttaccaaagcgccagttcgccccttcttatgaaagccgaaggcagaaccaggatagaatcaataaaactgtgctgtatggaacacccaggaaatgttttgttggacaaagcaagccaaatcatccattgctacaagcaaaaccccagtccgagcctgattatctggaagtgctggaaaagcagaccgctatcagccaactctag

SEQ ID NO: 240696 - DNA, 2538 bp, synthetic construct
  misc_feature 1..2538: note = Description of Artificial Sequence: Synthetic coding sequence
  source 1..2538: mol_type = other DNA
atgctttcaggtgtgtggttcttgtcagtactgaccgttgctggtattctacaaacagagtccaggaagaccgcaaaggacatatgtaagatcagatgtctctgcgaggagaaggagaatgtgctgaacatcaactgtgagaacaagggcttcaccactgtgtcattgttgcaaccaccccaataccgtatttatcagctctttctgaacggaaatctgttaacccggttatatcctaacgagtttgtgaactacagcaatgccgtgactctgcatctgggcaacaacggcctgcaggagattcgtaccggggcattctctggcctgaagacactgaagagactgcatttaaacaataacaagctggaaatactcagagaagacactttcctcggattggaaagcctggagtatctgcaggcggactataactacatttcagcaatcgaagccggtgctttctcaaagttgaacaaacttaaggttctgatactgaacgacaacctgctattgagtctaccatctaatgtgtttcgatttgtcctgctaacccatctcgaccttaggggaaatcgcttgaaggtgatgcccttcgccggagtcctcgagcatattgggggtatcatggagatccagcttgaagaaaacccctggaactgtacgtgcgatctgctgccccttaaagcgtggctggatactatcaccgtattcgtcggagagattgtctgcgaaaccccgttcaggctgcacgggaaggacgtgacgcagttgacccgacaagatttatgcccgaggaaaagtgcctctgacagtagtcagcgtggcagccatgcggacacccatgtgcagcggcttagtccgactatgaaccctgccctcaaccctacccgagcgcctaaggctagtcgccctccgaaaatgagaaacagacctacccctagagttacggttagtaaagatcgacagagctttggacccatcatggtctatcaaacaaaatctccggtgccattgacgtgccccagctcctgcgtgtgtacgagccagtcttcagacaacgggctcaatgtgaattgccaggaacgaaaatttacgaacatatccgacctccagcctaagcccacttctcctaagaaactgtatctgactggcaattatctgcagacagtctacaagaacgacctattggagtatagctctctggatttgttacatctcggcaataaccgtattgccgtcattcaggagggtgcttttactaacctgacctcactgcgccgactctatctaaacggcaactacctggaggtgctgtaccctagtatgtttgacggcttacagtccctgcagtatctataccttgaatacaacgtgatcaaagaaattaaaccgctgaccttcgatgcactgattaacctccagctgcttttcctcaacaataacctgctccggagcttgccagacaacatctttggtggcacagcactgactaggctgaacttgcgcaataaccacttttctcacctccctgtgaaaggtgtgctcgaccagctgcctgctttcatccagatcgatctccaagagaacccctgggattgcacctgcgatatcatgggactgaaagactggaccgagcacgccaactcacctgttatcataaacgaggttacctgcgagtctccagccaagcatgcaggggagatcctgaaattcctcggaagggaagcaatctgtccagacagccctaacctgagcgacggcaccgtcctatcaatgaaccacaacacggatactcctcggtcactgagtgtgagtcctagttcctaccctgagctgcacacggaagtgccactctcagttcttattctgggcctgcttgtggtctttatcctgtctgtttgctttggcgcaggcctctttgtgttcgtactgaagagaaggaaaggagtgccttccgtcccgcgtaatacaaacaacttagatgtatcctcctttcagctccaatatggctcttataatacagagacgcatgacaagaccgacgggcatgtatacaactatattccaccacctgtggggcagatgtgccagaatcccatctacatgcagaaggaaggagatcccgtggcatactaccgaaacctgcaggaattctcatactctaatctggaagaaaagaaggaggaaccagccacaccggcttacaccatctccgccactgagctactggagaagcaggctacccctcgggaacccgagcttctgtatcaaaacatcgcagagcgtgttaaggagcttcccagcgctggcctagtccactataatttttgcactcttcctaagagacagtttgcacccagctatgaatcccgacgccaaaatcaagatcgtattaacaagaccgtgttatatggaacaccaagaaaatgtttcgtcggacagtccaagcctaaccacccccttctccaggcaaaaccccagtccgaacccgactatctggaggtgctggagaagcaaacagccatctcccagctgtag

SEQ ID NO: 240697 - DNA, 2538 bp, synthetic construct
  misc_feature 1..2538: note = Description of Artificial Sequence: Synthetic coding sequence
  source 1..2538: mol_type = other DNA
atgctctctggggtatggtttttgagtgtgctgactgtggctggcatcctgcagaccgaatctcgtaagaccgccaaggatatttgtaaaatccgatgtctgtgcgaagagaaggagaacgtgctcaacattaactgcgaaaacaagggattcactaccgtcagcttgctgcagcctccacagtaccgaatctatcagctgtttctcaatgggaaccttctgacgcgcctctaccctaatgaattcgtcaattactctaacgctgtaactctgcaccttggtaacaatggtctgcaggaaattcggacaggggcattttccggcttgaaaaccttgaagcggctccatctaaacaacaataaattagaaattctccgcgaggacaccttcctggggttggaaagtctggaatacctgcaggccgactacaactacatcagcgcaattgaagcaggtgcgttctctaagctgaacaagctcaaagttctaatcctgaacgataacctgctcctctccctgcccagcaatgtctttcggttcgtcctgctgacacatctagacctccggggtaaccggctcaaggtgatgccatttgcaggggttctcgaacacatcggaggcattatggagattcagcttgaggaaaatccttggaattgcacatgtgacctgcttccactcaaagcctggcttgacaccatcacggtcttcgtgggcgagatcgtatgcgagaccccgttccggctccatggtaaggatgttacccagctgactcgtcaggatctttgccccagaaaaagtgcatcagacagctcccaacgcggatcacatgctgacactcacgtccagcggctgtcaccaacgatgaatccagccctaaatcctacaagagcgcctaaggcttctagacccccaaagatgaggaaccgtcccacacccagagtgacggtcagcaaggaccgtcagagcttcggaccgattatggtgtaccagacaaaaagccctgtgccgctgacatgcccgagtagctgcgtgtgcacctcccagtcgtccgataacggcctgaacgtgaactgtcaggaacggaagttcactaatatctccgacctgcagccaaagccaacaagccctaaaaaactctatctgacagggaactacttgcagaccgtatataagaatgatctcctcgagtattcttcacttgacctgttgcaccttgggaataacaggatcgcggtgatacaagaaggagccttcactaatctcacttccctaaggcgcctctacctgaacgggaactacctggaggtcctgtacccctccatgttcgacggattgcagtcgttgcagtatctgtacctggaatacaacgtcattaaagagattaaaccactgactttcgacgctttaatcaacttacaattgttgtttcttaacaacaacctgctgcgcagtttgcccgacaacatctttggtgggacagctctcaccagactgaatctgcgcaataatcacttttcacacctaccagtgaagggcgtcctggatcagttaccagcgtttatccaaattgatctgcaggagaacccgtgggactgcacctgtgatattatgggcctcaaagattggaccgagcacgccaatagtcccgtgataatcaacgaggtgacctgtgagagcccagccaaacacgccggagaaattttgaaatttctcggcagggaagcaatttgcccggactctcccaatctgtcagatgggacagttttgagtatgaatcataatacagatacccctcgttccttgtcggtatcaccaagtagttaccccgagctgcacacagaggtgcccttaagcgtgctgatacttggcctgctcgtcgtgtttatcttaagtgtgtgtttcggtgccggacttttcgtgtttgtgcttaaacgacgcaagggcgtcccttccgtcccccgaaatactaacaaccttgatgtgtctagcttccagttgcaatacggtagctacaacactgagacccatgataagacggacggtcatgtgtacaattatatccctcctcctgtcgggcagatgtgccagaaccctatttacatgcaaaaggagggtgatcccgtcgcatactaccggaacctgcaggagttttcctatagcaatctcgaggagaagaaggaggaacctgcaactccagcctataccattagcgccacagagctattagagaaacaagcaacaccaagggagcccgaattgttgtaccaaaacatcgctgagagggtcaaggaactgccttccgctggccttgtgcactacaatttctgtaccctgccaaaacggcaatttgccccttcttatgaatccaggcgtcaaaatcaggataggattaataaaaccgtcttgtacggaactcccagaaagtgctttgtagggcagtctaaaccaaatcaccccctgctgcaagccaaaccacagagcgagccagactatcttgaagtgctcgaaaagcagaccgccatctctcagctgtag

SEQ ID NO: 240698 - DNA, 2538 bp, synthetic construct
  misc_feature 1..2538: note = Description of Artificial Sequence: Synthetic coding sequence
  source 1..2538: mol_type = other DNA
atgctgagcggggtatggttcttaagcgtgctcacagtcgccggaatcctgcagacagagagccggaagactgccaaagatatatgtaagatccgctgtctctgcgaggaaaaggagaatgtgctgaatataaattgcgaaaacaaaggcttcactactgtgagtctactccagccacctcagtaccgcatctaccagctgtttcttaatggcaacctccttaccagactgtatcccaatgaattcgtcaactattccaatgcagttaccctgcacctcggcaataacggcctgcaggaaataaggacaggagctttctccggattgaaaaccctcaagaggttgcacctgaataacaacaagctcgagatactgcgggaggacacattcttgggcctcgagtccttggaatatctgcaggcggattataattacattagtgccatcgaagcaggcgctttctccaaactcaacaagcttaaggtactcatcttaaatgataatcttctgttgagtctgccaagcaacgtttttcgtttcgtactcctgactcacctggacctccggggaaaccgtcttaaggttatgccattcgctggggtgctcgaacacattgggggaatcatggaaattcagctcgaagaaaatccctggaattgcacctgcgacctgttgcccctcaaggcctggttagacacaattacagtgtttgtaggcgaaatcgtatgtgagaccccattcagactccacggaaaggacgttacccaactgacaaggcaggacctgtgcccacgcaagagtgcctccgattcttctcagcgagggtctcatgcagacactcacgtgcaacgtcttagcccaacaatgaaccctgcactcaatcctactagagccccaaaggcaagtcgccctccgaagatgagaaataggcctacccctcgcgttactgtgtctaaggatagacagtctttcggaccaataatggtgtaccaaacgaagtctcccgtcccactcacgtgcccctctagctgcgtctgtacctctcagagctcagacaacggccttaatgtgaactgtcaggaaaggaagtttaccaacatctccgatctacagcctaaaccgaccagcccaaagaaactctacctgactggtaactatttgcagacggtttataagaatgacctgctcgagtatagcagtttagaccttctacacctgggaaataaccggattgcagtcattcaggaaggcgcttttaccaatcttacatctctccgtaggttgtatcttaatggcaactatctagaggtgctttaccccagtatgttcgacggactgcaatcacttcagtatttatacctcgaatacaacgtgatcaaagagattaagccgctcacctttgacgccctgatcaacttgcagttgctgttcttgaataacaacctactgcggagtttgcccgataatatctttggtggaacagccctgacaagactgaatttgcggaacaatcacttttctcatctccccgtgaagggagtgctggatcagctccccgcttttattcagatcgaccttcaggagaacccatgggactgcacatgcgacatcatgggacttaaggattggacggagcacgcaaactcccctgtcatcataaacgaagttacgtgtgagtctcccgcaaagcatgcgggtgagattttgaaattcctcggaagagaagcaatctgcccggatagtcccaatttgtccgacggcactgtgctgagtatgaaccacaacactgacactcctaggtccctctcagtgtctccttcaagctatccagagctgcatacagaagtgccactttctgtgctcattctcggactgctcgtggtatttattttgtctgtgtgtttcggtgcgggactgttcgtttttgttctgaagaggcggaagggcgtgccaagcgtccctcggaatacaaacaatcttgatgtgtcctccttccagctacagtatggtagctacaacactgaaacacacgacaagaccgatggtcatgtatacaattacatccctcccccagtggggcagatgtgtcaaaatcccatatatatgcagaaagagggggatccagtcgcttattaccgtaacctacaggaattctcctattctaacctcgaggagaagaaggaggaacccgctacccccgcttacaccatcagcgcaacggaacttctggagaagcaggccactccgagagagcctgaattactgtatcagaacatagctgaacgggtgaaagagctgccgagtgctggtttggtgcactacaacttttgcacactgcccaagcgacaattcgctccaagttacgaatcccggagacagaaccaagaccgcattaacaagactgtgttgtatggaacacctcgtaagtgctttgtgggccagtcaaaaccaaaccacccccttctacaggcaaaaccgcagtccgagcccgattacctcgaggtcttggaaaaacaaaccgcgatttcacaactctag

SEQ ID NO: 240699 - DNA, 2538 bp, synthetic construct
  misc_feature 1..2538: note = Description of Artificial Sequence: Synthetic coding sequence
  source 1..2538: mol_type = other DNA
atgctttctggagtttggtttctgtcggtcttaactgttgccggaatcttgcagacagagagccgcaaaaccgccaaggacatctgtaaaattcgctgtctgtgtgaggaaaaggagaacgtactgaatattaactgcgagaacaaaggctttactactgtttcactcttgcagcctccccaatacagaatttaccaattatttctgaatggtaacctgctgacacggttataccccaacgagttcgtgaactacagcaatgcagtcacactccatctcggcaacaacggtcttcaggagattcgaacaggcgctttctctggactgaagacacttaagcgccttcatttgaataacaacaaacttgagatcctacgggaggatacttttttggggctggagagtctcgaataccttcaggctgattacaattacatctccgcaattgaagccggagctttcagcaaacttaataaactgaaggtgctcatcctcaatgacaatctgcttctgtctcttccatcaaacgtgtttaggttcgtgctgctaacacaccttgatctgcgcggaaatcggttgaaggtgatgcccttcgcaggggtgctggaacacatcgggggaatcatggagatccagctggaggagaacccgtggaactgcacatgcgacctgctgcccctcaaggcgtggctggacacgataaccgtcttcgtgggcgaaattgtttgtgagacgccatttaggctgcacgggaaggacgtcacgcagttgacacggcaggatctgtgtcccaggaagtcggcttctgactcatctcagaggggcagtcacgccgatacacatgtgcagaggctgagtccaactatgaaccccgcactgaatccaaccagggcacccaaggcgtccaggcccccaaagatgagaaacagacccacgcctagagtgacagtctctaaggacagacaatctttcggccctatcatggtctatcaaaccaagtcacctgtccccctcacttgcccttcatcatgtgtctgtacctctcaatcttctgataacggcctcaacgtcaattgtcaggagcgtaagttcacaaatatctctgacctccaacctaaaccaacctctcccaaaaaactttatctcactggcaactacctgcaaactgtatataaaaatgacctgcttgagtattccagtcttgacctcctacacttagggaacaatcggatcgccgtcatccaggagggggctttcacaaatctgacaagcctgaggagattatatcttaatggtaactacttagaagtgctgtacccctctatgttcgatggcctgcagtccctccagtacttgtacctggaatataatgtgatcaaagagattaaacctcttacatttgacgctctgatcaatctccagctgctgtttctgaacaataaccttctgcgctccctaccggacaacatctttggaggaacagcactgacaagattaaatcttagaaacaatcatttctcccacctcccagtgaaaggcgtgctggatcagctccctgcattcattcaaatcgatctgcaggagaacccatgggactgtacttgtgacatcatgggcctgaaagattggaccgagcacgctaattctcctgtgattatcaatgaagttacttgtgagtcccctgcaaagcacgcaggcgaaattttgaagtttctaggaagagaagccatctgcccagacagtcccaatttgtctgatggcaccgttctttctatgaatcacaatacagatacacctcgctctctgtctgtgagcccgagctcctatcctgagctacataccgaggtgcctctgagcgtgttgattctgggtctcttggtggtgtttatcttatccgtgtgctttggcgctgggctgtttgtctttgtgctgaagcgacgaaagggcgtaccatctgttccaaggaacactaacaatttggacgtctcttcgttccaacttcaatatggttcttacaacactgaaacacacgataagactgacggccacgtgtacaactacatccccccacctgtggggcagatgtgtcagaatccaatctacatgcagaaggaaggcgatcctgtcgcatattatcgtaatctgcaggagttttcctactcaaacctcgaagaaaagaaggaggaacccgcaacgcctgcttacacgatttccgctacagagctcctggagaagcaggccacccccagagaacccgaactgctgtatcagaatatcgccgagcgtgtaaaggaacttccgagcgccggtctggtgcattataatttttgcaccctgccaaagcgccaatttgcccctagttacgagtctcgcagacagaatcaggacaggattaataagactgtgctgtacggcacgcccaggaagtgcttcgtgggccagtctaaaccaaaccaccctctgctgcaggcgaaaccccagagtgagcctgattatcttgaggttctggagaagcagaccgccatttcacagctttag

SEQ ID NO: 240700 - DNA, 2934 bp, synthetic construct
  misc_feature 1..2934: note = Description of Artificial Sequence: Synthetic coding sequence
  source 1..2934: mol_type = other DNA
atgaaaccatccatagctgagatgctgcaccggggaaggatgctgtggatcattcttctctctaccatcgctttaggctggacaacccccataccccttatcgaagactcagaggagattgacgagccctgctttgatccgtgttattgcgaggttaaggaatccctctttcatatccactgtgactcaaaggggtttaccaacatttcccagattactgaattttggagtcggccattcaaattgtatctccaacgcaacagtatgcggaagctgtacacgaacagtttcttgcacctgaacaatgctgtatccattaacttaggaaacaatgcacttcaggacatacagacgggcgcattcaatggcttgaagattttgaagagactgtatcttcacgaaaataaactcgacgtcttcagaaacgacacctttcttggactggaatcactcgagtatttgcaagcggattataatgttatcaaacgcatcgagtccggcgcttttcggaacttgagcaagcttcgagttcttatcttgaatgacaacctgattccaatgctgcctacaaacctgtttaaagcagtctcacttactcacctggacctgcgaggcaaccggcttaaagtgctgttctaccgtggtatgcttgaccacatcggacgatccctgatggagctgcaactggaggaaaatccctggaactgtacctgcgagattgtgcagctcaaaagctggcttgaacggattccatatacagctcttgtgggggatataacatgtgaaacaccctttcactttcatggaaaagatttacgcgaaatcaggaagaccgagttgtgtccattgctgagcgactccgaagtcgaggcttcacttgggattccccacagctctagcagtaaggaaaacgcttggccaactaagccatcttctatgttatcttcggtgcacttcacagccagtagcgtggaatataaatcaagcaacaagcagccgaagcccaccaagcagccacgtacccctcggcctccttccacatcccaggccttgtaccccggtcccaaccagcctcccatcgctccatatcagacgagaccacccatccctattatctgtcctacgggatgtacgtgcaatcttcacataaatgatctgggcttgacagtaaactgtaaggagcgcggatttaataacatttccgagctgctccctagaccccttaatgccaagaaactatatcttagttccaatctgattcaaaaaatttatcgctccgatttttggaattttagctcattggatttacttcacctggggaataaccggattagttacgtgcaggacggcgcttttattaacctgcccaaccttaagtctctgttcctaaatggaaatgacattgagaaactgaccccaggaatgtttcggggacttcaatccctccattatctgtactttgagttcaacgtcataagggaaattcagcctgccgcatttagcctcatgcctaatctcaagctgctttttctgaacaataacctgctccgcactctcccaacagacgcgtttgccggaaccagcctggcacggttgaacttacggaagaactatttcctgtacttgccagtggccggagtactggaacatctcaacgcaattgtgcagatcgatctgaacgagaatccatgggattgtacatgcgaccttgtaccctttaaacaatggattgaaaccatttcgagtgtgagtgtggtgggtgacgtcttatgccgctcaccagagaacctaacacaccgcgacgtgcgcacaatagagctggaggtactatgccccgagatgttacacgtcgcaccagccggtgagagcccggctcagcctggagattctcatctgattggagccccaacttcggcttccccgtacgagtttagtcctcctggcggtcccgtgccactctcagtgctcatcctttctctcctggttctgtttttctcagctgtttttgtggccgctggcctgttcgcatatgtcctgcggagaaggagaaagaaactgcccttccgctcaaagaggcaggaaggagtggacttaaccggcattcagatgcagtgccacagactgtttgaggatgggggtggcggtgggggtggatctggaggtggtgggcgtcccaccctctcttcgccagaaaaggctccaccagtgggacatgtttatgaatatattcctcacccggtgacccagatgtgcaataatcctatctacaaacccagggaagaggaggaagtcgcagtgtcgagtgcccaagaagctggatctgccgaacgcggtggccctggaacgcaacctccagggatgggcgaagctctgttgggcagtgagcagtttgccgaaacccccaaagaaaaccacagtaattatcgaaccctgctcgagaaggaaaaagagtgggctttggcagttagttcgtctcaattgaatactattgtcacggtgaaccatcatcacccccatcacccagctgtaggcggagtgtcgggtgtggtgggaggaactggtggcgaccttgccggttttagacaccatgagaaaaatgggggagtggtcctcttccccccagggggtggttgcggctcaggcagtatgctgctcgatcgggagagaccacaaccagcaccatgcaccgtgggatttgtggattgtttatacggcacggtcccaaagctcaaagaacttcacgtccatccacccggtatgcaatatcctgatcttcagcaggacgccaggctgaaagagactctcttgtttagcgcgggtaaaggctttaccgaccaccagactcaaaaaagcgactacctggagctccgagccaagctgcaaacgaaaccagattacttagaggtgcttgagaagaccacctacaggttttag

SEQ ID NO: 240701 - DNA, 2934 bp, synthetic construct
  misc_feature 1..2934: note = Description of Artificial Sequence: Synthetic coding sequence
  source 1..2934: mol_type = other DNA
atgaagccaagcatagcagaaatgttgcatcggggtcggatgctctggataatcctgttaagcaccattgctttagggtggaccacgccaatcccacttatagaggattcagaagaaatcgatgaaccttgttttgatccctgctactgtgaggtgaaagaaagcttgttccatatccattgcgatagtaagggtttcactaatatctcccagattacagagttttggagtaggccttttaagctctacctgcagcgcaattccatgcgcaaactgtacaccaactcattcttacatctgaataatgcggtgtctattaaccttggcaacaatgcactccaggacatccagaccggcgcattcaatggcttaaagatattgaagcgtctttacctccatgaaaacaagttagacgtgtttaggaatgacaccttcctgggcctggaaagcctggagtatttgcaggcggattacaatgtgattaagcgaatcgagagcggagcctttagaaacctgagtaagctccgggtgctaatcctaaatgacaatttgatccccatgcttcccactaatctatttaaggccgtgtcgctgacgcatttagatttgagaggcaataggctgaaagttttattttatcgtggcatgttggatcacattggaagatccctgatggagttgcagctcgaagagaatccctggaattgtacgtgcgaaatagtccagctgaaatcatggttagagagaatcccatatacagccctcgttggcgatatcacatgtgaaaccccctttcacttccacgggaaggatctgcgagagatccgcaagactgagctgtgcccgctcttgtctgactccgaggtggaggccagcctcggcatcccccattcttcctcaagtaaggaaaacgcctggcctacaaaaccatcctccatgctctcttccgtgcactttacggcaagctctgtggaatacaaatcatcgaataaacaacctaagccaacgaaacaacctcggacgccaaggccaccttccacgagccaagccctatacccgggacccaaccagccccctattgctccatatcagaccagaccacccatccctatcatctgcccaaccgggtgcacctgcaatctccacattaatgacctgggtctcaccgttaattgcaaagagagggggttcaataatatatccgaacttctgcctcgaccccttaatgctaagaaactgtacctgagctccaatttgattcaaaaaatttaccgctccgacttttggaacttttcctccttggacctgctgcacctcggaaataacaggatctcctatgtgcaagacggtgcattcatcaacctgcctaacctgaaaagtctcttccttaacgggaacgatatcgaaaagcttacccccggaatgttccggggactccagtccctgcattatttatactttgaattcaatgtcatacgggagatccagccagccgctttctctctaatgccaaacctgaagctcctctttctcaataacaacttgttacgcactctccccacagatgcctttgcgggtactagccttgccaggttgaatctgcgaaagaactacttcctctatctccctgtcgccggagttctcgaacatctcaatgccatagtgcagatcgatctgaacgagaatccatgggactgcacatgcgaccttgtgcctttcaagcagtggattgagacaatatcctcagttagcgttgttggagatgtgctttgtagatccccagagaatctgacccatagggatgtgcggacaattgaactagaagttttatgccccgagatgttacacgttgcccctgctggagaatcccccgcacagcccggtgactcccacctgattggggcacccaccagcgcctccccctacgagtttagtccgcctggtggaccagtccctctatcagtgctaatcctctccttgctggtgttgttcttctccgcagttttcgtcgccgctggcctcttcgcttacgttctgcgacggaggcggaaaaagcttcctttccggtccaaaaggcaagagggagtggatctcactggtatccaaatgcagtgccataggctgtttgaggacgggggaggtggaggcggaggctcagggggtggtggacggccaacgctgtctagtcccgaaaaggcgcctccggttggacacgtgtacgagtacattccacacccagtgacccaaatgtgcaataaccccatctacaaacccagagaagaagaggaggttgcagtttccagtgcgcaggaagcgggaagtgccgaaagagggggaccagggacacagcctccagggatgggcgaggccctcctcgggtctgagcagtttgctgaaacacctaaggagaaccacagtaattacaggacactgttagaaaaggaaaaggaatgggcgttggcagtgtcctctagccagctcaacaccattgtcaccgtcaaccatcaccacccacaccatccagcagtcggtggagtctctggggtggtgggcggaaccggcggagacctagcaggatttcgccatcacgaaaagaatggaggcgtcgtgcttttccctcccggtggaggttgcggttctgggtctatgctgctcgacagggagcggccacaaccggctccctgtactgttgggtttgtcgactgtctctacggaaccgttccaaaactgaaggagttgcacgttcatcccccaggtatgcagtaccccgatttacagcaggacgccagactgaaggagacactgctgttctctgccggaaaagggttcacagaccaccagacccagaaaagtgattacctcgagctgcgggctaagctgcagactaaacccgactacctggaggtccttgagaaaaccacctatcgattttag

SEQ ID NO: 240702 - DNA, 492 bp, synthetic construct
  misc_feature 1..492: note = Description of Artificial Sequence: Synthetic coding sequence
  source 1..492: mol_type = other DNA
atgaaaccctcaattgcagagatgttgcataggggaagaatgttgtggatcattcttctctccacaatcgccctagggtggaccaccccaattcctctaatcgaggactcagaggaaatcgatgaaccctgctttgacccttgctactgtgaggtgaaagaatcccttttccatattcattgtgactctaagggctttaccaacatcagccagataacagagttctggagccgccctttcaaactctacttgcagcgcaatagtatgagaaaattatacaccaactcatttttgcacctcaataatgccgtttctattaatctgggaaataatgccctgcaagacatccaaacaggcgcattcaatggcctgaagattctgaaaagactctacttacacgaaaataagctagacgtatttagaaatgatactttcctagggctcgagagtctagagtaccttcaggcggactacaacgttatcaagcgatag

SEQ ID NO: 240703 - DNA, 2514 bp, synthetic construct
  misc_feature 1..2514: note = Description of Artificial Sequence: Synthetic coding sequence
  source 1..2514: mol_type = other DNA
atgttcctctggctttttctcatccttagtgctctgattagcagcactaatgcagattccgacatcagcgtcgagatctgcaacgtgtgttcttgcgtgtctgtggagaacgttctttacgttaattgtgaaaaagtgagcgtataccggcctaatcaactgaagccaccctggtcaaacttctaccatctgaacttccaaaacaattttttaaatattttgtaccccaacacattcctcaacttctcgcatgctgtctcacttcatctcggaaataacaagttacagaatattgagggaggcgcattcctggggctgtccgccctgaagcagctgcatctgaacaataacgagctgaagatcctcagggcggacaccttcctgggaattgaaaatctagagtacctccaagcagattataatttaatcaaatacattgaaagaggcgcatttaataaactccacaagctgaaggtgcttatcctgaatgataaccttatatcattcctccctgacaacatctttcgttttgcctcactgacacatctcgatatccggggaaatcggatccagaagctgccttacatcggtgtgctggaacacatagggagagttgtggagttgcagctcgaagataatccctggaactgtagctgcgacctcctgccactcaaagcttggctggagaacatgccatacaacatttatatcggtgaggctatctgtgagacaccctccgacctttatggcaggctacttaaagagacgaacaagcaggagctgtgcccaatggggaccggctcagatttcgatgtgcggatcctcccgccttcacagctggagaacgggtatactaccccaaatggacatacaacccagaccagtctacatcgcctggtcaccaagcctccaaaaactactaatccgtcgaagatttcgggcattgtcgctggtaaggcgctcagcaaccgcaatctcagtcagattgtgtcttaccagactcgggtcccccctttaacaccgtgtccagctccctgcttttgtaaaactcacccttctgatctgggcctcagtgtgaattgccaggaaaagaatattcagtccatgtcagaactgatccccaagcccctgaacgctaagaagcttcatgtcaacggaaactccattaaagacgtggacgtctctgactttactgatttcgagggcctggatttactccacttggggtcaaatcagatcaccgtgataaagggagacgtgttccacaatctgaccaatctgagaaggctttatctgaacggaaatcagatagagcggctgtatcctgagatcttctcaggactgcacaacctgcagtatctgtatctggagtacaatttgataaaggaaatatccgctggaaccttcgactcaatgccgaacctgcagctcctctacctaaacaataatctactaaaatctctccccgtttatattttctctggcgcacctcttgccagactcaatctccgaaataataaattcatgtatcttcccgtgagtggtgtcctggatcagctgcagtcactgacacagatcgacctggaaggaaatccatgggactgcacttgcgatctggttgcgctcaagttgtgggtggagaagctatctgacgggatcgtggttaaagaattaaaatgcgagacccccgtacagtttgctaatattgaactcaagagcctgaaaaacgagatcctgtgtcctaaacttctaaacaaaccctctgctcctttcactagtccagccccagcaattacgttcaccacgcccctcggccctataagatcccccccaggcggacccgtacccctgtccattctgattttgtccatcctggttgtgcttatcctgactgtgtttgtagctttttgcctgttggttttcgttcttcgtcgaaacaagaagccgaccgtgaagcatgaaggactgggcaatcctgattgtgggtccatgcaattgcaactgcggaagcacgaccataagaccaacaagaaggacggattgtctacagaggcgttcattccccagaccatagaacagatgtctaagtcgcatacttgtggcttgaaagagagtgaaactggtttcatgttcagcgaccccccaggacagaaagtcgtaatgagaaacgttgccgataaggagaaagacttgcttcatgtggatactcgaaaacgactttctaccatcgacgagctggacgagctgtttccttctagggactctaatgtctttatccaaaactttctcgaatccaagaaagagtacaactctatcggggtgagcggttttgagatcaggtacccagagaagcagcctgataagaagtccaaaaagtccttaattggtggcaatcacagcaaaattgtggtggaacaaaggaagtccgaatacttcgagctgaaggctaaactgcagtcatctccagattatctgcaggtgctcgaggaacagactgcactgaataaaatatag

SEQ ID NO: 240704 - DNA, 2514 bp, synthetic construct
  misc_feature 1..2514: note = Description of Artificial Sequence: Synthetic coding sequence
  source 1..2514: mol_type = other DNA
atgtttctgtggcttttcctcatcctctctgccctcatcagttccaccaacgctgactccgacatctcagtcgagatttgcaacgtctgttcttgtgtgtccgttgaaaatgtgctttatgtgaactgtgagaaagtttccgtgtaccggcctaaccaacttaagccaccttggtctaatttttatcatctcaatttccagaataattttctgaacatactgtacccaaacaccttcctgaatttcagccatgccgtatctctgcacctgggtaacaataagctacagaacatcgaaggtggggcattcctgggcttatccgccctcaaacagctacacctgaacaacaacgaactgaagatcctgagggcagacactttcctcgggatcgagaatctagagtatctgcaggccgattacaatcttataaaatacatcgaacgaggcgcattcaacaagcttcacaaactcaaagtgttgattttgaacgacaacctgatctctttcctccccgacaacatatttagatttgcaagtcttactcacctggatattagaggcaatagaattcaaaagctgccatatattggcgtactggagcacatcggcagggtagtagaactgcaactggaggacaacccatggaactgtagctgcgacttacttcccctgaaggcctggctagaaaacatgccttataacatctatatcggtgaagcaatatgcgagaccccctccgacttgtatggacgcctgcttaaagagacaaacaaacaggagctctgtcctatggggacaggctccgacttcgacgtgcggatcctccctccatcccagctggagaacgggtatacaacgccgaatggtcatactactcagaccagtcttcaccggctcgtgactaaaccgccaaagacaacgaacccttcgaagatatccgggatagtcgccggaaaagccctgtccaatcgcaacctgtctcagattgtctcttatcaaaccagagtaccccctttgaccccttgcccggctccatgtttttgtaaaacccacccaagcgacctgggcctctccgtgaattgtcaggaaaagaacattcagtccatgagcgaactgatcccaaagccccttaatgctaagaagctgcatgtgaacggcaacagcattaaagacgtcgatgtctctgattttacagactttgaaggactcgacctgctgcatcttggatcaaatcagatcaccgtcattaagggggacgtgttccacaacttgacaaatctgcgcaggctgtatctgaacgggaaccagatcgaacggctgtatcctgagattttctccggcttgcacaatctccagtacctatatttggaatacaatctaatcaaggaaattagtgccggtaccttcgattccatgccgaacctgcaattgctatacttgaacaacaacctgctaaagtccttgccagtttatatcttttcaggcgctcctctcgctcggctaaaccttcgcaataataagtttatgtacttgccggtgagcggcgtgttagaccaacttcaatcattaacacagatcgacctggaaggtaacccttgggactgcacatgtgacctggtggccttgaaactgtgggtggaaaagctgagcgacggaattgtcgtgaaagaattgaaatgcgagacgcccgtacaattcgccaacatcgagctcaaatccctgaaaaatgaaatattatgtcccaagttactgaacaagccctcggcgccattcactagtccagcgccagccataaccttcacaaccccgctgggccctatccgctctcccccaggcggtccagtgcccctctccatcctgatcttgtctatcctcgtagttctgatccttacggtgtttgtcgcgttttgtttgctggtcttcgtgttaagaaggaataagaagcctactgttaagcacgaggggctggggaatccggactgcggctccatgcaacttcagctcagaaagcacgatcacaaaaccaataaaaaagatggcttatcaacagaagccttcataccccagacaattgagcaaatgagcaaatcacacacttgcgggctgaaggagagtgagacaggatttatgttctccgaccctcccggacaaaaggtagtcatgcgcaacgtggccgacaaggaaaaggatctgctccacgtggacactcgtaaacgcctgtctacgatcgacgaactggacgaattattcccctcccgcgactctaacgtttttatccagaatttcctggagagtaagaaagagtacaactctattggggtttctggctttgaaatcaggtaccctgaaaagcaacccgacaaaaagtcaaaaaagagtctgatcgggggtaaccattccaagatcgtagtcgagcagcgcaaatcagagtactttgagctgaaggcaaagctgcaatccagtcccgactacctccaggttctggaggagcagaccgccctgaacaaaatttag

SEQ ID NO: 240705 - DNA, 2514 bp, synthetic construct
  misc_feature 1..2514: note = Description of Artificial Sequence: Synthetic coding sequence
  source 1..2514: mol_type = other DNA
atgtttctttggctgttcctcatcttatcagccttgatttctagcacaaacgctgactctgacatctctgtcgagatctgtaacgtctgctcatgcgtgagtgtggaaaacgtactgtacgttaattgtgagaaggtgagcgtgtatcgccctaatcagctgaaacctccttggtctaacttttatcacctcaacttccagaataacttcctgaacattttgtacccaaataccttcctgaactttagccacgcagttagtctacatctcgggaacaataagttgcagaacatcgagggtggtgcattcctaggtctcagcgctttgaaacaactacatctaaataacaacgaactgaagatccttcgggcagacacattccttggaatagagaacctcgagtacctacaggcagattataatttgatcaagtacattgagaggggcgcttttaacaagttgcacaagctgaaagtgctgattctgaacgacaacctcatttcgttcctgccagataatatctttcgtttcgcaagtcttacccacctggacatcagaggcaatcgcatacaaaaactaccctatatcggagtgctagagcacatcggtagggtggtagaattgcaattagaggataacccctggaattgcagctgcgaccttcttccgctgaaagcatggctcgagaatatgccctacaatatctatattggcgaggcgatttgtgagacacctagcgatctttatgggagacttttgaaggaaaccaacaagcaggaactttgccccatgggcacaggatcggactttgacgtgcgtatcctgccaccatcccagctggaaaacggctatacaacccctaacggccataccactcagacttcccttcataggctggtaaccaaaccacctaaaaccactaatccatccaaaataagtggaattgtcgccggaaaagctctgtcaaaccgaaacctaagccaaattgtgtcgtaccagactagggtacctccacttacaccttgtcccgcaccctgcttctgtaagacacatcccagtgatctcgggctgagcgttaactgccaggaaaaaaatatccaatctatgagtgagctaattcccaagccactcaacgccaagaaactccacgtgaatggcaacagcattaaagatgtggatgtgtcagatttcaccgactttgaaggcctggatttgctccacctcggaagtaaccagatcaccgtgatcaaaggagacgtcttccataacctcacgaatctcagacgactctacctgaacggcaatcagatagaacggctctacccagagatcttttctggtctccataacttgcaatacctgtatctggaatataacttgatcaaggagatctcggccggtacctttgactcgatgcccaacctacagctgctgtatctgaataacaacctacttaagagcctgcccgtgtacattttctcgggggctccccttgcaagactgaacttgcggaataataagtttatgtatttgccagtctccggtgttctcgaccagctccagagtctgacgcagatcgacctggaaggcaacccatgggactgcacctgtgacctagtggcccttaagctgtgggtggaaaaactttctgacggcattgtggttaaagagctcaaatgtgaaacgcccgtgcagttcgccaatattgagctgaagagtctcaagaacgaaatcctgtgcccgaagctgctgaataagccttcggcgccattcacatccccagctcccgctatcactttcaccacaccccttggccctatcagatccccaccgggtggcccagtacccctcagtatactgatcctatctatccttgtcgtgctgatcctaaccgtttttgtcgccttctgcctgcttgtcttcgtgctgcgaagaaataagaagcccacagtgaaacatgaagggcttggcaaccctgactgtggctctatgcagctgcagctccgaaagcacgatcacaaaactaacaagaaggacgggctgtccactgaggcgtttattccccagaccatcgaacaaatgagtaaatcccacacatgcggtctgaaagagtccgagaccggcttcatgttttcagatccgcctggccagaaagtggttatgcgcaacgttgcggataaagaaaaggacttgctgcatgttgacaccaggaaaagactgtcaaccatcgatgaactagacgagctgtttccgtccagagacagtaatgtgttcattcaaaacttccttgagtccaagaaagagtataactctatcggggtatctggattcgagattcgctaccccgagaagcagcccgacaagaaatccaagaaatcactaatcgggggaaaccacagcaagatcgtggtcgaacagagaaagtccgaatacttcgaacttaaagccaagttacagagctcccccgactatctgcaagtgctggaggaacagacagcactgaacaaaatatag

SEQ ID NO: 240706 - DNA, 2877 bp, synthetic construct
  misc_feature 1..2877: note = Description of Artificial Sequence: Synthetic coding sequence
  source 1..2877: mol_type = other DNA
atgcatacctgttgtcctccagttacgctggaacaggatcttcacaggaagatgcatagttggatgctacagacactcgctttcgccgttacaagccttgtgctgtcttgcgccgagaccattgactattatggcgaaatctgcgacaatgcttgcccatgtgaggagaaagacgggatcctgactgtctcctgcgaaaatcggggaataatatctctgagcgaaatttcacctccacgctttcccatttatcacctgttgttaagcggcaacctgctgaatagactctaccctaacgagttcgtgaactatactggcgcttctatactgcacctgggatctaacgtgatccaagacatcgaaactggagcgtttcacgggctgcgcggactgaggcgacttcacctcaataataacaagctagaactgctccgggacgatacttttctgggactggagaacctggagtacctccaagtggattacaactacatttccgtgatcgagccaaatgcctttggaaaactgcacttattacaggtcctcattctgaacgacaatcttctctccagcctccctaacaatctgtttcgcttcgttcctctcacgcatctcgacctgagaggtaacagactcaagctcctcccttacgtgggtttgcttcagcatatggacaaggtcgttgagctgcagcttgaggagaatccctggaattgctcttgcgagcttattagtctgaaagattggctcgacagcatcagttattcagccctggtcggagatgttgtctgcgagactccttttaggttacatggacgggacctagacgaggtgagcaaacaggaactgtgtcctcgcagattgatttctgactacgagatgagaccccaaactcccctctctaccactggctacctgcacacaacacctgcctccgttaatagtgtggccacatcatcctctgcagtctacaaaccgcctttaaagcctcctaaaggaacccggcagcctaataaaccgagggtgcggcctactagtcgtcagccaagcaaggacctgggctactccaattacggaccttccattgcttatcagacgaagagccctgtgcctcttgaatgccctacggcctgcagctgtaacctgcagatctctgacttgggcttgaacgtcaactgccaggaacgaaagatagaatccatagcggaacttcagcccaaaccttacaacccaaaaaagatgtatctgaccgagaactatattgccgtggttagaagaaccgattttctggaggccacaggtttggacctcctgcacctgggaaataatcgaatctctatgatccaagacagagctttcggcgatctgaccaaccttaggcgcttgtacttgaatggaaatcggattgagagactctccccagagctattttacggtcttcagagtttacagtatctcttcctccagtataacctgattcgagaaatccagagcggaacctttgatccggttccaaacctgcaattattgttcctgaacaacaatttgctccaagccatgcccagcggtgttttttccggactgaccctgctgcgccttaacctccggagtaaccacttcacctccctgcccgtatccggtgtgctggaccaattgaaatctcttatacagattgatctgcacgacaatccatgggattgtacctgcgatatcgtgggtatgaaactgtgggtggaacagttgaaagtgggggtcctcgtggacgaggtcatttgtaaagccccaaagaagttcgcagagaccgacatgcgatcgatcaagtccgaattactctgcccggattactccgatgtggtggtcagcacccccactccgtcaagcattcaagttcctgcacggacgtctgccgtgactcccgctgtgagactcaattctacaggcgctccagcatctttgggcgcaggcggaggcgcaagcagcgtgccccttagtgtgctcatactctccctgctgctagtgtttataatgtcagtgttcgtcgctgccggactgtttgtcctggtgatgaagcgacggaaaaaaaatcaaagcgaccacacctctacaaataactctgatgtctccagtttcaatatgcagtactcagtttacggcggagggggaggcaccggcggacacccccatgctcatgtccaccaccggggacctgctctgcctaaggtaaaaaccccagccggtcatgtgtacgaatatattcctcatcccctggggcatatgtgcaaaaacccaatctatagaagccgagaaggaaattccgtggaagattataaagacctgcatgagctaaaagtgacgtattcttcaaatcaccaccttcagcagcaacagcagccacctcccccaccgcagcaacctcaacaacagcctccccctcaactgcagctacagccaggcgaggaggagcggagagagtcacatcatttgagatcccctgcctacagcgtgagtaccattgagccccgagaagacttactgtcgcccgtgcaggacgctgataggttttacaggggcatcctcgagcctgacaaacactgttccacaactccagccggaaacagcctgccagaatatcccaagtttccctgtagcccggctgcttacacgtttagtccaaattacgacttgcgtcgccctcaccagtacctgcacccgggagccggagactccaggttacgggagcctgttctgtacagccccccaagtgccgtgtttgtcgagcccaaccggaacgagtatctggaactcaaagccaagcttaacgtagaaccagactacctggaagtgctggagaaacagacaaccttttcccagttctag

SEQ ID NO: 240707 - DNA, 2154 bp, synthetic construct
  misc_feature 1..2154: note = Description of Artificial Sequence: Synthetic coding sequence
  source 1..2154: mol_type = other DNA
atgggggctggaaaacacagggagggagggggaggggatcccacctcccttaacggatgcgcggacttaattcagcgaagaactgagatctcccgggacctggatgaagtgtctaagcaggagctgtgcccacggaggctcatcagcgactatgagatgcggcctcagacacccttaagcacgacagggtatctacataccactccagcgtcagttaactctgttgccacttccagtagcgctgtatataagcctcctctgaagcctcccaaggggacccggcagcctaataagccgcgagtacgacccacatcacgccagccaagcaaagacctgggctactccaattacgggccaagcattgcctaccagactaaatcgcctgtgcctttagaatgcccgaccgcctgcagttgcaatttacagatcagtgacttaggtctgaatgtcaattgccaggaacgcaaaattgagagcattgccgagctgcagccaaagccgtataaccccaaaaagatgtatctgaccgagaactacatcgccgttgtgcgcagaacagacttcctggaggccacaggcctggacctcctgcatctcgggaataaccgaatttctatgattcaggaccgcgcttttggtgatctcaccaatctcaggcggctgtacttgaatggaaatcgtatcgagcgtctgtcacctgaactgttttatgggttgcagagccttcagtatctgtttttacagtataacctgatcagagagatacagtcaggcaccttcgatccggtgccaaatttgcagctcttattcctgaataacaacttactgcaggccatgccatcaggagtgttctcgggcttgacattgctgcgattgaatctcagatccaatcacttcacgagcctgcccgtttcaggtgtcctcgatcaactgaagagtctgatccagatcgatctgcatgataacccttgggattgcacttgcgacattgtgggtatgaagctctgggtggagcaactgaaagttggggtgcttgtagacgaagtgatttgcaaggcaccgaaaaagttcgcagaaaccgatatgaggtctattaaaagcgaattgttgtgtcctgattactcagacgtcgtggtatccacgcccaccccgtcctccatacaggtccctgcccgaacgtctgccgtcacacccgcagtgaggcttaatagcaccggagctcccgctagtctgggcgcagggggaggagcctccagcgtgcccttgagtgtccttatcttgtccctgttgctggtatttattatgtctgtctttgtcgccgctggcttgttcgttctcgtgatgaaacggcgtaagaagaaccagtcagaccatacatccacaaataactccgacgtgagctcttttaatatgcaatactccgtgtacggcggagggggtggaactggcggtcacccccacgctcacgtacaccaccggggacccgcacttcccaaagtgaagacacctgcaggccacgtgtatgagtacatcccccaccccttaggacacatgtgtaagaaccccatttatagatccagagagggaaacagtgtagaggactataaagatctgcacgaattgaaggtgacctacagctctaaccaccacctacagcaacagcagcagcccccacctcctcctcagcaacctcagcagcagccccctccccagctgcaactccagccgggagaggaagagaggagagagtctcaccacctgaggagtcccgcttatagtgtgtccactatcgagcctcgggaggacctcctgtctcctgtccaggacgcagatcgattttacagaggtatactggaacctgacaagcactgcagtaccacacccgcaggaaactcactcccagaataccctaaattcccttgtagccccgctgcctacaccttttctcctaattatgatctccgtagaccccatcaatatctgcaccctggcgcaggtgatagccggctgagagaaccagtgctctacagcccaccgtcagctgtttttgtggaacccaatagaaatgagtaccttgagctgaaagccaaacttaatgttgaacccgattatctggaagtgcttgaaaagcagaccactttctcacagttctag

SEQ ID NO: 240708 - DNA, 2526 bp, synthetic construct
  misc_feature 1..2526: note = Description of Artificial Sequence: Synthetic coding sequence
  source 1..2526: mol_type = other DNA
atgaagttgtggatacacctgttctacagctccctcttagcgtgtattagcctccactctcaaacccctgtgctctctagccgtggctcttgtgattcactttgcaattgtgaggagaaagatggaacaatgttgattaattgcgaagccaaagggatcaaaatggtctcggaaatctctgttccgccttctcgaccctttcagctgtctcttcttaacaacgggttaaccatgctgcacaccaatgacttctctggcctgaccaacgcaattagtatccatctgggttttaacaatatagccgatattgagatcggtgccttcaatggactcggactactgaagcagctgcatattaaccacaattcacttgaaatcctcaaggaggacacattccatggcctggaaaacctggaatttctccaggccgataacaacttcattaccgtcatagaaccctctgcattttccaaattgaacaggttgaaggttctgattctgaatgataatgctattgaatctctgccgcctaatatatttcgttttgtacctttgacccacctggacctgcgaggcaaccagctgcagaccctaccctacgtggggttcctggagcacattggacggatcctggatctgcaactagaagacaataagtgggcctgtaactgtgatctcttgcagctgaaaacctggttagaaaatatgcctccccaaagtatcatcggcgacgttgtctgcaattctcccccattcttcaaaggaagcattctgtccaggctgaagaaagaatctatctgcccaacacccccagtgtatgaagaacacgaggacccatcagggagtctgcacctggctgctacaagctcaatcaatgattctagaatgtcaacaaagactacatctatcctaaaattacccactaaggccccaggcctcatcccttatataacaaaaccaagtacacagcttcctggtccctactgtcccataccgtgcaattgtaaggtgctgagccccagcggactgctcatccattgccaggaaagaaatatagagagtttgtctgatctgaggcctccaccccagaatcctcggaagctaattctggcagggaatatcatccactccctcatgaaatccgacctagtcgagtatttcacattggagatgcttcaccttggtaataatagaattgaagttctggaggaggggtctttcatgaatctcacacgcctacagaaactgtatctcaacggtaaccacctcacaaaactgtcaaaaggcatgtttttaggactgcacaacctggaatacctttacctggaatataacgcaataaaggagattctgccgggaactttcaacccaatgcctaaactcaaagtgctttacctgaacaacaatctgctgcaggtcttgcccccacatatcttctccggtgtgcccctgacaaaggttaatctcaagactaatcaattcactcatttgccagtgtcaaatattcttgacgacctggatttgctgactcaaattgacctggaagacaacccctgggattgttcttgcgacctcgtagggctacaacagtggatccagaaactgtccaaaaacaccgtaactgacgatatcctctgtacaagccctggacatctcgataagaaggagctgaaagcactgaacagtgaaatcctgtgcccaggactcgtcaacaatccaagcatgccaacacagaccagctatctaatggtcaccacccccgctactacgactaacacagcggacaccatattgcggtcactgacagatgcagtgccactgtcggtcttgatcctggggctcctgattatgtttatcacaattgtattctgcgcagctgggatcgttgtgctggttctgcacaggaggcgaagatataaaaagaagcaggttgacgagcagatgcgtgacaacagccctgttcatctgcaatactctatgtacgggcataagacaacgcatcataccaccgagcggccatctgcgagcttgtacgaacaacatatggtcagtccaatggtgcatgtctaccgatcaccatccttcggtcctaagcacctcgaggaagaggaggaaagaaatgaaaaagaagggtccgatgccaaacatttgcagagatcactgctcgagcaagaaaaccattctcccttgaccggcagcaatatgaaatataagacaacgaatcagtccacagagttcctatcttttcaagacgccagcagcctctataggaatatcctggagaaagagcgcgaactccagcaactgggcatcacggagtatctccggaaaaacattgcccagctgcaacctgatatggaggcccactacccaggagcacacgaggaactcaagctaatggagactttgatgtattctagacctcgcaaggtcctggtcgagcagacgaagaatgaatatttcgagctgaaggccaaccttcacgccgagcccgattatttggaagtactggaacagcaaacttag

SEQ ID NO: 240709 - DNA, 4578 bp, synthetic construct
  misc_feature 1..4578: note = Description of Artificial Sequence: Synthetic coding sequence
  source 1..4578: mol_type = other DNA
atgaggggggtgggatggcagatgctatctctgtccctgggactggtcttagctatcctgaataaagttgctccccaagcctgcccagcccaatgcagctgctccggctctacagtggattgccacggcctggccttacggtctgtcccccgaaacatcccacggaatacagagcggctggacctgaacggtaacaacataactaggataacaaagactgatttcgctgggttaaggcatctcagggtgctacagttgatggagaacaaaattagtaccatagagcgcggtgccttccaggatctcaaggagctggagcgcctcagactgaatagaaaccacttacagctgttccctgaactcctctttctggggaccgccaaactgtaccgactcgacctttccgaaaaccagattcaggccatacccaggaaagctttccgaggcgctgtcgacatcaagaatctgcagctggactataaccagatctcatgcattgaagacggtgcctttcgcgcattgagggacctagaagtgctgacacttaacaacaataatatcacgcgcctgtcagtggcctccttcaaccatatgccaaaattaagaacctttaggctccacagtaacaatctatactgcgattgccaccttgcatggctgtctgattggttgcgacagaggcctagggtgggcttgtacacccaatgtatgggcccttctcaccttcggggacacaacgtggctgaggtacagaaacgtgaattcgtctgcagtgggaagggtgaaggccaccagagcttcatggccccttcatgctcagtgctccactgtcccgctgcttgtacctgcagcaataacatagtagattgtcggggaaagggtctgacagagatcccaacaaatctgccagaaaccattacggagattcgtctcgaacagaacaccattaaggtgattcctccaggtgcattttcaccctacaagaaattaaggcggattgatttgagtaacaaccaaatttcagaattagccccagacgcctttcaggggctgaggagcctgaattcgctcgtcctgtatggaaataagattacagaactgccgaaatctcttttcgaggggctgttcagcctgcaactccttcttctgaacgctaacaaaatcaattgtctccgggtggacgcttttcaggaccttcacaacctcaacttgctctccctgtacgacaataagctacagacaatcgccaagggcactttctccccactgcgcgctatccagaccatgcatcttgctcagaatcccttcatctgcgattgtcaccttaagtggctggctgattacttacacaccaatcccatcgagacttccggcgctagatgtaccagtcctcggcgacttgcgaacaagcgaattggccagattaaatctaaaaagttccgctgttccggaacagaggactacaggagtaagcttagtggggactgttttgccgaccttgcctgccctgaaaaatgtaggtgtgaaggaacaacggttgactgttcaaaccaaaaattgaataagatcccagagcacatccctcagtatacagccgaactcaggttgaacaataatgaatttactgtgctcgaagcgactggcatttttaagaagctgccccaactcaggaagatcaacttctcaaacaataaaataacagatattgaggaaggggcattcgagggtgcatccggcgttaatgaaatccttctgacctctaataggctggaaaacgtgcagcacaaaatgttcaaaggcctggaatccctaaagacactgatgctccgctcaaatcggatcacctgtgtcgggaatgattcctttatcgggctgtccagcgtcagactgctgtcattgtacgataaccagattacaacagtggccccaggggcattcgacacactgcacagcctgagtacattaaaccttctggcaaacccatttaattgtaactgctatctcgcctggctcggagaatggctccgtaaaaaacggattgtaacaggcaatccaagatgtcagaagccttatttcttgaaagaaatccctatccaggacgttgctatccaggacttcacctgtgacgacggcaacgatgataattcctgttcacctctgtcaaggtgccccaccgaatgtacctgtcttgacacggtcgttcggtgctccaacaaaggattgaaagttctgccaaaaggcatcccgcgagatgtgacagagttgtaccttgacggaaaccagtttaccctcgtgccgaaggagctttctaattacaaacatctgaccttgatagacctctccaacaaccgaataagcacgctcagtaaccagtcattctccaatatgacacagctactgaccctgattctgtcctataacaggctgcggtgcatcccacccagaacttttgacgggttgaagtctctcaggcttctcagtctccacggcaacgacatctcagtcgtgccagaaggggcatttaatgatctctcagctctgtcccacttggccattggcgcaaacccactgtactgtgattgcaacatgcagtggctatctgactgggtaaagtcagaatacaaggagcctggaatcgcacgctgcgccggaccaggagagatggcagataagctgcttctgactactccgtctaaaaaattcacatgccaagggccagtggatgtgaatatcctggcgaagtgtaatccctgtctgagtaatccgtgtaaaaacgacggtacctgcaatagcgacccagtcgatttctacaggtgcacctgtccctacggctttaaggggcaggactgcgatgtgccaatccatgcctgtattagcaacccctgtaagcacgggggaacctgccacctgaaggaaggtgaggaagacgggttttggtgtatttgtgccgatggttttgaaggtgagaactgtgaggttaatgtcgatgattgtgaggataatgactgtgaaaataacagtacctgtgttgatggcatcaacaattacacatgtctttgtccaccagagtacaccggcgaactgtgcgaggaaaagcttgacttctgcgcccaggacctaaacccctgccagcacgattccaagtgcatcctcactcccaaggggttcaagtgcgactgcaccccaggctacgtaggcgaacactgcgatattgattttgacgattgtcaggataataagtgcaagaatggagcccactgtacagatgccgtaaatgggtatacatgcatatgtccggaggggtacagtggtctcttctgcgagtttagcccccctatggtacttcctagaaccagcccctgtgacaactttgattgccaaaatggcgctcagtgcatcgtgaggattaacgaaccaatttgtcagtgcctgccaggatatcaaggcgagaagtgtgaaaagcttgtctcagtgaattttattaataaagagagctacctgcaaatcccctccgccaaggtccggcctcagacaaatatcacgctccagattgcaaccgatgaagactccgggatattactctacaagggcgacaaagatcacattgcagtggaactgtaccggggacgtgtccgtgcctcttacgacactggctcacacccagcctccgcgatctattccgtggagactataaacgacggtaattttcatatagtcgagttgcttgcgctggaccagtcactgtccctgtctgtggatggtggaaacccgaagataattacaaacctctctaagcagtctacgctgaattttgacagccctctgtacgtgggcggaatgccagggaagagtaatgttgctagcttgaggcaagcacctgggcagaatggaacatcattccatggttgcatcagaaacctttatattaacagcgagttacaggattttcagaaggtgcccatgcaaaccgggattttgccgggatgtgagccttgccataagaaagtctgcgcccacggtacatgccagcctagttcccaggccggttttacctgcgagtgtcaggaaggatggatggggccactttgcgaccagaggactaacgacccttgcttaggaaataaatgtgtgcacgggacttgccttccaatcaacgcctttagctactcgtgtaagtgccttgaaggccatgggggtgttttgtgtgacgaggaagaggatctgttcaacccttgccaggccatcaaatgtaaacatggcaaatgcaggctctccggccttggccagccttactgcgaatgttcctctggttacaccggcgatagctgtgaccgggagatatcctgcaggggggaacgaatccgagactactaccagaagcagcaagggtatgccgcttgccagaccacaaagaaggtgagcaggctcgaatgcaggggcggatgcgcagggggacagtgctgtggcccactgagatcaaaacgaaggaagtactctttcgaatgcactgacggctcctcctttgtagacgaggtggaaaaggtggtcaagtgcggctgcacacggtgcgtgtcatag

SEQ ID NO: 240710 - DNA, 4566 bp, synthetic construct
  misc_feature 1..4566: note = Description of Artificial Sequence: Synthetic coding sequence
  source 1..4566: mol_type = other DNA
atgagaggtgtgggctggcagatgctctctcttagtcttggcctcgtgctggcgattctgaacaaggtggcccctcaggcatgcccggcacagtgctcctgttccggatccactgtcgactgccacggactagccctcaggagcgtgccacggaacattccccgaaacactgagcggctggacctaaacggtaacaatatcacgcgtatcactaagaccgactttgccggtttgcgacacttgcgggttctccagctgatggaaaataagatctccactatcgaacgtggcgctttccaggatctgaaagagctagagaggttaaggctaaacagaaaccatttacagctgttcccggagcttctattcctcgggacagccaagctgtaccgactggatctaagtgagaatcagatacaggcaattcccaggaaagcttttcggggtgcagtggacatcaagaacctgcagctcgattacaatcaaatatcatgcatcgaagacggcgctttccgcgctctgcgagaccttgaagtcctcacactcaataacaataatataacacgtttatcagttgccagttttaatcacatgccgaagctgaggacctttcgactccactctaataatttgtactgcgactgtcatctggcttggctgtccgattggctgaggcagcggccacgggtgggactctacactcagtgcatgggcccaagccacctaagaggccacaacgtggctgaggttcaaaagcgcgagtttgtgtgctcgggacatcagtcctttatggctccctcatgtagcgttcttcattgtccagcagcatgtacctgctctaacaacatcgtcgattgtagaggcaaggggctgacagagatccccacgaatctacctgagaccatcaccgagattcgccttgagcagaacactatcaaagttattccccctggtgctttctcaccctacaagaagctgcggagaatcgacttaagcaacaaccagatatccgaactggcacctgacgcatttcaaggtctcagatctctgaatagtttggttctgtacgggaacaaaattacagaactgcccaaaagcctgtttgaaggcttgttttctctccagttgttactgttgaacgccaataaaatcaactgtctgcgcgtcgacgcattccaggatctccataacctgaacctgcttagcctctacgacaacaaactgcagacaatcgcaaagggcactttcagccccctgcgcgcaatacagacaatgcacctggcccagaatccattcatctgcgattgccacttgaagtggctggctgactatttacacaccaacccgatcgaaacctctggggcacgctgtacatctccacgcagactcgccaacaagcgtatcggtcagattaaaagcaaaaagttccgatgttcggggacagaagactatcgatctaaactcagcggagactgctttgccgatctggcatgtcccgaaaaatgccgctgtgagggcaccacagtggattgcagcaatcaaaaacttaacaagatccccgaacacatcccccagtataccgctgagctccgcctgaacaacaacgaatttacggtcctggaggccactggaatttttaagaagctccctcagctaagaaaaatcaatttttctaacaacaaaatcacagatatcgaagagggcgcatttgagggcgcatcaggtgtgaatgaaattttgttgacttctaatcgcctggaaaatgtgcagcacaaaatgttcaaaggacttgagtccctcaaaacactgatgctgcgtagcaaccggatcacatgcgtggggaacgactctttcatagggttgagctctgtaagactgttgagtctctatgataaccagatcactaccgtggcaccaggagcattcgatacccttcactccctgagcaccctgaacctccttgctaatcccttcaactgtaactgctatctggcgtggctcggggagtggctccgaaaaaagagaatcgtcacggggaatcctcgttgtcagaaaccttatttcttaaaagaaattcccatacaggacgtagccatccaagacttcacttgcgatgatggcaacgatgacaactcttgcagtcccttgtcccggtgccccacagagtgcacttgtctcgacactgtggtacgctgcagtaacaaaggccttaaggtcctccccaaggggatccctagggacgtaaccgaactctacctggatgggaaccagttcacactggtccctaaagaactgtctaactacaaacacttaacactaatcgatctgtctaacaaccgaatctcaacactctccaatcaatcctttagcaatatgacacagctgctgactctgatcttatcgtacaaccgccttcggtgcatcccgccacgaacattcgacggtctcaaatcactgcgcctacttagcctccatggtaatgatatttcagtggtccctgaaggggcttttaacgacctctctgctttatcccacttagccattggagctaatcccttgtactgcgactgcaatatgcagtggttaagcgattgggtaaaatcggagtataaagaaccgggaatagcccgatgtgcaggtcctggggagatggccgataaactgctcctgaccactccaagtaaaaagttcacctgccaggggccagttgacgtcaacattctggccaagtgtaatccgtgtttgtctaacccttgcaaaaatgacggcacttgcaacagcgaccctgtggacttctataggtgtacttgtccatacggattcaaagggcaagactgcgatgttcccattcatgcttgcatcagcaatccctgtaaacacggaggtacatgccacttgaaggaaggagaagaagatggcttttggtgcatttgtgccgatgggttcgaaggagagaattgcgaagtcaacgtggacgactgcgaggacaatgactgcgaaaataatagcacctgcgtggacggcattaacaactacacatgcctgtgtcctcccgagtacaccggagaactttgtgaggagaaactagatttttgcgctcaggatttaaatccatgtcagcacgacagtaaatgcatcctgacccccaagggctttaagtgtgattgtactccagggtatgtcggggaacactgcgatattgactttgatgactgccaggataataaatgtaaaaatggcgcacattgtaccgatgcagtgaatggatacacctgcatttgtcctgaagggtacagcggtctattctgtgagttctctccgcctatggtactgccacggacttccccgtgcgataacttcgactgtcagaatggagcccaatgtatcgttcggattaacgagccaatctgtcaatgcctgcccggataccaaggagagaaatgcgagaaactggtgtcggtcaactttatcaacaaggagtcctacctccagattcctagcgccaaggtgagaccccagactaacatcaccctgcagatcgccaccgacgaggacagcgggatactgttgtacaagggagacaaggaccacatagctgtcgagctctatagggggagggtgcgggcttcctatgatactggctctcatcccgcatccgcaatctactcagtggaaaccatcaacgacggcaacttccatattgtggagctgctggccttggatcagagccttagtctgtcggtggacggaggtaatccgaagatcattactaatctcagcaagcagtcaacacttaactttgattccccgctgtacgttgggggaatgcccggaaagtccaacgtagcaagccttcgccaggcccctgggcaaaatgggacgtccttccatggatgcatccgaaacctgtacatcaacagcgaactgcaagatttccagaaggtgccaatgcagaccgggattcttcctgggtgtgagccctgtcacaaaaaggtctgcgcgcatggcacctgtcagcctagctcccaagcaggattcacatgcgaatgccaggagggctggatgggcccactctgtgatcaacgcaccaacgacccctgcttgggcaacaagtgtgtgcacggcacttgcttgcctatcaacgcgttcagctacagctgtaagtgtctcgaaggccacgggggtgtgctgtgtgacgaggaggaggatttgtttaatccgtgtcaagctattaagtgtaagcacggtaaatgtagactgagcggcctaggacagccatattgtgagtgcagttccggatacactggagattcgtgcgatagggaaatatcgtgccgtggtgaacggatccgagactactatcagaagcagcaaggatacgccgcatgtcagaccaccaaaaaggtgtctagactcgagtgtaggggaggatgcgctggtggccagtgctgtggacccctgcgctctaaaagaagaaaatactctttcgaatgtacagatggtagcagcttcgttgacgaagttgagaaagtggttaagtgtgggtgcacccggtgcgtgagctag

SEQ ID NO: 240711 - DNA, 4578 bp, synthetic construct
  misc_feature 1..4578: note = Description of Artificial Sequence: Synthetic coding sequence
  source 1..4578: mol_type = other DNA
atgcgtggtgtcgggtggcagatgctgtcactctccctaggacttgtcctggccatccttaataaggttgcaccccaggcatgcccagctcagtgctcgtgtagcggctctactgtggattgccatggtctcgctttaaggagtgtgccgaggaatattcccaggaacaccgaacggctggatctgaatggcaacaacatcacccggattaccaagaccgatttcgccggtctgcgccacctgcgagtgctgcaactgatggaaaacaagatctccactatcgaacgcggtgcttttcaggacctcaaggaactagaacgcctacgtctcaaccggaaccacctgcaactcttcccagaactgctcttcctgggaactgccaagttatatcgcctggacctatcggaaaatcaaatacaagctatacctagaaaggctttccgcggagctgtggacatcaagaacttgcagttggactacaatcagatttcctgcatcgaggatggagcctttagggccttaagggacctggaggtattaacattgaacaacaataacatcacacgtctgtctgtggcgtcttttaatcatatgccaaaattgcgtacctttcgactgcattctaataatctctattgcgattgccacctggcctggctctctgattggctgcgtcagaggccaagagtggggctctacacccagtgcatgggcccatcacacctacgaggccataacgtggcggaggtgcagaaacgggagttcgtgtgttccgacgaagaagaaggacatcagtccttcatggcacctagttgcagcgtcttgcactgtcccgctgcatgtacatgcagtaacaacatcgtcgattgcagagggaagggactgacagaaatccctacgaacctgccggagactatcacggaaatccgattggaacaaaacactattaaggtaatacctccaggggctttcagcccttacaagaaacttcggcgtatagacctgtccaacaaccagatatctgagctcgcacccgatgcgttccaggggctgcggtccctgaattccctagtcctctatggcaacaaaataaccgaattacccaagtcactgtttgaagggctgttctctctgcaactgttattactgaacgcaaataaaattaactgccttagagtagatgcgtttcaggaccttcataatctgaacttactgagtttatacgataataagcttcagaccattgccaaggggacattcagccccctgcgagccattcagaccatgcatctggcccagaatccatttatttgcgattgtcatttgaaatggctcgcggattacctgcatacgaaccccattgaaacatccggtgcaaggtgtacaagtccacggagattagctaacaagaggatcggacaaataaaatccaaaaagtttcgctgcagcgggactgaggattaccgcagtaagctgagtggagactgcttcgccgacttggcatgtcccgaaaagtgccggtgtgaggggaccactgtggactgctctaatcaaaagcttaacaaaatccccgaacacatcccacagtatacggccgaactccgattgaataataacgaattcaccgttctcgaagccactggaattttcaagaaactgcctcaactgcgaaagatcaatttctctaataataagattactgacatcgaggagggcgcattcgaaggagcctccggcgtgaatgaaattcttcttaccagcaatcggttagagaacgtgcagcacaagatgtttaaaggcctagaaagcctgaagactctgatgctaagatcaaaccgaatcacttgcgtaggaaacgacagtttcatcggtctgtcgtcagtgcgactgctaagcctctacgataaccaaattaccaccgtcgctcccggagcttttgacactcttcattcactgtccactctcaacttacttgccaaccccttcaactgtaactgttaccttgcctggctaggcgagtggctgaggaagaagcgtatagtcacaggaaacccaagatgtcaaaaaccatatttccttaaggaaattcccatccaagacgtcgctatccaagattttacctgcgacgatggtaatgacgacaactcctgctctcccctcagtaggtgcccgaccgaatgtacttgcttggacactgtcgtgcgatgcagcaataaggggctcaaggtcttaccaaaaggcattccaagggacgtcactgaactttacttggatggtaatcagtttacgttggtcccaaaggagctttccaactacaaacacctgaccctgatcgacctctccaacaaccgcatctctacactgtccaatcaatccttttccaacatgacacaactgctcacactgattctctcctataaccgcctccgctgcattcctccccgtacattcgatggtctaaagtccctgcgcctcttatctctgcacggaaacgatatctctgtggtcccggaaggcgcatttaacgatctatcagcccttagccatctggcaatcggcgcaaatccgctgtactgtgattgcaacatgcagtggctgagtgattgggtgaagtctgaatataaagagccaggaatcgctcggtgtgcgggacctggggaaatggctgacaagctgctattgaccacgcccagcaagaagttcacctgccagggtcctgtggatgttaacattctggcgaaatgtaacccctgcttgagcaacccatgtaaaaacgatggaacttgcaacagcgaccccgtcgatttttatcggtgtacctgcccttacgggttcaaggggcaggattgtgacgtcccaatacacgcttgcatttcaaatccttgtaaacatgggggtacttgtcacctcaaagaaggggaggaggacggcttttggtgcatatgcgccgatggcttcgaaggggaaaattgtgaagtaaacgtggatgactgtgaggataatgattgtgagaacaattccacctgtgtagatgggatcaacaactatacttgcctgtgtcctcccgaatataccggagaactatgcgaggagaagttggatttctgcgcgcaggatctgaacccttgccagcacgattctaagtgtatactcaccccaaagggcttcaaatgtgactgcactcctggatacgtgggtgaacattgtgacatcgacttcgacgactgtcaagacaataaatgcaaaaacggtgctcactgtacagacgccgtcaacggatacacatgtatttgtccagagggatactctgggttgttctgcgagttctcgccaccaatggtgttgcctaggacctcaccgtgcgacaatttcgattgtcagaatggagctcagtgtattgtaagaatcaacgaaccaatttgtcagtgcctcccaggatatcaaggggagaaatgtgagaaacttgtgtcagtgaacttcatcaacaaggagagctacctgcagatcccttctgctaaagtgaggccacagaccaatattacgctgcagattgctaccgatgaggattctggaatcctgctgtataagggcgacaaggatcacatcgcagtcgaactgtatcgagggagggtgcgggcttcttacgacaccggtagccaccctgcctctgccatatatagtgtagagactattaacgacgggaatttccatattgtggagctgctggcgttggaccagtccctttccctttcagtggatggaggcaaccccaagatcatcactaatctctcgaaacagtccactctaaactttgattcaccattgtacgtggggggtatgccaggcaagtccaatgtggcttctctgcggcaggccccagggcaaaatggcactagttttcatgggtgtattagaaacctctacataaactcagagttacaggacttccagaaggtgccaatgcagaccggcatcttgcccggttgcgagccatgccacaagaaggtgtgcgcccacggtacctgccagccttcttctcaggcaggctttacttgcgaatgtcaggagggctggatgggtcctctctgcgaccaaagaactaatgatccctgcctcgggaacaagtgtgtccacgggacctgtcttcccataaatgctttctcttactcatgcaaatgtctggaggggcacggtggtgttttgtgcgacgaggaagaggatctcttcaacccgtgccaagcgatcaaatgtaagcacggaaaatgtaggttgtctggactcggccagccctactgcgagtgctcctctggctatacgggagattcctgtgaccgcgagatttcgtgccggggagaaagaatccgcgactactatcaaaagcagcagggctatgccgcttgccaaacaaccaaaaaagtcagccggctggagtgtagaggagggtgcgctggaggccaatgttgcggaccactgagaagcaaacgtcggaagtactcattcgaatgtaccgatgggagcagcttcgtggatgaagttgagaaggttgtcaaatgtggttgcactaggtgcgtttcctag

SEQ ID NO: 240712 - DNA, 4590 bp, synthetic construct
  misc_feature 1..4590: note = Description of Artificial Sequence: Synthetic coding sequence
  source 1..4590: mol_type = other DNA
atgaggggtgtggggtggcaaatgctctctcttagtttgggtctggtcttggccattctgaacaaggttgcccctcaagcttgccccgctcagtgctcatgctctggcagcacagtggactgccatggccttgcactgagatccgtcccaagaaatattcctcgtaacactgaacgtttggatcttaatggaaataatattacccgcattacaaagactgactttgctggcctgaggcaccttagagtgctgcagctcatggagaacaagatctcaaccatagaaagaggggctttccaggatctgaaagaactggagcggctgaggcttaaccgtaatcacctacagctgtttccggagctgttattcctggggacggctaaactctatcgtcttgacctgtcggaaaatcagatccaggcaattcctcgaaaagccttccgcggtgccgtggacattaagaatctgcagcttgactacaatcagataagttgcatcgaagacggtgcctttagggccctgcgggatttagaagttctcacactcaacaacaataatatcacccgcttgtcagtcgcgagcttcaaccacatgcccaagcttagaacattcagactacacagcaataatctctattgtgactgccatctggcttggctctcggattggctgagacaacggccacgcgttggactctatacacagtgtatgggaccgagccatttgcgtgggcacaatgtggcagaggttcaaaagagagagttcgtgtgctccggccaccaatctttcatggccccatcttgttctgtcctgcactgcccagccgcatgcacatgctcaaacaatatcgttgattgcagagggaaaggcctgactgaaatcccaaccaatctgcccgaaaccataacggagatacgcctggagcagaacaccattaaagtgattccaccaggcgctttcagcccgtataagaaattacgacgcatcgacttatcaaacaatcagatttccgaactcgctcccgacgcctttcaggggctacggtccctgaacagcttggtgttgtacggaaataaaatcacggagttgccaaagtctctcttcgaaggattgttcagccttcagctcctgctgctaaacgcgaacaagatcaattgcctccgagttgatgcctttcaggatcttcacaatttgaacttgctgagcctctacgacaataagctgcagactatcgcaaaggggacgttttcccctttacgcgcaatccagacgatgcatctcgcgcagaacccattcatttgcgactgccacttaaaatggctcgctgactatcttcacaccaatcccatcgaaacttctggggctagatgcactagccctcgcaggcttgcaaacaagcgcattggccagatcaagtccaagaagttccgctgctccgctaaggagcagtatttcattccgggtacagaagattatcgtagcaagctgagcggcgattgctttgccgacctggcctgtcccgaaaagtgtcgatgtgagggaaccactgtggattgctctaatcagaaacttaataagattcctgaacatatccctcagtataccgcagaacttagactgaacaacaatgaattcacagtgctagaagcaaccggtatcttcaaaaagttgcctcaactgcgcaaaatcaatttctctaacaacaaaattactgacatcgaagagggggctttcgagggggcaagcggcgttaatgaaatactcttgacaagcaataggttggagaatgttcagcacaaaatgttcaaaggcttggagtcccttaagacactgatgctgcggagtaataggattacttgtgtgggtaacgattcatttatcgggctgtcttccgttcgccttctaagtctttacgacaaccagatcactacggtagctcctggggctttcgatactctccatagtctatcgactcttaatttactcgcaaatcctttcaactgcaattgttacttagcctggctgggcgaatggcttaggaaaaagaggattgttacgggcaacccgaggtgccagaagccctacttcctgaaagagattcctattcaggatgtcgccattcaggactttacttgcgatgacgggaacgatgacaactcgtgttctccactgagtcgctgcccaactgagtgtacctgtctggacacggtagttcggtgcagcaacaagggcctaaaggtcctgcccaaaggaattccgagagacgtgacggagctgtaccttgacggcaatcagtttactctagtgccgaaggaactgtcaaactataaacacctgaccctgattgatttgtccaataatcggatctctacgttgtccaatcagagcttcagcaacatgactcagttactgacacttatactctcatataacagacttcgatgcataccaccacgcacttttgacggcctcaaatcccttagactgctgagcctccacgggaacgacatctccgtggtccctgagggcgcttttaatgacctgtctgcactatcacacttggcgatcggggctaaccctctctattgtgactgcaatatgcagtggctctcggactgggtcaaatcagagtacaaggagccgggtatcgccagatgcgccggacccggagaaatggcagacaaacttctactgacaaccccatctaagaagtttacttgtcagggcccagtggatgtgaacatattagcaaaatgtaatccttgtctgtctaatccatgcaaaaacgacgggacttgtaattctgaccctgtggacttctacaggtgcacttgcccttatgggttcaaaggacaagattgcgatgttcccattcatgcttgtatatcaaacccatgtaaacatgggggtacttgtcacctgaaagaaggagaggaggatggcttctggtgtatatgtgccgacggtttcgagggagagaactgtgaggtgaacgtggatgactgtgaagataacgattgcgagaacaactctacgtgtgtcgatggaatcaacaactatacttgcttgtgcccgccagaatataccggcgaactctgcgaggagaaacttgacttctgcgcgcaagatctcaacccctgccagcatgactctaagtgtatcctcaccccgaagggcttcaagtgcgactgcactcccggatatgttggcgaacactgtgacatcgactttgacgactgtcaggacaacaaatgcaagaacggggcacactgtactgacgccgtgaatggttatacatgtatatgccctgaaggctatagtggcctgttttgtgagtttagtccgcctatggtgctgcctagaacctcgccatgcgacaattttgattgccagaacggggctcagtgtattgtgcggattaatgaaccaatatgtcagtgcttgcctgggtaccagggcgagaaatgcgagaagttagtgtccgtcaattttatcaataaagagtcatatttacagatcccatcagccaaggtccggcctcagaccaacatcaccttgcagatagccaccgatgaggactctgggatactgttatataaaggggataaggaccatattgccgtggaactctacaggggaagagtcagagccagctacgacaccggctcccaccccgcttctgccatctacagtgtcgagactatcaacgatggcaattttcacattgtcgaattactggctctggatcagtcactgtcactctccgtggacggcggaaatcctaagattattactaatctttcaaaacaatccacactgaattttgacagtccgctctacgtcgggggtatgccaggaaaaagcaatgtcgccagtctgcgacaggcgccaggtcagaatggtacgtccttccacggttgtattcggaatctctacatcaactctgaactgcaggatttccagaaagtccccatgcagacagggattctgccgggatgtgagccttgtcataagaaagtatgtgcccacgggacctgccagccaagtagtcaggctggttttacatgcgagtgccaggagggctggatgggtccgttatgtgaccaacggaccaacgatccctgtctcggtaataagtgcgtacacggtacctgccttcccatcaacgcatttagttatagttgcaagtgtctggaagggcatggtggggtactctgtgacgaggaagaagacctgttcaatccttgtcaggccatcaagtgcaagcacggaaagtgccgcctcagcggactgggccaaccttattgtgaatgctcaagcggatacaccggagacagctgcgaccgggagataagctgtagaggggagcggatccgggactattaccagaagcagcagggctacgcggcttgtcaaactaccaagaaggtatctaggttagaatgcagggggggatgtgctggcggacaatgctgtgggcctctgcgcagtaaaaggaggaagtattccttcgagtgcacagatggaagttcattcgttgacgaggtcgagaaggttgtaaaatgcggatgcactcgttgtgtgtcttag

SEQ ID NO: 240713 - DNA, 4419 bp, synthetic construct
  misc_feature 1..4419: note = Description of Artificial Sequence: Synthetic coding sequence
  source 1..4419: mol_type = other DNA
atggcgcctggatgggccggtgtgggcgcagcggttagagccaggctggcattagccctagccttggcctcagtgctcagcggtcccccagctgtggcatgtcccactaaatgcacatgcagtgcagctagtgtggattgtcatggcctggggcttagggccgtgcctagggggataccaagaaatgccgagcgcctagatttggaccgcaacaacatcactcgtatcactaagatggacttcgccggtttaaagaatcttcgtgtgctccacctggaagacaaccaagttagtgttatcgaacgcggagccttccaagatctcaaacagcttgagagactgaggcttaacaaaaataaactacaggtactcccggaactcctgtttcagtctacccctaaacttactagactcgatctaagcgaaaaccaaatacaagggattccacgaaaagcatttcgaggaataactgacgttaagaacctgcagctggacaataatcacattagctgtattgaggatggagcctttagggctctccgcgatcttgaaatcctgacgctgaacaacaacaacatttcacggatactagtcactagcttcaatcacatgcctaagattaggaccctgcggctgcattccaaccacctctattgcgattgccacctggcatggctgagtgactggctgcgtcagcgtcgcaccgtgggtcagtttaccctctgcatggcccctgtgcatctcaggggtttcaatgtagccgacgtacagaagaaagaatacgtgtgtcctgctccgcactctgaaccgccaagctgtaacgctaattccatctcctgccctagcccttgcacctgctcaaataacattgtggactgcaggggtaaaggactgatggagattcctgctaatctcccagagggtatcgtggaaattagactggagcagaattctataaaggcaatccctgcgggtgctttcacccagtacaagaagctcaaacgtattgacatctccaagaaccagatatccgatatcgctccggacgcctttcagggactcaagagcttaacctccctggtgctatacggtaataaaatcacggagattgtgaagggcctatttgacggcttagtcagtctacagctgttgctgctgaatgccaacaaaatcaattgcttgcgcgttaacaccttccaggacctgcaaaacctgaatctattgtccctatatgataataagctccagaccatcagtaagggcttatttgcaccactccagtccattcagacattgcacttagcgcaaaaccctttcgtctgtgattgtcacctcaagtggctggctgactaccttcaggataaccctattgaaacatcaggagccaggtgctcctcccccagacgcctcgccaacaaacgtatttcccagataaagtcaaaaaagttccggtgtagcgggtcagaggactaccggagccggttcagcagcgagtgctttatggacctggtctgcccagagaagtgcagatgcgagggaacaattgttgactgctcgaaccaaaaattggtcaggatccccagccacctacccgagtacgtgactgatctgagactcaatgacaatgaggtgtctgttttggaagcgacgggtatattcaagaagttgccaaatttgagaaagattaaccttagcaataataaaattaaggaggtgcgggaaggcgctttcgacggagccgcaagcgtacaagagctgatgttgacaggcaaccagcttgagactgtccatggcagggtgtttcgcggtctgtctggactaaaaacgttaatgttgcggagcaacctgattgggtgcgtgtccaatgacacctttgccggtctctcctccgtccggttgttatcactgtatgacaatcggataacaaccattacacccggtgcatttaccacccttgtgtcattgtcaacaatcaacctgctgagcaaccccttcaactgtaattgccaccttgcctggctgggcaaatggctccgcaagaggagaatcgtgtccggtaatccgcgatgtcagaagccctttttcctcaaagaaatcccaatccaggacgtcgcaatccaggactttacgtgcgacggaaatgaagagagtagttgtcagttatccccgagatgtcctgaacagtgtacctgcatggagactgtggtgaggtgcagtaataagggcctgcgcgctcttcctagaggcatgcccaaggatgtaacagagctgtacctggaaggcaaccacctgacagctgtgccaagagagctgtccgcgctgagacatcttacactgatcgacctgtcgaacaactctatatcaatgttgaccaactacacattcagcaacatgagtcacttatctacgcttatcctgtcttacaaccggctcagatgtattccagtgcatgcctttaacggcctgcggtcactgcgagtgctcacgctgcacggcaacgacatcagcagcgtccctgagggaagctttaacgacctcacgtccctcagtcatctagccctcggaacaaatcccctgcactgtgattgttccctgagatggctttcagaatgggtgaaagccggatacaaagaaccaggaatcgcacggtgctcgtccccagaacccatggcagatcgactgctgctgacaacccccacccacaggtttcagtgcaagggccctgttgacatcaatatcgtggctaagtgtaacgcttgtctatccagtccgtgtaagaacaatggaacctgcacccaggacccagtggagctgtatcgatgcgcatgcccgtacagctacaaaggcaaggactgcaccgtgcccatcaacacatgcatacagaatccatgtcagcacggcggaacatgccacctgtccgactctcacaaagacgggttttcatgttcatgccccctggggtttgagggccagcggtgcgaaataaacccagatgattgcgaggataacgattgtgagaataacgctacctgcgttgatggaatcaacaattatgtctgcatctgtccccctaattacacaggcgagctgtgcgacgaggtgattgatcactgcgtccctgaactgaacctctgccagcatgaagccaaatgcattccattagacaagggcttttcttgtgagtgtgtcccgggatatagtggcaagttatgtgagacagataacgacgactgtgtcgcccacaagtgccgacacggcgctcagtgtgtggacactataaatggttacacgtgcacctgcccccagggctttagcgggccattttgcgaacatcctccacccatggtgttgctccaaacatccccttgcgaccagtacgagtgtcagaacggagctcagtgcatcgtggttcagcaagagccaacctgtcggtgcccaccaggtttcgccggaccaaggtgcgaaaagttgattacagtaaactttgtgggcaaggactcttatgtggagctcgcctcagccaaagtgcggcctcaggccaatataagtttgcaggtggccaccgataaagacaatgggattttgctgtacaagggggataacgacccactggcactagaactgtaccaaggacacgttagactggtgtatgatagcctttcctctccaccaacaaccgtttacagcgtcgagacggttaatgatgggcagtttcactcagtagagctagttaccctcaaccaaaccctaaatttggttgttgacaaggggactccaaagtccctcggcaagctgcagaagcagccagccgttggtataaacagtcctctctatcttggcggaattccaacatcaacaggcctctccgctctgcggcaaggtactgaccgcccattggggggttttcatggctgcatccatgaggtgcgcatcaacaacgagctgcaggactttaaggctctaccccctcagtccttgggagtatctcccggatgcaaaagctgcaccgtgtgtaaacatggactctgtcggagcgttgagaaagactccgttgtgtgcgaatgcaggccaggttggacggggcctctgtgtgaccaggaggcccgagatccctgcctggggcatcggtgccaccacggtaaatgtgtggcgactggaacaagttatatgtgtaagtgtgcagagggatatgggggagacctctgtgataataaaaatgactcagccaatgcttgttcagccttcaagtgtcaccatggacagtgccacatctcagaccagggagagccctactgcctctgtcagcctggcttctcaggcgagcattgccaacaggtcttccgggctcaagtctttcaatcctcactgcccggtaattgcagttggagttgctggcctcctcgaccaccaatgccctag

SEQ ID NO: 240714 - DNA, 4571 bp, synthetic construct
  misc_feature 1..4571: note = Description of Artificial Sequence: Synthetic coding sequence
  source 1..4571: mol_type = other DNA
atggctcccggttgggctggcgtgggtgcagccgttagggcccgacttgccctcgctttggctctggcgtccgtattgtctgggcctcccgctgtggcttgcccaaccaagtgcacctgctccgctgcgtcagtagactgtcatggccttgggcttagagccgtgccccgaggcatccctagaaatgctgagagactggacctggaccgaaacaacatcacccggattactaagatggactttgccggtttgaagaacttgcgggtgcttcacctcgaagataatcaggttagcgtgatcgaaaggggcgcattccaggacttgaagcagctcgagcggttaagactgaataaaaacaaactgcaagtccttccggaactgctgtttcaatccacgcccaagctgacaagactggacctttctgagaatcagatacaaggcataccacgcaaggctttccgcggaatcacagatgtgaagaacctccagctggacaacaatcacatttcctgcattgaggacggagccttcagggccttacgggatctggagattcttacactcaacaacaacaacatcagccggatcctcgtgacatccttcaaccatatgcctaagatccgcacgcttagactccactccaatcacctgtactgcgactgtcacctggcttggttatctgactggctccgccagaggcgtaccgtcggtcagttcacgctctgtatggcccctgtgcacctcagggggtttaatgtggccgacgtgcaaaaaaaggaatacgtttgtcccgcacctcactcagaaccccctagctgtaatgcaaatagcatcagttgcccctccccttgcacatgctctaataacatcgtggattgccggggaaagggtttgatggagatcccggcaaatcttcccgaaggaattgtggagattcgcctggaacagaattctataaaggctataccagcaggtgccttcacccagtacaaaaaactaaaaagaatcgacatcagtaaaaatcagataagtgatattgcaccagatgcgttccagggactgaagagcctcacatccctagttctttacggaaacaagattacagagatagtcaagggcctgttcgatggactcgtgtctctgcagcttctgttgttgaatgccaataaaattaattgtctccgggtcaataccttccaggatctgcaaaacctgaacctcctgagtttgtacgataataaactgcagaccatttctaagggcctcttcgctcccctgcagagcatacagacactccacctggcacaaaacccttttgtgtgtgactgccatctgaaatggctggctgattacctccaggataaccctatagagacgagtggagccaggtgttctagtccccgtcggctggccaacaaacggatctctcagattaagagcaaaaaatttcgctgctctgggtcggaagattatcggagccgtttctcctctgagtgcttcatggatctggtttgtcccgagaaatgtcgatgcgagggtacaattgtagactgcagcaatcagaaactcgtgaggataccgagccacttaccagagtatgtgacagatctcagactgaacgataacgaagtttccgtgcttgaagccacgggcatttttaagaagctaccaaatctgaggaagattaacctgtcaaacaataaaatcaaggaggtgcgcgaaggagcctttgacggcgctgcctccgtgcaggaattgatgctcaccggcaatcagttggagacggtgcacggtcgagttttccgcggactgtccgggctgaagacacttatgttgcggtctaatctgatcggctgcgtcagtaatgacacctttgctggtctttctagtgtcaggttgctgagcctgtacgacaaccgtattaccaccattactccaggggcattcacaactctggtgagtttgtctaccataaacctactttcaaatcctttcaattgtaactgtcatctggcctggctgggaaagtggttaagaaagcggagaatcgtgagcggaaacccgaggtgccagaagccctttttcttgaaagagattcctatccaggacgtcgcaatccaggattttacctgcgacggcaatgaagagagtagctgtcagctttcgcctcgttgccctgaacagtgtacctgtatggagactgtggtcaggtgcagtaataagggtcttagagctctgccacgcggtatgcccaaggatgtgactgagctgtatctggagggaaatcatttgaccgcagtgcccagagagctgtccgctctgaggcacctgacgttgattgacctgtcaaataatagcatttctatgctgactaactatacttttagcaacatgtcacacctcagcaccctcattctgtcctacaatagactgaggtgtatcccagtccacgcattcaacggccttaggagtcttagggtgctgaccttacacggaaacgatatcagcagcgttcccgaaggctcatttaacgatctgacctcactgagtcacctggctctcggaactaacccattacattgtgactgctccttaagatggctatccgagtgggttaaggccggatacaaggaacctggaatagcaagatgctcctcccccgagccaatggctgaccgtctcttgctcactacacccactcaccgcttccagtgtaagggacccgtcgacattaatatcgtcgccaagtgcaacgcttgtttgtcgtccccctgtaagaacaacggcacctgtacgcaggaccccgtggagttgtaccgctgtgcctgcccatactcctataagggcaaagactgcaccgttcccatcaatacatgtattcaaaatccttgccaacatggcggaacttgtcaccttagcgacagtcataaggacggattctcgtgttcctgccccctcggattcgaagggcagcggtgcgagatcaatccggacgattgtgaggacaatgactgtgaaaacaatgcaacttgtgttgacggtataaataattacgtgtgcatctgtccgccaaattacacaggcgaactgtgcgacgaagtgattgatcattgcgtacccgaactgaatctgtgccagcacgaggccaagtgtattcccttggacaagggtttctcttgcgagtgtgtccccggttactcaggcaagctgtgcgaaacggataatgacgattgtgtggcccacaagtgccgccacggagcacagtgtgtggatactatcaacgggtatacatgtacttgtccacagggattttccggacccttttgcgaacatccgccaccaatggtcctgctgcagacatccccgtgcgaccagtatgagtgccaaaatggtgctcagtgtattgtcgtgcagcaggagcccacctgcaggtgtccccctggcttcgccggacccaggtgtgaaaaactcatcaccgtgaatttcgtgggcaaggacagttacgtggaactggcaagcgcgaaggttagaccccaagccaacatttcattacaggtcgcgacagacaaagacaacggcatactgctatacaaaggggacaacgatccattggctttagaactgtatcaggggcacgttcgcttggtctacgactccctgagctcacctcctaccacagtttactccgtggaaactgtgaacgatggccagttccactctgtggaactggttacactgaatcagaccctgaatctggtggtggataagggaacgccgaaatcgctgggaaagttacagaagcagcccgctgtgggcattaactcaccactgtacctgggaggaattcccacttctaccggcctgtccgccctgaggcaaggcaccgaccgcccattaggcggattccatggctgtatccatgaagtcaggatcaacaatgagctgcaggatttcaaagctctccccccacagtctcttggagtctctcctggttgcaagtcctgcacggtttgcaaacatggattgtgtaggagtgtcgaaaaggacagcgtggtgtgcgagtgccgtcccggatggaccggaccactctgcgatcaagaagccagagacccctgtctggggcacagatgtcaccacgggaaatgcgtcgctaccggcacctcttacatgtgtaagtgtgccgagggatacggcggtgacctgtgtgacaataagaacgatagcgccaatgcatgctcggcctttaagtgccatcatggtcagtgccacattagcgaccagggagagccttactgcctttgtcagcctggtttctccggggaacactgtcaacaggagaatccttgccttggtcaagtggtgagggaggtaatccgcaggcaaaagggctacgcgagctgcgcaactgcgtcaaaggtgccaatcatggagtgtaggggtgggtgtggccctcagtgctgccaaccaacgaggtcaaaaagacggaagtatgtgtttcagtgcaccgacggctccagttttgtcgaagaggtcgagcggcaccttgaatgcgggtgcctcgcttgtagtta

SEQ ID NO: 240715 - DNA, 3258 bp, synthetic construct
  misc_feature 1..3258: note = Description of Artificial Sequence: Synthetic coding sequence
  source 1..3258: mol_type = other DNA
atgtcaaccccgtctagattcaaaaaggacaaagagattattgcagagtacgagtcccaggtgaaggagatcagggctcaactcgtggaacagcagaaatgcctagagcagcagaccgaaatgcgggtgcagcttctgcaagatctgcaagatttctttaggaaaaaggccgaaatagagacggagtactctaggaatctcgagaaactggctgaaaggtttatggctaaaactcgctcaacaaaggatcatcagcaatacaaaaaagatcagaatctcttgtcaccagtgaattgctggtacctcctactgaatcaggttaggcgcgaatccaaagaccacgccactctgagcgatatatatctgaataacgtcatcatgcgctttatgcaaatttcagaggactccacacgcatgttcaagaaatcgaaggagatcgcctttcagctgcatgaggatctgatgaaggtgctgaacgagctgtataccgttatgaagacgtaccacatgtatcatgctgagtcgattagtgccgagtcaaaacttaaggaagctgagaagcaggaagagaagcagattggacgctccggcgacccagttttccatatcagactcgaagagagacatcagaggcggtcgagtgtcaagaagatagaaaagatgaaggagaaaagacaggcaaaatactccgagaataaactcaaaagcatcaaggctcgaaatgagtacctgctgactctggaagcgacaaacgcctccgtgttcaaatattacatacatgacctgtctgatctgattgattgttgcgaccttggttatcatgcttccttgaatagggccctgaggacatatctcagtgctgagtataacctcgagaccagtcgtcacgaggggttggacattattgaaaacgcagttgataatctcgagcccaggagcgacaaacagcgcttcatggaaatgtatccggctgccttttgtcctccaatgaaattcgagtttcaatctcacatgggagacgaagtctgccaggttagtgcccaacagccagtgcaggctgagttgatgctgcgataccagcaactacagagtcggttggccactctaaaaatcgagaacgaagaggtgaagaagaccacggaggccactctgcagaccattcaagatatggtgacaattgaagactacgatgttagcgaatgctttcagcattcaagatccacagagagtgtaaaaagcacagtctccgagacgtatctctccaagccctctatcgcaaaaagacgagccaaccaacaggagaccgaacagttctattttatgaagctcagagagtacctcgagggctccaatctcatcacaaagttacaggccaagcacgaccttttacaacgcacactcggtgaggggcaccgtgctgagtacatgaccacacggccacctaacgtccccccaaagccacagaaacaccgtaagagtaggcccagaagtcagtataacaccaagttgttcaacggcgacttggagaccttcgtgaaggattctggccaggtgatcccgctgattgtggagtcctgtattcgctttatcaacctatacggactgcaacatcagggaatcttcagagtgtccggcagccaggtcgaagtgaacgatatcaaaaactcatttgagcgcggtgagaacccgttagcagacgaccagagcaatcacgatataaactcagtagcaggggtccttaagctgtatttcaggggcctggaaaatcccttgttccccaaggagaggttcaatgacctgataagctgcattcgtatagataatctttacgagagggctcttcatatccggaagctcctgctgacattgcccagaagcgtgctgatcgtgatgagatacttgttcgcctttcttaatcatctgtcccagtattctgatgagaatatgatggatccgtacaacctggccatatgttttggacccactctcatgccggtccctgagattcaggatcaagtgtcctgtcaagcacatgtcaatgagatcatcaaaacaatcatcattcaccacgaaacaattttccccgatgccaaggaattggacggccctgtctatgagaagtgtatggccggtgatgactattgcgattcaccctacagtgaacatggaacgctggaggaggtggaccaagatgcaggcacagagccccacacctctgaagacgagtgcgagcccatcgaagctatcgcgaagtttgattacgtcggtagatcagctcgggagctctccttcaagaagggtgcttcactcttattgtatcacagagcatccgaagattggtgggagggaagacataatggaattgatggtttggtgccccatcagtacatcgtggtgcaagatatggatgacacctttagtgatacactctcgcagaaggctgacagtgaagcctcttcagggcctgtcacggaagacaagagctccagcaaggacatgaacagcccaactgataggcaccccgacggctatctggcacgacagaggaaacggggagagcctcctcccccagtacggaggccaggccgaacttcagacggccactgtcctttacatccaccccacgccctgtccaactcaagtgttgacttgggctctccttctctggcatcacatcctcggggactgctgcagaatagggggctgaacaacgatagcccagaacggaggcgcagacctggtcacggctcactcaccaacattagtaggcacgactcactcaagaagattgatagcccaccaattagacggagcacgagctccggccagtacactgggttcaacgaccacaaacctttagaccctgagacaatcgctcaagacatcgaggaaactatgaatacagccctcaacgaactccgggagctcgaaaggcagagcacagccaaacatgcgcctgacgtcgtcctagataccttggagcaggtcaaaaattcaccaaccccagccacgtccacggaatcattgagcccactccataatgtagctctccggtcctcagagcctcagatccgcagatccaccagctcctcctctgacacgatgtctacattcaagcccatggtggctcctcggatgggagtacagctgaagccacccgcactgcgacctaagcctgcggtcctgccgaaaactaatccaaccataggcccagctcccccaccgcagggcccaactgacaagagctgtaccatgtag

SEQ ID NO: 240716 - DNA, 3189 bp, synthetic construct
  misc_feature 1..3189: note = Description of Artificial Sequence: Synthetic coding sequence
  source 1..3189: mol_type = other DNA
atgtcaacaccaagtcgattcaagaaggacaaagagataatcgcagaatatgaatcgcaggtgaaagaaattcgagcccaattggtggaacagcagaaatgccttgaacagcaaaccgagatgagggtacagttactgcaggacttacaggacttctttcggaaaaaagcagaaattgaaacagagtatagccgtaacctggagaagcttgcagagcgcttcatggctaaaacccggagtacgaaggaccaccagcaatataaaaaggatcagaacctgctgtcacctgtgaattgttggtaccttcttctcaatcaggtcaggagagagagcaaggatcatgcaaccctgtccgacatctatctaaacaatgtcatcatgcgattcatgcagatcagcgaagacagcactcgcatgttcaagaagtcaaaggagatcgcctttcagctgcacgaagatctgatgaaggtcctgaatgagctgtatactgtgatgaagacatatcacatgtaccatgccgagtccatttccgccgaaagtaagctgaaggaagccgaaaaacaggaggagaaacagataggcagaagcggggacccagtatttcatatcaggttagaagaacgtcaccagcgaagatcatccgtgaagaaaatagaaaagatgaaagaaaaaagacaggcaaaatattcagaaaataagttaaagtccatcaaagcacgcaacgagtatctgctgaccctagaagccactaatgccagtgtttttaagtattatatccatgacctgtccgatttaatcgactgctgtgacctgggctaccacgcgagcctgaacagagccttgcggacctatcttagcgccgagtacaacctcgaaacctccagacacgagggattagacatcattgagaacgctgtagacaacttagagccccgatctgacaaacagcgatttatggagatgtatcccgcagccttctgccccccaatgaaattcgaatttcagtcccacatgggtgatgaggtttgtcaagtatcagcccaacagccggtgcaggccgagctaatgctccgttaccagcagctccaaagtagactcgctacattgaaaattgagaacgaagaggtcaagaagaccaccgaggcaaccctccagacaatccaagacatggtgaccatcgaggactacgatgtgagtgaatgttttcagcactctaggagcaccgaatctgtgaaatccaccgtgtctgaaacctatctttccaaaccaagcatcgccaagcggcgtgccaatcagcaagagacagagcagttctacttcatgaagctacgcgaatacttggaggggtctaatctgatcaccaaactccaagccaaacatgatctgttacagcggactctcggggaaggccacagggccgagtatatgacgacctcccgaggaagacgaaatagccacaccagacaccaggactcggggcaggtgatccctttaatcgtggagtcatgtatcagatttattaacttgtatggcctccagcatcagggcattttccgcgtgtctggctcccaggtggaggtgaacgatattaagaattcattcgagagaggcgaaaatccgttagccgacgatcagtctaatcatgatataaattctgtggcaggcgtgctcaaactctatttcaggggcctcgaaaatccattgttccccaaggaacgatttaatgatctgatcagttgtatcagaattgataacctctacgagcgcgcattgcacatcagaaagctcctgctgacgctcccaaggagcgtccttatcgtaatgcgctacctgtttgctttccttaaccatctgtcacagtacagtgatgaaaatatgatggatccctacaatctcgcaatttgtttcggccctacgctcatgcccgtccccgaaatccaggaccaggtgtcctgtcaggcccatgtaaacgaaattatcaagactattatcatccatcatgaaactattttcccagacgcaaaagaactggacggccctgtttatgagaaatgcatggcaggcgacgattactgtgactctccctatagcgagcacgggactctggaggaggtcgaccaagacgccggaacagaaccacatacctcagaagacgagtgcgagccaattgaggcaatcgccaagtttgactacgtcggaaggagcgcacgtgagttgtcgtttaaaaagggggcatccctactcttgtaccacagggcctcagaggactggtgggaaggcaggcataatgggatcgacgggctagtgccccaccagtatatcgtagtccaggacatggatgataccttctccgatacattatcccaaaaggccgattcagaagcatccagcggcccagtgaccgaagacaaaagctcttctaaagatatgaattctcccactgaccgacatcctgacggttatttggctcgtcaaagaaagagaggcgaaccccctcccccagtgaggagacctggaaggacctccgacggccattgtccactgcacccgccacatgccctcagtaacagctccgtagacctgggctcccccagcttagcatcccaccccagaggactgctgcaaaatcgcggtcttaacaacgatagcccagagaggaggagacgcccagggcacggctccctcacaaatatatctcggcacgattcacttaagaaaatagacagccctcccatcaggcgcagtacatctagtggacagtacaccggtttcaacgatcataaaccgttggaccctgaaacaatcgctcaggacatcgaggagacaatgaatacggccctgaatgagcttagagaacttgagcgacagtcaacagccaaacacgcacctgatgtggtcttggataccttagagcaggtcaagaattccccgacccccgctacctctaccgagagtctctcaccactccacaatgtggctctgaggtctagcgaaccccaaatcagaaggtccacaagttcttcttccgatactatgtctacatttaagccaatggtcgctcctcggatgggcgtccagctgaagccacctgcactgaggccaaagcctgctgtattgcctaagacaaatccaacaattggacccgctccgccaccgcaaggccctactgacaagtcatgcaccatgtag

SEQ ID NO: 240717 - DNA, 2958 bp, synthetic construct
  misc_feature 1..2958: note = Description of Artificial Sequence: Synthetic coding sequence
  source 1..2958: mol_type = other DNA
tgaaaggaccagaacgttttgtcccctgtcaactgctggaaccttctgctgaatcaggtgaagagagagagccgggaccacacgactttgtctgatatttatttaaacaacatcatccctcgttttgttcaagtgtccgaagactctggacggcttttcaaaaagtccaaagaggtagggcagcagctccaggatgacctgatgaaagttttgaacgagttgtactcggtgatgaagacatatcacatgtacaacgctgacagtattagtgcgcagagtaaactgaaggaggcggagaagcaggaggagaagcaaatcgggaagtctgtgaagcaagaagaccggcaaactcccaggagccctgactcgacagctaacgtgcgtattgaggaaaagcacgtgcggcgatcaagtgttaaaaagatcgagaaaatgaaggagaaacgacaggctaagtataccgaaaacaagttgaaagctatcaaagcaaggaacgagtatctactggcactcgaggcaactaacgccagcgttttcaagtactatatccacgacttatctgacctgattgaccagtgttgcgacctcggatatcacgctagcttgaacagggcgctgagaacattcctctccgcggagctcaaccttgaacagagtaaacatgaagggctagatgctattgagaacgcagtagaaaatctggacgccacctccgacaagcaacgcctgatggagatgtataataatgtcttctgtccacccatgaagttcgagtttcagccacacatgggcgacatggcctcccaactatgtgctcaacagcccgtccagtcggagctcgtgcagaggtgtcagcagcttcagagtcgcctgtccacccttaagattgagaatgaggaggtaaagaagactatggaggcaacgctacagacaatccaggatatagtcacagtggaagattttgatgtgagcgactgctttcagtatagcaatagtatggagtcggtcaagagcaccgtgagtgagacctttatgtctaagcccagcatcgctaaaaggagggccaaccaacaggagacggagcagttctattttaccaaaatgaaggaatacctggaggggcgtaacttgatcacaaagctgcaagcaaagcatgatctattgcagaaaaccctgggcgaatctcagcgaaccgactgctcactggctagacggtccagcacagtgaggaagcaggatagttcccaggctattccactggtggtcgaatcctgcatcaggtttatcagccgccatggtcttcagcatgagggaatttttcgcgtgtccgggagtcaggtagaagtgaacgatatcaaaaacgcattcgagaggggcgaggatccactggccggagaccaaaatgatcacgacatggattctattgccggtgtgctgaaattgtacttccgaggacttgagcatcctctgttccccaaagacatctttcacgacctaatggcgtgcgtgaccatggacaatctgcaagaacgcgctcttcatattcgaaaggtgttgctggtgctgccaaaaaccacactgatcattatgcgatatctgtttgcttttctgaatcaccttagccagttcagcgaggaaaacatgatggatccctacaacctggccatttgttttgggccatctttgatgagtgtgcctgaaggtcatgatcaggtatcatgtcaggcacacgtgaacgaactgattaagaccattattatccagcatgagaacattttccctagcccacgcgaactggaaggcccagtgtacagccgcggaggatctatggaagactattgcgattctccccatggcgagaccacatctgtggaggactccacacaggacgtgacagcagagcatcacacatcagacgatgaatgtgaacctatcgaagctatagctaaatttgactatgtgggaaggactgcaagagaattgtcctttaaaaagggggcttctttgttactttaccagagggcaagcgacgattggtgggaaggcaggcacaatggaatcgacggactgattccccaccagtacattgtggtgcaggatactgaagatggtgtggtggagcggtcttcccctaagtccgaaatagaagtaatctcggaacctcctgaagagaaggtcacagcaagggccggtgccagttgcccttccggagggcatgtggccgacatatacttagctaatatcaataaacagcggaagaggcctgagtcgggtagcattaggaaaacatttaggtcagacagccatggactaagttccagcttaactgacagtagttcacctggggtcggagcctcctgtcgtccctcgagtcagccaattatgagccagtccctcccgaaggagggcccagacaagtgctcgataagcggtcacggatctctgaattcaatatctagacacagctctttgaaaaacaggctcgatagcccacagattaggaaaactgctacggccggaaggagcaaaagctttaacaatcatcggccaatggatcccgaagtcattgcacaggacattgaggccactatgaactcagccctgaacgaattgagagagctggagaggcaatcttccgtcaagcacacacccgatgtcgttttagacacccttgaacccttgaaaacgtctcccgtggtggcaccgacttccgaacctagctctcctcttcacactcagttactaaaggatcccgaacctgcatttcaacgatcagccagcaccgctggggacattgcttgcgctttcaggcctgtgaagtccgtcaaaatggcggcacccgtcaaaccccctgctacccgcccaaaacccacagtattccccaagactaacgccacaagccccggagtgaactcaagcacctcaccgcagagcactgacaagtcatgtactgtgtag

SEQ ID NO: 240718 - DNA, 2796 bp, synthetic construct
  misc_feature 1..2796: note = Description of Artificial Sequence: Synthetic coding sequence
  source 1..2796: mol_type = other DNA
cagagcaaggaagtgggccaacagctccaagacgatctgatgaaagttctgaatgagctgtactctgtgatgaaaacttaccatatgtacaatgcagatagtatctctgcacaaagcaaactgaaggaggccgaaaagcaagaggagaagcagatagggaagagcgtgaagcaggaggatcgccaaacccccaggtcacccgacagtactgccaacgttcggatcgaggagaagcacgtgaggaggagtagtgtcaagaaaattgagaagatgaaggaaaagcggcaagccaagtacactgagaataaactgaaggccattaaggcacgaaatgaatacctactcgccctggaggctaccaacgcaagtgtgtttaagtattatatccacgatctgtctgatctaattgaccagtgctgcgacctggggtatcacgcaagcctgaatagggcattgagaaccttcttatcagccgagctcaatctggagcagagcaaacacgaggggctagacgcaattgagaacgcagtcgagaacttagatgccacctccgacaagcagcgcttaatggaaatgtacaacaatgtgttttgcccaccgatgaaatttgagtttcaaccgcatatgggtgatatggcctctcagctctgcgctcaacagcccgtccagagcgagctggttcagagatgccaacagttgcagtcccgtctgtccaccctcaagatcgagaatgaagaagtgaaaaaaactatggaggctacgctgcaaacaattcaggatattgtcacagtagaggattttgacgtatcggactgttttcagtactctaactccatggagtccgtcaaatcaactgtgtctgagacatttatgtcaaagccctcgatcgccaagagacgggctaatcagcaggaaactgagcagttctacttcaccaaaatgaaggagtatttggagggccgaaacctgattacaaaactacaggcaaagcatgacctgctccagaaaacactcggggaatcccagagaacagactgttccctggctaggcgctcctctaccgtacgcaagcaggacagctcccaagcaatccctctcgtcgtggagagctgtattaggtttatcagccgccatgggctgcaacacgaaggcatcttccgtgtctcgggttcccaggtagaggttaatgatattaagaatgcatttgagagaggggaggaccctttggctggtgaccaaaacgatcatgatatggactcaattgcgggtgtactgaagctgtactttaggggtctcgagcatcccctcttccctaaagacatcttccatgaccttatggcttgtgtgaccatggacaacttacaagaacgggctctgcatatcagaaaggttctgctcgtgcttcccaaaactacattgattatcatgcgatatctttttgcattccttaatcacctctcccagtttagcgaggaaaacatgatggatccttataatctggctatctgctttggcccatccctaatgtctgtgcctgaggggcacgatcaggtctcatgccaggctcacgttaacgaactcattaaaacaatcatcattcagcacgaaaatatattcccatcaccacgcgaacttgagggaccagtgtactcacgtggcggtagcatggaggactattgtgactctccgcatggagagactacttcagttgaggactcaacacaggatgtgactgccgaacaccacacctcagacgatgaatgtgagcccattgaagctattgcaaaattcgattacgtcggccgaaccgcccgagaacttagctttaagaaaggagctagcctactcttgtaccaacgcgcaagtgatgactggtgggaagggcgacataacggcatcgacgggctcatcccccaccagtatattgtggtgcaagatactgaagacggcgttgtggagcgcagctctcccaagtccgagatcgaggtcatatccgagccgccagaggaaaaagttacagcccgtgctggggcttcgtgcccctccggaggacatgtggccgatatttacttggccaatataaataaacagcgcaaacggccagagtctggaagtatccgcaagacctttagaagtgattcccacggcttaagtagcagcttgacagatagttctagccccggtgttggggctagctgtcgacccagtagccagcctatcatgtctcagagtttgccgaaggaggggccagacaagtgcagtatctctgggcatggaagccttaactccatcagtaggcactcatctttaaaaaatagactggattctccacagataaggaagacggcaactgctgggagaagtaagagttttaataaccatcgaccaatggatcccgaggtgattgcacaggatatagaagccactatgaattcagcactgaatgaactgcgagaactcgagaggcaaagctccgtgaagcacaccccagatgttgtgctagacacgttagagccactcaagacatcccctgtggtagctccaacatctgagccctcctctcctctacacacgcaattactgaaggatccagagcctgcgtttcaacgctccgccagcacagccggagacatcgcatgtgccttcaggcccgtgaaatctgtgaaaatggcagccccagtgaagcctccagccacacgccctaagccgaccgtgtttcccaagactaacgcaactagccctggcgtaaacagttcaacatctccccagtcaactgacaagagttgtaccgtgtag

SEQ ID NO: 240719 - DNA, 2112 bp, synthetic construct
  misc_feature 1..2112: note = Description of Artificial Sequence: Synthetic coding sequence
  source 1..2112: mol_type = other DNA
agaaaggaccagaacgtgctgagccccgtcaactgttggaatctgttactgaatcaggtgaagcgagagtcgcgcgatcatacaaccttgagcgatatttacttaaataacatcataccgagattcgtccaggttagcgaagattccggcaggctcttcaaaaaaagtaaagaggtgggtcaacagcttcaagatgacttgatgaaagtactgaacgaactgtatagtgtcatgaaaacctaccacatgtataacgccgattcaattagcgcacagtcgaagctcaaggaagctgaaaagcaggaggaaaaacagataggtaaatcggtgaaacaggaggatagacaaacccccagaagcccagacagcaccgctaacgtccggattgaagaaaagcacgtgcgcaggtcttccgtcaaaaagatagaaaagatgaaagagaagagacaggctaagtacaccgagaacaaattgaaagcaatcaaagcacgcaatgagtacctgcttgcactcgaggccacaaacgcttccgtatttaaatattatatccatgaccttagtgatttaatcgattgttgtgatctgggataccatgcctccctcaatagagctctccggacattcctttctgctgaattgaatctggaacagtctaaacacgagggcctcgacgctattgaaaacgctgtcgagaacctggatgctaccagtgataagcagcgcctcatggaaatgtataacaacgtgttctgtccccctatgaagttcgagttccagccacacatgggggatatggcaagccagctgtgtgctcagcaacctgtgcaatcagagctggttcagaggtgtcagcaactgcagagcagattgagtacgctaaagatcgagaacgaggaagtcaagaaaacaatggaagctactcttcagactattcaggatatcgttactgttgaggactttgatgtaagcgattgttttcagtactcaaattccatggagtccgtcaagtctacagtttcagagacctttatgtccaagccgagcattgccaaacgtcgcgctaaccagcaagagaccgaacagttttacttcactaaaatgaaagaatacctcgagggcagaaatttgatcacaaaactgcaggccaaacacgacctattgcaaaaaaccctgggagagtctcagcgcacagactgttccctggcacgaaggtccagcaccgtgaggaagcaggactcaagccaggctatcccactggtagtggagagttgtatcagattcatctccaggcatggcctgcagcatgagggaatcttcagagtgtcggggtcgcaggtcgaggtcaatgatatcaagaacgcattcgagagaggagaagaccctttggctggggatcagaatgatcatgatatggactccatcgccggagtgcttaagctttatttccgcggactggaacaccctctgtttccaaaggatattttccacgaccttatggcctgcgtgacaatggataacctacaagaacgagccctccatataagaaaggtactgcttgtcctcccaaagaccacactcattataatgcgatacctgttcgcattcttaaaccacctgtcacagttcagtgaggaaaacatgatggatccttacaacttggccatctgctttggcccatctctgatgagtgtgcctgaaggacacgatcaggtatcttgccaggcgcacgttaatgagcttatcaagactattattatccaacatgaaaatatcttccccagtcctcgggaactggaggggccagtttacagccgtggaggtagcatggaggactactgtgacagcccccatggtgagacaacatcagtggaggatagcacccaggatgtgactgcagaacatcataccagcgatgatgagtgcgagcccatcgaagctattgccaagtttgattacgtggggaggacagccagggaactatcctttaaaaaaggggcaagtttattgttataccagagagcatcagacgactggtgggaagggagacataacggtatagatggactgatcccccatcaatacattgtggtccaggataccctgataagctag

SEQ ID NO: 240720 - DNA, 759 bp, synthetic construct
  misc_feature 1..759: note = Description of Artificial Sequence: Synthetic coding sequence
  source 1..759: mol_type = other DNA
atggaggattattgcgacagtcctcatggcgagactacatccgtggaggatagcacgcaggacgtgacagctgagcatcacacgagtgacgatgaatgcgaaccaattgaggcaatcgcaaaatttgactacgtaggaagaacagctagagaactgtccttcaaaaaaggggcttctctgttgctgtaccagagggcttccgatgactggtgggagggtagacacaacggcattgacggcctgattcctcatcagtacatcgtcgtgcaggacacggaggacggtgtggtggagcgaagttccccgaagagcgagatcgaagtgattagtgaaccacccgaggaaaaggtcacagcgcgagccggtgcgagctgtccttcaggcggacatgtcgcagatatctatctggctaacatcaataacaacttgcacttggacaacacgaagccagtgactaccaagcagcgtaagcgtcctgagagtggctccattagaaagacattccgctccgattcccatgggctgtcgagctcccttaccgactcttccagccctggagttggagcgtcttgtcgacccagcagtcagcccattatgtcacagagtcttcctaaggaaggcccagacaagtgttcgatcagcggacacgggtccctgaactcgatttcacgtcattcaagtctgaagaatcggctggactcaccgcagatccgaaagacagcgacggctggtcgtagcaaatcttttaacaatcattag

SEQ ID NO: 240721 - DNA, 693 bp, synthetic construct
  misc_feature 1..693: note = Description of Artificial Sequence: Synthetic coding sequence
  source 1..693: mol_type = other DNA
taggcggagcaccacacgtctgacgacgaatgcgagcctattgaagcaatagccaaatttgactacgtgggaagaacggccagggaattatcctttaaaaagggagctagcctgttgctctatcaaagggcctcagatgactggtgggagggtcggcacaacggaatcgacggacttattccccatcagtatatcgtggtgcaagacacggaagatggggtggtggagagatcatcgcccaagagtgaaattgaggtgatctcagagccacctgaggaaaaagtaaccgcacgcgcaggcgcaagctgcccctccgggggacacgtcgcggatatttacctggccaacatcaataacaacctccacttggataatacaaaacctgttacgacaaagcagagaaaacggccagaatctggatccattagaaagaccttcaggtcggatagtcacgggctatctagctcactgacggattcaagctcaccaggcgtgggcgcatcttgcaggccaagctctcagcctatcatgtcacagtcactgcccaaggagggccctgacaagtgttcaatatctggccatggaagtctaaactctattagcaggcactcatctcttaagaaccggctggactcgcctcaaatcagaaagaccgctacagccggtcgctcaaagtcatttaacaaccattag

SEQ ID NO: 240722 - DNA, 1353 bp, synthetic construct
  misc_feature 1..1353: note = Description of Artificial Sequence: Synthetic coding sequence
  source 1..1353: mol_type = other DNA
gtgaagaaaacgatggaagccaccttacaaactattcaagacatagtaacagtcgaagacttcgacgtcagcgactgttttcagtactctaattccatggagtcagtaaagagcaccgtcagcgaaacatttatgtctaaaccctctatcgcaaagcgtcgtgcgaatcagcaggagaccgagcagttctacttcactaagatgaaggagtatcttgaaggtcgaaatctgataaccaagcttcaagctaagcatgatctccttcagaagaccctcggtgaatcgcagcggactgattgctccttggcccgtcgctcatcaaccgtaagaaaacaagattcctcgcaggcgatcccccttgtcgtggagagttgcattagattcatctcccggcacggcctccagcacgaaggcatctttcgcgtgagtggttcacaggtggaagtcaatgatattaaaaacgcctttgagaggggcgaggaccctctcgccggagatcagaacgatcacgacatggactccattgccggagtcctgaagctgtacttccgaggcctggaacaccccctctttcccaaagacatcttccacgatctgatggcctgtgtaacaatggacaacctgcaggagcgcgcactgcacatcaggaaggttctgcttgtcctgccaaagactacactgatcatcatgagatatctgttcgccttcctgaatcatctctctcaattctctgaggaaaacatgatggacccctacaatctggcgatctgttttgggcctagcctaatgagtgtgccagaaggccatgatcaggtatcttgccaggcccacgtaaatgagcttataaaaacaattatcatacagcacgagaatatatttcccagcccgagggagttggaaggaccagtgtacagtagggggggtagcatggaggattattgcgacagtccgcacggcgaaacaacctcggtggaagacagtactcaggacgttaccgctgagcatcacacgagtgatgatgagtgtgaaccaattgaggcaatagctaagttcgactacgtcggcagaaccgcccgagaactttccttcaagaaaggtgcatcactgctgctgtaccaacgtgcgtctgatgattggtgggaaggccgacacaacggcatagacggtctgattccacatcaatatatcgtggtccaagatacagaggacggcgttgtggaacggagctctcctaaatccgagatagaagtcattagcgaacccccagaggaaaaggttacagcacgcgcaggcgctagttgcccatctgggggacatgtggccgatatatatctggctaatatcaacaagtag

SEQ ID NO: 240723 - DNA, 3228 bp, synthetic construct
  misc_feature 1..3228: note = Description of Artificial Sequence: Synthetic coding sequence
  source 1..3228: mol_type = other DNA
atgagttctcagaccaaattcaaaaaagataaggagattatcgctgaatatgaggcacagatcaaagagatacggacgcagctagtagaacagtttaaatgtctggaacaacagagtgaatctcgcctgcaattattgcaggaccttcaagaattcttccggcgaaaagctgagatagaactggagtactctagatccctagaaaaactcgccgagcgtttttcatctaagattagaagctcacgcgagcatcaattcaagaaagatcagtatcttctgtctcctgttaactgctggtaccttgtgctccatcagacgcgtagagagtcaagggaccatgccacgctgaatgatatcttcatgaacaatgttattgtcagactctctcagattagcgaggatgtgatcagattgtttaaaaaatcgaaggagataggcctacagatgcatgaagaactgctgaaagtgaccaacgagctctataccgtgatgaaaacctatcacatgtaccacgctgagtccattagcgccgagtccaaacttaaggaggcagaaaaacaggaggaaaagcaatttaataaaagcggcgacctttccatgaacctgctccgccacgaagacagaccgcagagaagatcttccgtgaaaaaaatagagaaaatgaaggagaagcgccaggccaaatattctgaaaataagctcaagtgcaccaaagcccgtaacgattatctacttaacctggctgcaacgaatgccgcaatttcaaagtattacatacacgacgtctccgatctgatcgactgctgcgatctgggatttcatgcttcactagctaggacattcaggacctatctgtccgccgaatacaatctggagacctcacggcacgaaggattggatgtgatcgaaaacgccgtggacaacttggacagccgatcggacaagcacactgtaatggacatgtgtaaccaggtgttctgtcccccattgaaattcgaattccaaccacacatgggagatgaggtatgccaggtcagcgcccagcagccagtccaaaccgagttacttatgcgataccaccagctccagtctaggctagccacgctgaagatcgagaatgaggaggtgcgtaagaccctggacgccaccatgcagaccctgcaggacatgctcactgtggaagactttgacgtttctgatgcctttcagcacagtagatccactgaatccgtaaaatctgcagctagcgagacctatatgagcaagattaacattgcgaagagacgggctaatcagcaggagactgaaatgttttattttactaaattcaaggagtatgtcaacggatctaacctgatcaccaagttacaggcaaagcacgacctgcttaagcagactctcggagagggtgaacgcgcagaatgtggaaccacacgagggaggcggaacgctaggacccggaaccaagatagtggccaggctatcccgctggtggtggagtcttgtattagatatatcaatctctacggactacagcaacaaggcatcttcagggttccgggatcgcaggtggaagtgaacgatatcaagaatagttttgagcgaggcgaggaccccttggttgacgatcaaaacgaacgcgacattaacagcgtggcaggcgtgttgaaactctactttcgcggacttgagaaccccctctttccgaaggagcggtttcaagacctaatatctacaattaaactggagaaccctgcagagagggtccatcaaatccagcaaatcctcgtcacgctccctcgcgtggtcatcgtggttatgagatacttatttgccttcctgaaccatctatcgcagtactccgacgagaatatgatggatccatataacctggcaatttgttttggccctactctgatgcatatcccagacggacaggaccccgtgtcatgtcaggcgcacattaacgaagtcatcaaaaccattatcatccaccatgaagcaatcttccccagccccagagaattagaaggaccagtctatgaaaaatgcatggcagggggtgaagagtattgcgattcgccccatagtgagccaggcgctatcgacgaggtcgatcacgataacggcaccgagccccatacatctgatgaagaggtggaacagatcgaagctatcgccaagttcgactacatgggtcggtcccctcgtgagctctcttttaaaaaaggggcatccctgctcctgtaccatcgcgcttctgaagattggtgggagggcagacacaacggtgtcgacggattaatcccacaccagtatatcgtggtgcaggacatggacgacgccttcagcgactccctgtcacagaaagctgactcagaggcaagctctgggccactacttgatgataaagcctcctctaagaatgacttgcagtcccccaccgaacacatctcagattatgggttcggtggagtcatgggaagagtacgcctgcgaagcgatggggcagcaattcctagacggagatcagggggtgatacccattcaccccctcgaggcctggggccttcaattgacacgccgcctcgcgctgccgcttgcccttcatccccccataaaatcccccttacaagaggtaggatcgagagcccggagaaacgcaggatggccacttttggttctgcgggtagcattaattaccccgataaaaaggcactttccgagggacacagcatgcggtccacttgcgggtctacacgacatagttccctgggagatcacaaaagtttggaggctgaagccctcgctgaggatatcgaaaagaccatgtccactgcccttcacgagttaagggaactggagaggcaaaatacagtcaaacaggcacccgatgtcgtgcttgacacacttgaaccgctcaagaaccctccaggtccagtgagctccgaaccagcatcccctctccacaccatcgtgatcagagatccggacgctgcaatgcgtaggagttcctctagctccacagagatgatgactacattcaagccagcactttccgctcgcttggccggagcccaactgaggccccctccaatgaggcccgtcaggcctgtcgtgcagcaccgctcgagcagtagctccagcagcggggtggggtcccccgctgttacaccaaccgagaagatgtttccgaattcctccgccgacaaaagtggaacaatgtag

SEQ ID NO: 240724 - DNA, 3300 bp, synthetic construct
  misc_feature 1..3300: note = Description of Artificial Sequence: Synthetic coding sequence
  source 1..3300: mol_type = other DNA
atgagcagccagacaaaatttaagaaagacaaggaaattatcgccgagtacgaggcgcagatcaaggaaattcggacccagctggtggagcagttcaaatgtcttgagcagcaaagcgagagtaggcttcagctccttcaggatctgcaggagttctttagacgaaaagccgaaattgaactggagtacagccgcagtctggagaagctggccgaaaggttctcctcgaagattcgtagcagtcgggagcaccagttcaaaaaagatcagtacctgctgtcccccgtgaactgctggtacttagtgctccatcagactcgtcgcgaaagccgcgaccatgccacgctgaatgacatattcatgaataatgtaatcgtgcgcctcagccaaatcagcgaagacgtgattagacttttcaaaaaatccaaggagataggattacagatgcatgaggagctcctgaaagtgaccaacgagctatacacagtgatgaaaacttatcacatgtaccacgccgaatcaattagcgctgagtcaaagctgaaggaggccgagaaacaggaggagaagcagtttaataagtcaggggatctctccatgaacctgcttcggcatgaggatagaccacagcgcagaagcagtgtaaagaagattgagaaaatgaaagagaaacgccaagccaagtattcagagaataagctgaagtgtaccaaggccagaaacgactacctcttgaacctggccgctaccaacgccgctattagcaaatattacatccacgatgtgtcggatctgattgattgctgcgatcttgggttccatgctagcctcgctaggacatttcgcacctatctaagtgcagagtacaatctggaaaccagtcggcatgaagggttggatgttatagagaatgctgtggacaatttggacagtagaagcgacaaacatactgtgatggacatgtgcaaccaggtgttttgccctcccctgaagttcgaattccagcctcatatgggtgatgaagtgtgccaggtgagcgcccaacaaccagtccagactgagctgttaatgcgataccaccagctgcagtcacggctggctacccttaaaatagagaatgaggaagtccgcaagactcttgatgcgacgatgcagacgctgcaggatatgctgacggtcgaggactttgacgtgagcgacgcctttcagcactctcgtagcacagaatcagtcaagtcggcggcaagcgaaacctacatgtccaaaatcaacatcgccaagaggagggctaatcaacaggagactgagatgttctatttcactaagttcaaggagtacgtgaatgggagcaatctgattacaaaactgcaggccaaacacgatttgctgaaacagacactcggcgaaggcgagcgggctgagtgtggtactaccagaccaccctgccttccccctaaaccccagaagatgaggcgtccgaggcccctgtctgtgtattcccacaagctcttcaacggctccatggaggcattcattaaggactccggacaggctattcctctcgtggtcgagtcctgcatccgctatatcaacctgtacgggctgcagcagcaggggatctttcgtgtgccgggttcccaggttgaggttaacgatatcaaaaactcattcgagcggggtgaggacccactggtcgacgatcaaaacgagagggacataaattcagtggcaggagttttgaaactgtacttcaggggcttagaaaatcccctatttccgaaggagcgcttccaggatctgatcagcactatcaaacttgagaaccctgccgaaagggtccaccagatacagcagattcttgtcactttgcctagagtggtgatagttgtcatgaggtatctgtttgctttcctcaatcatcttagccagtacagcgacgaaaatatgatggatccctataatcttgctatatgcttcggccctacattaatgcacatccctgacggccaggatcctgtgtcctgccaggcccatatcaacgaggtgataaagaccattatcatccaccacgaggcgattttcccgtccccacgcgaactcgaaggtcctgtttatgaaaagtgcatggccggtggggaagaatactgcgacagtccacactctgaacctggcgcaatagatgaagtggaccatgataatgggactgagccgcatacaagcgacgaggaagtcgagcagatcgaggcaattgccaagtttgattatatggggaggagccccagagagctgtcattcaagaagggggcaagcctcctgctgtatcacagggccagtgaggattggtgggaaggccgacataatggggtggacggattaatcccccatcagtacattgtagtacaagatatggatgatgcattcagtgattcacttagtcagaaggccgattcggaagcttcttctggccctctccttgatgataaagcatcttccaagaatgaccttcagtctcctaccgagcacataagtgactatggtttcggaggggtgatgggaagggtgcgtctccgaagtgatggggctgcaatccctagaaggcgctctggcggagacacccattctccccctagggggttgggaccatctatcgacacccctccgcgagccgcagcctgtcccagttcccctcacaagattcctctcactcgtggcaggattgaatccccggaaaaacgtagaatggcaacttttggatcagctgggtcaataaattaccccgacaagaaggccctttctgagggccacagtatgagatccacctgcggatccaccagacatagttccctaggcgatcataagtctctcgaggcagaggccttggcagaagatatcgaaaagacaatgtctacagctttgcacgaacttcgagagctggaaagacaaaacacggtgaagcaggccccagatgtcgtcctcgataccctcgaacccctcaaaaaccctcctggccctgtctcttccgagcccgcatccccactgcacaccatcgtaattagagacccagatgctgccatgaggagatcttctagctcctctacagagatgatgaccacttttaaacctgccctcagtgcaaggttggcaggcgcacagttgcggcctcctcctatgaggcctgtgaggcctgtagtgcaacacagatcatcgtcctccagttccagcggcgtggggtccccagcagtaactcctaccgaaaagatgtttcccaactcttcggctgataagagtggaaccatgtag

SEQ ID NO: 240725 - DNA, 1008 bp, synthetic construct
  misc_feature 1..1008: note = Description of Artificial Sequence: Synthetic coding sequence
  source 1..1008: mol_type = other DNA
atgaacaacgttatcgtgagactctcacaaatttcagaggacgtgattcggctgttcaaaaaaagcaaagagattgggctgcaaatgcacgaggagctgctgaaagtaaccaatgagttgtataccgtcatgaaaacctatcacatgtatcacgctgagagtatttctgcagagtctaaactcaaggaagctgaaaagcaggaggagaagcagttcaacaagagcggggacctctctatgaacttgctgcgccacgaggacagaccccagaggcggtcgagcgtgaaaaagattgaaaagatgaaagagaaaagacaggctaaatattctgagaacaaactcaagtgtaccaaggcccgtaacgactaccttctaaacctggcggctaccaatgccgcaatctccaagtattacatccacgacgtgtccgacctgatcgattgttgtgatttaggattccatgcgtcacttgctcggacatttcgcacctatttatctgccgaatataatctggaaaccagccgtcatgagggcctggatgtcattgagaacgcggtcgataacttggatagtagatctgataagcatacagtgatggatatgtgcaatcaagtgttttgcccacccctgaagttcgagttccagccacatatgggagacgaagtttgccaggtatctgcacaacagccggtgcagaccgagctcctcatgcgctatcaccagttacagagcaggctcgcaacactgaagattgagaatgaggaggttagaaagactctggatgcgactatgcagactctgcaagatatgttaacagtcgaagactttgacgtgtctgatgcattccaacactccaggtctaccgagagcgttaagtcagctgcatctgagacatacatgagtaagatcaatatcgctaaacgcagggctaaccagcaggagaccgagatgttctatttcacgaaaggtccggatgatgtgttccccatatgccaccctagactgtag

SEQ ID NO: 240726 - DNA, 360 bp, synthetic construct
  misc_feature 1..360: note = Description of Artificial Sequence: Synthetic coding sequence
  source 1..360: mol_type = other DNA
atgtcctggtggagaaacaatttttggattattctggcggtcgctattattgtggtgagcgtcgggcttggcctcattttatactgcgtgtgcaagtggcagcttagaagaggaaagaagtgggagatcgccaaaccactgaaacataagcaggtggacgaggagaaaatgtatgatttcctgctgctgagaaccgcctgcagtctgcctcccctgcctctgcactaccgcacctctatgaccgagacttatggggtgttattgtgccggcctggttggtcagctctcgctaggtcgcgcctgactgccgcatcagccagctgggtgcaggcgatcttgcttccccagccaccgaagtag

SEQ ID NO: 240727 - DNA, 438 bp, synthetic construct
  misc_feature 1..438: note = Description of Artificial Sequence: Synthetic coding sequence
  source 1..438: mol_type = other DNA
atggacacatttacagtgcaggatagcactgcaatgagctggtggagaaacaatttctggatcattcttgccgtagcgatcatcgtggtctcagtgggactgggactcattctgtactgcgtttgcaagtggcagcttcgaagaggcaaaaagtgggagatcgctaaacccttgaagcataaacaggttgatgaagagaagatgtatgagaatgttctgaacgaatctcccgtgcagctgccaccccttccaccccgtaattggcctagcttggaggacagtagcccgcaagaggcaccgtcacagccaccagcaacctactctcttgtgaataaagtcaaaaataagaagaccgtgtctatcccgagctatatcgagcccgaggatgactatgacgatgtggaaatccctgccaatacggaaaaagctagtttttag

SEQ ID NO: 240728 - DNA, 438 bp, synthetic construct
  misc_feature 1..438: note = Description of Artificial Sequence: Synthetic coding sequence
  source 1..438: mol_type = other DNA
atggatacgtttaccgttcaggattccactgctatgagctggtggcggaataacttttggataattctagccgtggcaattatcgtggtttccgtcggcttagggctgattttgtactgtgtgtgcaagtggcaattacgtaggggtaagaagtgggaaattgctaagcctctcaagcacaagcaggttgatgaagaaaaaatgtacgagaatgttctcaatgaatcgccagtgcaattaccaccattacccccacgaaactggccctccctggaagacagctcaccccaggaagccccaagtcagccccctgccacatactcacttgttaacaaggtcaagaataagaaaactgtgagtattccctcttacattgaaccagaggatgactacgacgatgtggagattcctgctaacacggagaaagctagtttctag

SEQ ID NO: 240729 - DNA, 1398 bp, synthetic construct
  misc_feature 1..1398: note = Description of Artificial Sequence: Synthetic coding sequence
  source 1..1398: mol_type = other DNA
atgaacgtaacctctcttttttccttcacctccccagccgtgaaacgtttgctgggctggaagcagggagacgaggaagagaaatgggccgagaaggcagttgatgcgctggtgaaaaagctgaaaaaaaaaaagggagccatggaagagctggagaaagctctgagctgcccaggacagcctagcaactgcgttactattcccagaagtcttgatggccgtctgcaggtgtcacaccgaaaaggcctccctcacgtgatttattgtcgcgtgtggcgctggccagaccttcagtcacatcacgagcttaagcctctcgaatgctgcgaatttcctttcgggagtaagcagaaagaagtgtgtatcaacccttatcactataagcgcgttgaatctccggtgctgcccccagtgctggtacccagacactccgagtataacccccaacattctctacttgcacaattcaggaacttaggtcagaatgagcctcatatgcccttgaacgcgaccttccccgactctttccaacagcccaattcacacccctttcctcattcgccgaactcaagttacccgaactccccgggttcctcaagcagcacatacccccattccccaacttcatccgatccaggttcaccatttcagatgccagccgacacccctccccctgcgtaccttccaccagaggacccaatgacacaggatggttcacaacccatggataccaacatgatggcgccacccctgccttccgaaattaatagaggcgacgttcaggccgtcgcctacgaggagcccaagcactggtgttcaatcgtgtattatgaactcaataacagagtgggtgaggcctttcatgccagttccacctccgtgctcgtggacggtttcactgacccttctaacaataagaatagattttgcctaggactgcttagcaatgtgaacagaaattctacaatcgagaatacccgtcgccacatcgggaagggtgtacacttgtactacgtgggcggagaagtttatgctgaatgtctatctgattcgtccatctttgtgcagtctaggaattgcaattatcatcacggattccaccccactacagtgtgtaagatccccagcgggtgtagtctgaaaattttcaataaccaagagttcgctcagttgttggctcagagcgtgaatcacggattcgaaacagtgtatgagttaaccaagatgtgtaccatccgcatgagtttcgttaaaggttggggtgccgagtaccaccggcaagacgtgactagtacaccatgctggatcgaaatacacctgcacggaccgctgcagtggctggataaagttctaacacagatggggagcccacacaatcccataagcagcgtgtcctag

SEQ ID NO: 240730 - DNA, 1398 bp, synthetic construct
  misc_feature 1..1398: note = Description of Artificial Sequence: Synthetic coding sequence
  source 1..1398: mol_type = other DNA
atgaatgtgacaagtttgttctcctttacatcccctgcagtcaagcggctgctcgggtggaagcagggagacgaggaggagaaatgggctgagaaggctgtagatgcacttgttaagaaattaaagaaaaaaaagggtgcaatggaagaacttgaaaaagcccttagttgtccgggtcaacccagcaactgtgtgacaatcccgagatctctggatggtaggctacaggtgtcccatcggaaaggcctccctcatgtgatttactgccgggtttggcggtggcctgatctgcagtctcatcacgaattgaagcccctggagtgctgtgagttccccttcgggtctaagcaaaaagaagtgtgtatcaatccctaccattacaagagggtggagtcccccgtgctgccaccagtacttgttcctcggcactcagaatataacccacagcactccctgctcgctcaattccggaacctcggtcagaatgaaccacacatgccgctgaatgctacttttccggattcttttcagcagccaaattctcatccctttccgcactcacccaattcttcatatccgaattctcccggtagtagtagcagtacttatcctcactctcccacctccagcgatccaggctcaccctttcagatgcccgcagataccccccctcccgcatatttgccacctgaggaccctatgacacaggatggttcccagccaatggataccaatatgatggcccctcctttgccatccgaaatcaaccggggagatgtgcaggccgtggcctatgaggaacccaaacattggtgtagcatcgtctactatgaacttaacaatagggtcggagaagcttttcacgcgagcagcacttccgtcctcgtggacggattcaccgaccctagtaataacaaaaacagattctgcctaggtttactttccaacgttaaccgtaactctactatcgaaaacaccaggaggcatatcgggaagggggtccatctctattatgtcggaggcgaggtgtacgccgagtgtcttagcgatagctcaatctttgtgcagtcacgcaattgcaattatcatcatgggtttcatcccacaactgtgtgtaagattccatcgggttgcagcttgaaaatctttaacaatcaagaattcgcccagctgctggctcagagcgtcaaccacggattcgagaccgtttacgagctcaccaagatgtgcaccatacgtatgtccttcgtcaaaggctggggcgcagaataccatcgacaggacgtgacaagcaccccctgctggatcgaaatccacttgcatggcccactccagtggctggataaggttcttacacagatgggtagtccacacaacccgatttcatcggtttcttag

SEQ ID NO: 240731 - DNA, 177 bp, synthetic construct
  misc_feature 1..177: note = Description of Artificial Sequence: Synthetic coding sequence
  source 1..177: mol_type = other DNA
atgaacgtaacatccctgttctctttcaccagccccgcagttaaacgccttttggggtggaagcagggcgatgaagaggagaaatgggctgaaaaagccgtggatgccctcgtaaagaaactaaagaaaaagaaaggcgctatggaggaactcgagaaggcattgtcttgcccatag

SEQ ID NO: 240732 - DNA, 33 bp, synthetic construct
  misc_feature 1..33: note = Description of Artificial Sequence: Synthetic coding sequence
  source 1..33: mol_type = other DNA
atgaatgtcacaagcttattctccttcacctag

SEQ ID NO: 240733 - DNA, 288 bp, synthetic construct
  misc_feature 1..288: note = Description of Artificial Sequence: Synthetic coding sequence
  source 1..288: mol_type = other DNA
atgaatgtgacctccctgtttagttttacctctcccgcagtaaagcggctgcttggctggaagcaaggcgacgaggaggaaaagtgggcagaaaaggcagtagatgctctcgtgaagaaacttaagaaaaagaagggcgctatggaggaactggagaaggctctttcctgtcccggtcagccgtcgaactgtgtgacaatccccagatccctggacggtcgattgcaggtgtcacaccgtaagggattaccacacgtcatttactgtagagtatggaggtggccctag

SEQ ID NO: 240734 - DNA, 402 bp, synthetic construct
  misc_feature 1..402: note = Description of Artificial Sequence: Synthetic coding sequence
  source 1..402: mol_type = other DNA
atgaacgtaacatcattgttcagcttcaccagccctgctgtgaaacgtctccttggctggaagcagggggacgaagaagagaagtgggcagaaaaggccgtggatgccctggtcaaaaaacttaaaaagaagaagggagccatggaggaactggagaaggcacttagctgtccagggcaaccctctaactgcgttaccatcccacgatcacttgatgggagactgcaggtaagccaccgaaagggactaccccatgttatctactgtagagtgtggaggtggccggacctgcagtcccaccacgaactgaagccactggaatgctgtgagtttccctttggcagcaaacagaaggaggtgtgcattaacccttatcactataaacgggtcgaatcaccctag

SEQ ID NO: 240735 - DNA, 321 bp, synthetic construct
  misc_feature 1..321: note = Description of Artificial Sequence: Synthetic coding sequence
  source 1..321: mol_type = other DNA
atgaacgtgaccagcttgttcagttttacaagtcccgcagtaaagagactattgggttggaagcagggagatgaggaggagaagtgggcagagaaggcagttgatgcgctcgtcaagaagctgaagaagaagaagggcgcaatggaagaactggagaaagctctgtcatgtcccggacagcctagcaattgtgtgaccatccctcgatccttggacggaaggctgcaggtaagccaccggaaggggctaccccacgtaatttattgtagagtttggcgctggcccgacttacaatcgcaccacgagctgaaacctctctag

SEQ ID NO: 240736 - DNA, 339 bp, synthetic construct
  misc_feature 1..339: note = Description of Artificial Sequence: Synthetic coding sequence
  source 1..339: mol_type = other DNA
atgaacgtgactagcctctttagctttacctctcccgctgtcaaacgattactggggtggaagcagggtgacgaggaggagaagtgggctgaaaaggcagtagatgcgctagttaagaaacttaaaaaaaagaaaggcgcaatggaggaacttgagaaggcattgtcttgccccggacagccgagcaactgtgtgaccatcccccgaagccttgacggcaggctgcaggtgtcacaccgcaaggggcttccgcacgttatctattgcagggtgtggaggtggcccgatctgcaaagccaccatgaattaaagcctctggagtgttgtgaattcccctag

SEQ ID NO: 240737 - DNA, 1398 bp, synthetic construct
  misc_feature 1..1398: note = Description of Artificial Sequence: Synthetic coding sequence
  source 1..1398: mol_type = other DNA
atgaacgtcacgtcactgttctctttcacttcccctgccgttaagagactgctgggctggaaacagggcgacgaggaggagaaatgggccgaaaaagccgttgacgcgctcgttaaaaagttaaagaaaaaaaagggagcaatggaggaactggaaaaggccctgtcctgccctggacaacccagtaactgcgtgactatccctcgatcactggacggcaggctgcaggtgagccataggaaagggctcccacacgtcatttactgccgagtctggcgctggcctgatctccagtcccaccatgagctgaaacccctggaatgctgcgagtttccctttggcagcaagcagaaagaggtctgtatcaatccatatcattataaacgcgtggaatcccctgtgctccctccagtactggtgccacggcactccgagtacaatccccagcattccctgctagctcagtttaggaacctcggacagaatgagcctcacatgcctctgaacgccacttttcccgactcattccagcagccaaacagccaccctttcccacatagtcccaacagcagctaccccaacagccctggttctagttcatctacttatccccacagcccgacaagcagcgatcccggatccccttttcagatgcctgcagataccccccctcccgcttacctaccgcctgaagaccctatgacacaggacgggtctcagccaatggacacgaatatgatggctcctccactcccatctgagatcaaccgcggtgacgtacaggccgtggcttacgaggagccaaaacattggtgttcaatcgtatactacgaactgaataatagggtcggcgaggcattccacgcctcctccactagtgtgctggtagacggatttactgaccccagcaataacaaaaaccggttctgtttaggactgctgtccaatgtgaaccggaattctactatagagaacacccggagacatatcggaaagggagtgcatctgtattacgtgggcggagaggtctatgctgagtgtctctccgacagcagcatcttcgtacagtctaggaactgcaactatcaccatggttttcaccccactaccgtgtgtaaaattcccagcgggtgttctctgaaaatttttaacaaccaggagtttgcccagcttctcgctcagtccgtaaatcacggatttgagaccgtgtatgagctaacaaaaatgtgcacgattcggatgagttttgtcaagggatggggcgcagaataccaccgccaagacgtgacatcgacaccttgttggatcgaaattcacttacacggtcccctgcagtggttggacaaagttctgactcagatgggctcaccacataatccaattagctccgttagttag

SEQ ID NO: 240738 - DNA, 1659 bp, synthetic construct
  misc_feature 1..1659: note = Description of Artificial Sequence: Synthetic coding sequence
  source 1..1659: mol_type = other DNA
atggataacatgtctataaccaacactcccacatctaatgacgcatgcctttcgatcgtgcactctctgatgtgccaccgtcagggcggtgaaagcgaaacattcgcaaaacgggctatcgagtccctcgtcaaaaagctcaaggaaaagaaagatgaactggatagcctgattacggccataaccaccaacggagcacatcctagtaagtgcgtaactatccagcgtacgcttgatggccgactgcaggtggctggacggaaaggattcccgcacgtgatctacgccagactctggcgttggcccgatcttcataagaacgagctcaagcacgtgaagtactgtcagtatgcctttgaccttaagtgtgacagcgtgtgtgtgaacccttatcactacgagagggtggtcagccccggtatagacctctccggcctcactctgcaatctaacgctccgtcatccatgatggttaaagatgagtacgtccacgacttcgagggccagccctctctcagcaccgaaggacattctatacaaaccatccagcaccccccttcgaatcgcgcatcgacagagacctactcaacacctgccctgctcgcaccctccgagtccaatgcgaccagcaccgccaattttccaaatatccctgtcgctagcacctctcagccagcctccattttgggcggttcgcactcagaaggattgttgcagattgccagcggaccgcagcctggccagcagcaaaatgggttcacaggacagcctgcgacctaccatcacaattctacaacaacttggaccggttcaaggaccgcaccatatacccctaacctgccacaccaccagaatgggcacctccagcaccaccctccaatgcctccccacccagggcactattggccagtccacaacgaattggcgttccagcctcccatctcaaatcaccccgctcctgaatattggtgcagcatagcttactttgagatggacgttcaggtcggggaaacgtttaaggtaccatcaagctgtccaatagtgacagtggacggatacgtagacccttccggtggcgatcggttttgcctcgggcagctgtcaaacgttcacagaaccgaagccattgagagggctagactgcatattgggaaaggtgtgcagctggagtgtaagggcgaaggcgatgtttgggtacggtgtctgtcggatcatgctgtgtttgtgcagagttactatcttgatagagaagctgggagggctcctggggacgccgtgcacaagatttatcccagtgcttatatcaaagtctttgatctacggcagtgccatagacagatgcagcagcaagctgctacagctcaggcggcagcagccgcacaggccgcagcagtggccggaaacatacctgggccagggtcagtgggcggaattgctcctgctatatctctttccgcagcagccggaattggcgttgatgacctcagaagactctgtattctgagaatgtcttttgtcaaaggatggggacccgactatccccgacaaagcatcaaggaaaccccgtgctggatcgaaatccatctccaccgcgcattacaacttctggacgaagtgttgcacaccatgcccattgccgaccctcagccgttagactag

SEQ ID NO: 240739 - DNA, 1659 bp, synthetic construct
  misc_feature 1..1659: note = Description of Artificial Sequence: Synthetic coding sequence
  source 1..1659: mol_type = other DNA
atggataatatgtccatcaccaacacacctacctctaacgatgcatgtctatcaatagttcactcactgatgtgccaccgacaggggggagagagcgagacatttgcgaagagggcaatagaaagcctcgtgaaaaagctcaaagaaaagaaggacgaactggacagtctgatcaccgcaatcacaacaaacggggcacatccttccaaatgcgtgaccattcagaggacccttgatggcagactgcaagtagccggacgcaaggggttcccccacgtaatctatgcccgactatggcggtggccagacttacataagaatgaactgaaacatgtgaagtactgccagtatgcgttcgatctgaaatgcgattcagtttgcgttaacccctaccattacgaaagagtggtttccccaggtattgatctcagcggcctgaccttacaaagcaacgcaccaagcagcatgatggtcaaagacgaatatgtccatgacttcgaaggtcaaccttccttgtccaccgagggtcattctatacagaccatccagcaccccccttctaaccgcgctagtaccgaaacatattccactcctgccctgttggcacctagcgagtcaaacgctaccagcacagcaaatttccccaatatcccagtcgcctcgaccagccaaccagcatccatcttggggggaagccatagcgaagggttgttacagattgcatcaggcccacagccagggcaacagcagaatggtttcacgggacagcccgcaacttatcaccacaacagcacaacaacctggactggctcaagaactgctccctatacacccaacctccctcatcaccaaaatgggcatctgcagcatcatccaccaatgcctccacatcctgggcactattggcccgttcataacgagctcgcattccagcccccaatttccaaccatcccgcacctgagtactggtgttccatagcctactttgagatggacgttcaagtgggcgaaaccttcaaggtgccatcgtcatgtccaatcgtgacagtcgacgggtacgtcgacccttccgggggagatcgcttctgcctcggccagctgagcaatgttcatagaactgaagccatagaacgggcacggttgcacattgggaaaggggtacagctcgaatgcaaaggagaaggtgatgtttgggtacgttgcttgtctgaccacgccgtgtttgtacagtcatattaccttgaccgcgaagcagggcgtgctccaggcgacgccgtccacaagatttacccaagtgcctatatcaaggtcttcgatctgcgacaatgccaccgacagatgcagcagcaagctgctactgctcaggccgctgccgctgcacaggctgcagccgtggccggaaatattccaggccctggttcagtgggtggaatagcaccggctatcagcttaagtgcggcagccggtattggtgtcgacgatctgagaagactctgcatacttcggatgtcatttgttaaaggctgggggcctgactaccctagacagagcataaaggagacaccatgctggattgagatccacttgcacagggctctgcagctattagacgaagttcttcatacaatgccaatcgctgatccccagcctttagactag

SEQ ID NO: 240740 - DNA, 534 bp, synthetic construct
  misc_feature 1..534: note = Description of Artificial Sequence: Synthetic coding sequence
  source 1..534: mol_type = other DNA
atggataacatgtcaataaccaatactcccacttcgaatgacgcctgtctgtctatcgtgcactcgctgatgtgtcaccgacagggtggcgagagtgaaacctttgctaagagggcaatcgaatctctggtcaagaagctcaaggagaagaaggacgagctggactcgttgataacagcaataacaacaaatggagcccacccatccaagtgcgtgactatccagaggacgcttgatgggagactgcaggtggccggacgcaagggattccctcatgtgatctacgcgcgtctgtggcggtggcccgacctgcacaagaatgaactaaagcacgtaaagtactgtcagtacgcctttgacctcaaatgcgacagcgtgtgtgtgaatccctatcattacgagcgggtagtgagcccgggtatagaccttagtggactgaccctgcaatctaacgaaaataattggtacttctctcaactgctactggaccttgacaagggtatgatacaagagcaggctatccatggcccatag

SEQ ID NO: 240741 - DNA, 1311 bp, synthetic construct
  misc_feature 1..1311: note = Description of Artificial Sequence: Synthetic coding sequence
  source 1..1311: mol_type = other DNA
atggataatatgagcatcaccaacacccccacgagtaatgacgcatgtctgagcatagtccattccttaatgtgtcaccggcaggggggagagtctgaaacctttgcgaaacgggcaatagaatccctggttaagaaactgaaggagaaaaaagacgagctggacagtttaattacagccatcacaaccaatggggcacacccatctaaatgtgtcacgattcaacgcactctggatggtcggttacaggtggcaggcagaaagggttttcctcacgtgatctatgcccgactgtggcggtggcccgaccttcataaaaacgaattgaaacacgtcaagtactgccagtatgcctttgacctgaaatgcgattccgtgtgcgtaaacccctaccattatgagagggtggtttctcctggcatcgacctatctgggctgaccctgcagtccaatgcccctagtagtatgatggtcaaggatgaatatgtccatgattttgagggccagcctagtttgtctacggagggccacagcattcaaactatccagcacccgccttctaatcgtgcgagcaccgaaacttattcaacaccagcgctgcttgccccttcagagtcaaatgccactagtacagccaactttccgaacattcccgtcgcctcgacatcacagcccgcatctatcctaggtggctcccattcagaagggctgctgcagattgctagcgggccacagcctggccaacagcagaatggcttcacggggcaacctgcaacttatcaccataattccaccactacgtggactgggagcaggactgctccctacacacctaatcttcctcaccatcagaatggtcatcttcaacaccatccgcctatgccaccacaccccggacactattggccggtgcataatgaacttgcttttcagccgccaattagcaatcatccggcacccgagtactggtgctccatcgcatacttcgagatggacgtgcaggttggggagacctttaaggtgccttcttcctgtcctattgtcacagtagacggttacgtggatccgtcagggggtgacagattttgcctcgggcagctgtctaacgttcaccgcaccgaagctatcgagcgagccagacttcatatcggcaagggcgtgcagctagaatgcaaaggtgaaggtgatgtatgggttagatgcctctccgatcatgctgtctttgtgcagtcttattatttggatcgcgaagccggacgcgctccaggagacgccgtgcacaaaatttaccctagcgcttatattaagtag

SEQ ID NO: 240742 - DNA, 243 bp, synthetic construct
  misc_feature 1..243: note = Description of Artificial Sequence: Synthetic coding sequence
  source 1..243: mol_type = other DNA
atgaccagtatggcctccttgttcagcttcacgtcccccgcagttaagcgcctgttgggctggaaacagggcgacgaggaggagaagtgggccgagaaagccgtggatgctctggtgaaaaagcttaaaaaaaaaaaaggggctatggaggagctggagaaagctctctcaagccccggacagccctccaagtgcgttacaattccgcgaagcctcgatggtcggctgcaagtgagccactag

SEQ ID NO: 240743 - DNA, 387 bp, synthetic construct
  misc_feature 1..387: note = Description of Artificial Sequence: Synthetic coding sequence
  source 1..387: mol_type = other DNA
atgacaagcatggcgagtctcttcagctttacttcgcccgctgttaaacgcctgctcgggtggaaacaaggggatgaagaggaaaaatgggcggagaaagctgtcgacgcactggtcaagaagctcaagaagaagaagggcgctatggaggagctcgagaaggcgctgtcgtctcccggtcagcccagcaaatgcgtgactattccgaggtctctggatgggaggctgcaggtctctcaccgaaagggcctcccccatgttatttattgccgagtctggagatggccggatctccaaagccaccatgagctcaaaccgttagatatctgtgagttcccattcggaagcaagcagaaagaggtgtgcatcaatccatatcattattag

SEQ ID NO: 240744 - skipped

SEQ ID NO: 240745 - DNA, 405 bp, synthetic construct
  misc_feature 1..405: note = Description of Artificial Sequence: Synthetic coding sequence
  source 1..405: mol_type = other DNA
atgacgtcaatggcttccttattttcttttacgtccccggctgtcaagcggctgcttggctggaaacagggcgatgaggaggagaagtgggctgaaaaggccgtcgacgcccttgtgaagaaactcaaaaaaaaaaaaggagctatggaagagctggaaaaggctttgagtagtcccggacaaccatccaagtgtgtgaccatccccaggtcactggatggtcgtttgcaggttagccaccggaaagggctcccccacgttatatattgcagggtgtggcgctggccagacctgcagtctcatcatgaactcaagccattagatatctgcgagtttcctttcggatccaaacagaaagaggtgtgtatcaatccctatcactataagcgggtggaatccccctag

SEQ ID NO: 240746 - skipped

SEQ ID NO: 240747 - DNA, 1395 bp, synthetic construct
  misc_feature 1..1395: note = Description of Artificial Sequence: Synthetic coding sequence
  source 1..1395: mol_type = other DNA
atgacatctatggccagtcttttctccttcaccagcccagccgttaagcgtctcctgggatggaaacagggggacgaggaggagaaatgggcagaaaaggccgtcgacgccctggtgaagaagctgaaaaaaaaaaaaggggcaatggaagaactagaaaaagcactctcttccccagggcagccgagcaagtgtgtcacaattccccgtagcctagatggccgtctccaagtgtcccatcgcaaggggctgccccacgttatatactgccgagtgtggcgctggccagacctccagtctcaccatgagctgaagccgctggacatttgcgagtttccctttggctcaaagcagaaggaagtctgtatcaacccctaccactataagcgagttgagagtcccgtgcttcctcccgttttagtacctaggcataacgaattcaatccgcaacacagtttgctcgtgcaatttagaaatctcagccacaatgaaccacatatgccacagaacgctacctttcctgactcttttcaccaacctaataacacaccatttcccctcagcccaaacagcccatatcccccaagcccagccagcagcacctaccctaacagcccagccagcagcggccctggctccccgttccagttacctgcagacacacctccccctgcttatatgcccccagacgaccagatgggccaggataattcccaacccatggacacctcaaataatatgattccacagatcatgccctcgatcagttctcgagatgtgcagccagtagcttacgaggaacctaaacattggtgctccattgtgtattacgagcttaataacagagttggggaggcgtttcacgcctcgtctacatccgtgttggtagacgggttcaccgaccccagcaataataagagccgcttttgtctggggttgctgagtaacgtcaaccgcaatagtactatcgaaaatacacggcgtcacatcggaaagggcgtgcacctgtactatgttggaggagaagtgtatgctgaatgtttatcggatagtagcatttttgtccagagcagaaactgcaattttcaccacggatttcacccaacaacagtgtgtaagattccatctagttgctcgctcaaaatcttcaacaatcaggagtttgcccagctactggcccagtccgtcaatcacggttttgaggcggtctacgaacttactaagatgtgcacaatacgcatgagctttgtcaaaggctggggggctgagtatcatcgacaggacgtgacgtcaacgccctgctggattgaaattctccacggaccattgcagtggctggacaaggttctgacacaaatgggcagccccctgaatcctatcagcagcgtctcctag

SEQ ID NO: 240748 - DNA, 1395 bp, synthetic construct
  misc_feature 1..1395: note = Description of Artificial Sequence: Synthetic coding sequence
  source 1..1395: mol_type = other DNA
atgacgtccatggccagtctcttctcgttcacttcgcccgcagttaagcggctgcttggctggaagcagggagacgaggaagagaaatgggccgagaaagccgtcgatgcactggtgaagaaactgaagaagaagaagggcgcaatggaggaactggaaaaggcgctgagctctccaggccaaccgagtaagtgtgtcaccatcccacgaagtttggacggaaggcttcaggtctcccataggaagggcctgccacatgtgatatattgccgggtgtggaggtggccagatctgcagtcacatcacgagctcaaaccacttgatatttgcgagtttccattcgggagcaagcagaaggaggtttgcataaacccttatcattacaaacgtgtcgaatctcccgttctgccccctgttcttgtgccccgtcataatgagtttaaccctcaacattccctgctcgtgcagttcagaaatttgtcacacaatgagccacacatgccccaaaacgctacattccctgattcttttcatcagcccaacaataccccttttccactgtctcccaattctccataccctcctagccccgcaagcagtacttaccccaattccccagcatcttcaggtcctggatccccttttcaactccccgcagacacacctccgccagcgtacatgccaccggacgatcagatgggtcaagacaatagtcagccaatggacacaagtaacaacatgattccacagataatgccctccatctcttccagagacgtgcagcccgttgcctacgaagaacctaagcattggtgcagcatcgtgtattacgaactgaacaaccgtgttggagaagcattccacgcttcctcaacctctgtcctggtggatgggttcactgaccccagcaacaacaaatcccgcttctgtctgggccttctgagcaatgtgaatcgcaacagtacgattgagaatacaaggaggcacattggcaagggggtgcatttgtattacgtaggtggagaggtctacgccgagtgtttatcagattcctcaatcttcgtccagagccggaactgcaacttccatcacggcttccaccccaccacagtatgtaaaataccttcttcgtgctctctcaaaattttcaacaatcaggaatttgcccagctgctggcccaatctgtgaaccatggtttcgaggccgtctacgagttgactaaaatgtgcaccattcgcatgagcttcgtcaaaggttggggcgcagagtaccatcgtcaggatgtaaccagcacaccttgctggattgagattctccatggaccattgcaatggctggacaaggtgcttactcagatgggaagccccctcaatcccatcagctccgtttcgtag

SEQ ID NO: 240749 - DNA, 1491 bp, synthetic construct
  misc_feature 1..1491: note = Description of Artificial Sequence: Synthetic coding sequence
  source 1..1491: mol_type = other DNA
atgttccgctctaagcgatccgggcttgtcaggcggttgtggcgaagtcgcgtagtgcctgatcgggaagagggaggcagcggaggaggtggaggcggtgatgaggacgggagcctgggttctcgggcagaacccgctcctcgggctcgagaaggtggaggatgtgggcgatctgaggttcggcctgtggcccctcggagaccccgagatgctgtgggccagcgaggcgcacagggagcgggaaggcgacggcgagccggtgggcctccacgcccaatgagcgagcctggcgctggggctgggtcatctctgcttgacgtagcagagcccggaggaccagggtggctgcctgagagtgattgcgaaacagttacttgttgtttgtttagtgagagggacgcggctggcgcaccaagggacgccagcgatcctttagcaggagcagcactagagcctgccggaggtgggaggagtcgcgaagccagaagccgcttgttgttgctggaacaggaactgaaaactgtgacctactcattattgaagagactaaaggaaagatcactggacacacttctcgaggctgttgagtccaggggcggtgtgcctggaggttgcgtcttggtccccagagcggatctcagattggggggacagccagcccctcctcagctgctgctcggacgactctttaggtggccagatcttcaacacgctgtggagctcaagccactgtgcggatgccactcgtttgccgctgcagcggacggacccaccgtgtgttgtaatccctaccacttcagcagactgtgtgggcctgaaagtccccctcctccgtattcaagactgagtccacgcgatgagtacaaacccctcgatttatctgattccaccttaagctacaccgagaccgaagctaccaacagtttgataactgccccaggcgaattctccgatgcttctatgtctccggatgccacgaaaccttctcactggtgtagtgttgcctactgggagcaccgaactagggtaggacgcctttatgctgtgtatgatcaggccgtgtctatattctacgatcttcctcagggatccggcttttgtctgggccaactaaacttggagcagcgatctgagtctgttcgtcgtactcgatcaaaaataggattcgggatactgctttcaaaagaacctgatggggtctgggcctataataggggggagcatcccattttcgtcaattcgcctactctcgatgcccctgggggacgagccttggtggtccggaaggtgcccccaggttactccataaaggtgttcgattttgaacgctctggactgcaacatgcccctgagccagatgccgcagatggaccttatgatcctaattcagtgaggatttctttcgccaaaggctgggggccttgttattcccgacagttcatcacctcttgtccttgttggctggaaattctgctgaataacccccgatag

SEQ ID NO: 240750 - DNA, 708 bp, synthetic construct
  misc_feature 1..708: note = Description of Artificial Sequence: Synthetic coding sequence
  source 1..708: mol_type = other DNA
atgtcgcgcatgggcaagccaattgagacccaaaagtccccgccacctccatattcgagattgagtcccagagacgaatacaagcctctggacctgtcggattcaactctaagctacactgaaaccgaagctactaatagcctcattaccgcaccaggggaatttagtgatgcttctatgtcaccagatgcaacgaagccatctcactggtgctcagtagcctactgggaacaccggacgcgagtaggccgactctatgccgtttatgaccaggcagtgtctatcttttacgacctgccacaaggaagcggcttttgccttgggcagttaaatttggagcaacggagcgagtcagtcagaaggactagatctaagattgggttcggcatacttctgtcaaaggaaccggacggcgtgtgggcttacaaccgaggcgagcacccaattttcgtcaattcaccaacacttgacgccccaggcggtcgcgctctggtagtgaggaaggtacctcctggctactccattaaagttttcgactttgagagaagcggacttcagcatgcccctgagcctgacgcggctgatggcccttatgatcccaactccgttcgcatctcgtttgcaaaaggctgggggccatgttatagtcgacagtttataaccagttgcccatgctggttggagatcctactaaacaacccaaggtag

SEQ ID NO: 240751 - DNA, 1017 bp, synthetic construct
  misc_feature 1..1017: note = Description of Artificial Sequence: Synthetic coding sequence
  source 1..1017: mol_type = other DNA
atgttcaggagtaagcgaagtggcctggttcgacggctgtggagaagtcgggtggtgcccgaccgggaagagggcggatctgggggaggaggagggggtgacgaagatggcagcttagggtcccgcgctgaacccgcaccgagggctcgggaaggcggtggctgtggtcggtctgaagtgcggcctgttgcgcctagaaggccccgtgatgccgtggggcagagaggagctcagggagccggaagaaggcgcagggccggaggccctccaagaccaatgtctgagcctggcgcaggggctgggagtagtctgttggacgtggccgaaccgggagggcctggctggctcccggagtcggactgcgaaaccgttacctgttgtttatttagcgagcgggacgccgcaggcgctcctagggacgcttctgatcccttagcgggagccgcactagagcctgcgggagggggtcggtctagagaggccagatcccgcttattgctgctggagcaggagctcaagactgtgacctattcgctactcaagcgccttaaggaaagaagtttggatacccttttggaggcagtcgaaagtcggggaggtgtacccggtggatgcgtgttagttcctcgcgctgatctccgcctgggtggacagcctgcacctccacagttactgctgggaagactgtttcggtggccagacctgcagcacgcggtggaactgaagcctttgtgcggatgtcattcattcgcggctgcagccgacggcccaacagtgtgctgcaatccctatcacttcagtagactctgcggtcctgaatcaccccctcctccgtactctaggctcagccctcgcgatgagtataagcccctcgatcttagtgattctacactcagctacacagaaactgaggcgactaattcccttattaccgctcccggagaattctcagctgccgatgccggtatcggttcacggggtaaccggggacttgagtcctccgtcccatgtagctag

SEQ ID NO: 240752 - DNA, 1293 bp, synthetic construct
  misc_feature 1..1293: note = Description of Artificial Sequence: Synthetic coding sequence
  source 1..1293: mol_type = other DNA
atgcactcaacaaccccaatcagctctctcttctcttttacatcgcccgcagttaagagactgctaggctggaaacagggcgatgaagaagaaaagtgggccgagaaggctgtggattcgctcgtgaaaaagcttaaaaagaagaaaggggctatggatgaattggagagagcgctcagttgccctgggcagccaagtaaatgtgtgaccatcccgagaagcctggacggtaggctgcaggttagtcacagaaaggggttaccccacgtgatctactgccgcgtttggcgatggccagaccttcagtcacaccacgagctcaagcccctggagtgttgcgaattccccttcggctcgaagcaaaaggaggtttgtattaacccttaccactacaggagggtggagactccagtccttccgcctgtgctggtgccaagacatagcgagtacaatcctcaattgtccctcctggctaaattccgctccgcctcactgcattcagaaccactcatgccacacaatgctacctatcctgactcattccagcagcctccctgttctgctctgcctcccagccccagccacgcgttttcacagagtccgtgcaccgccagctaccctcacagcccaggttcaccctcagaacctgagagtccataccagcacagcgacttccgacctgtgtgctacgaagagccgcagcattggtgcagcgtcgcatactatgagttgaataacagagtgggagagacttttcaggcctctagcagatccgtgcttatcgatggctttacagatcctagtaacaaccgcaataggttttgtttgggtctacttagcaacgtgaatagaaattcgaccatcgagaacactagaaggcatattggtaagggcgttcatttgtactatgttggtggggaggtctacgccgagtgcgtctctgactctagtatcttcgtgcagtctcggaattgtaattaccagcatggctttcatccagccaccgtctgcaagatcccttcaggttgcagcctgaaagtgttcaataatcagctgttcgcccagctcttggcccagagcgtgcatcacggctttgaagtagtctatgaactcacaaagatgtgcactattcggatgtcctttgtgaagggctggggggcagaataccatagacaagacgtgacatcaacaccctgctggatcgagatccatctccatgggcctctgcagtggcttgataaggtacttactcaaatgggaagtccgcacaaccctataagcagtgtatcttag

SEQ ID NO: 240753 - DNA, 1404 bp, synthetic construct
  misc_feature 1..1404: note = Description of Artificial Sequence: Synthetic coding sequence
  source 1..1404: mol_type = other DNA
atgcactctaccactcccatatccagtttgttctcctttaccagtcctgcagtcaaacggctcctgggttggaaacagggtgatgaggaggagaaatgggccgaaaaggccgttgactcactagtaaaaaagttgaagaagaagaaaggggcaatggacgagctggaacgagctctcagttgtcctggtcaaccgtctaagtgtgttaccattcccaggtccctggacggacggttacaggtgagtcacagaaagggccttccccatgtcatttactgtagagtctggcggtggccggatctacaaagccaccatgagctgaagcctctggagtgttgcgaatttccgtttggaagcaaacagaaggaggtgtgtatcaacccttaccactaccgccgagttgagacccctgtgctgcctcccgttctagtccccaggcattcagagtacaatccccaactcagccttctggccaaattccgctccgcgagcctgcactccgaaccgctcatgccacacaatgcaacctaccccgactccttccagcagccaccatgcagtgccctccctccaagcccttctcacgcattctcccagagcccttgtactgcatcttatcctcacagtcccggatcccccagcgaaccagaatcaccttatcaacatagtgtggataccccgccactgccctatcacgccacagaggccagtgaaactcagtccggccagcccgtggacgcaaccgccgaccggcatgtggtgctttctatccctaacggagattttaggcctgtctgttatgaggagccgcaacactggtgtagcgtcgcatactacgaactgaataacagggtcggcgaaacattccaggcttcttcccgctctgtgctgatcgatgggtttacggatccaagcaacaatcgcaaccgcttctgtctggggctgcttagtaacgttaatagaaactctactatagagaacacaagacggcatatcgggaaaggagttcatctgtactacgtgggaggcgaagtgtatgcagaatgtgtgtcagattctagcatttttgtacaatcccgcaattgcaattatcagcatgggtttcacccggctactgtctgcaagatacctagcgggtgttccctgaaggtcttcaacaaccagctcttcgcccagttgctggcccagtctgtacaccatggctttgaagttgtgtatgagttaacgaaaatgtgtaccattagaatgtcatttgtgaaaggctggggagcagaataccatagacaggacgtcaccagcacaccctgctggatcgaaatccacctgcacggacctctgcagtggcttgataaggtgcttacgcaaatgggttcacctcacaatccaatatccagcgtgtcctag

SEQ ID NO: 240754 - DNA, 1404 bp, synthetic construct
  misc_feature 1..1404: note = Description of Artificial Sequence: Synthetic coding sequence
  source 1..1404: mol_type = other DNA
atgcattcaaccacccccatatcgagcctgttcagttttacatcaccagccgtaaagagactattgggctggaagcaaggcgacgaagaggagaaatgggctgaaaaagcagtggattcgctggtaaaaaagctcaaaaagaagaagggggcaatggatgaactggagcgggctctgagttgcccaggccagccttctaagtgtgttacaattccacgttctctcgacggcagattgcaggtgtctcacagaaagggccttccacacgtgatctactgcagagtgtggcggtggcctgacctgcagtcacaccacgagctcaaacccctcgagtgctgcgagttcccattcggatctaaacaaaaagaggtctgcatcaatccctaccattatcggagagttgaaacacccgtcctgccacccgtgttggttccgaggcattctgaatacaacccacagctgagcttgttggccaagttcagaagcgcttctctgcattccgagcccctaatgccccataacgcaacctaccccgacagctttcagcagcctccttgttccgcactgccaccgtctccatcacatgcgttttcccaaagcccctgcacggccagctatcctcacagccccggatccccgtcagagcccgaaagcccctaccagcactctgttgacactccccctctcccttaccacgccactgaggcctcggaaacccagtcaggccagcccgtggacgccacggcagatcgccatgtagttctgtcaataccaaatggcgatttccgccctgtgtgttatgaggaacctcagcactggtgcagcgtggcttactacgagcttaacaacagggtcggggaaacttttcaagccagctcccgctcagtgttgattgacggattcaccgatcccagcaataataggaatcgcttttgcttgggccttctgtccaacgtcaatcggaattcaaccatcgagaatactaggcgtcacataggtaagggggtccacctctactacgttggaggtgaagtgtatgcagaatgtgtgagcgattcaagcatatttgtccagtcacgaaactgcaattaccaacacggatttcacccggcaactgtctgcaagattccgtcaggatgctctttaaaagtgttcaacaatcagctctttgcccagttgctggctcaaagtgtgcaccacgggtttgaggtggtgtacgaactcaccaaaatgtgcacaatccgcatgagtttcgtgaagggatggggggctgagtaccacagacaggacgtgacctccacaccatgctggatcgaaattcacctgcacggtcctttgcaatggcttgataaagttttaactcagatgggatcaccccacaaccctataagcagcgtgtcttag

SEQ ID NO: 240755 - DNA, 1191 bp, synthetic construct
  misc_feature 1..1191: note = Description of Artificial Sequence: Synthetic coding sequence
  source 1..1191: mol_type = other DNA
atgaaggcggtgaaatccgagcgggagcggggttctcgtcggcgtcacagagatggcgatgtcgtcctgcccgcaggtgtggtagtcaagcaggagaggctcagtccagaagtggcaccaccagcacaccgaaggcccgatcatagcggcggaagcccttccccccctacctcagagcctgcccgatctggacaccggggtaatagagccaggggggtcagccggtctcctccaaaaaagaagaataaggcctccgggagacgttctaaatccccaaggagcaagcgcaatcgatccccccaccacagcactgtgaaagttaaacaggagcgcgaggatcaccccagacggggaagggaggatagacagcaccgggagccatctgaacaggagcacaggagagccaggaattccgacagagataggcatagggggcactcgcaccagcggagaacatcaaacgaacggccaggtagtggccagggccagggtagagatagagatacgcaaaatctgcaggctcaggaggaggagagagaattttataacgcgcgtaggagagaacaccgtcagcgcaacgacgttggtgggggaggatctgagagccaggagcttgtcccccgtccgggaggaaacaataaggagaaggaggtacctgctaaggaaaagcccagtttcgagctgtctggtgcacttctggaagacaccaatacctttcgtggcgtggtgattaagtattctgagccccctgaagccaggattcccaaaaaacgctggcggctctacccgttcaagaatgacgaagtgttgccagtcatgtatatccatcgacagtctgcctacctcttggggaggcatcgaagaatcgctgatatccccatcgaccacccgagttgttccaagcagcatgccgtgttccagtatcgacttgtggagtacaccagagcagacggaactgtggggcgtagggtgaaaccgtatattatcgatttgggctcaggcaatgggaccttccttaataacaaaagaatcgaaccacagcgatactacgaactcaaggagaaggacgttctcaaattcggattctcatctagagaatatgtgctgctgcacgaatctagtgatactagcgaaattgatcgcaaagatgatgaagatgaggaggaagaggaggaagtgagtgacagttag

SEQ ID NO: 240756 - DNA, 1143 bp, synthetic construct
  misc_feature 1..1143: note = Description of Artificial Sequence: Synthetic coding sequence
  source 1..1143: mol_type = other DNA
atgaaggcggtgaaatctgaacgcgagggcgtggtcgtgaagcaggagcggctgagccccgaggttgccccaccagcgcatagaagacccgaccattctggaggaagtcccagcccacccacttccgagccggcaaggagcggtcatcgaggtaaccgggctcgtggcgtgagccggtctccacccaagaagaagaataaggctagtggccgtcgaagcaaaagccctaggtcaaagcggaatcggtctccccaccattcaaccgtaaaagtgaaacaggagcgagaggaccaccccaggcgtggcagggaagaccgacagcaccgcgagccgtctgaacaggaacacagacgggctcgtaatagcgatcgcgaccgccaccgcggacactcccaccagagacggacatctaatgaacgccctggaagcgggcagggccagggtcgcgatagggacacccagaatctgcaggcacaggaggaggagagggaattctacaatgcacggagaagggagcacagacaacggaacgacgtggggggtgggggatccgagtcacaggagctcgtgccccgtcccggaggcaacaataaagagaaagaggtacccgctaaagagaaaccatcgttcgaactcagcggcgcactgcttgaagataccaatacattccggggtgtggtcataaagtattccgaaccaccagaagcgaggataccaaagaaacgatggcgactttacccctttaagaatgatgaagtgctgcctgtcatgtatatccatcggcaaagcgcttacctgctaggaagacacaggcggatagccgacatccccatcgaccacccttcctgttctaaacagcacgccgtctttcagtatcgattagttgaatatactcgtgctgatgggaccgttggacgaagggtgaagccatacatcatagatctgggtagtggcaatggcactttcctcaacaacaaacgcatcgaaccacaacggtactatgagttaaaggaaaaagatgtcctgaagtttggtttcagctcaagggagtatgtgctgctgcatgagagttccgacacttctgagatcgatcggaaagatgacgaggacgaagaagaagaggaagaagtctcagattcttag

SEQ ID NO: 240757 - DNA, 2274 bp, synthetic construct
  misc_feature 1..2274: note = Description of Artificial Sequence: Synthetic coding sequence
  source 1..2274: mol_type = other DNA
atgagcaaccccggtacaagaaggaacggaagctcaatcaaaattcggctcaccgtgctgtgtgcaaaaaacctggcaaaaaaggatttttttcggctgcccgatcctttcgccaagatagtcgtcgacggctccggccaatgccactccaccgataccgtgaagaacactctggatccgaagtggaatcagcactacgatttgtacgtaggaaagaccgactctatcacgattagtgtgtggaatcacaaaaagatccacaaaaaacaaggtgcaggctttcttgggtgtgtgcggcttttgtctaatgcaatttcaaggttaaaagatacaggatatcaaagactcgacctctgcaagctcaacccatccgacactgatgcagtccgcggacagatcgtggttagtcttcagacccgtgataggattggtactgggggaagcgtcgtggattgtcgcggtctgttggagaatgagggcacagtctacgaggactccggcccaggcaggcccttatcatgtttcatggaagaaccggcaccctataccgacagcacgggagcagccgcagggggtgggaactgccggttcgtcgagtcaccgagtcaggaccagagactccaggcccagcgactgaggaacccggacgtgagggggtccttgcagacacctcaaaataggccccatggtcaccagagccccgagttgcccgaagggtatgagcaacggaccactgtacagggacaggtatacttcctgcacacacaaactggggtgagtacatggcatgacccaagaatcccctcaccctcagggacaatccccggaggtgatgcggctttcctgtacgagttcctgctgcaggggcatacatctgagcctcgggatctgaatagtgtgaattgcgacgaactcggtccacttccacctgggtgggaggttcgctccaccgtctcggggagaatatacttcgtagaccacaacaaccgtaccacacagtttacagatccccgtttgcatcatattatgaaccaccagtgccagctgaaggaaccatctcagcccctgccactgccttcggaggggtctctggaagatgaggagctgcccgctcagagatacgagcgtgatttggtgcagaagctcaaagtcctgaggcacgaattaagcttgcaacaaccccaggccggtcactgtaggatcgaggtctcccgcgaggagatttttgaggaaagttatcggcaaataatgaaaatgagacctaaggacctcaaaaagcggctgatggtgaagtttcgcggagaggagggacttgattatggtggagttgccagggagtggttatatctactgtgccatgaaatgctaaatccctactacggcctttttcagtacagtaccgataatatatacatgctgcaaattaatcctgattcttccattaacccggaccacctgtcatatttccatttcgttggcaggataatgggactggccgttttccacggccactacatcaacggcggatttactgtccccttttataagcagcttctcggtaagccaatccagctatcagatttggagagcgttgaccctgagctccacaaaagtcttgtgtggattctcgaaaacgacatcacacccgtgctcgaccacacattttgtgtggaacataatgctttcggaaggattctgcagcatgaactgaaaccaaatggaagaaacgtgccggtcacggaggagaacaaaaaagagtacgtccggctgtatgtgaactggcgatttatgagaggaattgaagcccaatttctggccctgcaaaagggctttaacgaactcatcccgcagcacctgctgaaacccttcgaccagaaagagttggagctaatcattggaggactggataaaatcgatcttaacgactggaagtctaacacgcgccttaagcactgtgtcgctgacagtaatattgtgcgctggttctggcaagcggttgagactttcgatgaggaaagacgagcccgactcctccagttcgtcactggcagcacccgcgtcccattgcagggctttaaggcgctacagggatccacaggagcagcaggacccagactgttcacgattcacctcatagacgcgaacaccgacaatctgccaaaagcacatacatgcttcaaccggattgatatccccccttatgagtcatacgagaaactttatgagaagttgctgacagccgttgaggagacgtgcgggtttgccgttgagtag

SEQ ID NO: 240758 - DNA, 2196 bp, synthetic construct
  misc_feature 1..2196: note = Description of Artificial Sequence: Synthetic coding sequence
  source 1..2196: mol_type = other DNA
atgtcaaatccaggcaccaggaggaatggctccagcattaaaataagactgactgtgttatgcgcgaagaatctggccaagaaagatttctttaggttacctgatcctttcgctaagattgtggtagacgggtccggccagtgtcactccacggacaccgtgaagaatacactcgaccccaagtggaatcaacactacgacttatacgttggtaaaacagattcaataacaatcagcgtgtggaaccacaagaagatacataaaaaacagggcgctggcttcttgggatgtgttagactgttgtcaaacgcaatcagtagactgaaggacacaggctaccagcggctggatctttgcaaactaaacccttcagatacagatgccgtgcgagggcagatcgttgtcagtttgcagacaagagatcggattgggacgggaggctccgtggtggattgcagggggcttttggaaaacgaggggaccgtatatgaagactcaggtccaggccgtcctctgtcgtgttttatggaagaaccggctccgtataccgatagcactggtgctgcggcaggagggggaaactgccggttcgtggaaagcccatcacaggaccagcgcctccaagcacagcgattgaggaatcccgacgtacgtggcagtctgcagaccccacagaatcgccctcatggacaccaatcgccagaactacctgaggggtacgagcagagaaccacagtccaggggcaggtgtactttctacacacccagacaggtgtatctacgtggcatgatccccgtatacccagagatcttaattccgtgaactgtgatgagctgggaccactccctccgggttgggaggttcgaagtaccgtgagcggaagaatctacttcgtggaccacaacaatagaaccacacagtttactgatcctagactgcaccacattatgaaccatcagtgccagctaaaagagccgtcgcaacccctcccacttcccagcgaaggttctctggaggacgaggaattgccggctcagcgctacgagcgtgacctcgtgcaaaagctgaaggtcctgcgccacgaactgtccttgcagcagccgcaggcgggacattgtagaatcgaggtatctcgggaagagatcttcgaagagagctaccgacagattatgaagatgaggcccaaggatctcaaaaaaaggcttatggtgaagtttaggggcgaagaaggtcttgattatggtggggtggcaagagaatggttgtacctgctgtgtcacgagatgctgaatccatattacgggctttttcagtatagcaccgacaacatctacatgctgcagattaaccctgactcctctattaacccggaccatctgtcttactttcattttgtcggcaggattatgggtttggccgtcttccacggccactatatcaatggcggattcacagtgccgttctataaacaactgttaggcaagcctatacagcttagtgacctggagtctgtcgaccccgagctccacaaaagcctggtttggattctcgaaaatgatatcactccggttctggaccatacattctgtgtggagcataacgctttcggaaggatcctgcaacatgaactcaaaccaaacgggagaaacgtgcctgtgacagaggaaaataaaaaagagtacgtgcgcctgtacgtgaactggcgttttatgcgcggaattgaggcccaatttttggcgctccaaaagggtttcaatgagctgatccctcagcacctgcttaagcccttcgaccagaaggagttggagctcatcatcggaggattggacaaaatagacctgaatgattggaagtctaatacacgcctgaagcactgcgtggcagattccaacatcgttaggtggttttggcaggccgtggagacctttgatgaggaaaggagagcacgcctgctgcaatttgtgaccggaagcacacgggtaccacttcagggttttaaagcattgcagggatctactggtgcagctgggccacgtttattcacaatccatctcatcgatgccaatacagataacctccctaaggcacacacatgttttaaccgaatcgacatcccaccatatgagagctacgagaaactctacgaaaaactgctgacggccgtggaggaaacttgcggcttcgctgttgaatag

SEQ ID NO: 240759 - DNA, 1323 bp, synthetic construct
  misc_feature 1..1323: note = Description of Artificial Sequence: Synthetic coding sequence
  source 1..1323: mol_type = other DNA
atggctactcgatcttgccgggaaaaagcccagaaactgaacgagcagcatcagcttatcttgagcaaactactgagggaggaggataataagtactgtgcggactgcgaggccaagggaccaaggtgggcaagctggaatattggagtttttatctgcataaggtgcgccggaattcataggaatctgggagttcatatatcaagagtaaaaagcgtgaatctcgaccaatggactgcagagcagatccagtgcatgcaagacatggggaacactaaggccaggcttttgtacgaggctaatctgcccgagaactttaggcgccctcaaactgaccaggccgtggaatttttcatacgcgataagtatgaaaaaaaaaagtattatgataagaacgctatcgcgatcactaataaggaaaaagaaaagaagaaagaggaaaaaaagagagagaaggagcccgagaagccggctaagccactgaccgccgagaagcttcaaaagaaggaccaacagttagagcctaagaagtccacgagtccaaaaaaggcagccgagcccaccgtggacctgttaggcctcgacggccctgcggttgcacccgttacgaatggaaatactaccgtgccccctttgaatgatgatctggacatcttcggcccaatgatctctaatcctctgcctgcaacggtcatgccccctgcacagggaactccctcggcccctgcagccgctacgcttagcaccgtgacatccggagacttggacctcttcacggagcagaccaccaagagcgaggaggtggccaagaagcagctgagcaaggattcgatccttagtctctatggcacaggcaccatacagcagcagagcaccccaggagtcttcatggggcctactaacatcccgtttaccagtcaggctcccgctgcgtttcaaggcttccctagcatgggcgtccccgtcccagctgctcctgggctcattggcaacgtgatggggcagtcccccagcatgatggtgggaatgccaatgccaaatgggttcatgggaaacgcacagactggtgtgatgccgctgcctcagaatgtggttgggcctcagggaggtatggtcggtcagatgggcgctccgcagtctaaatttgggttaccacaagctcagcaaccacagtggtccctctcacagatgaatcagcagatggctgggatgagtatcagctccgccacgcctaccgctggattcggccagcctagtagcaccacagccggttggtccggcagctcatcaggccaaacactttcaacacagctttggaagtag

SEQ ID NO: 240760 - DNA, 489 bp, synthetic construct
  misc_feature 1..489: note = Description of Artificial Sequence: Synthetic coding sequence
  source 1..489: mol_type = other DNA
atgggaaatactaaagcacgcctgttgtacgaggcgaacctgccggagaattttcgcaggcctcaaacggaccaggcagtagagttttttatcagagataaatacgaaaagaaaaagtattatgacaagaacgctatcgctatcactaacatctccagctctgacgcgccacttcagcccctggtgtcaagcccatccctccaggccgctgtggataaaaataagcttgaaaaagaaaaagagaagaagaaggaagagaagaagagagagaaggagcctgagaagcccgcaaagcctttaacggcagaaaagctgcagaagaaagaccagcagctcgaaccaaaaaagagtaccagccctaagaaggccgctgagcctactgtggatcttcttggcctggtctggcggaaaatcgagaaagaaaaaagtgagaggcagctggttgaggtggaggagctcactttcatgtattgctttccaaagaactag

SEQ ID NO: 240761 - DNA, 1311 bp, synthetic construct
  misc_feature 1..1311: note = Description of Artificial Sequence: Synthetic coding sequence
  source 1..1311: mol_type = other DNA
atggccacccggagctgtagagagaaagcccaaaaattgaatgagcagcatcagctgatactgtctaagctgctgcgggaagaggacaacaagtattgtgctgactgcgaagctaagggtccaagatgggctagttggaatatcggagtcttcatctgcatccgttgtgcgggtattcaccgtaatctgggagttcatataagccgggttaagagcgttaacctcgatcagtggacagcagaacagatacagtgtatgcaggatatggggaacactaaggccagactgctttacgaagcaaatttgccagaaaatttcaggcgtcctcagaccgatcaagccgtggagttctttattcgagataagtatgaaaagaaaaagtattatgataagaacgcaatcgcaatcacgaacaaggaaaaagagaagaaaaaggaagagaagaagagagagaaggagcctgaaaagcctgcaaagccgctcaccgcagaaaagttgcagaaaaaggaccagcagctcgaaccaaaaaagtcaacttcgcccaaaaaggccgcagagcctacagtagatctcttaggcttggatggacccgctgtagcccctgtgactaacgggaacactactgtccctcccttaaacgacgacttggacatatttggccctatgatctcgaaccccttgcctgctaccgttatgcccccagcacaaggaactccttccgcacccgcagctgcgaccctgtccacagtgaccagcggagatcttgacctgttcactgaacaaacaaccaaaagtgaagaggtggccaagaaacagctgagcaaggattcaattttatccctgtacggaacagggaccatacagcaacagtcgacaccgggtgttttcatgggaccaaccaacattcctttcacttcacaagctcctgctgcattccagggcttcccatcgatgggggtccccgtccccgcagcccctggactgatcggcaatgtaatgggacagtcccctagtatgatggtcggtatgccaatgcctaacggatttatggggaacgcccagactggagtgatgcccctgccacaaaacgttgtaggaccacagggaggcatggtaggacaaatgggtgctccccagtctaagtttgggctgccccaggcacaacagccacagtggtcactgtcccagatcatgcagaagggtgatgctgtgctgcaacacagcatctccgcaatttactggccaatgacacgatggctgaagtgcccacttgttgacgaatctgctgatggctggcacgaataccagtag

SEQ ID NO: 240762 - DNA, 1404 bp, synthetic construct
  misc_feature 1..1404: note = Description of Artificial Sequence: Synthetic coding sequence
  source 1..1404: mol_type = other DNA
atggccactcgctcgtgcagggaaaaagcgcagaaactgaatgagcagcaccaacttattctgtctaagcttcttcgcgaggaagataacaagtactgtgcagactgcgaggcaaaaggccctcgctgggctagctggaacatcggggttttcatttgtattcggtgtgccggaatccatagaaatttgggcgtgcatatcagccgagtcaaatcagttaatttagatcaatggaccgctgaacagatacagtgcatgcaggatatgggtaacactaaggctcggctattgtatgaagccaatctgccagaaaacttccgccgacctcagacggaccaagccgtcgaatttttcattcgggacaaatacgaaaagaagaagtattatgacaaaaacgccatcgcgattactaacatcagtagttctgatgccccactgcagccattggtaagcagtccaagtctgcaggctgccgtggacaaaaataagctcgagaaggagaaggagaagaagaaagaggagaagaagagggagaaggaacctgaaaagcctgccaagcctttgaccgctgaaaagctccagaaaaaagaccagcagctggaacctaagaaatccacatcccctaagaaggccgcagaacctaccgtggacttgcttgggctggacggtcccgcagtggcgcctgtgactaatggtaatactacagtccctcccctgaacgatgacctcgacatattcggcccaatgatctcgaatccactccccgctaccgtgatgcccccagcacaaggaacaccgagcgctcccgcagccgcaacgctgagcactgtgacctcaggggatttggatctgttcaccgagcagactaccaagagcgaggaagttgccaagaaacagctgtccaaagactcaatcttgtctctttatgggactggcaccatccagcaacagagcactcctggggtgttcatggggcctacaaatatcccgttcacctcccaggccccagccgcatttcagggcttcccaagcatgggagtccccgtgcccgcagctcctggccttatcggaaacgtaatgggtcaatcaccctccatgatggtggggatgccaatgcccaacgggtttatgggaaatgcccaaacaggggtgatgcccctacctcagaatgtcgtggggccacagggaggaatggttgggcaaatgggggcaccccagtccaaattcggcttaccacaggctcaacagccccaatggtccttaagtcagatgaatcagcagatggctggcatgagcattagcagcgctactcctacagcgggttttggccaacctagctccaccaccgctggctggtcaggcagctcttctgggcaaacactgtcaacccagttgtggaagtag

SEQ ID NO: 240763 - DNA, 414 bp, synthetic construct
  misc_feature 1..414: note = Description of Artificial Sequence: Synthetic coding sequence
  source 1..414: mol_type = other DNA
atggccacgagatcttgtagagaaaaagcgcagaagctgaatgagcagcatcagttgattttgagcaaacttctccgcgaagaggataacaagtactgtgccgattgtgaggccaagggcccacgatgggcctcctggaatatcggggtctttatatgtatccggtgcgctggcatccacagaaatcttggggtgcatatctccagagtaaagtctgtgaatctggaccagtggaccgcagagcagatacaatgtatgcaagacatgggaaatacgaaagcccgactcctgtatgaggctaacttacccgagaacttcagaagaccgcagactgatcacgaagacataattctcgagactaccgcggtaattacactgctgcttaacaaatgccttccgtacgcaaagccgtag

SEQ ID NO: 240764 - DNA, 378 bp, synthetic construct
  misc_feature 1..378: note = Description of Artificial Sequence: Synthetic coding sequence
  source 1..378: mol_type = other DNA
taaaagtactatgataagaacgctatagctataactaatatttcttcttccgatgccccactccaacctctggtttcttcaccgtcactgcaggccgcagtggataagaacaaacttgagaaagaaaaggaaaaaaagaaggaggaaaaaaagcgggagaaagaaccagaaaagcccgctaagccactcacagctgagaagctgcaaaaaaaagatcagcagctggaacccaaaaaatccacctcacctaaaaaagctgctgagcctaccgttgatttactggggctcgtgtggcggaaaattgaaaaagagaagagcgagcggcagctcgtagaggttgaggagttgactttcatgtattgcttccctaagaattag

SEQ ID NO: 240765 - DNA, 189 bp, synthetic construct
  misc_feature 1..189: note = Description of Artificial Sequence: Synthetic coding sequence
  source 1..189: mol_type = other DNA
atgctttttctcaaattatcagtgtttagggccgtggaattctttattagggacaagtacgaaaagaagaaatattatgataagaatgccattgcaatcacgaacatctcatcctcagacgcccctttgcaacccctcgttagctcaccctccctacaggctgcagtcgacaagaacaagcttgagtag

SEQ ID NO: 240766 - DNA, 1200 bp, synthetic construct
  misc_feature 1..1200: note = Description of Artificial Sequence: Synthetic coding sequence
  source 1..1200: mol_type = other DNA
atgatctttaagggaccgaggtgggcttcctggaatatcggggtctttatctgtatacgctgcgccggaatccaccgtaatctgggggtgcacattagtagggtgaagagcgtgaacttggatcaatggacccaggagcagatccaatgtatgcaggaaatgggtaatggcaaggcaaaccgtctgtatgaagcttacctcccagaaacatttcgtagaccgcagatcgaccccgcagtggaagggtttatccgggacaaatacgaaaagaagaagtatatggatcgctcgctggacatcaacgcctttcggaaggaaaaggatgataaatggaaacggggttctgaaccagtcccggagaaaaaactggaacccgttgtgttcgaaaaagtcaaaatgccacagaaaaaggaggatccccaattaccaagaaaaagctcccctaagagtacagcgcctgtcatggacttgttgggcctcgatgcaccggttgcatgctcaatcgctaattccaagacctccaatactctcgagaaggacctggatcttctggcgtccgttccttccccttcatcttccggcagccgtaaggttgttggatcaatgcccaccgccggatccgcgggtagcgtgccagagaacctgaacctgttcccggaaccaggatccaaatcagaggagataggtaagaaacaactctctaaagattccattctgtcgctctacggcagccagacacctcagatgcctacacaggcgatgtttatggcccctgcgcagatggcctaccccacagcttatccctcattcccaggagttaccccccctaactccatcatgggatccatgatgccaccccctgtagggatggttgctcagccaggggctagcggcatggtggcccctatggcaatgcctgccggatatatgggaggaatgcaagctagtatgatgggagtgcccaacgggatgatgaccacacagcaagccggttacatggccggaatggcagccatgccccagactgtatatggtgtgcagcctgcacagcagctgcaatggaacctcactcagatgactcagcagatggctggcatgaatttctacggcgctaacggaatgatgaactatggccagtccatgtcaggcggaaacgggcaggcggctaatcagacgctgtcaccacagatgtggaaatag

SEQ ID NO: 240767 - DNA, 1290 bp, synthetic construct
  misc_feature 1..1290: note = Description of Artificial Sequence: Synthetic coding sequence
  source 1..1290: mol_type = other DNA
atgaccggcaaatcagtgaaagacgtggatcgctaccaggccgtgctggcaaatttgctgttagaagaggacaataagttctgcgcagactgccagtctaaaggacccaggtgggcttcctggaacattggagtgtttatctgcattcgttgtgctggcatccatcgcaatctcggagtgcatatttcccgagtcaaatccgtgaatttggaccagtggactcaggagcagatccagtgcatgcaagagatgggtaatgggaaagccaatcggctctacgaggcttatctgccagagacattccggcgaccccagattgaccccgctgtcgagggattcattcgtgataaatatgagaaaaaaaagtacatggacagatcccttgatattaacgccttcagaaaggagaaggacgataaatggaagcggggttccgaaccggtccccgagaagaaattggaacccgtggtctttgagaaagtgaaaatgccccagaaaaaagaggatccacagctaccgaggaaatcttcaccaaagtctaccgccccagtgatggacctgctgggccttgatgcgcctgtagcgtgcagcatcgccaactcaaagacctccaacactttggaaaaggacttggatctgctggccagtgtgccgagcccaagcagctctggaagcagaaaggtcgttggttctatgcccactgctgggtctgctgggtccgtgcccgaaaacttgaacctctttcccgagcccggaagcaagtcagaagagatcggaaaaaaacagcttagtaaagattccatactctccctatacggttctcagactcctcagatgccaacccaggccatgtttatggccccagcacagatggcctatcctacagcttatccctccttccctggcgtgacccctcctaacagcataatgggcagtatgatgccccctccggtcggcatggtcgctcagccgggtgcttccggcatggtagcacccatggccatgcccgcaggctatatgggcggtatgcaggcttccatgatgggggtccccaacggcatgatgacaacccagcaggccggttacatggccggaatggctgctatgccacaaacagtgtatggtgttcaaccggcacaacagctgcagtggaacctgacccagatgacccagcagatggccggaatgaatttttatggtgccaacggcatgatgaactatggccagtccatgagcggtgggaacggacaagccgctaaccaaactctttccccacagatgtggaagtag

SEQ ID NO: 240768 - DNA, 684 bp, synthetic construct
  misc_feature 1..684: note = Description of Artificial Sequence: Synthetic coding sequence
  source 1..684: mol_type = other DNA
atgaccggcaagtcggtcaaggacgtagatcgctatcaggccgtgctggccaatctgctcctggaggaagataataaattttgcgcagattgccagagcaagggcccacgttgggccagttggaacattggcgtgtttatctgtataaggtgtgcaggtatccataggaatctgggtgtgcatattagccgtgtgaagtctgttaacctggaccagtggacgcaagagcagatccagtgcatgcaggagatgggcaatggcaaggccaaccggctctatgaggcttatctcccagagacgtttcgcaggcctcaaatagacccagccgtagaaggctttataagggataaatacgagaagaagaagtatatggacagatcccttgacattaatgcttttcgcaaagagaaggatgacaagtggaaacggggatctgagccggtccctgagaaaaaattggaaccagtggtgtttgaaaaggtgaaaatgcctcagaagaaggaagacccacagctgcccaggaagagcagcccaaaaagcacggcccctgttatggacctcctgggcctggatgcccctgtagcatgtagcatcgccaatagcaaaactagtaacaccctggagaaagatctggacctgctggcctctgtgccaagtccctcttctagcggaagtcggaaatag

SEQ ID NO: 240769 - DNA, 1050 bp, synthetic construct
  misc_feature 1..1050: note = Description of Artificial Sequence: Synthetic coding sequence
  source 1..1050: mol_type = other DNA
atgcaggagatgggaaatggtaaagcaaatcgactctacgaagcatacttgcccgagacctttagacggccacaaattgatcctgcagttgagggtttcattcgggataaatatgagaagaagaagtatatggatagatctctggacataaatgcttttagaaaagagaaggatgataaatggaagcgcggttccgaacctgtgcctgagaagaaattagaacctgtagtattcgagaaagtgaagatgccacagaaaaaggaggacccacaacttcctagaaagagcagtccaaagtctacggctcctgtgatggacctcttgggactcgatgctcccgttgcatgtagcatcgctaactcaaaaacctcaaatacactggagaaagatctggatttgctggcctccgtgcccagtccatcctcgtctgggagtcgcaaggtcgtcggcagtatgcctacggcaggctcagcaggctcagtgcctgagaatctcaatctctttccagaacctgggtcgaaatctgaggagattggcaaaaagcagctgtctaaagattctatcctcagtctgtatggctcacagaccccacagatgcccacccaagccatgtttatggcacccgctcagatggcctaccccaccgcttatccttctttcccaggcgtgaccccacctaactccataatgggtagcatgatgcctcctcccgtgggtatggtggcccaaccaggagcgtcaggcatggtggcccctatggcaatgccagccggatatatgggcggtatgcaggccagcatgatgggagtaccgaatggcatgatgaccactcaacaggcagggtacatggcagggatggctgccatgccacagactgtttatggcgttcagcccgctcagcagcttcagtggaacctgacccaaatgacacagcagatggcgggaatgaacttttatggcgctaacggcatgatgaactacggccagagtatgagcggaggaaatggtcaggccgctaatcagaccctttcccctcagatgtggaaatag

SEQ ID NO: 240770 - DNA, 189 bp, synthetic construct
  misc_feature 1..189: note = Description of Artificial Sequence: Synthetic coding sequence
  source 1..189: mol_type = other DNA
atggcacgaggaaaccagagggaactcgctagacagaagaatatgaaaaaaactcaggagatatcaaaagggaaaagaaaagaggattcattaacagcgagtcaacggaagcagcgggattctgaaatcatgcaggagaagcaaaaggccgctaacgagaaaaaatccatgcaaacaagggaaaaatag

SEQ ID NO: 240771 - DNA, 333 bp, synthetic construct
  misc_feature 1..333: note = Description of Artificial Sequence: Synthetic coding sequence
  source 1..333: mol_type = other DNA
atggcccgtgggaaccagcgtgaattagcccgtcaaaagaacatgaagaaaacccaggaaatttccaaggggaaaaggaaagaggactcactgaccgcgtcccagcgcaagcagtcatcaggaggccagaaatcagaatccaagatgtcagccggtcctcatctgccgctgaaagcccctagggagaatccatgcttccctctgcccgcagcaggaggatcaagatattacctggcatacggctctataacgcccataagcgccttcgtttttgtcgtcttctttagtgtgttctttccttccttctatgaagatttctgctgctggatttag

SEQ ID NO: 240772 - DNA, 147 bp, synthetic construct
  misc_feature 1..147: note = Description of Artificial Sequence: Synthetic coding sequence
  source 1..147: mol_type = other DNA
atgaaaaaaacacaggaaatctccaaggggaagaggaaagaggactctcttaccgctagccaaagaaagcaacgggacagcgagatcatgcaggagaaacaaaaagccgctaacgagaagaaaagcatgcagaccagggagaagtag

SEQ ID NO: 240773 - DNA, 63 bp, synthetic construct
  misc_feature 1..63: note = Description of Artificial Sequence: Synthetic coding sequence
  source 1..63: mol_type = other DNA
atgaagaaaacccaggaaatatcaaagggaaagaggaaggaggattctctcacagccagctag

SEQ ID NO: 240774 - DNA, 291 bp, synthetic construct
  misc_feature 1..291: note = Description of Artificial Sequence: Synthetic coding sequence
  source 1..291: mol_type = other DNA
atgaagaagacccaggaaatcagcaagggtaaacgtaaggaagacagccttactgcttcccagcggaaacagagttctgggggtcaaaagtccgaatcaaaaatgtccgcaggccctcacctgccactcaaggcgccaagagagaacccatgctttccgctgccagctgccggtgggtcccggtattaccttgcctacggaagcatcacaccaatttctgcctttgtgttcgtagtgttctttagtgttttcttcccctccttctacgaggatttctgctgttggatctag

SEQ ID NO: 240775 - DNA, 270 bp, synthetic construct
  misc_feature 1..270: note = Description of Artificial Sequence: Synthetic coding sequence
  source 1..270: mol_type = other DNA
atgaaaaagacacaggagatctcaaaagggaagcgcaaagaagactcactgacagcgagccaaagaaagcaatctagcggcggacagaagagcgaatctaaaatgtcagcaggacctcatctgcctctcaaagcgcctagagagaatccctgctttcctttgccagcagctggcggttctcgttactacctcgcatacgggtctatcacccccatcagtgcctttgtgtttgtcgtgtttttttcagtgttttttccctcattttattag

SEQ ID NO: 240776 - DNA, 3156 bp, synthetic construct
  misc_feature 1..3156: note = Description of Artificial Sequence: Synthetic coding sequence
  source 1..3156: mol_type = other DNA
atgggcagcgctgaggacgccgtgaaggagaaattgctgtggaatgtgaaaaaggaggtgaaacagatcatggaagaagcagttactaggaagtttgtccatgaggactctagtcacattatcgccctttgcggcgctgtggaggcgtgtctccttcatcagttacgcaggcgagcggctggcttcttgcggtctgacaagatggccgctctcttcacaaaagtcggaaaaacttgccctgtcgcaggggaaatctgccataaggttcaagagctacaacagcaggctgaggggaggaagccctcaggcgtctcacaggaggccctgcggagacagggaagcgcctcaggcaaggcccctgcacttagtcctcaggcacttaagcatgtgtgggtaaggactgcacttattgagaaagtgctcgataaggtcgtgcagtacctggcagagaactgcagcaaatactatgaaaaggaggcacttctggcagaccccgtgtttgggccaattcttgccagcctcttggtcggtccatgcgctctggagtatactaaattaaagacggctgatcattattggaccgaccctagcgccgacgagctggtccagagacacagaatccggggacctccgacgaggcaagattctccagctaaaagacccgcactaggtatccgtaaaagacatagttctggtagtgcaagcgaggatagactggcagcctgcgccagagagtgcgtcgagagcctgcaccagaattcacggacaaggcttctatacgggaaaaaccatgtactcgtccaaccaaaagaagacatggaagctgtcccgggatacctctcgctccatcagtccgctgagagtctgaccctcaaatggacccccaatcagctgatgaatggaacactgggggattctgaactagagaagagcgtgtactgggactatgcgttagtggtccctttcagccaagtcgtatgcatccactgtcaccagcagaaaagcggtgggacattggtgctcgtcagtcaggacggcattcagaggccacccttgcatttcccacaaggtggtcatctgctgagtttcctatcttgcctggaaaatggactgttgcctcgtggacagctggagcccccactctggactcaacagggtaaaggcaaagtgttcccgaagctgagaaaacgctcctccatcagatctgtggacatggaagaaatgggtaccggcagagctaccgattacgtattccggattatctatcccggacaccgccacgagcatattactatcaattaccatcatctcgccgcttcccgggctgcctccgtcgatgacgacgaggaggaagaagataagctgcacgcgatgctgagtatgatatgttcccgaaatctgacggcccctaacccgatgaaggacgccggtgacatgattgaaatgcaagggttcggccctagcttgcctgcctggcatctggaaccactatgtagccagggcagctcttgcctgagctgctcctcatcctcctccccccacgccacgccctcacactgttcctgcatccctgaccggctgccgcttcgactgctttgtgaaagcatgaagagacagatcgtgagccgcgcattctacggttggttagcgcattgcagacatcttagtaccgtacgcacccatctgagcgccttggtacatcattcggtgatccccccagaccgtccaccgggagcgagcgccggattgacaaaggatgtctggagcaagtatcagaaggacaagaagaactataaagagcttgaattactgcggcaggtttactacgggggtattgagcacgagattaggaaagacgtctggccattcctgctaggccattataagttcggcatgagcaaaaaggaaatggagcaggttgacgcagtggtcgcggctcgctatcagcaggttctggctgaatggaaggcctgcgaagttgtggtgcggcagcgtgaaagggaagctcatccagccacgagaaccaagttctcctccggttcctctatcgattcccatgttcagagactgatccatcgcgactcgaccatctctaacgatgtgttcattagcgttgatgatttagaaccgcctgaacctcaggatcctgaggattcccgtcctaagcccgagcaggaagcgggaccaggcactcccggaaccgccgttgtcgaacagcagcacagcgtggagttcgattccccagactccggattgcctagcagccgaaattactctgtggcctctggcattcagagctcattggatgaaggtcagtctgttggttttgaagaggaggacggaggaggcgaggagggatcaagcggcccaggaccagccgcacacacactgagggaaccacaagatccctctcaagagaagccccaagctggagaattggaggccggagaggagctagcagccgtctgcgccgctgcctatacaatagagctgctggacacagtcgctcttaatctccacagaatcgacaaggacgtccagcgatgtgaccgcaattattggtacttcacccccccaaatctcgagagactgcgggatgtgatgtgtagctacgtctgggagcatctcgatgtcggatacgtgcagggaatgtgtgacctcctggccccactgcttgttacactggataacgaccaacttgcttatagctgcttttcacatcttatgaaaagaatgtcgcagaattttcctaatggaggggctatggacacacatttcgctaacatgcgttcactgattcagatccttgacagtgagctattcgagttgatgcatcaaaacggagattacacacatttttacttttgctaccgatggtttttactggatttcaagcgagagctgctttacgaggatgtgtttgccgtgtgggaggtgatttgggctgcacgacacatatcctcagaacacttcgtgctgtttatcgcattggctttggttgaggcttacagggagatcatccgcgataataacatggattttaccgacatcattaagtttttcaacgaaagagctgagcatcatgatgcacaggagattctgcgaattgctcgggacctggtccacaaggtccagatgcttatcgaaaacaagtag

SEQ ID NO: 240777 - DNA, 3021 bp, synthetic construct
  misc_feature 1..3021: note = Description of Artificial Sequence: Synthetic coding sequence
  source 1..3021: mol_type = other DNA
atgggctcagcagaggacgcagtcaaagaaaaactcttatggaacgtgaagaaggaagtaaaacagattatggaggaggctgttaccagaaagttcgtgcacgaggactcgagtcacataattgcactctgtggagcagtggaggcatgtctcctgcaccagctgaggcggcgtgcggctggttttctgaggagcgacaagatggccgctctcttcaccaaggtaggcaagacatgtcccgtcgcaggcgagatctgtcacaaggtgcaagagctgcagcagcaggccgaggggaggaaacctagcggggtgagtcaggaagcactgagacgccaggggtcagccagcggaaaggcccctgccctgtcgcctcaggcgctcaaacatgtgtgggtgagaaccgcgctaatcgagaaagtgttagataaagttgttcaataccttgccgaaaattgctctaagtattacgaaaaggaagccctcctggccgaccctgttttcgggcctatcttagcctcattgctcgttggtccctgtgctttggaatacacaaaacttaaaacagctgatcactattggaccgacccgtctgctgatgaattagtgcagagacaccgcataaggggcccaccaaccagacaggatagtcctgctaagaggcccgctctgggtatccggaagcgtcatagttctgggtccgccagcgaagatcgcctggccgcttgcgccagggaatgcgttgagtcgctgcaccagaatagccgcactagactgctctatggtaagaaccatgtgttagtccaacccaaggaggacatggaggccgtgccaggatacttaagccttcatcagtcggctgagagcctgaccctgaagtggactcccaaccaactcatgaacggcacactcggtgactccgagttggagaaaagtgtgtactgggactatgcactggtggtgcctttcagtcaggttgtgtgtatccactgccaccagcagaaaagtggcggtaccctggttctcgtttcgcaggacggcatccagcgaccgccacttcatttccctcaaggaggccatctgctttcctttctgtcttgcctggaaaatgggctgttaccgcgaggccaactggaacctccactatggactcagcaggggaagggcaaagtgttccctaagttaagaaagaggtcttctattagaagcgtggatatggaggagatgggtaccggccgagctactgactatgtgtttcggataatttaccccggacacaggcatgaacataacgcaggtgacatgatcgagatgcaaggcttcggcccatctcttccagcctggcatctagagcctctgtgcagtcagggcagttcttgtctgagttgctctagctcaagctccccccacgccaccccgtcacattgcagttgtattccggaccgcctcccgctgcgacttctctgtgagtcaatgaagcgccaaatcgtgagccgtgccttttacggatggttggcccattgtcggcatctgtccacagtgcggacccacttgtctgccctcgtccatcactccgttattcctcccgaccggccacccggagcgagcgcgggattgacaaaggatgtgtggtccaaataccagaaagacaaaaaaaattacaaggaactcgagctgcttaggcaggtatactacggcggtatagagcacgaaattagaaaggatgtctggccctttctcctcggacactacaagttcggaatgagcaagaaagaaatggaacaggtggatgctgtggtcgccgcacgttatcagcaggtactggccgaatggaaagcctgcgaggtggtcgtcaggcaaagagagagagaggctcatcctgcaacccgaaccaagttttcatctggctccagtatcgatagccatgtgcaacgtttgatccacagggattctacaattagtaatgacgtcttcatatccgtcgacgacttggagccacctgaacctcaggacccagaggacagcaggcccaagccagagcaggaggcaggacctggaacccccggtacagccgtggtagagcaacaacactccgtggagttcgacagtccggattcaggcctcccatcaagcagaaattattccgttgccagcggcatccaatccagtctggatgaggggcagtctgtagggttcgaagaggaggacggcggaggggaggaggggagttccggaccgggtcctgccgcacataccctgcgtgagccccaggatccaagccaggagaagccgcaggccggagagctggaagcaggcgaagagctcgccgcagtgtgcgctgccgcatacactatcgagctgctggacaccgtggccttgaacctgcacagaatcgataaggatgtccaacggtgtgatcgtaactattggtattttacaccaccgaacctggaacgactcagggatgttatgtgctcttacgtttgggaacaccttgatgttgggtatgtccaggggatgtgtgatctcctagcacccctgctggtcaccctcgataacgaccagctcgcctattcctgcttttctcacctgatgaaacggatgagccaaaactttcccaacggcggtgcaatggacactcatttcgcaaacatgaggagcctgattcagatcctggactccgaactgtttgagctcatgcaccagaacggcgattacacccacttttacttctgctataggtggttcctacttgatttcaaaagagaactgctctatgaggatgtgtttgccgtgtgggaggtcatatgggcagccaggcacatctcctctgaacacttcgtactcttcatcgcacttgctttggtcgaagcttatcgcgagataatcagagataataacatggacttcactgatataatcaagttctttaacgaacgcgcagagcatcatgacgcacaggagatcctgcgtatcgctagagatcttgtccacaaagtgcagatgcttatagaaaataagtag

SEQ ID NO: 240778 - DNA, 795 bp, synthetic construct
  misc_feature 1..795: note = Description of Artificial Sequence: Synthetic coding sequence
  source 1..795: mol_type = other DNA
atgtgccacaaaaacgggtttcctcaggaagggggaataacagccgctttccttcagaagcggaagttacggctgagcaagaaccatcgacccgcacgagctaaggtcacagaacacgtcagaggcactcgtcccggtagagccaccgccggaccggctgccagtacccgagcggcagggtccctattctttgaccgctggggaaatcggggtccagcagggtgcagggggtcctctcacctgcctcagcagcttaagttcactacatcagatagttgcgatagaattaaggacgaatttcagttgctgcaagcacaataccactccttaaaactcgaatgtgacaaactcgcctcggaaaagagcgagatgcagcgccactacgtcatgtactatgagatgtcctacggattaaacattgaaatgcataagcaggcggagattgtgaagcgccttaatggcatatgtgcgcaagtcctgccctatctctcccaggagcaccagcagcaggtcctaggggcaatcgaaagagccaaacaggtgacagcgccagaactgaacagtataatccgccagcagctgcaggcccatcagctgtcgcagttgcaagcccttgccctaccactcacacccctgcccgtgggcctccagcctccaagtcttccagcagtcagtgctgggaccggcctcctgtctttgtcagccctggggagtcaggctcacctgtctaaagaggataaaaatggacatgacggagacacacaccaggaggatgacggcgaaaagtctgattag

SEQ ID NO: 240779 - DNA, 267 bp, synthetic construct
  misc_feature 1..267: note = Description of Artificial Sequence: Synthetic coding sequence
  source 1..267: mol_type = other DNA
atgaacatgtctaagcagccagtgtctaatgtccgagcgatccaggccaatatcaacatccctatgggcgcttttcggccaggagcaggccagcctcctagacggaaagagtgtacaccagaagtggaggagggagttcccccaacatcagacgaggagaagaaaccaatccccggtgctaagaagctgcccggtccagcagtgaacctcagtgagatacagaatattaagagcgaactgaagtatgttcccaaggccgagcagtag

SEQ ID NO: 240780 - DNA, 6410 bp, synthetic construct
  misc_feature 1..6410: note = Description of Artificial Sequence: Synthetic coding sequence
  source 1..6410: mol_type = other DNA
atggccgacgtaacagcccgtagcctccagtacgaatacaaggcaaattctaacttagttttgcaggcagataggagtctgattgacagaacacgcagggacgaacccacgggagaagtgttgtcccttgtgggaaagctcgagggcactcgtatgggagacaaggctcagcgcactaaacctcagatgcaagaggaacgaagagccaaaaggaggaagagagatgaggataggcatgatattaataagatgaaaggttacaccctgctatcagaagggattgatgagatggttggcatcatatacaagcccaagaccaaagaaacacgggagacttatgaggtactcctgtcttttatccaggccgctcttggggaccagccacgagacatcctctgtggtgcagcggatgaggtgctagcagtgctgaaaaacgaaaagctgagggacaaagagcggaggaaggaaatcgacctgctgctgggtcagactgacgacacacgataccacgtcctggtgaacttaggcaagaaaatcaccgactatggcggtgataaagagatccagaatatggatgacaacatcgacgagacctacggcgtgaatgtgcaatttgagtctgatgaagaggagggcgatgaggatgtctacggcgaagtgcgggaagaagcctctgatgatgatatggaaggggatgaggccgtggtccgctgtaccctcagcgccaacttagtcgcttccggggaactcatgtcctcaaaaaaaaaagacttacatccaagagacattgacgccttttggctgcagagacaactctcacggttctatgatgacgctatcgtttctcagaaaaaagccgacgaggtgctcgagattctcaagaccgcgtccgacgaccgggaatgcgagaaccagctagtgctgctgctgggtttcaacacattcgactttatcaaggtgcttagacagcatagaatgatgatcctgtattgtacactgcttgcttctgcgcagtcagaggctgagaaggaaagaataatggggaagatggaggctgacccggagctgtccaagttcttgtaccagctgcacgagacggagaaggaagacctgataagagaagaaaggtctaggcgcgagcgtgtgagacagagcaggatggatacagatcttgaaacaatggacctagaccaaggcggagaggcattagctcctcggcaagtactggatcttgaagacctggtctttactcagggttcccactttatggctaacaaacgttgtcagctgcctgatggcagcttcagacgtcagcggaagggctacgaggaagtacatgtgcctgcgctgaagcctaagccattcgggtcagaagagcagctgttgcctgttgaaaaacttccaaaatatgcacaggccggatttgaggggttcaagaccctcaatcgtattcagtcgaaactttatagagctgctttagagaccgatgagaatttactgctgtgtgcgccaacaggtgccggaaagacaaatgtggccctgatgtgcatgttgagggagatcggcaagcatatcaacatggacgggacaataaatgttgacgatttcaagatcatctatatagcccctatgcgcagcctcgtgcaggagatggtgggctcatttggtaagcgacttgccacttatggtatcaccgtggctgagcttaccggcgaccatcagctctgtaaagaagagattagtgccactcagattatagtgtgcactcctgagaagtgggacataattactcgcaaaggcggagagaggacttacacccaacttgtgcgactcatcatccttgatgagatacacctgctgcacgatgacagagggcctgtgctagaggcgctggttgccagggccatccgaaacattgaaatgacccaggaagacgtcagactgattggactgtccgcgacactgcccaattacgaggatgtcgccaccttcctgcgggttgacccagctaagggattattctactttgacaactccttccggcctgtccccctggagcagacctatgttggcatcactgaaaagaaggctatcaaacggttccagataatgaatgaaatcgtgtacgagaaaatcatggagcatgccggaaagaatcaggtcctggtgtttgtgcattctcggaaggagactggcaagactgccagagcaatcagagacatgtgcctggagaaagacactcttggattattccttcgcgaaggaagcgccagtactgaggtactgagaaccgaagcagaacagtgtaagaatctggaacttaaggacctcctgccatatggttttgccatacatcacgccggaatgactcgagtggatcgcacactcgtggaggacctgtttgccgacaaacatattcaagtgcttgtgagtaccgctacgttagcttggggggtgaatttgcccgctcacacagtgattatcaagggaactcaggtgtactctccagaaaagggccgttggacggagctcggcgcactcgacattctgcagatgttggggcgtgcaggtcgccctcagtatgacacgaaaggggagggaattcttattacctctcatggagaactgcagtattatctgagcttgctgaaccagcaactgcctatagagagccagatggtctccaaattgcccgacatgttaaacgctgagatcgtcctgggtaatgtgcagaacgccaaggacgcagtgaactggctgggatatgcctacctgtacatccgaatgcttcgcagtccaacgctgtatggaatcagtcatgatgatctgaagggagatcccctgctcgaccaacggaggctggacctggtgcacaccgccgcactaatgctggacaaaaacaatttggtaaaatacgacaaaaagactggcaacttccaggtgaccgagctcgggcgaattgcctcccactactacatcaccaacgatacagtgcagacctacaatcagctcttgaagcccacgctaagcgagatcgaactgttccgagtctttagcctgtcttctgaattcaagaacatcacggtgagggaagaggaaaagcttgaactgcagaagctcctggagagggtgccaatacccgttaaggaatcaattgaggagcccagcgctaaaatcaatgttctgctgcaggccttcatatcccagctgaagcttgaggggtttgcgctaatggccgacatggtgtatgtcacccagagcgcaggccgactgatgcgagccatcttcgaaattgttctgaatcgcggatgggcccagcttaccgacaagaccctgaacctgtgtaagatgattgataagcggatgtggcaaagtatgtgccccctgaggcaatttcgaaagctgcccgaggaggtggtcaaaaagattgagaagaaaaactttccgtttgagcgcctctacgacttaaaccacaacgagattggagagctgattagaatgcccaaaatgggcaagacgatccataaatacgtccatctttttccaaagttggaactgagcgtccatttgcagcctatcacacggtccaccttgaaggtggaacttactatcacacctgactttcaatgggatgagaaggtgcacggctccagcgaagccttctggatcctagtggaggatgtggatagtgaggtcattctgcatcatgaatacttcttgttaaaagctaaatacgcccaggatgaacatctgattactttcttcgtgcccgtgttcgagcccctaccaccacagtactttatcagggtggtgtctgacagatggttgtcctgcgagacgcagctcccagtttcatttaggcacctgatcctgccggagaaatacccaccaccaaccgaactgctggaccttcagccacttcctgtgtccgctctgagaaattcagccttcgaatccctataccaggataaattccccttttttaacccaatacagacgcaggtctttaacacagtgtacaattctgacgataacgtgttcgtgggggctccaacaggttcggggaaaacgatatgcgctgagttcgccatacttcggatgcttctgcagtcatcagaaggcagatgtgtgtacatcactcctatggaggccctcgctgagcaggtgtacatggactggtacgagaagtttcaggataggctaaacaagaaagtcgtactcttaacaggcgagaccagcactgacctcaagttactggggaaggggaatatcatcatctcgacccccgagaagtgggatattctgagtcgacggtggaaacaaagaaagaatgttcagaacatcaacctgttcgtggtcgacgaagtccacctgattgggggagagaatggtcctgtactcgaagtgatctgctcccggatgcggtacatctcttcacagatcgagaggcctataagaatcgtagccctttccagtagcctgtctaacgccaaggatgtcgcacactggttagggtgcagcgcgactagtacatttaacttccacccgaatgtgcgtcccgtacctctggagttgcatattcagggattcaacattagccacacccagactcgcctgctgtccatggccaagcctgtgtaccatgctatcactaaacatagtcctaagaaacccgtcattgtttttgttcccagccgcaaacagacacggctaacagcgatcgacattctgaccacctgtgcagctgacatacagagacaacgctttcttcactgtactgagaaggacctcattccctatctggaaaaactgagtgattccactctaaaagagactctcctgaatggcgtcggatacctccacgagggcctgagtccaatggaaagacggcttgttgaacagctttttagctctggcgctatccaggtggttgtggcaagcaggtccctgtgttggggcatgaatgtcgccgctcatctggtcataattatggacacccagtattataatggcaagattcacgcctacgttgattaccctatttatgacgtcctgcagatggtaggacacgctaatcggccactgcaagatgatgaggggcgatgcgttataatgtgtcagggatctaagaaagacttttttaagaaatttctttatgagcccctacccgttgagtcccacctagaccattgtatgcacgatcattttaatgcagagatcgtgaccaagactatcgaaaataaacaagatgcagtagactatctgacgtggaccttcctttaccgtagaatgacccagaaccctaattactacaatcttcagggcatcagccatcggcacctctcagatcatctctccgagctggtggaacagaccttatccgacttagagcagagtaaatgtattagcatagaagatgagatggatgtggcccctctcaatctcggaatgatcgcagcctactactacatcaactacactacaattgagctattctccatgtccctcaacgccaagactaaggtgaggggtctcatcgagatcataagtaatgcagccgagtacgaaaatattccaattcgacaccatgaggataatctgctccgccaactggcccagaaagtgccccataagctaaataacccgaaatttaatgatccccatgttaaaactaacctcctgttgcaagctcacctcagccggatgcagctatccgcagaactccagtcagatactgaagagatcctgtccaaagctataagactgatccaggcatgtgtcgacgtcctctcctctaacgggtggctaagccctgccctggccgctatggagcttgctcagatggtcacccaggctatgtggtctaaggattcttatctaaagcagctcccacacttcacttcagaacatattaaaagatgtacagacaaaggagtagaaagtgtctttgatatcatggaaatggaggatgaagaacgcaacgcactccttcagctcactgactcacagatcgccgacgtagccaggttctgcaaccggtaccccaacatcgagttatcctacgaagtggtcgacaaagactctataagatctggcggaccagttgtagttctagtgcagctagagagagaagaagaagtgaccggacccgttatcgccccactgttccctcaaaagagggaagaggggtggtgggtagtgattggagatgcaaagtctaactcgctgatcagcatcaagcgtctgaccctgcagcaaaaggccaaagtcaaactcgattttgtggcccctgccacaggggctcataactatacattatactttatgtctgatgcatacatgggctgcgatcaggaatacaagttctcggtcgatgttaaagaggccgaaacagactccgactctgacta

SEQ ID NO: 240781 - DNA, 1878 bp, synthetic construct
  misc_feature 1..1878: note = Description of Artificial Sequence: Synthetic coding sequence
  source 1..1878: mol_type = other DNA
atggctgacgttaccgcaaggtccctccagtacgagtataaagccaacagtaacctggttttacaggctgatagatctctgatcgacagaacgcggcgagacgagcctaccggcgaggtgttatcccttgttggcaagctcgagggcacacgaatgggggataaagcacagcgtaccaagcctcagatgcaagaggagcgaagagccaagcggaggaaacgagatgaagatagacacgacatcaataagatgaagggttacactctcttatccgaggggatcgatgagatggtcggcatcatctacaagcctaaaaccaaggagactcgggaaacttacgaagtgctgctgtcttttattcaggccgctctaggagaccaacctcgggacatcctgtgtggcgctgccgatgaagtccttgctgttttgaaaaatgaaaagttacgtgacaaggagaggcgtaaagagattgacctgcttctggggcagactgacgacacacgttaccatgttctcgtgaacctcggaaagaaaattaccgattacggaggggacaaggaaattcaaaacatggatgacaatattgatgaaacgtatggagtcaatgtgcagttcgagagcgacgaggaagagggagacgaggacgtgtatggcgaagtgcgggaggaggctagtgacgacgatatggaaggcgacgaagctgttgttcgctgtacactgtcggcaaatcttgtcgctagcggggagctcatgtcaagcaaaaagaaggacctgcacccacgcgacatcgatgcattttggttgcagcgccagctgtcacgattctacgacgatgccatcgtgagtcaaaagaaggctgatgaagtgctcgagattctgaagactgcctccgacgaccgggaatgtgagaatcagcttgtgctgctgctcggtttcaacacatttgattttataaaagttctccgtcaacatcgcatgatgatactgtattgtactctgcttgcctccgcccagtctgaagccgagaaagaacggattatggggaagatggaggcagacccagaattgagcaaatttctttaccagctgcacgagactgagaaagaagatctcattcgggaggagcggtctcggagggaacgcgtacgccagtccaggatggatacagatctggagacaatggacctggatcagggcggtgaagccttggcccctcgacaggtgctggatcttgaggatctcgtgttcacccagggtagtcacttcatggccaataagcgctgtcagttgcctgatggctcatttcggagacaaaggaagggttacgaggaagtgcatgtaccagccttaaagcctaaaccctttggatctgaggagcagctgctcccagtcgagaaactgccaaagtatgcccaagcaggattcgaagggttcaaaacactcaatcgaatacaatccaaactctatcgcgcagccttggaaactgacgagaaccttctcttgtgcgctcccaccggtgccggaaagacaaatgtcgcccttatgtgtatgttgcgtgagattggcaaacacattaacatggacggtaccatcaatgtggacgacttcaagattatctacattgcacctatgcggagtcttgtgcaggagatggtgggctccttcggaaaacgagatgcaaagagtaacagcttaattagcattaaaaggcttacgttacagcagaaggctaaagttaaactggacttcgtcgcacctgctaccggcgcacacaattacacgctctattttatgtcagatgcgtatatgggctgcgaccaagaatacaagtttagtgtggatgtgaaggaggcagagaccgactctgactccgactag

SEQ ID NO: 240782 - DNA, 1788 bp, synthetic construct
  misc_feature 1..1788: note = Description of Artificial Sequence: Synthetic coding sequence
  source 1..1788: mol_type = other DNA
atgaggtacatttcctcgcaaattgaaagacccattcggatcgtggcactttctagcagcctatcgaatgcgaaggatgtggcccattggttaggctgttccgcaaccagcacattcaacttccaccctaatgttagaccggtgcccctcgaactgcacatccaggggtttaatatatcccatactcagactagactgctatcgatggctaagcccgtttatcacgccattactaagcatagcccaaaaaaacccgttatcgtgtttgtgccttcgaggaaacagacaagattgactgctattgatattctgactacctgcgcagctgatattcagagacagaggtttctgcactgtacagagaaagatctgattccctacctcgagaagctgagtgatagcactctcaaagagacactactcaatggggtgggctacctccatgaggggcttagccccatggaacggaggctcgtcgagcaactcttttcaagcggcgcaatccaggtggtcgtagctagtaggtctctgtgctggggaatgaatgttgctgcccacttggttatcattatggatacccagtattataacggaaaaatacatgcatacgtcgattatcctatctacgatgttctgcagatggttggccatgccaatagaccacttcaggacgatgaggggaggtgtgtgattatgtgtcaaggctcaaagaaggatttctttaagaagtttctatacgagccgctcccagtcgaatcccacctggatcattgtatgcacgaccactttaatgccgagattgtgacaaaaactatcgagaacaagcaggacgccgtggattatcttacatggactttcctgtatcgtcgcatgacccagaacccgaactactacaacctgcagggaatttcccatcgccatctctccgaccacctctctgaactcgtggagcagacccttagtgacctggaacagagtaaatgtatcagcatagaggatgagatggacgttgcacctctgaacctcggtatgatcgccgcatattattatatcaactacacaaccatagagcttttttcaatgtcactgaacgcgaagactaaagttcggggacttattgagatcatttctaatgctgccgaatacgagaacatcccaatccgacaccacgaagacaatctgttgagacagttggctcaaaaagtgcctcataaactgaacaatcccaaattcaacgacccccacgtgaagacaaatctattgctccaagcccacttgtcgaggatgcagctctccgccgaactgcagtcggatacggaagagatcctgtccaaggccatccgcctgattcaggcctgcgttgacgtgctgagttctaatggctggctatcgcctgcccttgcggcaatggagctggctcaaatggtcactcaggccatgtggagtaaagatagttacttgaagcagttaccgcacttcactagtgaacacatcaaacggtgcacggacaagggcgttgagtccgttttcgatatcatggagatggaggacgaggagaggaacgcccttctgcaacttaccgatagtcagattgccgatgtggcaaggttttgcaataggtatcccaatatcgagcttagttacgaggttgtggataaggactcaatacgcagcggcggacctgtggtcgttctggtgcagttggagcgcgaggaagaagtaactgggccagtgatcgcaccattattcccgcagtttagggcaggtagaagcgggagccggctgtag

SEQ ID NO: 240783 - DNA, 1788 bp, synthetic construct
  misc_feature 1..1788: note = Description of Artificial Sequence: Synthetic coding sequence
  source 1..1788: mol_type = other DNA
atggccaaaccagtctatcatgctattacaaaacatagtcccaaaaagccagttatcgtgtttgtacccagccggaagcagacccgcctgaccgccattgatatcttgaccacctgtgccgcagatatccagagacagcggtttctgcactgcaccgagaaggatcttatcccttatcttgaaaaattgtctgattcaacactgaaggaaacgctcctcaacggagttgggtacctacacgaaggactgtcccctatggagcggaggttagttgagcagctgtttagctctggagccatccaggtggttgtggcctcccgtagcctctgttgggggatgaatgtagccgctcatctcgtcatcattatggacacccagtactacaatgggaagattcatgcttatgtggattatcccatatacgacgtgctgcaaatggtgggtcacgccaatcggccacttcaggacgatgaaggcaggtgtgtcatcatgtgtcagggctctaagaaggattttttcaagaagttcctgtacgaacctctgcccgtggaaagccatctggatcattgcatgcatgaccacttcaacgcagagatagtcactaagaccatcgagaacaagcaagatgcagtggactacttaacctggactttcctctacaggcgcatgactcagaatcccaattactacaacctgcagggaattagccataggcatctctcggaccacctgagcgagctggttgaacagaccttgagtgatttggaacagagcaagtgtatcagtattgaagatgagatggatgtggctcccctgaatctcggtatgatcgccgcatactattatatcaattatacaaccatcgaactgttttcgatgagcctgaacgcaaagactaaggtaaggggactcatcgaaattatctccaatgctgccgagtacgaaaatattcccattcgccaccatgaggataaccttctgagacagctggctcagaaggttccccataaactcaacaaccctaagtttaatgatccccacgtcaaaacaaacctgctgctgcaggcacatctgagcaggatgcaactgagcgcggaactgcagtctgatacggaggagattctgagtaaggctattcggctcattcaggcttgcgttgatgtgctgtcatctaatggatggctgtctccagccctggccgctatggaattggcccaaatggtaacacaggctatgtggtctaaagactcttatcttaaacagcttccgcatttcacttctgagcacattaaaaggtgcaccgataagggcgtggagtctgtgttcgatatcatggagatggaagacgaggagcggaacgcccttcttcaacttacagattcccagatcgccgacgtggcacggttttgcaataggtaccctaacattgagctttcctatgaagtggtggacaaggatagtatccgtagcgggggacccgtagtggtgctcgtccagctggagcgggaggaggaggtgacaggccctgtgattgcgccactgttcccacagaagcgggaggagggctggtgggtggtgatcggagatgcaaagtcaaacagtctcatctccatcaagaggctcaccctgcagcagaaggcgaaggttaagttggatttcgtcgccccagccacaggtgcccataactataccctgtatttcatgtccgatgcttatatggggtgcgatcaggagtacaaattttctgtagacgtcaaggaggctgagaccgatagcgatagcgactag

SEQ ID NO: 240784 - DNA, 2325 bp, synthetic construct
  misc_feature 1..2325: note = Description of Artificial Sequence: Synthetic coding sequence
  source 1..2325: mol_type = other DNA
atgatgatattatattgcaccctcctggccagcgctcagagcgaggcagaaaaggagcgcattatggggaagatggaagctgacccagagctgagcaagtttctgtaccagcttcacgagaccgagaaggaggacctgatccgggaggagcggtcaaggcgagagagagtgcggcagagcagaatggacaccgatcttgaaacgatggacctggatcagggaggggaggctttggccccacggcaagtactggacctggaagatctggtctttacacagggatctcatttcatggcaaataagcgctgccagcttcccgatggctcctttagacgccaacggaaaggatacgaggaagtgcacgtccctgccctcaagcccaagcccttcggtagtgaggaacaactgttgcctgtggagaagttgcctaagtacgcccaggctggctttgaagggttcaagactttaaacaggatccaatcaaagttgtacagggcggctctggagactgatgaaaaccttcttctttgcgcccctaccggagcaggtaagaccaatgtggcgctgatgtgtatgctgcgggagatcggcaagcatatcaatatggacggcactatcaacgttgatgacttcaagattatttacatagcgccaatgcgctctctggtccaggagatggtgggcagcttcgggaagcgactggccacttacggcattaccgtcgccgagttgactggcgatcaccagctctgcaaggaggaaatcagcgctacccagataattgtctgcacgccagagaagtgggatatcatcacccggaaggggggtgagagaacgtatacgcagctggtgcgcttaattatcctggatgagatccatctcctgcacgacgaccggggacctgttctcgaagccttagtggctagagctattaggaatatcgagatgacacaggaggacgtccgactgatcggactgagtgctaccctcccaaactacgaagatgtcgccacatttctgagggtcgacccggctaagggacttttttactttgacaacagtttcaggccagtcccactagaacagacatacgtagggatcacagagaagaaagctattaaacgctttcaaattatgaacgagatcgtgtacgagaaaataatggaacatgccggtaaaaatcaagtgctggtcttcgttcactcacgaaaagagactggcaaaactgccagagctataagggacatgtgcctggaaaaagataccttaggcttattcctccgcgaggggtcagcatccacagaggtcctcaggactgaagctgagcaatgtaagaacctcgaattgaaggatctgctgccttatgggtttgccattcaccacgctggaatgacccgagtggatagaacattggttgaggatctctttgccgacaagcacatccaggtcctggtaagcacggctaccctagcttggggagtgaacctgcctgcccataccgtgatcattaagggaacacaagtctactcacccgagaaggggaggtggaccgagctgggagccctggacatcctccaaatgctcgggagggccggaagaccccagtacgacactaagggcgagggcatcttgatcacttcccatggcgagcttcagtattacctgtcacttctgaatcagcagctccccattgaaagccagatggtctctaagctgccagatatgctgaatgctgagattgttctggggaacgtgcagaacgccaaagatgcagtcaactggctaggctacgcctacctttatatacggatgctgagatccccaacactgtatggaattagccatgatgacctgaagggggatcctctgcttgatcaacgccgtttagacctcgtgcacactgccgctcttatgctcgacaagaacaatctggtgaaatatgataagaagacaggaaactttcaagtcaccgagttaggaaggattgcatctcactactacataactaacgacactgtgcagacctataatcagctgcttaaaccaactctgtcagagatcgaactgttccgcgtgttttccctatcgagtgaattcaaaaacatcaccgtgagggaggaggagaagctagagttgcaaaagttgctcgaaagagtccctattcctgtgaaggagtcaattgaggaaccatctgccaagatcaatgtgttgctgcaggcgttcatctctcagctcaaactggaaggattcgccttgatggcagacatggtttatgtgacacaatccgctggacgcctgatgagagcaatcctgaagctgtcttag

SEQ ID NO: 240785 - DNA, 2160 bp, synthetic construct
  misc_feature 1..2160: note = Description of Artificial Sequence: Synthetic coding sequence
  source 1..2160: mol_type = other DNA
atgctgcttcaaagcagcgagggaagatgtgtttatattacccccatggaagcactggctgagcaggtgtacatggactggtacgaaaagttccaggatcggctcaataaaaaagtggttctcctgaccggggaaaatggccctgtgttggaggtgatttgcagcagaatgcgctacattagctcacagatagaaagacctatccgaatcgtggcactcagctcaagtctgtctaatgctaaggatgtggcccactggctgggatgttccgccacttctactttcaatttccaccccaacgtgaggccggtgcctttagagctgcatattcagggatttaatattagtcatacacagactaggctcctttctatggccaagcctgtctatcacgcaatcacgaagcactcccctaagaagccggtgatagttttcgtcccatctagaaaacagactcgcctgaccgctattgatatcctgactacatgcgccgctgacatccagcgccaacgattcttacattgcaccgagaaggatctcattccctatctcgaaaagctttccgattctactctgaaagaaactctcctgaatggcgtagggtacctgcacgagggactgtcccctatggaacgaaggctggtcgagcagctgttcagctccggagctatccaggtcgttgtggcaagcaggtcactgtgctggggtatgaatgtcgctgcccacctcgtgataatcatggacacgcagtactataatgggaaaatccacgcctacgtggactacccaatttacgacgttctgcaaatggtgggccatgccaataggcctttgcaggacgacgagggcagatgcgtgatcatgtgccaaggaagcaaaaaggatttcttcaaaaagtttttatacgagcctctgcctgtggagtctcacctcgatcactgcatgcatgatcattttaatgccgagatcgttacaaagaccatcgagaataaacaagacgccgtagattacctgacatggacttttctgtatcggagaatgactcagaaccccaattactacaatctccagggaatctctcatagacacctgtccgaccacttgtcagagctggttgaacagacgttgagtgacctggagcagagcaagtgcattagtatagaagatgaaatggacgtcgcccctcttaacctcggcatgatcgctgcctactactacatcaattatacaactatcgaactgttcagcatgtcattgaacgccaagacgaaagtcagagggttaattgagataatcagcaacgcggcagagtacgaaaatatcccgattaggcatcacgaagacaacctcctgagacaactggcccaaaaagtaccccataagctgaataacccaaaattcaatgacccgcacgtaaagactaaccttttgttacaggcccatctttcgcggatgcaactctcagcggagctgcagagcgacacagaggagatactgtctaaggccatccgcctcatccaggcctgcgtcgatgtattatcaagcaacggttggctgagtccagcccttgccgctatggagttggcacagatggtcacacaggcaatgtggagtaaagactcgtacctcaaacagcttccacactttactagcgaacatatcaaacggtgcactgataaaggggtggagagcgtgtttgacatcatggagatggaggatgaggagagaaatgcactgctgcagctcaccgatagccaaattgcagacgtcgcacgcttctgcaaccgctaccccaatatcgaattgagttacgaagttgtggacaaagatagtatcagatcaggcggtccggtcgtggttctcgtccagttggagcgagaagaagaggtgaccgggcctgtgattgcacctctgttccctcagaaaagagaggaaggttggtgggtcgtgataggcgacgcgaaaagtaacagcctcatctccatcaagcggcttaccctgcagcaaaaagcaaaagtaaagctagacttcgtcgcacctgctactggggcacataattatactttatattttatgtcagacgcctatatgggctgcgaccaggagtataaattttctgtagatgttaaagaagcagagacagacagtgattcagactag

SEQ ID NO: 240786 - DNA, 1074 bp, synthetic construct
  misc_feature 1..1074: note = Description of Artificial Sequence: Synthetic coding sequence
  source 1..1074: mol_type = other DNA
atgatagaacagcagaagcgaaaaggacccgagctgcctctggtcccggttaagaggcagagacatgaactgttgctgggcgctgggtccggtccaggcgctggtcaacagcaagcaacccccggagcactgctccaggctggccctcctcggtgctcatcgctgcaggcgcctataatgcttctgtctgggcacgagggggaagtttactgttgcaaattccaccccaacggttcaacattggcatcagctggcttcgaccgactgatactcttatggaatgtgtatggcgactgcgataattatgccaccctcaagggccatagcggggcagtcatggaactgcattataatacagacggaagcatgttgtttagcgcaagtaccgacaaaactgtggctgtgtgggactcagaaaccggagagagagtgaaacgactgaagggacatacatcattcgtgaactcttgctacccagccaggaggggccctcagctcgtatgcacgggctctgacgacggtaccgtgaagctatgggatatccgcaaaaaggccgcaattcagacctttcagaacacttatcaggtccttgcggtgacatttaacgacacatccgaccagatcatctcgggaggaatcgataatgacatcaaggtttgggatctgcgccagaataaactgacttacacaatgcgcggtcacgctgattccgtcaccggactatcattgtcctcagagggttcgtacctgctgtccaacgcaatggataatacggtgagagtctgggatgtgcgccctttcgccccaaaagagcggtgcgtgaaaatattccagggaaatgtccataacttcgagaagaacctacttaggtgctcttggagccccgacggatctaaaatcgccgcaggttctgcagatcgtttcgtctacgtctgggacaccacctctcggaggatactgtataaactacctggacatgccggatctattaacgaagtggccttccatcctgacgagcctattattatctctgcgtccagtgacaagcggctctatatgggagagatacagtag

SEQ ID NO: 240787 - DNA, 384 bp, synthetic construct
  misc_feature 1..384: note = Description of Artificial Sequence: Synthetic coding sequence
  source 1..384: mol_type = other DNA
atgatcctcatatccgccggatgccccggtggcctatggcctattgtggtactggtcggcctgttcatttggatctgctttgctgtcagagtgtgggatgttcgaccctttgcgccaaaggagagatgcgtgaaaatctttcaaggaaatgttcacaacttcgaaaagaacctattgcgatgctcttggtctccggacggtagcaaaattgctgcaggatctgctgaccggtttgtttacgtgtgggacacaacttcacgaagaattttatacaaactacctggacatgccggaagtataaacgaagtggcctttcatcccgatgaaccaattatcatatccgcttcttcagacaaacggttatacatgggagagattcagtag

SEQ ID NO: 240788 - DNA, 1230 bp, synthetic construct
  misc_feature 1..1230: note = Description of Artificial Sequence: Synthetic coding sequence
  source 1..1230: mol_type = other DNA
atgattgagcagcaaaaacgcaaagggcctgagctgccattggtgccggtgaagagacagcgccacgaactcttgctgggcgctggatccggacccggagcagggcagcagcaggcgacccctggggcactgctgcaggcaggtccccctcgttgcagctccctgcaggcacccataatgctgctttcagggcacgaaggcgaggtatattgttgtaagtttcaccctaatggatctacactcgccagcgccggttttgatcgtctgatcctgctgtggaacgtatatggagactgcgacaactatgctaccttgaagggacacagtggtgcagtgatggaattgcactacaataccgacggttccatgctgttttcagctagtacagacaagacagtcgccgtctgggactccgaaacaggtgagcgggtgaagagactgaaaggccacacttcatttgtcaacagttgctatccagcccgtagaggtcctcagctggtgtgcacaggatccgatgacggcaccgtcaagctgtgggacattcggaaaaaagcagcaattcagacctttcagaacacctatcaggtgcttgcagtgacgtttaacgatacttccgatcaaatcattagtggcggaatcgacaatgacatcaaagtgtgggatcttcggcagaacaaactcacgtacaccatgcgcggacacgccgatagcgtcactggcctgagtctgtcctcagaggggagctacctgctcagcaatgccatggataacaccgtcagagtgtgggatgtacggcctttcgcccctaaggagcgatgcgttaagatcttccaggggaacgtgcataactttgagaagaatctcctaagatgctcatggtctcctgacggatccaagatagccgcaggttcagccgacagatttgtgtatgtatgggatacgacatcacggaggattctctacaagctccctggccacgccggaagcatcaacgaggttgcctttcacccagatgagcctatcattgaaacaggatttcaccggatcgggcaggggggtcatgagctgctgacttcgagcaacccacccgcttcagccagccagtccgcgggaataacaggggtgtcccactgtgcccagcttcagacggtattcatgtgggttagcatgtcggtgtccccgctgctaattagcggcgaatcaaagagcaatgccccattctcttcctag

SEQ ID NO: 240789 - DNA, 849 bp, synthetic construct
  misc_feature 1..849: note = Description of Artificial Sequence: Synthetic coding sequence
  source 1..849: mol_type = other DNA
atggcagtccctgagacccgccctaaccacacaatttatattaacaatctgaatgagaaaatcaagaaggacgaactaaaaaaatcgttgtacgccattttctctcagtttggtcagatcctggacattctggtctcacggtcactcaaaatgagaggacaagcttttgtgattttcaaagaggtttctagcgccacgaatgcactaagaagcatgcagggtttccccttctacgacaaacccatgcggatacagtacgcgaagactgactctgatatcatcgccaagatgaagggtacctttgttgaaagggaccgaaagagggaaaagaggaagccaaaatctcaggaaacccctgctaccaaaaaggctgtgcaggggggtggggctactccagtcgtgggagctgttcagggcccagtgcccggaatgccacctatgacccaagcccctaggatcatgcaccatatgcccggtcagccaccatacatgcctcctccaggcatgataccgcctccgggactggcaccagggcaaatcccgccaggggcaatgcccccacaacagctcatgcccggtcagatgccccctgctcagccattaagcgagaatccacccaaccacattctctttcttactaatctgccagaggaaactaacgaactgatgttaagcatgctcttcaatcagtttcccggattcaaagaagtgcgattggttccaggccgtcacgacattgcctttgttgagtttgataatgaagttcaagctggcgctgccagagacgcgctgcaaggctttaaaataactcaaaataacgctatgaaaatcagcttcgctaagaagtag

SEQ ID NO: 240790 - DNA, 612 bp, synthetic construct
  misc_feature 1..612: note = Description of Artificial Sequence: Synthetic coding sequence
  source 1..612: mol_type = other DNA
atggccgtgcccgagactcggccaaaccatacaatctatattatcgccaagatgaaggggacattcgtggaacgagaccgcaaaagagagaaacgtaagcctaagtctcaggagacccctgctactaagaaagccgtgcagggagggggtgctactccagtggtaggcgcagtgcaggggcctgtgcctggcatgcccccaatgacccaagcccctaggattatgcatcatatgcccggacaacccccatacatgcctcccccaggaatgatacccccacctggtctggctccaggccaaattccccctggtgcaatgccaccgcagcagctgatgccaggacagatgcctccagctcagcccctttccgagaaccctccaaaccacattctcttccttacgaatttgcctgaggaaaccaacgaactgatgctgtcaatgctgttcaatcagttcccagggttcaaggaggttcgactggtgccaggtcgtcatgacatcgcttttgtggaatttgacaacgaagtgcaagctggcgctgccagagacgcactgcaaggattcaaaataacgcagaacaatgcaatgaagatctcttttgcgaagaaatag

SEQ ID NO: 240791 - DNA, 768 bp, synthetic construct
  misc_feature 1..768: note = Description of Artificial Sequence: Synthetic coding sequence
  source 1..768: mol_type = other DNA
atggtcaaactgacagccgagctgatcgagcaagcagcccagtacactaacgctgttcgcgaccgggagctggatttgagaggatataagattcctgttatcgaaaacttaggggctactttggatcagtttgatgccattgacttttctgataatgaaattcggaagttagacggattccctctgctcaggagactcaagaccttattggtaaacaataaccgcatctgtcgcattggcgagggactggaccaggctctaccctgcctaactgaattgatcttgaccaataatagcttggtggagctgggcgacctggacccattggccagcctgaaatccctgacctatttaagcatcttaagaaatcccgtgaccaataagaagcactaccgcctttacgtgatctacaaagtgccacaggtccgggtgttagatttccagaaggtaaagctgaaagagcggcaggaagcagaaaagatgttcaagggaaagcgaggagctcagctagccaaggacatcgccagacggagtaaaacattcaatcctggagcaggcttgcctacagacaagaagaagggaggtccaagccctggcgacgttgaggcaattaagaacgccattgccaacgcctctacccttgcagaagtcgagaggctgaaaggtctgctgcagagtggccagatccccggtcgggaacgcagaagcggcccaaccgatgatggtgaggaagagatggaagaggatactgtcacgaacggtagttag

SEQ ID NO: 240792 - DNA, 480 bp, synthetic construct
  misc_feature 1..480: note = Description of Artificial Sequence: Synthetic coding sequence
  source 1..480: mol_type = other DNA
atgccaaagttctattgcgactattgcgatacctacttgacccacgactcaccttcagtgaggaagacccactgttcgggccgaaaacacaaggagaacgtaaaagattattatcagaaatggatggaagagcaggcacaatccctcattgacaaaactacggcagctttccagcagggaaaaatccccccaacaccatttagcgcccctccccctgccggtgccatgattccacctccaccttctctgccaggcccaccacggccagggatgatgcccgctccacacatgggcggaccacctatgatgcccatgatgggaccgcctccgccaggcatgatgcctgttggacccgcacccggaatgcggccacctatgggcggacatatgccaatgatgccaggtcccccaatgatgcgaccaccagctaggccgatgatggtgccaacccggcctggaatgactcggcctgacagatag

SEQ ID NO: 240793 - DNA, 543 bp, synthetic construct
  misc_feature 1..543: note = Description of Artificial Sequence: Synthetic coding sequence
  source 1..543: mol_type = other DNA
atgaacagcgctagtgttgatggacacctttctggctgccggctattcttgttcctttctccattgtttcgattttattgcgactactgcgatacatatctcacccatgacagtccgtccgtccggaagacgcattgctctgggagaaagcacaaagaaaacgttaaggattactatcagaagtggatggaggagcaggctcaatctctgatcgacaaaaccacagctgcttttcagcagggtaagatcccccctacccccttctctgctccaccacccgctggagcaatgatccccccaccgccaagtctgcctggcccacctaggcccggaatgatgcctgccccacacatggggggacctcctatgatgcctatgatggggcctcctccgcctgggatgatgccggttgggccagcccctggcatgcgtcccccaatggggggtcacatgcctatgatgcccggaccaccaatgatgcgacccccagcaaggcctatgatggtacccacaaggcccggaatgaccaggccggataggtag

SEQ ID NO: 240794 - DNA, 357 bp, synthetic construct
  misc_feature 1..357: note = Description of Artificial Sequence: Synthetic coding sequence
  source 1..357: mol_type = other DNA
atggaggaacaggcgcagtccctgatcgacaaaacgacagctgctttccaacagggaaagatacctcccacccccttttccgcccctccaccagctggtgctatgatccccccaccccctagtctgccgggacccccaagaccaggtatgatgccagccccacacatgggagggccacccatgatgcccatgatgggacctccacctccagggatgatgcctgttggtccagcacccggaatgcgccctcctatggggggacacatgcctatgatgccaggaccacccatgatgagaccgccagccaggccgatgatggtaccaacacggccaggcatgacacgacccgataggtag

SEQ ID NO: 240795 - DNA, 159 bp, synthetic construct
  misc_feature 1..159: note = Description of Artificial Sequence: Synthetic coding sequence
  source 1..159: mol_type = other DNA
atgcgcattgagggttgcattattgggtttgacgagtacatgaatctagttctcgatgatgccgaggagattcattcaaaaaccaagtccaggaagcaactcggcaggatcatgttgaagggagacaatattacactcttacagtccgtgtcaaactag

SEQ ID NO: 240796 - DNA, 279 bp, synthetic construct
  misc_feature 1..279: note = Description of Artificial Sequence: Synthetic coding sequence
  source 1..279: mol_type = other DNA
atggcataccggggacagggacagaaagtgcaaaaagttatggttcagcctattaatctcatctttcggtatttgcagaaccgatcccgcatacaggtgtggttgtacgaacaggtgaacatgcgtatcgaaggttgcattattgggttcgacgagtacatgaacttggtgctggatgatgcagaagagattcatagtaagacaaaatcacgcaagcagctgggaagaattatgctgaagggggacaacatcaccctgctgcagtcagtctctaactag

SEQ ID NO: 240797 - DNA, 723 bp, synthetic construct
  misc_feature 1..723: note = Description of Artificial Sequence: Synthetic coding sequence
  source 1..723: mol_type = other DNA
atgacagtggggaagtctagtaagatgttacaacatattgactaccggatgcgttgtatcctgcaagatggacgaatattcattggaactttcaaagcgttcgataagcatatgaaccttattctctgcgactgcgatgaatttcggaagatcaagcccaagaatgccaagcagcctgagagggaagaaaaacgggttctcggacttgtgcttttgaggggagagaatctggtaagcatgactgtcgagggacctccgcctaaggacacaggaatcgcccgtgtgccactcgccggtgcagccggaggtccgggagtgggaagggccgcaggccgtggagttcctgcgggagtgcccattccacaggcccctgccggtctcgcgggaccagttcggggtgtgggcggtccgtcacagcaagtcatgacaccacagggaagaggaacagtcgcggctgcggctgtcgcagccacagctagtatcgcaggagcgcctacacagtacccccctggaaggggtaccccgcctccacccgtcggccgagctacccctccccctgggattatggcccctccaccgggaatgcgtccaccaatgggccctcccataggtctgcccccagcacgcggaacccccattgggatgcccccacccggaatgaggccacctcctcccggaattaggggcccaccccctcccggaatgcggccacccagaccatag

SEQ ID NO: 240798 - DNA, 723 bp, synthetic construct
  misc_feature 1..723: note = Description of Artificial Sequence: Synthetic coding sequence
  source 1..723: mol_type = other DNA
atgaccgtcggcaagagcagcaaaatgctgcagcacattgactatcggatgcgttgtatactacaggacggccgaatttttattggcaccttcaaagcttttgataagcacatgaatttaatcctgtgcgactgtgatgagttccggaagatcaaacctaagaatgccaaacagccagaaagggaagagaagcgtgtcctcgggctagtccttctcagaggtgaaaacctcgtgtccatgactgtcgagggccctcctccaaaggacactggcattgccagagtgcctctcgcaggcgctgccggaggcccaggtgttgggcgtgcagctgggaggggcgtgcccgctggcgttcccataccacaggctcctgctggacttgctggccctgtgcgtggcgttgggggtccttcgcagcaggtgatgaccccccaaggacggggaacggtagcagctgccgctgtcgctgcaacggctagcattgcgggagcaccaacccagtaccctccgggaagaggcacgccgcctcctcctgttggcagggcgaccccgccaccaggtattatggcacctccccctgggatgagaccaccaatgggcccacctataggtctccctcccgctaggggaactcctatcggaatgcctcctccgggaatgagaccaccccctccaggcattagaggccctccaccacctgggatgaggcctccaagaccttag

SEQ ID NO: 240799 - DNA, 723 bp, synthetic construct
  misc_feature 1..723: note = Description of Artificial Sequence: Synthetic coding sequence
  source 1..723: mol_type = other DNA
atgaccgtcggcaagtcaagcaaaatgctgcagcacattgactacagaatgagatgtattctccaggacggcaggatttttatcggaacattcaaggccttcgataaacacatgaacctaatcctttgtgactgtgatgagttcaggaaaatcaagccgaagaatgccaaacagccggaaagggaggagaaaagggtgctgggacttgtacttctacggggagagaatctggtgtccatgactgtggagggaccccctccaaaagacacaggtatcgccagagtgccattggctggcgctgcaggcggaccaggtgtgggaagagctgccggtaggggcgttccggctggagtccctatcccgcaagcccctgccggactggccggaccagtcaggggtgttgggggtccttctcagcaagtgatgaccccacaggggagggggactgtggccgctgccgcagttgccgcaacggcgagtattgctggggctcccacacaataccctcccggacgtggcacaccccctcctcctgttggaagagctacccccccacctggaattatggcaccaccacccggtatgcgccctccaatgggccctcccataggactgccaccagcacgcggaacccctattggtatgccgcctcctgggatgcggcctccaccacctggcatcagggggccaccccctcctggcatgagacccccaagaccttag

SEQ ID NO: 240800 - DNA, 723 bp, synthetic construct
  misc_feature 1..723: note = Description of Artificial Sequence: Synthetic coding sequence
  source 1..723: mol_type = other DNA
atgacagtaggcaaatcaagcaagatgctacagcatatcgattaccggatgcgatgtatcctgcaagatggcaggattttcattggtacgtttaaagccttcgataaacacatgaatctcatcctctgtgattgcgacgaattccgtaaaatcaaacctaagaacgccaagcaaccggagcgcgaggaaaaaagagtgctgggcctggtgttgctccggggtgagaatctggtgtctatgaccgtggaaggtcccccacccaaggatactgggatcgcccgtgtccctctggctggtgccgctggaggaccaggcgtggggagggcagcgggtcggggagtcccagccggtgtccctatcccccaggcccctgcaggcctggccggacccgtgcgtggcgtgggtgggccttctcaacaggtgatgacaccgcagggccgagggactgtggcagcagctgccgtggctgcgactgcctccatcgctggggcaccgactcagtacccacccggacgtgggactcctcccccacctgtcggacgggctactcctccacccggaattatggctcctccacccggtatgcggccaccaatgggcccacccattggcttgccgccagcacggggtacccctattggaatgccacccccagggatgaggccaccaccgcctggcatcagaggtccccctccgccaggaatgaggccaccgagaccttag

SEQ ID NO: 240801 - DNA, 735 bp, synthetic construct
  misc_feature 1..735: note = Description of Artificial Sequence: Synthetic coding sequence
  source 1..735: mol_type = other DNA
atgatggattctcagactgtcgggaagagcagtaagatgttacagcacattgattaccgaatgagatgcattcttcaggacggcagaatctttataggcaccttcaaggcatttgacaaacacatgaacctgatcctgtgcgattgtgatgaattcagaaaaattaagccaaaaaacgctaagcaaccggagagggaagagaagagagtcctcggcctggtattgctgaggggcgagaacttagtgagcatgactgtagagggtccgcctcctaaggatacaggcatagcgagggtgcccttggcaggagcagctgggggacccggagtgggcagagcagcaggacgcggtgtccctgccggagtaccaataccccaagccccagcaggccttgctggtcccgttaggggcgtcggaggtcctagccagcaggtgatgacccctcagggcagagggacagtagctgccgcagcagtggctgccaccgcctccatcgcgggagctcctacccaatacccacccggtcgcggaactcctccaccacccgtcgggagggcaacaccccctccagggataatggcgcctcctccaggcatgagacccccaatgggaccacctattggcctcccccctgctcgagggactcccattggtatgccccctccagggatgcgtcccccaccccctggcattagaggcccaccacccccaggtatgcgcccacccaggccctag

SEQ ID NO: 240802 - DNA, 945 bp, synthetic construct
  misc_feature 1..945: note = Description of Artificial Sequence: Synthetic coding sequence
  source 1..945: mol_type = other DNA
atgtctcgtgtgccagccttcctttcagctgcagaagtcgaggagcatctgagatcatctagccttttaatcccccctctagagactgcccttgccaatttctcaagcgggcctgagggtggggttatgcagcccgtaagaacagtggttcctgtgacaaagcaccgagggtaccttggagtgatgcccgcatatagcgcagccgaggacgcactgactacaaaacttgtgacattctacgaggaccgaggtattaccagcgttgtccctagccaccaggctacggtgctactcttcgaaccctccaatggtacactgctggcagtgatggatggaaacgttatcacagctaaacgaaccgcagccgtgtctgccatcgccactaagtttctaaaaccccctagcagcgaagtgctttgtatactgggtgccggtgtgcaggcctattctcactacgaaatttttactgaacagttttctttcaaggaggtgcggatctggaatcgcacaaaggaaaacgcagaaaagtttgcagatactgtgcaaggtgaggtgcgggtgtgctcatctgtacaggaagccgtcgctggcgcagacgtaattattacggtgacgctggccactgagcctatactatttggggagtgggtgaagcctggcgctcacattaacgctgtgggcgcatcacggcctgattggcgcgagctggatgatgagctcatgaaggaggcagtgttgtatgttgactctcaggaggccgctctcaaggagtctggggacgttctgctgagcggagcagaaatttttgcagagcttggcgaagtaataaaaggagtcaagcctgcccattgcgagaaaacgacagtttttaagtcccttggtatggcggtggaagatacagtcgccgcaaagctgatctacgactcttggtcctcaggcaaatag

SEQ ID NO: 240803 - DNA, 1248 bp, synthetic construct
  misc_feature 1..1248: note = Description of Artificial Sequence: Synthetic coding sequence
  source 1..1248: mol_type = other DNA
atggctaccgtgggagaatggagctgcgtccgatgcacatttcttaatcccgcaggtcagcggcaatgctctatctgtgaagctccacgccacaaaccagatttgaatcacattctgaggcttagcgtggaagagcagaagtggccctgcgctagatgcacctttagaaattttctaggtaaggaggcatgcgaagtgtgcggcttcaccccggaaccggctcccggtgccgctttcttaccggtcctgaacggcgtgttgccaaaacccccagcaatcctgggagagcctaagggatcgtgtcaggaggaagcaggtcctgttcgcacagctgggctggtcgctactgaacctgcacgcggacaatgtgaggataaagacgaagaagagaaggaagagcaggaagaagaggagggggcagctgagccgaggggcggatgggcctgcccgagatgtacactccacaatacacccgtcgcttcctcatgcagtgtgtgcgggggtccgaggcgcctgtcgttaccacgcatccctcccgaggcccttgtcgtacccgaagtggtggcccctgctggcttccacgtggtgcccgctgccccaccccctgggcttcccggtgagggtgccgaggcgaatcccccagctactagccagggtcctgcagcggagcctgagcctcctcgggtgccaccattcagccctttttcctccaccctgcagaacaacccagtgcccaggagtaggagagaggtgccaccacagctccaacctccagttccagaagcagctcaaccctccccctccgctgggtgccggggagcccctcagggtagcggctgggccggagcttcgaggttggcagaacttctctctgggaaaaggttaagtgtgctcgaagaagaggccactgaggggggaactagccgcgttgaggcgggttcgtcaacatcaggttctgatattatcgacttagcaggggatactgtgaggtacacccccgcttcacctagctctcccgatttcaccacttggagctgtgccaaatgtacactacggaaccccagcccaccatcactgcagcccctcggcaggggcccagagtccctgccaagagccgcaggacccagggctgggtgtgtgcagttggaggcgggtcatgggggtgcacgcggaagccctgcagaccatgcgggaagacgtcatcatccggcacatagagagccacggcgtgccgcaagaggcccttag

SEQ ID NO: 240804 - DNA, 270 bp, synthetic construct
  misc_feature 1..270: note = Description of Artificial Sequence: Synthetic coding sequence
  source 1..270: mol_type = other DNA
atgtcctcccaacagcagaaacagccttgcacacccccaccccagctgcagcagcagcaagtaaaacagccttgccagccgccaccccaggagccttgcatccccaagacgaaggaaccctgccacccgaaagtgcctgagccgtgtcaccctaaagttccagagccctgtcagcccaaggtccccgagccatgtcatcccaaggtgccagagccatgcccatcaatagtgacccctgccccagcccagcaaaagacaaaacaaaaatag

SEQ ID NO: 240805 - DNA, 222 bp, synthetic construct
  misc_feature 1..222: note = Description of Artificial Sequence: Synthetic coding sequence
  source 1..222: mol_type = other DNA
atgtcctctcagcagcagaaacagccttgtaccccaccgcctcagttgcagcagcaacaggtcaaacagccttgccagcctccgccacaggaaccatgcattccaaagacaaaagagccatgtcaccctaaagtccctgaaccatgccaccctaaagtgcctgaaccatgcccatctattgtgactcccgctccagcccaacaaaagaccaagcagaagtag

SEQ ID NO: 240806 - DNA, 219 bp, synthetic construct
  misc_feature 1..219: note = Description of Artificial Sequence: Synthetic coding sequence
  source 1..219: mol_type = other DNA
atgagttatcagcagcagcagtgcaaacaaccttgtcaacctcctcccgtttgtcctaccccgaagtgtcccgaaccctgtccaccccctaagtgccctgagccgtgtcctccacctaagtgtccacagccatgtcccccacagcagtgccagcaaaaatacccccctgtgactccatccccaccatgccagagtaaataccctccgaaaagcaagtag

SEQ ID NO: 240807 - DNA, 219 bp, synthetic construct
  misc_feature 1..219: note = Description of Artificial Sequence: Synthetic coding sequence
  source 1..219: mol_type = other DNA
atgagttatcagcaacagcagtgcaaacagccttgccagccccctcccgtatgcccaacacctaagtgcccagagccttgccctccaccaaaatgcccagagccttgtccaccccctaagtgtccacagccctgcccccctcagcagtgtcagcagaaatatccgcctgtgacgcccagtccgccatgccagcccaagtaccctcccaagtctaaatag

SEQ ID NO: 240808 - DNA, 219 bp, synthetic construct
  misc_feature 1..219: note = Description of Artificial Sequence: Synthetic coding sequence
  source 1..219: mol_type = other DNA
atgtcctatcagcagcagcagtgtaagcagccgtgccagcccccaccagtgtgtcctactcctaaatgccccgagccatgcccccctcccaaatgcccagaaccttgccccccacccaagtgccctcagccttgccctccacaacagtgccagcaaaaatatccgccagtgaccccttcaccaccttgccaacctaaatatccgccaaaaagcaagtag

SEQ ID NO: 240809 - DNA, 219 bp, synthetic construct
  misc_feature 1..219: note = Description of Artificial Sequence: Synthetic coding sequence
  source 1..219: mol_type = other DNA
atgtcataccagcagcagcagtgtaagcagccctgccaaccaccgcctgtgtgtccaacgccaaagtgtccagaaccttgtccccctcctaagtgcccagagccctgtcctcctccaaagtgccctcagccatgtcctccacagcagtgtcaacaaaaataccctccagttaccccatctccaccatgtcaacctaagtatcctcccaaaagtaagtag

SEQ ID NO: 240810 - DNA, 510 bp, synthetic construct
  misc_feature 1..510: note = Description of Artificial Sequence: Synthetic coding sequence
  source 1..510: mol_type = other DNA
atgagcagctaccagcaaaagcagacattcacccctccaccacagctccagcagcagcaggtgaaacagccaagccagcctccccctcaggaaatcttcgtccccaccaccaaggagccttgtcattccaaagtcccccaacctgggaatacgaagatcccagagcctggttgcactaaagtgcctgaacctggctgcactaaagttcctgagccaggatgcaccaaggttcccgaacccggttgcactaaagtgcctgagcctggctgcacaaaggtccccgagcccggttgcaccaaagttcccgaaccaggctacaccaaagttcccgaaccagggtcaattaaagtgcctgatcaggggttcatcaagttccccgagccgggagccattaaggtgccggagcagggatataccaaggtgccagtccctggatacacgaagctgccggaaccgtgcccttccaccgtgacgcctggcccagcccagcaaaaaacaaaacaaaaatag

SEQ ID NO: 240811 - DNA, 510 bp, synthetic construct
  misc_feature 1..510: note = Description of Artificial Sequence: Synthetic coding sequence
  source 1..510: mol_type = other DNA
atgagctcttaccagcagaagcagacgttcactccgcctcctcagcttcaacagcagcaggttaaacagccttcacaaccccctccccaggaaatattcgtgcctaccactaaggaaccctgccattcgaaagtaccacagcctgggaataccaaaatccccgaaccaggctgcactaaggtacctgagccgggatgtaccaaagtgccggaacctgggtgcacaaaagtgccagagccaggctgcacaaaagtccctgagcccggttgtacaaaagtacccgagccagggtgcaccaaagtacccgagcctggttacaccaaggttcctgaacccggttcgatcaaagtgccagatcaaggttttatcaaattccccgaacccggtgctatcaaggtgccagagcagggctatacgaaggtgccagttcctggttataccaagctgcccgaaccctgccccagcacagtgacaccaggaccagctcagcagaaaacaaaacagaaatag

SEQ ID NO: 240812 - DNA, 480 bp, synthetic construct
  misc_feature 1..480: note = Description of Artificial Sequence: Synthetic coding sequence
  source 1..480: mol_type = other DNA
atgtccagttatcagcaaaagcagactttcactcctcccccacagctacagcagcagcaagtgaagcagccttctcagcccccacctcaagaaattttcgtgcccacgaccaaggaaccgtgtcactcgaaagtccctcagcccggaaacaccaagatccccgaaccaggatgtaccaaggtgccagagcccggatgtaccaaggttcccgagccagggtgcacaaaggtccccgagccaggttgtaccaaagttcccgagccagggtgtacaaaagtgcctgagccgggttgcaccaaagtgcctgaaccaggatacacgaaggttccggagcctggttctatcaaagtgccagaccaggggtttattaagttccccgaacccggagctatcaaggtacctgagcagggctatacaaaggtccccgtgcctggttacaccaagctcccagaaccttgccctagcacagtgactccttag

SEQ ID NO: 240813 - DNA, 486 bp, synthetic construct
  misc_feature 1..486: note = Description of Artificial Sequence: Synthetic coding sequence
  source 1..486: mol_type = other DNA
atgtcatcttaccagcaaaaacagacattcactcccccaccacagctgcagcagcaacaggtgaagcagccatcacagcctccgccacaggaaatctttgtgcccactacaaaggaaccatgccattctaaggtgcctcaacctggcaataccaagatcccagagcctgggtgtactaaggtgccagaacctggatgcaccaaagtgcctgagccaggctgtactaaagtgcctgaacccggatgtaccaaagtacccgaacccggatgtaccaaggtccctgaacccggatataccaaggtacctgagccaggtagcattaaggtcccagaccagggcttcattaagttcccggaacctggggcaatcaaggtccctgagcagggttacactaaggtcccagtacccggatacactaaactgcctgagccttgtccctctaccgtcaccccaggtccggctcaacagaagactaaacaaaagtag

SEQ ID NO: 240814 - DNA, 10989 bp, synthetic construct
  misc_feature 1..10989: note = Description of Artificial Sequence: Synthetic coding sequence
  source 1..10989: mol_type = other DNA
atgtcaaggcgagcacctgggtcccgcttgtctagtggcggtggtgggggtggcactaaataccccagatcttggaacgattggcagccaagaaccgacagcgcatctgccgatccggacaacctgaagtactctagttccagggacagggggggatctagcagctacggcttacaaccttcaaattctgccgtggtaagcaggcagagacacgatgacacccgggtgcatgccgacatccagaacgatgagaagggaggctattcggtcaacggcggaagcggagagaacacttatggaaggaagtcccttggccaagagctgcgggtcaataacgtgaccagccctgagtttacctcagtacagcacggctctagggcactggccactaaggatatgaggaaatctcaggaacggagcatgagctactccgatgagagccgcttgagcaacctgctgcgcagaatcacccgggaagacgacagagacaggcgattagctacggtaaagcagcttaaagagttcatccaacagccggagaacaaactggtgctcgtcaaacagcttgacaacattctggccgctgtccatgatgtccttaacgaatcatccaaactactgcaagagctgaggcaggaaggagcctgttgtctgggcctactgtgcgccagccttagctatgaagccgaaaaaatctttaaatggattttttcaaagttttcttcatctgcgaaggatgaagtgaaactgctgtatctgtgtgccacttacaaagcgctcgagaccgttggggaaaaaaaggcctttagctccgtgatgcaactagttatgacgtctctgcagtcaatactcgaaaacgtcgacacaccagaattactctgtaaatgtgtaaagtgtatactactggtggccaggtgctacccgcacatcttctcgacaaatttcagggatacagtggatatccttgttgggtggcacatcgaccacacacagaagccatctttaactcagcaggttagcggatggctgcaaagcctcgagccattttgggtggctgatttggcattctcaacaaccctactgggacagttcctcgaggacatggaggcttacgcagaggacctgtcgcatgtcgcttctggggagagtgtagacgaggacgtgccgccaccatcagtgtccttgcctaagcttgccgctctcctgcgtgtgttcagtaccgttgtcaggagtatcggagagcgcttctcccccatccgcggtccgcctataaccgaagcttatgtcacagacgtgctgtatcgcgttatgcgctgtgtgaccgccgctaaccaagttttcttcagcgaagccgtccttacagctgctaatgaatgcgttggggtccttcttggctccctcgacccatcgatgactatccactgtgacatggtgatcacgtacggactagaccagctcgagaactgtcagacatgcggcactgactacattataagcgtcttgaaccttttgactctgattgtggagcagataaatactaagttgccgagctctttcgtcgaaaaattgttcatcccttccagtaaattgctgtttcttcgataccataaagagaaagaggttgtcgcagtggcacacgcagtgtaccaggcagtcttatctctaaaaaacatccctgtcctcgagactgcatataaactgattctcggcgagatgacttgcgctctgaacaatctgctgcacagcctccagctgcctgaggcctgtagtgagattaaacacgaagcttttaaaaaccatgtgttcaatgtggacaatgctaagttcgttgttatttttgacctgagcgccctcaccacaatcggcaatgcaaagaattcgttgataggaatgtgggccctgtccccaacagtgttcgccttactttccaagaatctcatgattgtgcattccgaccttgcagttcattttccggcaattcagtatgctgtgctgtatactctctattctcattgcactcgccacgaccattttatttccagctctctgtcctcctcaagtccgtcgctctttgatggggcagtcatcagcacagtaacaactgcgacaaaaaagcactttagcattattctcaatctgctggggatactcctgaagaaggataacctgaaccaggacactagaaagctcctaatgacctgggcgctggaagcagctgtgcttatgaaaaaaagtgaaacctacgcgcctctgtttagtctgcccagtttccataaattttgtaaaggcctgctcgcaaacacgcttgtcgaggacgtgaatatctgcctgcaggcatgttcatccctgcacgccttgtcttctagcctccccgacgatctgctgcaacggtgcgtggatgtgtgccgagtgcagttggttcactctggcactcggatccgtcaggcatttggcaagcttctgaagtcaatccctctcgacgtcgtactgtctaataacaatcacacagaaattcaggaaataagcttggcactccgcagccacatgagcaaagcccctagtaacacgtttcatcctcaagacttcagcgatgtgatttcgttcattctttacggtaactcccatcgcactggaaaggataattggttggagagactcttttatagttgccaacggctcgataagcgcgaccagtccactatcccaaggaatctccttaagactgacgctgtcttgtggcagtgggccatatgggaggctgcacaatttacagtcctctcgaaacttcgaacaccactggggagagctcaggacactttccagaccatcgaaggcatcataaggtccctggctgcccacactctgaaccctgaccaggatgttagccagtggacgacggccgacaacgatgaaggtcacggcaataaccagttgcgactggtactcctgctccagtaccttgagaatctagaaaagctgatgtataacgcttatgaagggtgcgctaatgccttgacgtcccccccaaaagtcattagaaccttcttctacacgaatagacagacatgccaagactggcttacgaggatcaggctgtctattatgcgagtcggcctgctggctggtcagccggcagttactgtgcgacacggcttcgatctgttgacagagatgaagacaacatcactcagccagggtaatgagctggaggttaccatcatgatggttgtcgaagccctatgtgagctacattgccctgaggcgatccaagggatcgcagtgtggtctagtagtatcgtgggtaagaacctcttgtggattaactctgttgctcaacaagcagagggccgatttgagaaagcatctgtggagtaccaggagcacctgtgtgccatgacaggtgtggactgctgcatttccagctttgacaagtccgtgctgacgctcgctaacgctggcaggaactctgccagtcctaaacatagccttaatggtgaatcgagaaagactgtgttaagtaagcccacggacagttccccagaagtgataaattacctgggtaataaggcttgcgagtgttacatttccattgccgattgggccgctgtccaagaatggcagaatgcgattcacgatttgaagaaaagtacctcttcaacaagtctcaatctcaaggctgacttcaactatatcaagtccttgagttcgttcgaatcagggaagttcgtcgaatgtacagaacagctggagttacttcctggtgaaaatatcaacttgctggctgggggatctaaggaaaaaatcgatatgaagaagcttttacctaatatgctgagccctgacccacgggaactccagaagagcattgaggtgcagctcctcaggtcgtcggtgtgtctggcgaccgctctcaatcctatcgagcaagaccagaaatggcaaagtatcacagagaacgttgttaaatatcttaaacagacaagccgcatcgccatcggccctttgaggctgtctaccctcacagtgtcacagtcattacctgtgctctctacactgcaactgtactgtagctcagcacttgagaacactgtgagtaatagattatcaacagaggactgcctcatcccgctcttttcggaagcccttaggagctgtaaacagcacgatgtccgcccatggatgcaggctttaaggtacaccatgtatcagaaccaactccttgagaaaatcaaagagcagacagtacccatccgatcccatcttatggagctaggattaaccgctgccaaattcgcgagaaagagggggaacgtctcactggcaacccgactgttggcacagtgttcggaggtgcagcttggcaaaactacaaccgcacaagatctagtgcaacacttcaagaaactgtcaacacaggggcaagtcgatgaaaaatggggcccagagctggatattgaaaaaaccaaactgctgtacacagcagggcagagcactcatgccatggagatgctcagtagctgcgctattagcttctgcaaatctgttaaagctgagtacgccgtcgccaaaagtattctgactctggctaagtggattcaagcagaatggaaggagatctctggccagttgaaacaggtctaccgggctcagcatcagcaaaatttcactggactaagtacactgagcaaaaacatcctgacgctgattgagctgccctctgttaacactatggaggaagagtacccgaggatcgaaagtgagtcaacagtgcatatcggagtgggggagcccgactttatccttgggcagttgtatcatctgagttcagtacaggcccctgaggtcgcaaaatcttgggcggcactggccagctgggcttatagatggggtagaaaagtagtcgacaacgctagtcagggggaaggcgtgaggttactgccgcgagaaaagtctgaggtgcaaaatctattaccagacactatcactgaggaggaaaaagagaggatttacggtatcttaggacaggcggtatgccgccctgcgggtattcaagatgaggacatcacgctgcaaatcaccgaatccgaggataatgaagaggacgacatggtagacgtgatctggcggcaactcatctcttcctgtccttggttgtcagaactggatgagtcagccaccgaaggcgttattaaggtttggcgaaaagtggtggacagaattttttctctgtacaagttatcctgttccgcatacttcacctttctaaaactcaacgcaggacagattcctcttgatgaggacgacccaagactgcatctcagccaccgggtggaacagtcaactgatgacatgatcgtaatggctacgctgcgcctgctgaggttacttgtaaagcacgctggggaactgagacagtacttggaacatggactggagaccacccctactgcaccatggcgaggcataattcctcagcttttctcaagactcaaccaccctgaggtctacgtccggcaatctatatgcaatctcctgtgccgcgtggcacaggactctcctcaccttatcttgtacccggcaatagttgggaccatttctctgtctagcgaatcccaggcctccggtaataaattctccaccgccatcccgacactgcttggtaacatccaaggcgaagaattactcgtgtccgaatgtgaaggcggatcccctcccgcaagccaggacagcaacaaagacgaacccaaatccggcttaaacgaagaccaagccatgatgcaggattgctacagcaagattgtggataagctgtccagtgccaatccaaccatggtgctgcaggtgcagatgctcgtggccgagctgagacgtgtcacggtgctgtgggatgagctctggctcggagtgttactccagcagcatatgtacgttctgagaagaattcagcagttagaggatgaagtgaagagagtgcaaaataacaacacgctcaggaaagaagaaaagattgcgattatgagggagaaacatactgctctgatgaagccaatcgtttttgccttggagcatgtcagatccatcacagcggcaccagcggagaccccacacgagaaatggttccaagacaactatggggatgctatagaaaacgcactcgaaaaactaaagacccctcttaaccccgctaaaccaggctccagctggatacccttcaaggaaataatgctgagcctgcaacagagggcacaaaagcgcgcatcttatattttgaggcttgaagagatcagcccatggcttgctgccatgacaaacactgagattgcattgccaggagaggtttcagcccgagatactgtgacaatccacagcgtgggaggtaccattacgatactgccaaccaagacgaagccaaagaagcttctctttcttggaagcgatggcaaaagctacccttacctgttcaagggtcttgaggacctacacttagacgaacgcatcatgcaatttctgtcaatcgtgaacaccatgttcgcaaccataaaccgccaggagactcctcggttccatgcaaggcactattccgtgacacccctgggcacaagatccggcctcatccaatgggtggatggggcaacccctctgtttgggctctataagcggtggcagcagagggaggctgccttgcaagcccagaaagcccaggatagctaccagaccccccaaaatccaggcatagtgcctcgacctagcgaactctactattctaagattgggccagccttgaagacagtgggactgtccctggacgttagcagaagagactggccactgcacgtgatgaaagccgtgttggaggaattgatggaagccacccccccaaatttgctggccaaagaactctggtcctcttgcaccaccccagatgaatggtggagggtgacccaaagctacgctagatctacagccgtgatgtccatggtgggttacataatcggcttaggagatcggcacctggataatgtgctgatcgacatgacgacaggcgaggtggtacacatcgattataatgtatgcttcgagaaagggaaaagtctgcgggtcccagagaaggtgcccttccgcatgactcagaacattgaaaccgctctaggcgtgactggggtcgaaggggtattccggctatcatgcgaacaggttctacacattatgcgccgtgggagagagaccctactgaccctgctggaggcctttgtgtacgacccactggtcgattggacagcagggggtgaggcaggctttgcgggagctgtttacgggggtggaggtcagcaggcagagtccaagcagtctaaaagagagatggaacgagaaatcactaggtcactgttcagcagccgggtggcggagattaaggtcaactggtttaagaaccgggacgaaatgctcgtcgtgctccctaagcttgacggtagcctagacgagtatctcagtttacaagagcaattgaccgacgtagaaaaacttcaaggcaagctgctagaggaaattgagtttttagagggcgctgagggcgtggatcaccctagccacactctgcagcataggtactccgaacatacccagcttcagacacagcaaagagcggtccaggaggctatccaggttaagctgaatgagtttgaacaatggatcacccattaccaggcagccttcaataatttagaggctacacaactcgcctcactgctccaggagatcagtacacagatggatttggggccaccaagctatgtaccagccactgcattccttcagaacgccggacaggcacatctgataagtcagtgcgagcaactggagggagaggtgggtgccctccttcagcagagaagaagtgtacttcgtgggtgccttgaacaactgcatcactacgctaccgttgcgctgcagtatcctaaagcaatatttcagaaacataggatcgagcagtggaaaacctggatggaagagctcatctgcaataccaccgtcgaacgttgccaagaactctataggaagtacgagatgcaatatgctccccagccacctccgactgtgtgccagttcattaccgctaccgagatgacgctgcagcggtacgctgctgatatcaattctcggctgatacgacaggtcgagaggcttaagcaggaggctgttacggtccccgtgtgtgaagaccagctgaaggagatcgaacgctgcattaaagtgttcctgcacgaaaacggggaagaggggagtctatccttggccagcgtcatcatttctgcactgtgcactcttacgagacgtaatctcatgatggagggtgcggcatcatcagcgggagaacagctggtcgatctgacctcacgcgacggggcttggtttctggaggaactatgttcgatgagcggaaatgtaacatgcctcgtccagctgttgaaacagtgtcatctggtgccgcaggacttagatattcctaaccctatggaagcctcagagaccgtgcacttagcgaatggtgtatacacaagtcttcaggagctgaattcaaatttccggcagatcatcttcccagaggcgctgcggtgtttaatgaagggagagtataccctcgaatcaatgctgcacgagctggacggcctgatagagcagaccaccgatggggtcccgctccagacccttgtggaatctttacaggcatacctgcggaatgcggcaatgggccttgaagaggagacgcacgctcactacattgatgtggcacgtctgctgcacgcacagtacggagagctgattcagccaagaaacggctccgtggacgagacaccaaagatgtccgcaggccagatgctcctggtcgcgttcgacggtatgttcgcgcaagtggaaaccgcattttcactgttggtggagaagctgaacaagatggagattcccatcgcctggagaaaaatagatataatccgggaagccaggtctactcaggtgaactttttcgacgacgataatcaccgccaggtactggaggagattttctttcttaaaaggcttcagactattaaagagttcttcagactctgcggaactttttccaagaccctcagtggctccagctcactggaggaccagaatactgtgaacggtccggtccagattgttaacgtgaagacgttgttccggaattcgtgtttcagtgaggaccagatggccaagcccattaaagcatttacagctgattttgtgaggcaacttctcatcggcctgcccaaccaagctttgggacttactctatgttcttttatctctgcacttggtgtggatatcatcgcccaagtcgaggctaaggacttcggcgctgaaagcaaggtaagcgtggacgatctgtgcaagaaagccgtcgaacacaacattcagattggaaagttttcgcagctcgtcatgaatagagcgaccgtcctggcttccagctatgataccgcttggaagaagcacgacttggtgagacgtctggaaacttccatttcctcatgtaagacttccctccagcgcgtccaattgcacatcgccatgtttcagcaatggcagcatgaagatcttcttattaatcgtccccaggccatgagcgtgacaccaccccctcggtcagcaattctcacttcaatgaaaaaaaaactccatacgctctcgcagattgaaacgtccatagcaacagtgcaggaaaaactggccgcattggagtcctccatcgagcagcgcttgaagtgggccggaggtgcaaatccggctctggcccctgttctccaggatttcgaggcaacaattgccgagaggagaaatctcgtgctgaaggaaagccagagggctagccaggtgacttttctgtgctccaacataatccattttgaatccctgcggacccgaaccgccgaggccctgaaccttgatgcagcgctgttcgagctcataaagcgctgtcagcagatgtgcagctttgccagccagtttaactcaagcgtctccgagttggaactgagactgctccagcgggtggatacaggcctagagcatcctatcggctcttctgaatggttgctaagcgctcacaagcagcttacccaagacatgagtacccagcgcgcaattcagaccgagaaagagcagcagatcgagaccgtctgcgaaacgatccaaaatctggtcgacaacataaaaactgtcctgaccgggcataatcgccagcttggagacgtgaagcacctactgaaagctatggcaaaggatgaagaggccgctttggcggatggggaggatgtcccatacgagaattcagtgagacagtttctgggggagtataagtcgtggcaggataacatccagacagtactttttaccctcgtgcaagctatgggtcaggtgagatctcaggagcacgtagaaatgctgcaggagatcaccccaactcttaaagaactgaagacacagagccagagtatatacaacaacttggtctcttttgcttcgccattggtgacagatgcaaccaacgaatgctccagccctaccagttctgcaacctaccaacccagctttgcagcggctgtccgctcaaacaccggtcagaaaacccagccagacgtcatgtcacagaatgctagaaaactgattcaaaaaaacctggccacaagcgccgacactcccccatccacagtgcccggtacgggaaaatccgtcgcctgctcgccaaaaaaggccgtcagagatcccaagaccggaaaggctgtgcaggaaagaaactcttatgctgtgtccgtgtggaagcgcgtgaaagccaagttagagggacgcgacgtggatccgaacaggagaatgtccgtggcagagcaagtggattatgtgattaaggaggctaccaacctggataatttagcacaattgtatgagggttggacggcctgggtgtat

SEQ ID NO: 240815 - DNA, 10986 bp, synthetic construct
  misc_feature 1..10986: note = Description of Artificial Sequence: Synthetic coding sequence
  source 1..10986: mol_type = other DNA
atgtcacggagagcgcctggctctcggctctcaagcggaggcggtgggggtggtactaaatacccaaggagctggaatgattggcaacccaggacagactcagccagtgctgatcccgacaatttaaagtatagctcttcaagagaccgtggaggatcctcatcctatggtctccagcctagtaattccgcagttgtgagccggcagcgacacgatgatactcgcgttcacgctgatatccagaacgatgagaagggtggctactccgtcaacggcggttcgggggagaacacatacggaaggaaaagcctgggacaggaactccgcgtgaataatgtgacctcgcccgagtttacaagcgtccaacatgggtctcgggcactcgccacaaaggatatgaggaaatctcaggagagaagtatgtcttattccgatgagagcagactgtcaaacctcttacgccgaatcaccagagaggacgatcgcgatcggcgacttgccaccgttaagcagcttaaggaatttatccagcaacctgaaaacaagttggtgctggtgaaacagctggataatatcctggctgcagtgcacgacgtgttgaacgagtcttccaaactacttcaggagctgcgccaagaaggagcctgttgcctgggtctgctgtgtgcctcgctttcttatgaggcggagaaaatattcaaatggatcttcagcaagttctcatctagtgctaaggatgaggtgaaactcctttacctatgtgccacatacaaagctctggagactgtgggagagaagaaagctttcagtagcgtcatgcagttggttatgaccagtttgcaaagtatcctggagaatgtggacacaccggagctgctctgtaagtgcgttaagtgtatccttctggtggctagatgttatcctcatatcttctcaaccaactttcgagatacagtagatatcctagtgggatggcatatcgaccatactcagaagccaagcctcacccaacaggtgtcaggatggctgcagtcactggaacctttctgggtcgctgatcttgcctttagtactactctactgggacagttcctggaagatatggaggcatacgctgaagaccttagtcacgtggctagcggagaaagcgtggatgaagatgtgccaccacccagtgtcagcttacccaaacttgccgctcttctccgggtcttcagtacggttgtacggtcgatcggagaaaggttcagtcctattcgaggccctccgatcactgaggcctacgtgaccgatgtactgtaccgtgtcatgcgctgtgtgactgccgctaaccaagtcttttttagcgaggccgtcctaacagctgcgaatgaatgtgtgggggttctgctcgggtctctggacccatccatgaccattcactgcgacatggtcataacatatggcttagaccaacttgagaactgtcaaacttgcgggaccgattacattatctccgtcttgaacttactgactctgatcgtggagcagatcaatacgaagctgccatccagttttgtggagaaattgttcatcccctctagcaaactcttgtttctgaggtaccataaagagaaggaggtcgttgccgtggcccacgctgtgtatcaggcagtgctaagcctgaaaaacatccccgtcctagaaaccgcttacaagctgatcctgggggaaatgacttgtgctcttaataatttgctgcacagcctgcaactgccagaagcctgctccgaaattaaacacgaagcttttaagaaccacgtgtttaatgtcgacaacgcgaagtttgtggtgattttcgatctcagcgccctgacaactatcggcaacgcaaaaaactccctgatcggaatgtgggccctcagccctacagtgttcgctctcctgagcaaaaacctgatgattgtccactcagatttagcagtccacttccccgcaatacagtatgccgttttgtataccctatattcacactgtaccagacacgatcactttatctccagctcactttccagcagctcccccagtctgttcgacggagccgtcataagtacggtgaccacagccacgaagaaacacttctctattattttgaatctgctcggaatcttgctgaaaaaggataatctgaaccaggatacgcggaagctgttaatgacctgggccctggaggccgctgtcctaatgaaaaagagcgaaacttacgctcctctgttcagcttaccttctttccataagttttgtaaaggtctgctcgcaaatacactcgtagaagatgtgaatatctgtctgcaggcctgctcatctctgcatgccctaagtagcagcctcccagatgatttgcttcagaggtgtgtggatgtatgtcgggtgcagttggtgcacagcgggacgaggatcagacaagcctttgggaaattactgaaaagtatccccctggatgttgtgctcagcaataataaccacactgagattcaggagattagcctcgctctccgcagccacatgtccaaggccccatccaacacttttcaccctcaagacttttcagacgttatttcattcatcctctacggtaactcgcacaggaccggcaaggataattggctggagagactgttttacagctgtcagcgtctggacaaaagagaccagtctaccattccccgaaatctcctgaaaacagatgctgttctgtggcagtgggcaatctgggaagcagcacagttcaccgtgctttctaagctgcgaacgccgttaggtcgagcccaggacactttccagaccatcgaaggtataatacgaagcttagccgctcatacactgaatccagatcaggatgtctcccagtggacgaccgcagacaatgacgagggtcatggtaacaaccaactccgactggtgctcctgttgcagtacctggagaacttggaaaaactgatgtataatgcatacgaggggtgcgcgaacgctctgacctccccaccaaaggtgattagaaccttcttttacactaacagacagacatgccaggactggttgaccagaataaggctgagcatcatgcgcgttggcttattggccggacagccggctgtcaccgtcagacacggtttcgatcttttgaccgagatgaagactactagtctgagccaggggaatgagctagaagtgaccataatgatggtggttgaagcactgtgtgaactgcactgccccgaggctatccaaggtatcgccgtgtggagtagcagtattgtgggcaagaacctcctttggatcaacagcgtggctcagcaggccgaaggacgttttgaaaaggcttccgtcgagtatcaggaacacctgtgcgcaatgacaggcgtggactgttgcatcagttcttttgacaaatcagtgttgacattagctaatgcgggacggaattccgctagcccaaaacacagcctcaatggcgagtccaggaaaacagttttgtcgaagcctaccgattcttctccagaagttatcaattacttgggtaacaaggcttgtgaatgttatatctcgattgctgattgggccgctgttcaggagtggcagaacgcaattcatgacctgaagaaatcaacatcaagtacttcactcaacctgaaagcagattttaactatattaagtcactgtcaagtttcgaaagtggcaagttcgtcgaatgcaccgagcagctggaactactgcccggagaaaatatcaatctgttagccggaggcagcaaggaaaagatcgatatgaagaaactcctccccaatatgctttcccccgatcccagagagctgcagaagtcaatcgaggtgcaattgctcaggtcttctgtctgccttgcaacggcactcaatcctatcgagcaggaccaaaaatggcaatctatcacagagaacgtggtaaagtacttgaagcaaaccagtcgaatcgccattggaccgctgcggttaagtaccctcacggtttcacaatctcttccagtgctcagtacattgcagctctattgctctagcgctcttgaaaacactgtgtccaatcgactcagcactgaagattgtctgatacctctgttttctgaggcgctgcgaagttgtaagcaacacgatgtgcggccttggatgcaggccctccgctacacaatgtaccagaatcagttgcttgagaagatcaaagagcaaacggtgcctatccgatcacacctgatggagcttggtctcactgcagccaaattcgccagaaaacgaggcaatgtgagccttgcaaccagattgctggctcagtgcagcgaagtgcagcttgggaaaaccacaacagcacaggacctggttcagcactttaaaaaactctccacacaggggcaggttgacgagaaatgggggccagagctggacattgaaaagactaaattgctgtacactgccggacagtccacacatgccatggagatgctcagctcctgcgcaatcagcttctgtaagagcgtgaaagctgaatacgctgtggccaagagtatcttgactttagccaagtggatccaggccgaatggaaagagatctctggccagctaaaacaggtttatcgtgcccagcaccagcagaacttcaccggcctctccacactcagtaagaacattttaaccctgatagaactgcctagcgtaaacactatggaagaagaatatccccgtattgagtccgagagcactgtacatatcggcgtgggcgagcctgattttatcctcggacagctttatcacctgtcttccgtgcaggctcccgaagtagcgaagtcttgggcagctctggcatcctgggcctacaggtggggaagaaaagtcgtcgacaatgcctctcagggcgagggtgtgaggctgctacctagggagaagagtgaagtgcagaatcttcttccagacaccattaccgaggaggagaaagaacgcatctacgggattcttggacaggctgtgtgcagacccgcagggattcaggacgaggacatcacattacagatcaccgagagcgaggacaacgaagaagacgatatggttgacgtcatctggaggcagttgattagttcatgcccatggttatctgagctcgatgagtcagccactgagggggtcataaaggtatggagaaaggtggtcgaccgcattttctcattgtacaaattgagttgtagtgcttatttcacctttctgaaactaaatgctggacaaatcccactcgatgaggatgacccaaggctgcacttgtcacacagagttgagcagtctaccgatgatatgatagttatggccaccctcagactcttgagacttttggtcaaacacgcgggtgagcttcgccagtatttggagcatggcctcgagaccactccaacagctccatggaggggaattattccacagttattctcaagactcaatcacccagaggtatacgttagacagtctatatgcaacttattatgccgcgtggcccaggacagtcctcatctgattctttatcctgcaatcgtcgggaccatctcccttagcagcgagtcccaggctagtggaaataaatttagtacagcaatcccaactttgctggggaacatccagggcgaagagctgttagttagcgaatgtgaagggggatctcccccagccagtcaggactctaacaaggatgaaccaaaaagcgggctgaatgaggaccaggcaatgatgcaagattgctattcaaagatcgtcgataagctctcttcagcgaatcccacgatggtgctccaggtccagatgttagtcgccgaactgcggagagtgactgtgctctgggacgagctgtggctgggggttttactacagcagcatatgtacgttttgcgcaggatacagcagctggaggatgaggtgaagagggttcagaacaataataccctcagaaaggaggagaaaatagcaatcatgcgagaaaagcacacagccttaatgaaaccaattgttttcgcactagagcatgtgaggtctataaccgccgcacctgccgaaacaccacacgagaagtggttccaggataattatggagatgctatcgagaatgccttagagaaattgaaaacccctctgaatcctgccaagcccggatctagttggattcctttcaaggagatcatgttgtccctgcagcagagggcccaaaagcgggcttcctatattttaaggcttgaggaaatcagcccatggttagctgccatgactaatactgagattgcattaccgggagaggtaagcgctagggacactgtaaccatccactctgtggggggaacaatcactattcttcctacaaagaccaagccaaagaagttgctgttcttgggttctgatggaaaaagttatccatatctgttcaagggacttgaagacctccacctggatgaaaggatcatgcagttcctctcaatcgtgaacacaatgttcgccacgatcaacagacaggaaacaccacgctttcacgcacgacactactcagtgactccacttgggacacgatcaggtctgatccagtgggtcgatggagcgacccctctcttcgggctgtataaaagatggcagcagagagaagctgccttacaggcccagaaagcacaggattcctatcagacaccccagaatccaggtatcgtgcccaggccgagcgagctgtattatagtaagatcggcccagctctcaaaaccgtgggactatctttggacgttagccgcagggattggcctctgcacgtgatgaaagccgtcctggaggagctgatggaggcgaccccacccaaccttctcgctaaggaactgtggtcctcttgtacaacacccgatgagtggtggcgggtgacgcaaagctacgcccgatcaactgctgtaatgtccatggtgggttacataatcggacttggagataggcacttagataatgtcttgattgacatgacgacaggagaagttgtgcacatcgactacaacgtgtgtttcgagaagggcaagtccctgcgcgtgcccgaaaaagtgcctttccggatgacacagaacatcgagaccgctcttggggtaacaggcgtagagggggtcttccggttaagctgcgagcaagtcttgcacatcatgagacgtggcagagaaaccttattgaccctgctcgaagctttcgtgtatgacccgcttgtggattggacagctggtggcgaggcgggatttgcaggggcagtgtacgggggtggcggacagcaggccgagagtaaacagagcaagcgggaaatggagagggagataactagatccttgtttagcagcagagtggccgagattaaagtcaattggtttaaaaatcgcgatgagatgctggtggtgctgccaaagctggatggctcgttggacgaatatttgtcgctccaggagcagttgactgacgtcgaaaagctgcagggtaagctcttggaggaaatcgagttcctcgaaggggcagagggtgtggaccatccttctcacaccctgcaacataggtacagcgaacacacacagctgcagactcagcaaagggccgtccaggaggctatccaggttaaactcaacgagtttgaacagtggattacccactatcaagctgcctttaacaatttagaagccacccaactggctagtctgcttcaggaaatttcgacacagatggacttgggacccccaagttacgttccagcgactgcatttctgcagaacgccggtcaggctcacctcatcagccagtgcgagcagctcgagggagaggttggtgccctgctgcagcagcgtcggtcagtcctccggggatgtctggaacagctgcatcactatgctaccgtcgccttacagtaccccaaagccatctttcaaaagcaccggattgaacagtggaagacatggatggaggagctaatttgcaacacgacagtggagcgctgtcaggaattgtacaggaagtacgaaatgcaatatgctccacaaccccctcctaccgtttgtcaattcattactgccacagaaatgacactgcagcgctacgccgctgatataaactcgcggctcattaggcaagtggagaggttgaagcaggaggccgtgacagtgcctgtgtgcgaagatcagctgaaagaaatcgagcggtgcatcaaggtattcctgcacgaaaatggcgaagaaggttctctcagcctggccagcgtcattattagcgctctgtgtaccttgacccgccgaaaccttatgatggagggcgctgcatcgtcggccggtgagcagctcgttgacctgacttcacgcgatggcgcatggttcctcgaagagctgtgttcaatgagcgggaacgtgacctgtttagtgcagttactgaagcagtgccatttagtgccccaggacctggacatcccaaatcctatggaagcctccgaaactgtgcacctggctaacggggtttatactagcctacaagaactcaacagcaatttccgccaaatcatctttcctgaagctttgaggtgtctaatgaagggtgagtataccttagaaagtatgctgcacgaactggacggcttgatcgaacagacaactgatggtgtacccctgcagacactggtcgaatcactgcaagcttacttaagaaatgcagctatgggcttagaagaggagactcatgcacactacattgatgtggcccgtctgctgcacgctcaatacggagagctgatccagccccgtaacggcagcgtggacgaaacccccaaaatgagcgccggacaaatgctgttggtcgcgttcgatggaatgttcgcccaggtggaaaccgcattctccttgctggtggagaagctcaataaaatggagatccctattgcatggagaaaaatcgatattattcgcgaagcaagaagtacacaggtcaacttttttgacgacgataatcatcgacaggtcctggaggagattttcttcctgaagcgtctgcagacgatcaaggagttttttaggctgtgcggcaccttctctaaaaccctgagtggcagcagttcactagaagaccaaaacacggtgaatgggccagttcagatcgtaaacgtgaagaccctctttagaaattcatgtttctccgaggaccagatggctaagcccatcaaagccttcactgcagacttcgttcggcaactgctcattggtctgccaaaccaagccctgggtttgaccttgtgcagctttatttccgctcttggcgttgacatcatcgctcaggtcgaggccaaggatttcggcgcagagtccaaggtctccgtggatgatctgtgtaagaaagccgtggaacacaatatccagatcgggaaattttctcagctggtgatgaatcgagctactgtgctagcttcgtcttatgacactgcttggaaaaaacacgacctcgttcggcgtcttgagacttctatatccagttgcaagacatctttacaaagggtgcaactgcatattgcgatgttccaatggcagcatgaggatttactcattaacaggccccaggccatgtccgtgacacctccccctcggtcagcaatcctcaccagcatgaagaagaaactgcatacactgagccagattgagacgagcattgcaacagttcaggagaagctggcggcactggagagcagcatcgagcagaggttgaaatgggccggtggagccaatcctgctctcgcccctgtcttgcaagatttcgaagctactattgccgagagacgcaatttagtgctgaaggagagccaacgcgctagccaagtaaccttcctgtgtagcaatattatacatttcgagagtctcaggacccgtacagcagaggccctcaacctggacgctgccttgttcgagctcattaagagatgccagcagatgtgtagctttgccagccagtttaacagctccgtgagcgaattagaactccgacttctacagagagttgataccggcctggaacaccccatcggaagctctgaatggctcctgagtgctcacaaacaattgacccaagacatgtcaacccagagggccatacagacggagaaagagcaacagatcgaaactgtgtgtgagaccattcagaatcttgtggataatatcaagacagtgttgaccgggcacaaccggcagttaggcgatgtgaagcatttgctaaaagctatggctaaggacgaggaagcagccttggccgacggcgaggacgtcccctacgagaatagcgtccggcagtttttgggggagtacaaatcctggcaggataatattcaaactgtgctgtttacactcgtgcaggcaatgggccaggtgcgcagccaggagcatgtcgaaatgctgcaggagatcacgcctacccttaaagagctgaaaacccaaagtcaatctatctacaataacctggtcagcttcgccagccctctcgtcacagatgccacaaacgagtgtagttctccaactagcagcgcaacttatcaaccctcattcgctgcggctgtccggtcgaacacaggccagaaaacccaaccagatgtgatgtctcagaacgcgaggaaattgatccagaagaacctcgctactagtgccgatacgccccctagcacagtgcctggaactggaaagagtgtcgcgtgttctccaaagaaagctgttagagacccaaaaaccgggaaagctgtgcaggagaggaactcttacgccgtgtcagtgtggaaacgcgtcaaggcaaagctcgaaggacgggacgtcgaccccaaccgcaggatgtcggttgctgagcaggtggattacgtaattaaggaagcaaccaaccttgacaacttggcccagttatatgagggatggacagcgtgggtctat

SEQ ID NO: 240816 - DNA, 3051 bp, synthetic construct
  misc_feature 1..3051: note = Description of Artificial Sequence: Synthetic coding sequence
  source 1..3051: mol_type = other DNA
atgagtcagggcccacccacgggcgagtctagcgagcctgaggcgaaggttctccacaccaagcgcctgtaccgggctgtcgtggaagctgtgcaccggttggacctgattctctgtaacaagacggcctaccaggaagttttcaagccagagaatatttcgttgcggaacaagctccgagaattatgcgtcaagttgatgtttcttcatcccgttgattacggcagaaaggccgaggaactgctctggagaaaggtctattacgaggtgattcagttaatcaagacgaataaaaagcatatacactctagaagtactctggaatgtgcctatcgaacacatctggtagcaggaattggtttttatcagcatctcctactctacatccagagccattatcagctcgagctacaatgctgcatcgactggacacacgttacggacccattgatcggctgcaagaagcccgtgtctgcatccggtaaagaaatggactgggctcagatggcgtgtcatcgatgtctcgtatacctgggtgacctgtccagatatcagaacgagctagccggtgtggatacagagctgctagctgagcggttctactatcaggcactgtcagtggctccacagatcggaatgccattcaaccagctgggcaccctggccggatccaagtactacaatgtagaggctatgtactgttatctgcgatgcattcagtcggaggtatccttcgagggagcttatggtaacctcaagaggttatacgataaggccgcaaagatgtatcatcagcttaagaaatgcgaaacgaggaagctgtctcctggcaagaagaggtgtaaggatattaagcgtctcctcgtgaatttcatgtacttgcaatctcttctccagcctaagagttcatcagtcgattccgaattaaccagtttatgtcagagtgtgttagaggatttcaatctgtgcctgttctacctgccaagcagcccaaacttgagtttagccagcgaggatgaagaagaatacgagagtggatatgcatttctgccggacctgctgatcttccagatggtgattatttgtctaatgtgtgtgcatagcttggagcgggctggatcaaaacagtactcagccgcaatagcattcaccctggctctgttttcccatctcgtgaaccacgttaatataagacttcaggcggagttggaggagggggagaatcctgtgcctgcttttcagtcagacggaacagacgaacccgagtccaaggaaccggtagagaaagaagaggagcccgacccagagccgccaccagtgaccccgcaggttggtgaagggagaaaaagccggaagttctctaggctcagctgtctacgaagacgcagacaccctcctaaggttggcgacgattccgatctgtctgaaggatttgagagcgattcgagtcatgacagtgcccgtgcctccgaaggaagcgactcagggtcagataaaagcctcgaaggaggagggaccgcctttgacgccgagacagatagcgagatgaatagccaggaatctcggtccgacctcgaagatatggaagaggaagagggaaccagatctccaactcttgaaccaccccgaggaaggtccgaggcccctgattctctcaacggccctttgggcccaagcgaggccagcattgccagcaatttacaggcgatgtccacccaaatgttccagaccaaaaggtgcttcaggcttgcgccaacctttagcaacctgctgcttcagcccacgaccaatcctcatactagcgctagccatagaccttgtgttaacggggatgtcgacaagcccagtgagcctgccagcgaagaaggctccgagtccgaggggagcgagtcctctggcagaagctgccgtaacgagagatccatccaggagaagctccaggtgctgatggccgaaggcttgttacccgctgtaaaagtgttcctagattggctcaggaccaaccctgatttgattatcgtttgtgcgcagtcttcccagtcactctggaacagactgtcagtcttattgaacctacttccagccgctggtgagctgcaggagtccgggctggccttatgtccagaggtgcaggacttgctcgagggctgcgagctgcctgatcttcctagttctttgctgctacctgaggacatggcactgcggaacctcccaccacttcgcgcagcccatcgcagatttaattttgataccgaccggcctctgctgtccacccttgaagagagcgtggtccgcatttgctgcatccggtcatttggccatttcatcgcgaggctacaggggagcattctgcagtttaaccctgaagtggggattttcgtgtccattgcacagagcgaacaagaatcactcctgcaacaggctcaggcacagtttaggatggcccaggaggaagccaggcggaatcgactgatgcgggacatggcgcagctccgcttacaactggaggttagccagttggaaggatccctgcagcagccgaaggctcaaagtgcgatgtccccatacctcgtccctgacacacaagctctttgtcatcacctgcctgtaatccgccagcttgcaacgtcaggaaggtttatcgtcattatccccaggactgtgatagacggtctcgacctgctgaagaaagagcatccgggtgcccgtgacggcatcaggtacctggaagctgagttcaaaaagggtaacaggtacatacgctgtcagaaggaggtaggaaagtcttttgagaggcacaaactgaagcggcaagacgctgacgcatggaccctctacaaaatcctggacagttgcaaacagctcaccctggcccagggcgcaggcgaggaagaccccagtggtatggttactataattaccggtctgcctctggacaacccatcagtgctgtcgggcccaatgcaggccgctctgcaggccgcagcgcacgcctctgtggacataaaaaatgtcctggacttttataagcagtggaaggagatcgggtag

SEQ ID NO: 240817 - DNA, 1125 bp, synthetic construct
  misc_feature 1..1125: note = Description of Artificial Sequence: Synthetic coding sequence
  source 1..1125: mol_type = other DNA
atgtctcaggggcctcccactggggaatccagcgagcccgaagctaaggtgctgcatactaagcggctgtatagggctgtggtagaagcagtgcataggctcgaccttatcctgtgcaataaaacggcttatcaggaggtgtttaaacctgaaaatatcagccttagaaataaactgcgagagctgtgcgttaagctgatgttcttgcaccccgtagactatgggcgaaaggccgaagaactcctgtggcggaaagtctactacgaagtgatacagcttataaagaccaacaaaaagcacatccacagcaggtctacactcgagtgcgcataccgaacccaccttgtggctggcattggtttttatcagcacctgctgctgtacatccagtcccattatcagctggaactgcaatgttgcatagactggacgcatgttacggacccactgattggttgcaaaaagccagtcagcgccagcggcaaagagatggattgggctcagatggcttgtcacagatgtctggtgtatttgggtgacttgtcaagataccagaacgaattagcgggagtggataccgagctgctggccgaaagattttactaccaggcactctctgtcgccccacaaattggtatgccgtttaatcagctgggcaccctggccggatctaagtattacaacgtggaagccatgtactgctaccttagatgcatccagagcgaggtttcgttcgaaggtgcatacggtaatctgaagagattgtatgataaggccgcaaaaatgtatcaccagctcaaaaagtgcgagacacggaaattgtccccaggcaaaaaaaggtgtaaggatatcaaaagactccttgtgaattttatgtacctacaaagcctgctccagccaaagtcaagaggttgcacaagccactgccctacgagtgctctttgtcttcccctcagctcttttcagggaagggagcaggcaccgccacgggctgccggaagtctggcatgcgcgtcaactgttagttgtgcgcaccagccacaccgctgttgcgcactttgctcttggctgctgtgttgggacaggatgggctgccaagaggagaaaaaaggtggcgctgtctag

SEQ ID NO: 240818 - DNA, 417 bp, synthetic construct
  misc_feature 1..417: note = Description of Artificial Sequence: Synthetic coding sequence
  source 1..417: mol_type = other DNA
taattcatagtgattatcccacggactgtgatcgacgggttagacctgctcaagaaggagcaccctggagccagggacggcattcggtatctggaagctgaattcaagaaaggaaatcgctacatacgatgccagaaagaagtgggaaagtctttcgagcggcacaagctaaagcgccaggatgccgacgcttggaccctctataagattctggactcgtgcaaacagctgactttggcgcaaggcgctggggaagaggacccaagtggtatggtgaccattattactggcctacccttggacaatcctagcgtactgtccgggccaatgcaggctgccctgcaggcggctgctcatgcttccgttgacataaagaacgtgttagacttttataagcagtggaaggaaatagggtag

SEQ ID NO: 240819 - DNA, 3438 bp, synthetic construct
  misc_feature 1..3438: note = Description of Artificial Sequence: Synthetic coding sequence
  source 1..3438: mol_type = other DNA
atgttggtcacggacctagagtatgctttagacaaaaaagttgagcaggacttatggaaccatgccttcaagaatcagatcaccaccttgcaggggcaggcgaagaaccgagcaaaccctaaccgttccgaggtccaggccaacctaagtctgttcctggaagcagcctccggattctacacgcaactccttcaggagctttgcactgtgtttaacgtggatctgccatgcagagtgaaaagtagtcaactgggcatcatcagtaacaaacagacccacacaagcgctattgtcaagcctcagtcttcctcttgcagttatatctgtcaacactgtcttgttcatttaggcgatatagcgaggtataggaaccaaacgtcccaggctgagtcttattacaggcacgccgctcagctggtgccatctaacggtcagccatataaccagctggccattcttgccagtagcaagggcgatcacctgaccaccattttctactattgtaggtccatcgcagtgaaatttcccttccccgcagccagtactaacctacagaaagcactcagtaaggcactcgaatcccgcgatgaggtcaaaaccaaatggggggtctctgacttcataaaagccttcattaaattccatggccacgtttacttgagcaagagtctggaaaaattgagccccctgagggagaagctcgaagaacagttcaaacgcctgttatttcaaaaagcctttaactctcagcaacttgtgcacgtcacggtgattaacctgtttcaattgcatcatttgcgtgacttctcaaacgaaactgaacagcatacctatagtcaggacgagcaactttgctggacccagttactggccctgtttatgagctttctgggcattctttgcaagtgccccctccagaacgaatctcaggaggagtcttacaacgcatacccccttccagctgtcaaggtgagtatggactggcttcgccttcggcctagagtctttcaggaggccgtggttgatgaacggcagtacatttggccttggttgatttcacttcttaatagcttccaccctcatgaggaggatttatcctctataagtgctacgccactgcccgaggagtttgagcttcagggcttcctggcattacggccttccttccggaatctcgatttttccaaggggcatcaagggataacaggtgacaaagaaggtcagcagcggagaatcaggcagcagaggctgataagtatcggcaagtggatcgcagacaatcagccaagactaatccagtgtgagaatgaagttggaaaactgctctttatcaccgaaatccccgagctgatcttggaagatcccagcgaggccaaggagaacctcatcctgcaagagacatccgtgatagaaagcttagccgcagacggctcacccggactgaaaagcgtgttgtccaccagtcgtaatttgtccaacaactgtgatactggcgagaagcctgtggtgacgtttaaagagaacatcaagacccgcgaggtgaatcgtgaccagggtcgaagctttccccctaaagaggtccgcagggactactctaaagggatcaccgtgacgaagaatgatggcaagaaagacaacaacaaacgcaagactgagactaagaaatgcaccctggagaagctccaggaaactggcaagcagaatgtcgccgttcaggtgaaatcccagactgaattgcggaaaacaccagtgagcgaggccaggaaaacaccagtaacacagactccaacacaggcctctaattcccaattcattccaatacatcatccaggagcctttccgcctctgccctcccgaccaggctttccaccgcctacctacgtcatccccccaccggtggcctttagcatgggatctgggtacaccttccctgcaggagtgtccgtgccgggaacctttctgcagccgacagctcattctcccgctggcaaccaagtacaggctggtaaacagtcccacattccatattcacagcagcggccttctggtcccggacctatgaatcaaggcccacagcaatcacagcctcctagtcagcagcccttaacttcacttccagcgcagcctaccgcgcaaagcacaagtcagcttcaggtgcaggccctgacccagcagcagcagtcgcccaccaaggccgtgcccgcactcgggaagagccccccacatcattccggcttccagcagtatcaacaggcggacgcatccaagcaactctggaatccaccgcaggttcaagggcctttaggcaaaatcatgcccgtgaagcagccatactatcttcaaactcaggatccaatcaaactgtttgaaccctctttacaaccaccggttatgcagcaacagcccctggaaaagaaaatgaaaccctttcccatggaaccatataatcacaaccccagcgaggtcaaagtgcccgagttttactgggacagcagctactcaatggcagacaaccgatcagttatggcccaacaggccaatattgatcgccgagggaagaggtcacccggtgttttccggcctgagcaggacccggttccacggatgccattcgaggatcctaagagtagtcccctgctgccacccgatctgctgaagagcctcgccgcactagaagaagaggaggaacttatctttagcaatcctcccgacctgtatcctgcacttctgggtcccctggcctctctgcccggacgctcgttattcaaatccttgttagaaaagccgagcgaactgatgtcccactctagttcctttctgtccctgacaggctttagtctgaatcaggaacgatatcctaacaactctatgttcaatgaagtctacggcaaaaacctcaccagcagttctaaggccgagctctcaccatccatggcaccacaggaaacgagtctgtactcactgttcgaaggaactccttggtctccttctttgccagcctcaagcgaccacagcacacccgcatctcagagtccccacagctccaacccctcttcactcccatcctcacccccaacccacaaccataactcagtgccattctctaattttggccctatcggaactcccgataaccgcgatcggaggacagccgacagatggaagacggacaagccggctatgggcggtttcgggatagactacctgagtgccacaagttcaagcgagagttcttggcaccaggcgagcacacctagcgggacctggaccggccacggaccatccatggaggactccagcgctgtcctgatggaatcactgaaaagcatctggagcagctcaatgatgcatccaggcccttctgctctggagcagctgctgatgcagcagaagcagaagcagcaacgtggccaggggactatgaacccacctcattag

SEQ ID NO: 240820 - DNA, 3414 bp, synthetic construct
  misc_feature 1..3414: note = Description of Artificial Sequence: Synthetic coding sequence
  source 1..3414: mol_type = other DNA
atgtccctgcagagcgcccagtatctccggcaggcagaggtcctgaaggcagatatgaccgattccaagttgggcccagcggaagtgtggaccagcagacaggctctgcaggacctgtatcaaaaaatgctggtgaccgatctcgagtacgccctcgataaaaaagtagaacaagatctgtggaaccatgcctttaaaaatcaaataaccacactgcaggggcaggcaaaaaatagggccaaccccaacagaagtgaggtgcaggccaacctcagcttgttcctggaggctgcgtctggcttttacacacagctgttgcaagagctttgtacagtctttaacgtggatctgccctgtagggtgaaatcaagtcagctgggaataattagtaacaagcaaactcatacttcagcgattgttaagccacagtcgtccagttgctcttatatctgtcagcactgccttgtgcaccttggcgacatcgccaggtatcgtaaccagaccagccaggccgagtcctattatcgccatgcagcacagcttgtgcctagcaatggtcaaccctataaccagctggccattctcgcaagttcaaaaggcgaccacctgacaacgatcttttactattgtagaagtatcgccgtcaaatttccatttccagccgcttctacaaacctccagaaggctctgagtaaagccttggaatccagggacgaggttaaaacaaagtggggcgttagtgactttatcaaggcctttatcaagttccacgggcacgtgtatcttagcaaatccctggagaaattatcgccccttcgagagaaactggaagaacagtttaaacggcttctcttccaaaaggccttcaacagccagcaattagtacatgttaccgtcataaacctctttcagctgcatcatttacgggatttttcgaacgaaactgagcagcatacctatagtcaggatgagcagctctgctggacccagctgctagctttgtttatgtccttcttgggcatactttgcaagtgtccactccagaacgagtcacaggaagagtcttataatgcctatcctctgccagcagtgaaggtgtcaatggactggttgcgcctgagacctagagttttccaggaagccgttgtcgatgaaaggcagtatatctggccttggctgatctctctgctgaatagtttccatccacatgaggaagacctatccagcatttctgcaaccccacttcccgaagagtttgaattacagggttttttggcccttcgaccaagcttcagaaaccttgatttctccaagggtcaccagggtatcacaggagacaaggagggccaacagcgacgcatccggcagcaacggctgatctctatcggcaaatggatcgctgacaatcagccaagactgatccagtgcgagaatgaggtgggcaagctgctgtttatcaccgagatcccagaactgattctggaggatcccagcgaggcaaaggagaacctgatactgcaggaaactagcgttatcgagtccctggccgctgacgggtctcccggattgaagtcggttctgtccaccagcagaaatctctcaaacaattgtgacactggtgagaagcctgtggtcaccttcaaagaaaatattaagactcgcgaagttaaccgggaccagggcagatccttccctcctaaggaggttcggagggattattccaaaggcatcactgtcaccaagaatgacggcaaaaaagacaataataagaggaagactgagacaaaaaagtgcacactagagaagctgcaggagacggggaagcagaatgtagctgtgcaggtgaagagccagactgaacttagaaaaactcctgtttccgaggccaggaaaactcctgtcacccagacccccacccaggcctcaaattcccaatttattccaatacaccaccccggtgccttcccccctctacctagccgtcccggatttccacctcccacgtatgtcatcccgcctcccgtggctttctcgatgggttctggatacacttttcctgcaggagtatcagtacccggaacgttccttcagccgaccgcccattcaccagcgggtaatcaggtgcaggcgggaaagcagagtcacattccctactctcaacaacgtccttccggacctgggcctatgaaccagggccctcagcaaagccagccaccatcgcagcaaccgttaacatcactgccggcacaacccacagcccaaagtacatctcagctgcaagtacaggccctcacgcagcaacagcaaagcccaaccaaagcagtgcccgctctgggcaaaagtccacctcatcactctgggttccagcagtaccagcaggctgacgcctctaaacagctatggaacccaccccaagtgcagggtcctttgggcaagatcatgcccgtgaaacagccttattatttacagacgcaggaccctattaagctgtttgaacctagcctacaacccccagtcatgcagcagcagccactagagaagaaaatgaagcccttcccgatggagccttacaatcataaccctagtgaggtcaaagtgcccgagttctattgggacagcagctattctatggcggacaaccggagcgtgatggcccagcaggcaaatattgatagacggggaaagagatcacccggtgtgtttcggcctgagcaagacccagtgccccgaatgcctttcgagaaatctctgctggaaaaaccttccgagctcatgtcccattcctcttcattcctttcacttactggctttagcctgaatcaggagcggtacccaaacaattccatgttcaacgaagtgtacggtaagaatttaacttcttcgtctaaagctgagctaagcccatcaatggctcctcaggagaccagtctatattcgctgttcgaaggcacaccatggtcacctagccttcctgcctcctcagatcattctacacctgctagtcagtccccccattctagcaacccaagctccttgccctcctcgcctcctacccacaaccacaattccgtacctttcagcaatttcggccctatcgggaccccggataatcgggatcggagaactgccgatcgctggaagacagacaaaccagcgatgggaggtttcggcattgactacctctctgccacttccagcagtgagagttcctggcatcaagctagtacaccgtcaggcacctggactggccacggaccctccatggaagatagctcagctgtcctgatggagtctctgaagagtatctggtcttcatcaatgatgcatcccggaccctctgccctcgagcagctcttaatgcaacaaaaacaaaaacaacaaaggggccagggaaccatgaatccgcctcactag

SEQ ID NO: 240821 - DNA, 3513 bp, synthetic construct
  misc_feature 1..3513: note = Description of Artificial Sequence: Synthetic coding sequence
  source 1..3513: mol_type = other DNA
atgaggaactggatgttcctgcagattgtgattgttggcgagaatgtgagcttcaagtcccagatgagaacagagaatctaaagtcagaagaacacctgaagagtagcaacatccgccaggccgaggtactcaaagctgacatgacagatagcaagctgggtcccgcagaagtgtggaccagccgccaagccctccaggacctgtatcagaaaatgctggtgaccgacctggagtacgcactggataagaaggttgaacaggacctttggaatcatgcctttaagaaccaaattactactctccagggacaggccaaaaatcgggcaaatcccaaccggtcagaagtccaggctaacctgtctctgtttttggaggccgcatctggattctatacacagctattacaggagctttgtactgtgtttaatgtggacctcccatgccgtgtgaaatcatctcagctggggatcatttctaacaagcagactcacaccagtgcgatcgttaagcctcagtcctcatcatgtagttacatatgtcagcactgcttggtgcacctgggcgatatcgcgcgttatcgcaaccagactagccaagcggagagttattaccgacatgctgctcagctagtgcccagcaacggacagccatacaatcagctggccatcttggcaagctctaagggcgatcacttgactaccattttctactactgcaggtccattgctgtgaaatttccattccctgccgctagtacaaatctgcagaaggcattgtccaaggccttggaatcacgcgatgaggttaaaacgaagtggggtgtgtcggattttatcaaagccttcatcaagtttcacggccacgtgtacctcagtaagtcattggagaagctcagccccctcagagagaagctggaagaacagtttaaaaggcttttatttcagaaggcttttaacagtcaacagctggtacatgtgaccgtgataaacctgtttcagcttcaccacctcagggatttctccaacgagacagagcagcacacatactcgcaggacgagcagctatgctggacccaactgctggctctgtttatgtcgttcctgggcatcctgtgtaaatgtcctcttcagaacgaaagccaagaggaaagctataacgcatacccgctccctgccgtcaaggtctccatggactggctgcgcctgagaccgcgagtgttccaggaagccgttgtggatgagagacagtacatctggccctggctgatttcactgctaaatagctttcacccacatgaagaggatctatccagcatctcagctactcccctgccagaggaatttgagttgcaggggttcctagctctgcgcccttcatttagaaacctggacttctctaaaggacatcaagggattactggcgataaagaagggcagcaacggagaattaggcagcaacgcttaatcagcattggcaagtggatagccgataatcaacccaggctgatccagtgtgaaaatgaggtgggcaagctgctttttattacagagatccccgagttgattctggaggatcccagcgaggccaaggaaaacttgattctccaggaaacaagcgtaattgaaagtctggccgcagatggatcccccggtctgaagagcgtactaagcacaagccgcaacttgagcaacaattgtgacactggtgaaaaacccgtcgtcacatttaaggagaacattaagacgcgggaggtgaatagagatcagggccgaagctttccccctaaggaagtgaagagccagacagaactcagaaaaacacccgttagcgaggccagaaagactccggttacccaaacacctacgcaggccagtaattcacaatttatacctatccatcaccccggagcttttccacctctgcctagtagacctggattcccgcctccaacctacgtgattccccctcccgttgcttttagcatgggatctggctacaccttccctgctggcgtgtccgtccctggaaccttcctacagccaacggcccacagtcctgcaggcaatcaggtgcaggcagggaaacaatcccatatcccttactctcaacagcgtccaagcggccctgggcctatgaaccagggacctcagcagagccagcccccatctcagcaacctctgacatctctgcccgcacagcccactgcacagtctacatctcaattgcaggtgcaggcactgacccaacaacagcagagccccaccaaggccgtccctgccctggggaagagcccgccacatcactcaggctttcaacagtatcagcaggcggacgcctcaaaacaactgtggaacccacctcaggtgcaaggcccattaggaaagataatgcccgtgaaacagccttattatctgcagactcaggaccctattaaactgtttgagccatctcttcagccccctgtgatgcagcaacagcccctcgagaagaaaatgaaaccttttccaatggagccgtataatcacaacccttcagaggtcaaggtgcctgagttctactgggactctagctattccatggccgataatcgctcagtgatggcgcagcaggccaatatcgataggcgcggaaaaaggtcgccaggtgtattccgaccagaacaggatcctgtgccccgaatgccatttgaggacccaaagagctctccgttgctgccccctgacctgttgaagtcactcgccgcactggaggaggaggaggagctgattttctcaaacccgcctgacctttaccccgcattgctgggcccactggccagcctccccggaaggtccttgttcaagagcctgcttgagaaaccgtccgaactgatgtcacactcttcttcctttctgtctcttacaggattttcccttaatcaggagcggtatccgaataactctatgtttaacgaggtgtacggaaagaatctgaccagctcaagcaaggcagaactttcgccgtcaatggctcctcaggagacatccctgtattctctgttcgagggtacaccttggtcccccagtctcccggctagcagcgaccacagcacccccgcttcccagtctcctcactcttccaacccttctagcctgccttccagcccgcctactcacaatcacaatagcgtcccatttagtaacttcggaccaataggcactccagataatagagatagaaggactgccgacagatggaagacagacaagccggctatgggcggtttcggaattgattatctgtccgcaacgtcttctagtgagtcgtcgtggcaccaagcctccaccccctctggcacgtggacaggccatggcccttccatggaggacagctccgctgttcttatggaatcccttaaaagcatttggtcttctagtatgatgcacccaggcccttcggctcttgagcagcttctcatgcagcagaagcaaaagcagcagcgtggacagggaaccatgaatcctccacactag

SEQ ID NO: 240822 - DNA, 2274 bp, synthetic construct
  misc_feature 1..2274: note = Description of Artificial Sequence: Synthetic coding sequence
  source 1..2274: mol_type = other DNA
atgctggtaacagatctggaatatgcgctggataaaaaagttgaacaggacctgtggaaccatgcctttaaaaaccagattacaactcttcagggtcaggccaagaatagggctaatcccaatcgcagcgaagttcaggctaacctgtcactcttccttgaagcagcgtccggattctacacccagttgctgcaggagctgtgcacagtcttcaatgtggatctcccctgccgtgtgaagagctctcagctgggaatcatctccaacaagcagacacacacatcagccattgttaagccacaatcctccagctgcagctacatttgccagcattgcctggtccacttaggggacatcgctcgctatcgcaatcaaacttcccaggccgagtcttactaccgacacgccgctcagctcgtgccttcaaatggccagccctacaatcagctggctatcctagcttctagcaaaggcgatcatttgaccacaatcttttattactgtagatccatcgctgttaaatttccttttccagccgctagcacaaatctgcagaaggccctatccaaagccctggaatcgagagacgaggtgaagacaaagtggggggtatccgattttattaaggctttcatcaaatttcatggacatgtttatctctcaaaatccttggaaaagttgtctcctttaagagaaaagcttgaggaacaattcaagagactcctcttccagaaagcatttaattcccagcaactcgtccacgtcactgttattaacctattccagctgcatcacctgcgggactttagcaacgagacagaacagcatacatactctcaggatgagcagctctgttggacacaactactggctctgttcatgagcttccttgggattctctgcaagtgccctttgcagaacgagtcacaagaagagtcctataacgcatatcctcttcctgcagtcaaagtgtccatggactggctgcggctcagaccacgagtattccaggaagctgtggtcgatgagcggcagtatatctggccgtggcttatcagtctgctcaattcattccacccgcatgaggaagacctatcgtcaattagcgcaacgccccttcctgaggagtttgaattgcaaggctttctggctctgagacctagcttccggaacctggacttctctaaagggcatcagggtattactggagacaaggagggacagcagaggagaattaggcaacagcgtctcatctcaatcggcaaatggattgccgataaccaaccaagactgattcagtgcgaaaacgaggtggggaaattactgttcatcaccgaaatccctgagcttattttagaagacccaagcgaagccaaggaaaacctgattctgcaggaaacatcagtgatcgaatcattggcagccgatggaagccccggtctgaagagtgtgctatccacatcgaggaacttaagcaataactgcgacacaggcgaaaagcccgtggtcacatttaaagagaacattaagacaagagaagtgaaccgggaccaagggaggtcctttccacctaaagaagtgaagagtcagacggagctccggaaaacacctgttagtgaagccaggaaaactcccgtgacccagacccctacacaggcgagcaactcacagttcatcccaattcaccaccctggcgcttttccccctctgcctagccgccctggatttccaccgcctacctatgtgatccccccacccgtggcttttagtatggggtcaggttacacattccccgctggggtctcagtgccgggaactttcctgcagcccaccgctcactccccagcgggaaaccaggtgcaagcagggaagcagtctcatatcccctactctcagcagaggccatctggcccaggtcctatgaaccaggggcctcagcaaagtcagcctccatcccagcagcctctcacctctctgcccgctcaaccaacagcccagagtacctcccagttgcaggtgcaggctctgacccaacagcagcaatctccaaccaaagctgtcccagctctaggcaaaagcccccctcaccacagcgggtttcaacagtaccagcaggctgatgcatctaaacaactgtggaacccaccgcaggttcagggtccattgggtaagatcatgcctgtgaaacaaccatactacctgcagacccaggatcccataaaactcttcgaaccatcactgcagccccctgtcatgcaacagcagcctttatag

SEQ ID NO: 240823 - DNA, 3150 bp, synthetic construct
  misc_feature 1..3150: note = Description of Artificial Sequence: Synthetic coding sequence
  source 1..3150: mol_type = other DNA
atgctcgtcaccgacttagaatatgctttggataaaaaggtcgagcaggatttatggaaccacgcctttaagaaccagatcactacattacaaggccaggcgaagaacagggccaatcctaataggtctgaggtgcaggcaaatttatctctctttcttgaggctgcgtcgggcttttatactcagcttctccaagagctgtgtacggtttttaatgtcgacctgccttgtcgcgttaaatcctcccagctgggcatcatctccaataaacagactcatacttccgccatcgttaagccacagagttcatcatgtagctacatttgccagcattgtctcgtgcatctcggtgacatagccagatataggaaccagacgtctcaggccgaatcctactacaggcatgctgcgcagttggtaccgtcaaacggacagccctacaaccaactggcgatcctggcttcatcaaaaggcgaccaccttacaacaatcttctattactgtaggtctatcgcagtcaagtttccctttccagcggctagtaccaatctccagaaggccctgtctaaggcactcgaaagcagagacgaagttaaaacaaagtggggggtttccgacttcattaaggccttcataaaatttcatggccatgtctatctttcaaaaagcttggagaagttatccccactgcgggagaaattggaggagcagttcaagagactgcttttccagaaggcctttaactcacagcagctagtgcatgtgaccgtcatcaatctgtttcagttacaccacctgcgcgatttcagtaatgaaacagagcagcacacttacagccaggacgagcagttgtgttggactcagctgctggctctctttatgtcatttctgggtattttgtgcaagtgtccactccaaaacgaaagccaggaggagagttataacgcttatccactccctgccgttaaggtgagcatggactggttgaggctgcggcctagagtctttcaggaggccgtcgttgatgagagacagtatatttggccatggctgatttctttgctcaactcattccatccccatgaagaggacctgtcaagcatctctgcaacaccattacccgaggagtttgaactgcagggatttctggccctgcggccatcctttaggaatttggacttttcaaaaggtcaccagggaatcaccggagataaggaaggccagcagaggcgtatcaggcagcaacgattgatctccattggtaagtggattgctgacaatcagcccaggttgatacagtgcgaaaacgaggtcggcaagctgctgtttatcactgaaataccagagctaatccttgaggacccgtcagaagcaaaggaaaatcttatcctgcaggagacctccgtgattgaaagcttggccgctgacggcagccctgggctcaagtccgtgttgtctacatcccgcaatttaagtaacaattgtgataccggggaaaagcccgtagtcaccttcaaggagaatatcaagacacgagaagtgaaccgtgaccaggggagatcttttccaccaaaagaggtaaagtctcagactgaactgcgaaagacccctgtgtccgaggctcggaaaacacctgtgactcagacgcccacacaagcatccaactcgcagttcattcctatccatcacccaggtgcgtttccacctctgccctctaggcctggctttcctcccccaacttatgtcatcccccctccagttgcgttcagcatggggtctggctacacctttccggctggagttagcgtgccagggaccttccttcagcccaccgcccatagtccagctggtaatcaggtccaagccggtaaacaaagccatatcccctacagccagcagcggccatcgggcccagggccaatgaatcaggggcctcaacagtctcagcctccttcccaacagcctctgacttctcttcccgctcaaccgacagcacagagcacaagccagctgcaggttcaggccctcacccagcaacagcagtcgcccaccaaggctgtgccagccctggggaagtctcctccccaccatagtgggtttcagcagtaccagcaagcagacgcctccaagcaattgtggaacccccctcaagtccagggacccctgggcaagattatgcccgttaagcagccatactatttgcagactcaggacccaattaagctgttcgagccaagcctccagcctccagttatgcagcagcagcccctcgagaagaagatgaaaccttttcccatggaaccttacaaccataacccatctgaagtgaaggtgcccgagttctactgggactcctcctattcaatggcagacaacaggtccgtcatggcccagcaggccaacatcgatcgtcggggaaagaggtcaccgggtgtctttcggccagagcaggaccctgtacccaggatgccatttgagaaaagccttcttgaaaagcccagcgagctgatgtcacacagtagtagttttctcagtctcactggcttctcccttaatcaagagcggtaccccaataacagcatgtttaacgaagtttacggtaagaatctgacatcttcttccaaggctgagctctcaccatcaatggcgccacaggagacttccctgtattcgctattcgaggggacaccatggagcccttcactccctgcttcatcagatcatagcacacctgcctcccaatccccccatagttcaaatccaagctccctgccatcttctccgcctacgcacaatcacaacagcgtcccattttctaattttgggcctattggaactccagacaatagagatcgacggactgcggaccgctggaaaactgataagccagccatgggcggttttggaatcgattacctctccgcaacatcttcatcggagagtagttggcaccaggccagcactccctcggggacatggaccggccacggcccttcgatggaggatagcagcgccgtgcttatggaaagccttaagagtatatggagttcctcaatgatgcacccaggcccttccgcactggagcaactgttaatgcagcagaagcagaagcagcagcggggtcaagggaccatgaatccaccacactag

SEQ ID NO: 240824 - DNA, 3537 bp, synthetic construct
  misc_feature 1..3537: note = Description of Artificial Sequence: Synthetic coding sequence
  source 1..3537: mol_type = other DNA
atgagcctccagagtgctcagtacttaaggcaggccgaagttttgaaagctgacatgaccgactcaaaactgggccctgcagaggtgtggacatcccgtcaagccctgcaggatctttaccagaaaatgctggtgactgacctggagtacgccctagataaaaaggttgagcaggatctgtggaatcacgccttcaagaaccagatcaccacactccagggacaagccaagaatagagccaaccctaataggagcgaagtgcaggcaaatctgagtctgttcttggaagcggcaagtggcttttatacccagctgctgcaggagttatgcaccgtgtttaacgtggacctgccttgccgggttaagagcagtcagttggggataattagtaacaaacaaacacatactagcgccatcgtgaagccccagtccagtagctgcagttatatttgccagcactgtctggttcatttgggggacatcgccagatacagaaaccagacctctcaggccgagtcctactacaggcacgccgcacagttggtgccaagtaacggacagccctacaatcaactcgctatcctcgccagctccaagggggatcacctgaccacaatcttttactattgccgatccattgccgtgaaattcccatttcccgctgcctcaacaaacctgcagaaggccttatccaaggccctcgaaagtcgagacgaggtaaagactaagtggggcgtgagtgactttattaaggcatttataaagttccacggccatgtgtatctgtcaaaatccctggaaaagctgtccccgctgagagagaaacttgaggagcagttcaagcgcctcctatttcagaaggccttcaacagccagcagctcgtgcatgttaccgtaattaacctgtttcaactgcaccatctgagggactttagcaacgaaacggagcagcacacctactcacaggatgagcagctgtgctggactcagctcctggccctgtttatgtccttcttgggaatactgtgcaagtgccccctccagaatgaatctcaagaggaatcctataacgcctacccactgccagctgtgaaggtgtctatggattggctacgacttagacctcgcgtttttcaggaagccgtggtcgacgagcggcagtacatctggccctggctgattagcctgcttaacagtttccatccccatgaagaggacttgtcatcaattagcgctacgcctcttccagaagagttcgagctgcagggttttctggctcttcggccatccttccgcaacttagacttcagcaaggggcaccaaggcataaccggtgacaaagagggacaacagcggaggatacggcaacagcgtctaatcagcatcggtaaatggattgcagacaatcagcccaggctcatccagtgcgaaaacgaagtaggaaaacttctgttcattactgaaattcctgagctgattttggaagacccaagcgaggccaaggaaaacctgattttgcaagaaaccagtgtgatcgaaagtttggctgcagacggcagtccaggcctcaaaagtgtgctgtccacttccaggaatctctccaataactgcgatacaggggaaaaaccagttgtcacttttaaggaaaatataaagacccgcgaagtgaatagggaccagggacggtctttcccccctaaggaggtgaagagccagacagagctgaggaaaaccccagtttcagaagctcggaagacgccagtcacccagaccccaacacaggcatctaactcgcagtttatccccatccaccaccctggagcatttcccccattgccaagtcgacccggtttccctcctccgacatacgtgatccctccacccgtggccttcagcatggggtccggttatacgttccctgctggtgtctcagtcccaggaacgtttctccagcctacagctcattccccagcgggtaaccaggtgcaggctggtaagcaaagtcatattccatacagtcagcagcggccttccggcccaggtcctatgaatcaggggcctcagcaatctcagcccccaagtcagcaacctctcacatccctacctgcccagccaacagcacaaagtacgtcccaactccaggtccaagccttgacacaacaacagcagtcgcccacaaaggcagtgcccgcacttggcaaatccccgcctcatcattcgggcttccagcagtaccaacaggcggatgcatccaagcagctgtggaacccgccacaggtacagggacctctggggaagataatgcccgtaaagcagccttattacctccagacccaggacccaatcaagctgttcgagccctcgttgcagcctcctgtgatgcagcaacagcccttggaaaaaaaaatgaagccatttcccatggagccttacaatcacaacccatccgaagtcaaagtgcctgagttctattgggacagctcttactccatggctgacaaccggagtgttatggcccaacaagctaatattgatcgccgtggtaaacggtccccaggggtttttagacccgagcaggatcccgtgcctcggatgcccttcgaagaccccaagtcctctccattgctcccacctgacctgctgaagtccctcgcggctctggaagaggaagaggagctgattttctcgaatccgcctgatctgtaccccgcactgctggggcctctcgcctcgctacccggaagaagcttatttaaatcactgctggagaagccgagtgagcttatgtcccattcgtctagtttcttatcccttacaggctttagcctcaatcaagagagatatcctaataattccatgtttaacgaagtttatggtaagaacctgacaagctcaagcaaggccgaacttagcccctctatggctccacaggagacttccctctattccctgtttgaaggtacaccctggagcccgtcactccccgcatcaagcgaccatagcacacccgcatcccagtccccccatagtagtaacccgagctccctgcctagtagccctcctacccataatcacaattcagtgcccttcagcaatttcgggccaataggtacaccagacaaccgtgacagacggaccgcagaccgatggaagacagataagccagcaatgggcggttttggcattgattacctttcagcaacgtcgtcttcggaatcttcttggcatcaagctagtaccccatccggtacctggactgggcatgggccttcaatggaggatagtagcgccgttcttatggaatctttgaaaaaacagcagcacggtgtgcagcagcttggccctaaacgccagtcagaggaggagggatcctcctccatctgcgtggcacacagaggtccccgtcctctcccctcttgtagcctgcctgcatctactttccgtgtcaaattcaaggcagccagaacttgtgcgcatcaagcccaaaagaagactaggcggcgacctttttggaagcggcgaaagaaggggaagtag

SEQ ID NO: 240825 - DNA, 3276 bp, synthetic construct
  misc_feature 1..3276: note = Description of Artificial Sequence: Synthetic coding sequence
  source 1..3276: mol_type = other DNA
atgagtttgcagtctgctcaatatttgcggcaggcagaggtgctcaaggcagatatgacagatagcaagttggggcctgcggaagtgtggacaagcagacaagctctgcaggatttgtaccagaaaatgttagtaacagacctggagtatgctttagacaagaaggtagaacaagacctgtggaatcatgcctttaagaatcagattactacactgcagggccaggctaaaaacagggctaatcctaataggtctgaagttcaagccaatttaagtctctttctcgaagcagcttccgggttctatacacaacttttgcaggaactgtgtacggtctttaacgtggatctgccctgccgagtgaagtcatctcagctggggatcattagcaacaagcaaactcatacatcagcgatcgtcaagccgcagtcgagctcatgcagctacatttgccagcattgtctggtgcatctgggggatattgcacgttataggaaccagacaagccaggcagaaagctactatagacacgcagcccaacttgtgccctccaacggccagccgtataatcaattggctatcctggcctcatcgaaaggggaccacctaactaccatcttctattattgccgaagcatcgctgtgaaattcccctttccagcagcgagcacaaacttacagaaagctttaagtaaggcactagaaagccgggatgaggttaaaacgaagtggggagtcagtgacttcataaaagcctttatcaagtttcatggccatgtctatctgagcaaaagcctggagaaactgtcgcccctgagagagaaattggaagaacagtttaagagactcttgttccagaaggcattcaactcacagcaattagtgcatgtgacggtcatcaatctgtttcagctccaccatctccgcgatttttcgaacgagacagagcaacacacatactctcaagacgagcagctttgctggacgcaacttctggcccttttcatgtccttccttggaatcctctgcaagtgtcccctgcagaatgaatcacaggaagagagttacaacgcatatccgttgcctgctgtcaaggtgtcaatggattggctgagattaaggcctagagttttccaggaggccgtagtagatgagagacaatacatatggccatggctaattagcctgctgaactctttccacccacatgaagaagacctgtccagcatcagtgccacacccttgcccgaagagtttgaacttcagggattcctggccctaagaccgtcttttagaaacctcgattttagtaaaggtcaccaaggtattaccggagataaggaggggcagcagcgacgaatcaggcagcaacgactgatttctatcggaaaatggatcgccgataaccagcctcgtctgatccagtgtgagaacgaagtggggaaactgctgttcatcacagaaatccctgaacttatcttggaggaccccagtgaggctaaagagaacctcatcttacaagagacctccgtcatcgagagtctagctgccgatggtagccccggtctgaaaagtgtgttgtcaacatctcggaacttgtctaataattgtgatacgggcgagaaacctgttgtgacattcaaagagaacatcaagactagggaggtaaatcgagaccagggacgcagcttcccacccaaagaagtcaagtctcaaactgaacttcggaaaacccccgtgagcgaagctcgaaaaactcctgtgacccagacgcccacccaggcttctaatagtcaatttatccctattcatcaccccggagctttcccacctcttccttctcggcctgggttccctcccccaacctacgtgattccaccccctgtggctttcagcatgggctcgggctacaccttcccagccggagtctccgtccctggcacattcctacaacctactgctcatagtccggcagggaatcaggtccaagccggaaagcagtctcatataccctattctcaacagagaccctccgggcctggtcctatgaatcagggtccccagcaatctcagcccccttctcagcagcccctcaccagtctgccagctcagcctacagcacagagcacctcacaactgcaggtgcaggcactgacacagcagcagcagtcccccaccaaagcagtgcccgctctggggaagagccccccacatcacagcggcttccagcagtatcagcaggctgatgcctcaaaacagctttggaatccaccacaagttcaagggcctctggggaagataatgccagtgaagcaaccatattatctacagacccaggatcctatcaaactctttgaaccctccctgcaacctccggtgatgcaacagcagcccctagagaaaaagatgaaacccttcccaatggaaccctacaaccacaacccctcagaagttaaagtacctgaattctactgggactcaagctacagcatggcagataatcggtctgtgatggcacagcaggccaacattgaccggaggggcaagaggtcccctggggtattccgcccagaacaggatcccgtgccaaggatgccctttgagaaaagtctgttggagaaacctagtgaattgatgtcccattcaagttcttttctgtcccttaccggtttcagtttaaaccaggaaagatatccaaacaacagcatgtttaatgaagtgtacgggaaaaacctgacctcaagtagtaaggcggagttgagcccatctatggccccacaggagactagtctctactccttatttgaaggaacaccttggtcgccaagtttgcctgcctcctccgaccactcaactcctgccagtcagtcccctcacagctcaaacccttctagcctgcctagctccccgccaacccacaaccataacagcgtgcctttttcaaattttggcccaatcggtactccagacaacagggacaggcgtaccgccgaccgctggaagaccgataagcctgctatggggggattcggaatagactatttatccgctacgtcaagctctgaatcctcctggcaccaggcctccacaccaagtggcacttggaccgggcatggcccttctatggaagattcttcagcagttctcatggaatctcttaagtccatctggagttctagcatgatgcaccctggcccttcggccctggaacaattactgatgcagcagaagcagaagcaacagagaggccagggcactatgaaccccccacattag

SEQ ID NO: 240826 - DNA, 2976 bp, synthetic construct
  misc_feature 1..2976: note = Description of Artificial Sequence: Synthetic coding sequence
  source 1..2976: mol_type = other DNA
atggctggccctgtgtctttacgggatctcctgatgggtgctagtgcatggatgggctctgagtctcctggagggagcccaactgagggaggcggatctgcagccggtggcccagagcccccttggcgcgaggacgaaatctgcgtggtaggcatatttgggaagacagcactgcgcctgaacagtgagaagttctccttggtgaataccgtgtgtgaccgacaagtattccctctgtttagacaccaggacccaggcgatccgggtcccggaatccgcacagaggccggagccgtgggcgaagccggaggcgctgaggatcctggcgcagccgctgggggatcggtgagaggaagcggcgctgtcgctgagggcaatcggaccgaggctgggagtcaggattattctctgctgcaggcctactatagccaggaaagtaaagtcctgtacctactcctgacctctatttgtgataattcacagctacttcgggcatgcagggcactgcagtctggcgaggccggagggggtctctcacttcctcacgctgaggctcatgagttctggaaacaccaggaaaaactgcagtgcctaagtctactttacctcttcagtgtctgtcacatcttattgttggttcatcccacctgctcctttgatatcacttatgacagggtgttcagagctctggacggactgagacaaaaggtcctacccctcttgaaaacagccattaaagactgtcccgttggaaaagactggaaacttaattgcaggccatgtcctcccagactgttgtttctattccagttgaacggagcattaaaagtggagcctccaaggaatcaggatccagcacatccagacaaacctaagaagcactccccaaaacgcaggctccaacacgctctagaggaccagatttatagaatctttcgcaaatcccgcgtcttaacaaaccagtctatcaattgtttatttactgtcccagctaaccaggcctttgtgtatattgtgcccggttctcaagaggaggaccctgtgggaatgcttttagatcagctgaggagccactgcactgttaaggacccagaatctcttctggttccagcacctctatcaggacccaggcggtaccaggtgatgagacaacattctcgccagcagttgagtttccacatagattcttccagcagttcttcaagcgggcaactggtcgacttcacactgcgagagttcctttggcagcatgtagaattggtcttgagtaagaagggatttgatgactctgtcggcaggaaccctcagcctagccactttgagctgccaacctatcagaaatggatctctgccgcttccaaactgtacgaggtcgccatcgacgggaaggaagaggacttgggatcccctacaggcgagctgacaagcaagatactatccagcataaaagtcttggaaggattccttgacatcgacaccaagttctccgaaaaccggtgccagaaggcccttcctatggcccacagtgcttatcagtccaatttgcctcacaactacactatgaccgtccacaagaaccaattagcccaagccctaagagtttacagccagcacgcaagggggccagctttccacaagtatgccatgcagcttcacgaggactgttataaattctggtctaatggacaccaactgtgcgaggagcggagcttaacagatcaacactgcgtacacaaattccacagtctcccaaagtccggcgagaaacccgaagccgatcgcaatccaccagttctctatcacaattctagggccaggtccactggagcgtgcaattgtggcagaaagcaagccccaagagacgatccattcgatattaaagctgcaaactacgacttctatcagcttcttgaagaaaagtgctgtggtaagttggatcatattaatttccccgtcttcgagccaagtacccctgaccctgctcctgccaagaatgaaagctccccagcgccacccgactccgatgctgacaaactcaaggagaaagaacctcagacccaaggagaatcaacatctctgtccttggccctgagtttggggcaaagtacggactccctgggcacctatccagcggatcctcaagcaggaggcgataacccagaagtccatggccaagtggaggtaaagacggagaaacgacctaacttcgtggatcgtcaggcctcaaccgttgagtacctgcctggtatgttacactccaactgccctaaaggcctgttacctaagttttcctcgtggtctttggtcaagttgggacccgcaaaatcctataactttcatactgggttagatcaacagggcttcatcccaggtactaactacctgatgccttgggacatcgtaattaggactcgagccgaggacgagggggatctggataccaattcctggcctgctccaaacaaggcaataccaggcaagaggagtgctgttgttatgggaaggggcagacggagggatgatatcgcccgagcattcgtggggttcgagtacgaagactcaagggggcgaagatttatgtgttcaggaccagacaaggttatgaaagtaatgggcagcggcccaaaagaatctgcactcaaggctctgaattccgatatgcccctctatatccttagctcctctcagggaagaggactgaagccccattatgctcagctgatgcgccttttcgtggtcgttccagatgcccctctgcagatcattctgatgcctcaagttcagcccggacccccaccatgcccagtcttctaccccgaaaaacaggaaattaccttaccgccagacgggctttgggttctgcgttttccctacgcctatgtaactgagaggggcccttgttttcctcccaaggaaaacgtgcagctaatgagttataaggtgctgcgcggtgtgttgaaagccgtgactcagtag

SEQ ID NO: 240827 - DNA, 2925 bp, synthetic construct
  misc_feature 1..2925: note = Description of Artificial Sequence: Synthetic coding sequence
  source 1..2925: mol_type = other DNA
atggccggaccggttagcttgagggacctcctcatgggcgcttctgcttggatggggagtgagtcacccggaggctctccaacagagggcggtgggtctgccgctggaggccctgaacccccatggcgggaagacgagatctgtgtcgtcggcatcttcggaaaaaccgccttacgtctgaattccgagaaattttcactcgtgaatactgtctgtgaccggcaagtgttccccctgttccggcatcaggatcctggggatcccggaccgggtattcgaaccgaagcgggtgctgtgggtgaggcaggcggagccgaagacccgggtgccgctgctggtggttctgtcaggggctccggcgcagtagcggaaggaaaccgcacagaggccggatcccaggactatagtttactgcaggcctactacagtcaagaaagtaaggttttatacctccttctcactagcatctgcgataactcccagctgctcagagcctgtcgagccctacagagtggtgaagctggcggtggcctctcactcccccacgccgaagctcacgaattttggaaacaccaggagaagcttcagtgcctgagcctgctctatctcttctctgtgtgccatattttattgctcgtccatcctacttgctcctttgatattacctatgatcgcgtgtttagagccctcgacggactcaggcaaaaagtacttccattgttgaagacggctatcaaggactgtcccgtgggaaaagattggaagctcaactgcaggccgtgtccgccacgcctgctgttcctgttccagcttaacggcgctctgaaggtggagccacctagaaatcaggacccggcacaccccgataagccaaagaagcactcacctaagcgacgtctgcagcacgcactggaggaccagatttatcgcatcttcagaaagtctagagtgcttaccaatcagtccatcaattgcctgttcactgtgcctgccaatcaggcatttgtttatattgtcccaggatcacaggaggaggatccagtgggcatgcttctagaccagttgaggagccactgtacagttaaagaccctgagagcctactggtgcctgcacccctctcagggccacgccgatatcaggtgatgcgtcagcatagcaggcagcagctctcatttcatattgatagttcttcttctagtagttcaggccaactggttgacttcacgttgagggaatttctgtggcagcacgtggagctcgtgctgtcaaaaaaagggttcgatgattccgtaggacgtaaccctcagcctagccacttcgagctcccaacgtatcagaaatggattagcgcagcaagcaaactgtatgaggtggctattgacggaaaagaggaggaccttggctctcctaccggtgagctgactagcaaaattctgtcatcaatcaaagttctggaaggatttctggacatcgatactaagttcagtgagaataggtgtcagaaggctctgccgatggcccattcagcttaccaaagcaacctacctcataactacaccatgactgtacacaagaatcagctagcacaggcattgcgcgtttatagtcagcacgccagggggcctgcgttccacaagtacgcaatgcagctgcacgaagactgttataaattttggtctaacggccaccagctatgtgaggaacgctccctgactgatcagcactgcgtgcacaaattccattccctgccgaaaagcggagagaagcccgaagccgatagaaatccgcctgtcctataccacaattccagagccagaagcaccggagcttgcaactgcggacgtaagcaggcccctcgcgatgatccattcgatattaaagctgccaattatgacttctaccagttgctagaagagaaatgctgcgggaaactggaccacatcaattttcctgtgtttgaacccagcacccctgatcccgcaccagctaagaacgagtctagcccagccccacctgattcagatgccgacaaactgaaagagaaggaaccccaaacacagggggagtctacgtcgctttcattagcattgtctcttggccaatccaccgattctctcggcacctaccccgcagacccacaagctgggggagataaccctgaagttcacggccaagtggaggtcaaaacagaaaagcgcccaaatttcgttgaccggcaagcctccacagtcgagtacctccccggaatgctccacagcaactgtcccaagggcctgctgcctaaattctcctcatggtctctggtgaagttgggtcccgcaaaatcttataactttcatacaggactcgaccaacagggattcatcccaggaacgaattacctaatgccctgggatattgtgattcgaacccgagcagaagatgagggtgacctcgatacaaattcctggcccgctccaaacaaagccatcccaggcaagagaagcgccgtcgttatggggagaggaaggagaagggatgacatagctcgcgcatttgtgggcttcgagtacgaagattccaggggcagacggttcatgtgttccggcccagacaaggttatgaaggtgatgggcagcgggcctaaggagagtgcgcttaaggcactgaacagcgacatgcctctgtacatcctctccagttcgcaagggcgaggacttaagcctcactatgctcagctcatgagattatttgttgtagtgccagatgctcctcttcagattatcctcatgcctcaggtacagccgggacccccaccatgtcccgtgttctatcctgaaaaacaagagatcactcttccaccggatgggctttgggtgttaagatttccttacgcataccttcgcgaggatctggtgagtccgctgaggaagatgtgtagttag

SEQ ID NO: 240828 - DNA, 1563 bp, synthetic construct
  misc_feature 1..1563: note = Description of Artificial Sequence: Synthetic coding sequence
  source 1..1563: mol_type = other DNA
atgtcagagagcggacactcccagcccggactctatggtattgagcgaaggaggagatggaaagaacctggctctggaggcccacagaatctgagtggacctggagggagagagcgggattatatcgcgccttgggaaagggagcggagggacgcctcagaagaaacctcaacatccgttatgcagaaaaccccaataattctgtccaagccaccagcagagaggtcgaagcagcctccaccccctaccgcccctgctgcccctccagccccagctccgctggaaaagccaattgtgctgatgaagccacgcgaagaaggcaaaggtcccgtcgccgtcacgggggcttctactcccgaaggaacagctcctcctccgcctgccgcacccgcacctcctaaaggcgagaaagagggccagaggccaactcagccagtgtatcagattcagaatagggggatgggcacagcagcccctgcagccatggaccccgtcgttggtcaggccaagttgttacccccagagcgaatgaaacattcaataaaacttgtcgacgaccaaatgaactggtgtgacagcgccattgagtatctgctagatcagacagacgtgctcgtcgtcggagtacttggcttgcaagggacaggcaaaagcatggtgatgtccctgctgagcgcgaacacccccgaagaagatcagcgaacctacgtgttccgcgctcagtcggctgagatgaaggagagaggcggtaaccagactagcgggatcgacttcttcatcacacaggagcgaattgttttcttggacacgcagccgattctgtcaccaagcatcctggatcacctgatcaataatgacaggaaactgccccctgaatacaatcttcctcacacatacgtcgaaatgcagagtctgcagatagcagccttcttattcacagtttgccatgtggtgatcgtggtccaagactggttcacagatctatcgttatatagattcctacagaccgcggagatggtcaagccaagcaccccaagcccatcgcatgagagttcttcttcatcgggttctgatgaggggactgagtattaccctcacttggtcttcctgcagaacaaggctcggcgtgaggacttctgcccacggaagcttcgccagatgcacctgatgatcgatcaactgatggcccacagtcatctgcggtacaaaggaacccttagcatgctgcagtgcaacgtctttcctggtctgccccctgattttcttgactcggaagtcaacctcttcttagttccgtttatggacagcgaagcggaaagcgagaaccctcctcgagccggtcccggatccagtccgctcttttcactgttgccgggataccgagggcatccaagctttcagagtttggtatcaaagcttaggtcccaagtgatgagcatggccaggcctcagctgagtcacacaatcctgaccgaaaaaaactggtttcattacgctgcccgaatctgggacggtgttcgcaagagcagtgctctcgcagagtattctcgtttgctggcctag

SEQ ID NO: 240829 - DNA, 2742 bp, synthetic construct
  misc_feature 1..2742: note = Description of Artificial Sequence: Synthetic coding sequence
  source 1..2742: mol_type = other DNA
atggcagacgaggcgctggcagggctcgatgagggggcactgcggaaactgctcgaagtcaccgctgacctagctgaaaggagacgcataaggagtgcaattcgtgagctgcagcggcaggagctggaacgggaggaggaagcactagcctcaaagaggttcagagccgaacgacaggacaacaaggagaactggctgcacagtcagcaaagagaggctgagcagcgagccgcactggccagactggcaggccagttagaaagcatgaacgatgtggaggagctgaccgcacttcttcggtccgctggagagtacgaagaaagaaagctgatccgagctgcaatcaggagggtgcgtgcacaagaaattgaggctgccacacttgcagggaggctgtattcagggcgaccaaactctggcagtcgcgaggactcaaagggcctggcagcgcatcgcctggaacagtgcgaagtgcccgaacgggaggagcaggagcaacaggcggaagtcagcaaacctacacccacgccggaaggtacttctcaggatgtcacgaccgtgacattgctccttcgggcacccccaggctctacttcctccagtcctgctagtccaagcagctccccaacaccagcgagccctgagccccctctggagcccgctgaggcccagtgcctgaccgccgaggtgccaggtagccccgaaccgccaccttcaccgccaaagactacttccccagaaccacaggagtctcctaccctgccaagcacagaggggcaagtggttaacaagttgctgtcggggccaaaggaaacacccgcagctcagtctcctacccgaggaccaagcgacacaaagcgtgccgatgtcgcaggcccaagaccttgtcagaggtctctctcagtgttatcacctagacagcctgcccaaaaccgggaaagtactcccctcgcttcaggccctagctctttccagcgggcaggcagcgtccgggatagggtgcataagttcacctctgactcgccaatggccgcacgcttgcaggatggcacgccacaggccgcactctcaccgttacccaggaaggctcccggacctctccctcaccagcatcacccgtgcctccttctccagaggcttcttctgtccggaccagatacctcttcacgtttttctaaggagcagcgcggtgtcgctcagccacttgcccaactccgcagctgcccccaggaagagggtcctaggggtagggggctggccgctaggcctctggaaaatagggctggcggacctgtggctcgaagtgaggagcctggcgcaccgctccctgtggcagttggcaccgccgagccgggtggcagtatgaagaccacctttacgatagagataaaagacgggcgtggacaggctagcactggacgggtcctgctgcctacaggcaaccagcgagccgaactgaccctgggtcttcgcgcacccccaaccctcctgagcacctctagcggtggcaaatctaccataactcgagtcaatagtccagggacactcgccaggctgggatcagtcacccatgtcacatcgtttagccacgctcccccatccagtagaggaggctgtagcattaaaatggaagctgagccggcagagcctctggctgcggctgtggaggctgccaacggagcggaacagactagagtaaacaaagccccagaggggaggagccccctttccgcagaggaacttatgaccatcgaagatgagggggtgctggataagatgctcgaccagagcactgactttgaagagcgaaagctgatccgtgcagccctgcgcgagctccggcagagaaaaagggatcagagagacaaggagagggagcgtcgtctccaggaagcgaggggacgtcccggtgaaggtcgaggaaacactgccactgagaccaccacacgacattcccagcgcgctgccgacggaagcgccgtgagcacagtcaccaagactgaaagactggtccactccaatgatggcacaaggaccgccaggactacgacagtggagtctagctttgtgaggcgatccgagaacgggtcaggaagcacaatgatgcagaccaagaccttctcttccagcagcagcagcaagaagatgggcagcattttcgatagagaagatcaagctagccccagagcagggagcctcgccgctctggaaaagcgccaagctgagaagaagaaggaactcatgaaagcccagtccctgcccaagacatcagcttcacaggctcgaaaagctatgatcgagaagttagagaaggagggcgctgcagggtctcctggtgggcctcgagctgccgtccaacgctccacctcgtttggcgttcccaacgcaaattctatcaagcagatgctgttagattggtgtcgggcaaagactaggggatacgaacacgttgacatccagaacttctctagctcttggtccgatggtatggccttttgcgccctcgtccataactttttccccgaggctttcgattacggtcagttgtccccccagaataggaggcagaattttgaggtcgctttctcgtcagccgaaacccacgccgactgcccccaactcttagatactgaagacatggtgcgcctgcgcgaacctgattggaagtgtgtgtatacatatattcaggaattttacaggtgccttgtgcagaagggcctggtgaaaacgaagaaaagctag

SEQ ID NO: 240830 - DNA, 2748 bp, synthetic construct
  misc_feature 1..2748: note = Description of Artificial Sequence: Synthetic coding sequence
  source 1..2748: mol_type = other DNA
atggccgatgaggccctcgccggactggacgagggagcccttcgtaagttgctggaggtaacagcagacctcgccgagagaaggcggatacgcagtgcgatcagagaattgcagaggcaagaactggagcgcgaggaggaagctctcgccagcaaaaggttccgtgccgagaggcaggataataaggagaactggttgcacagccaacagagagaggcagagcagcgggcagcgcttgccagattggccggtcagcttgaaagtatgaacgacgtcgaggagcttactgccctccttcgatccgccggagagtacgaagaacgaaagctgattagggccgcaatcaggcgtgtaagggcgcaggagattgaagcagctacactggctggcaggctgtatagtggcaggcctaattcagggtccagggaggactccaaaggcctggccgcacacaggctagaacagtgtgaagtgcccgagagggaggagcaggaacaacaggcagaggttagtaaaccaacccctacacccgaggggacttcacaggatgtaacaaccgtgacacttctgcttcgagccccaccaggcagtaccagctcctcccccgcaagtcccagcagctcacccactcctgcgagccccgaaccccctctcgaaccggctgaagcacagtgccttacagcagaggtgcccggaagccctgaaccgcctcccagcccccctaagaccaccagcccagaaccacaggaaagtcctactctgccttccacagagggccaggtggtcaacaagctgctatctggacctaaggagacccccgctgcgcagtctccgactagggggcctagcgatacaaagagggcagacgtcgctggaccaagaccatgccagcgcagtctgagtgtcctctcgccacggcaaccagcacagaaccgtgagtcaacaccactggcgagtggtccgagcagcttccagcgcgctggctcagtgcgcgaccgggtgcacaaatttacatctgactccccgatggcagccaggcttcaagacggaactccccaggccgctttaagcccgcttactcccgcacggctgctggggccatctctgacttccacgacaccggctagttcgtcatccgggagctcttctagaggacctagcgatacaagcagcagattctcgaaagaacagcgcggtgttgcacaacctctggctcagctgcggtcttgtcctcaagaggaaggtcccaggggccgagggctggctgcccgtccactcgagaacagggccggaggaccggtagcaaggtccgaagagcctggcgcacctttaccagttgctgtgggtacagccgagcccggaggttcaatgaaaacaacattcaccattgagattaaggacgggcgaggtcaagcttccacaggaagagttcttcttccgaccggaaaccaacgggcagagctcacgttgggcctacgcgcaccgccaactttattgtcaacgtcttcggggggaaagtcaacaatcactcgggtcaacagccctggcactctcgccagacttggctcggtgacccatgtgacttcgttctcccatgcaccaccttctagtaggggtggttgcagtataaagatggaagccgagcctgcagaacctctggctgcagctgtagaagcagctaacggcgcagaacagacacgcgtaaataaggcacccgagggacgctcacctctgtccgcggaagagctcatgaccattgaggacgagggcgtactggataagatgttagaccaaagtacagattttgaagagaggaagctcatcagggccgcacttcgagaactaagacagcggaaaagggaccaacgggacaaggagcgcgaacgaaggctacaagaagcgagggggaggcccggagaagggaggggtaataccgctacagaaacaactactcggcactcacaacgcgctgctgacggatccgctgtgtcaacagtaaccaaaacagagcggctggtgcattcgaatgatggcactcgaaccgcccgaaccactaccgtggagtcctcttttgtaagaaggagcgagaatggatcgggctcaacaatgatgcaaaccaagaccttctcgtcttcgagtagttccaaaaagatggggtcaatcttcgatcgagaagatcaggcctccccacgcgctggcagcctcgccgcattagagaaacgccaggctgaaaagaagaaagaacttatgaaggctcagtccctgccaaaaaccagcgccagccaggccagaaaagctatgatcgaaaagctcgagaaggaaggagctgccggatctcctggcggacccagagctgcagttcaaagatcaacaagttttggggttccgaacgccaacagcataaagcaaatgctgctggattggtgcagggcaaaaacgcgcggatatgaacatgtcgatatccagaacttttcctcctcttggagcgacggcatggccttttgtgctcttgtccataatttctttcccgaagctttcgactacggccaactgtctccacagaacaggagacagaactttgaggtagctttttcctctgccgaaacgcatgctgactgtcctcagctgctggacaccgaggatatggtgaggttacgggagccagactggaagtgtgtgtatacttatatccaggaattttataggtgtttggtgcaaaaaggactcgtgaagactaaaaagtcttag

SEQ ID NO: 240831 - DNA, 2754 bp, synthetic construct
  misc_feature 1..2754: note = Description of Artificial Sequence: Synthetic coding sequence
  source 1..2754: mol_type = other DNA
atggctgatgaagccctcgctggcctggacgaaggagcactgagaaaactgctggaggtcaccgccgacctcgctgaaagacggagaatccggagtgctattcgagaattgcagaggcaagaactggagcgggaagaagaggctctcgccagcaaaaggtttcgtgccgagcgtcaggacaacaaggagaactggttgcattcacaacagcgcgaggcagagcaacgcgcagcgctagccagactggcaggacaactagagagcatgaatgatgtggaagaactcacagccctcctacgttccgcaggcgaatatgaagagcggaagctcattagggcagctataaggagagtgcgcgctcaggaaatcgaggcagccactttggccggtaggctgtactctggtcgtccgaattccggctcacgggaagatagcaaaggcctggcggcacacaggctggaacagtgtgaagtccccgagcgcgaggaacaggaacagcaggccgaagtcagtaagcctaccccaacacccgagggcacttcacaagacgtgacaacggtgactctcttgctcagggcacccccagggtcaacaagctcaagccctgctagtccgtctagctcacccactccagcttctcctgaacccccactcgaaccggcagaggcacagtgtctaaccgctgaagtaccaggtagccccgagccaccaccgagtccgccaaaaacaacatctccggaacctcaggaaagccccaccttgccatccacggagggacaggttgtaaataaactgctgtcagggcctaaggaaacacctgcagcacaatctcctacgcgcggaccctccgacaccaagagggcagatgtggctggcccacggccatgtcaacgatctctgtctgtgcttagtccacggcaaccagcccagaaccgggaatctactcctctggcaagcggaccctcaagcttccagcgagcgggttcggtgcgggatcgggtccataagttcacctccgactcccctatggccgcaaggcttcaggacggaaccccgcaggctgccctcagcccacttacgcctgccaggctccttgggcctagtctcacatcgaccacccctgcctcctcctcttcgggtagctcaagcagaggtccttccgatacatcttctcggttcagtaaagagcagcggggtgttgcccagccattggcacagctgcgaagctgtcctcaagaggagggacccaggggaagaggactcgctgcacggcctctagagaatcgtgctgggggacccgtggctaggtccgaggaacctggtgccccattgccagtcgctgtgggcacagcggagccaggcggaagtatgaagactacctttaccattgagataaaagacgggcgtgggcaggcctcaactggtcgggtgctgctacccaccggcaatcagcgagccgaactcacgttgggtctacgggctcctcccacacttctgagcacctcctcaggcggtaagagcactattactcgggttaactcaccagggaccctggccagactcggtagcgttacacacgttaccagcttcagccatgctccacccagctctcggggaggctgctctatcaaaatggaagctgaacctgcggagcccctggcggcagctgtggaggcggcaaatggtgcggagcagaccagagtcaacaaagctcccgaaggccgtagcccactgtccgcagaggagctgatgaccatcgaagacgagggcgttttggataaaatgctcgatcagagcactgatttcgaagagcgcaagctgatacgagcagctttacgcgagctgcggcaaaggaagagagaccagagagataaggaacgggaaaggaggctgcaggaggcccgtggacggccaggggaaggccgaggcaacaccgccacagagacaaccacgcggcactcgcagcgagccgctgatggatctgcagtcagcacagtaacgaaaactgaacggctcgttcactcgaacgacggcacacgtacagccaggactacaacagtcgaaagctcctttgtgaggcggagtgagaacgggagcggtagtaccatgatgcagacaaaaactttcagctcatcgagcagctcgaagaaaatgggttcaatcttcgacagagaggatcaagcctctccccgagcgggttctctggcagctctggaaaagcggcaggctgagaagaagaaagagcttatgaaggcccagtccctcccaaaaacaagtgcctcacaggctcgcaaggcaatgattgagaaactcgaaaaggagggcgcagccggatctcctggaggcccacgtgccgcagtccagcggtcaacttccttcggcgtgcccaacgcgaactctatcaaacagatgctcctggattggtgccgcgcaaagactcggggatatgagcatgttgacatccaaaacttttcaagtagctggagtgacggtatggctttctgcgcccttgttcataatttcttcccagaggcgttcgactacgggcagctcagtccccagaatagaagacagaatttcgaagtggcattcagcagtgctgagatgctggtggactgcgtccctctagtggaggtggatgatatgatgattatgggaaagaaacccgatcccaaatgcgtgtttacatacgtccagtccctttataaccacctccggcgacacgaactgcgattgaggggtaaaaatgtgtag

SEQ ID NO: 240832 - DNA, 888 bp, synthetic construct
  misc_feature 1..888: note = Description of Artificial Sequence: Synthetic coding sequence
  source 1..888: mol_type = other DNA
atggaggctgagcccgcagagcctcttgccgcagcggtagaagccgctaatggtgccgaacagactcgcgtgaataaagcaccagagggcaggtcacctctgtcagccgaggagctcatgacaattgaggatgagggggtgctggacaagatgctggatcagtccacggacttcgaagagcggaagctcatacgtgctgccctcagagagttgcggcagcggaaacgcgacggtagtggcagcaccatgatgcagacaaaaacgtttagttccagcagctcatctaagaagatgggttccatcttcgatagagaggaccaggcttcgccaagggccggatcgctagcagcacttgaaaaaagacaggcagagaagaaaaaagagctaatgaaggcacagagcctcccaaaaacgtccgctagccaggctcggaaagccatgattgagaaacttgaaaaagagggcgcagcaggctctccgggagggccacgggcagcagtccagaggtctacctcattcggggtccctaacgccaactcgattaagcaaatgctcctggattggtgtcgtgctaaaaccagaggatatgagcacgtggacatccagaatttcagttcctcatggagcgatggcatggccttttgcgctctagtgcacaatttctttccagaggcatttgattacggccaattgagtccccagaatcgaagacagaacttcgaagtggccttcagctccgctgaaacacatgccgattgtccccaacttctagataccgaggacatggtccgcttacgtgagccagactggaaatgtgtgtacacatatatacaggagttctacaggtgtttagtgcagaaaggtttagtaaagacaaagaagagctag

SEQ ID NO: 240833 - DNA, 2817 bp, synthetic construct
  misc_feature 1..2817: note = Description of Artificial Sequence: Synthetic coding sequence
  source 1..2817: mol_type = other DNA
atgacttgtctctcacaccctttgcaactggaagttacagcggacctagcagagagaagacgaattcgaagcgcaattcgggaacttcagaggcaggaactggagagagaagaggaagcactggcgtccaaacggtttcgcgctgaacggcaggataataaggaaaattggctccacagtcagcagagagaggctgagcagagggcagctctcgcccgtctagccggacaattggagagcatgaatgacgtggaggagctcacagcattactgcgatcagctggggagtacgaggaaaggaagctgatcagggcagccatcagacgcgttcgcgcacaagagattgaagcggcaactctggctggcagattgtattccggaagacccaacagcggttcccgggaagacagcaagggattagctgctcacaggctggagcaatgcgaggtccccgaaagagaggagcaggaacagcaagctgaggtgtctaagccaactccaaccccagagggaacaagccaggacgtgaccacagtcacgctcttgttgcgcgctcctccaggaagcacatcctcaagccccgcttcgccttctagtagtcccacccccgctagccctgaacccccactggaaccggcagaagctcagtgcttaactgccgaggtgcctggcagccccgagccgcctcccagcccaccgaaaaccacttcgcctgagccgcaagaaagtccaacattaccaagtacagagggacaagtcgtcaacaaattgctctcggggccaaaagagacccccgctgcccagagcccaacccgtgggcctagcgacacaaagcgggcagacgtggcaggcccacggccttgtcagagatccctgagtgttctgtccccccgacagcctgcccagaatcgggagagtactcctttagcaagcggcccatccagcttccaaagggcaggatcagttcgggaccgagtgcataaattcacatccgattcaccgatggccgcaaggctgcaggatggcaccccacaagccgctttgagcccattgacacctgccaggctccttggaccaagccttacaagcacaacccccgcaagcagttcatcgggaagttcatcccgaggaccctcagatacatcctcacgcttctccaaggagcaacgcggagtggctcagccgctggcgcagttgcgatcttgtccacaggaagaagggcctcgtggcagagggctagccgcacgaccacttgagaatcgcgctgggggtcccgtggcgagaagcgaggaacccggagcccctctcccagtggcagtgggcaccgcagaacctggcggatccatgaagacgacctttaccatcgaaatcaaggatggacgaggccaggcatccacggggagagtgctgctccccacaggaaatcaacgggctgaactcactcttggacttcgcgctccccctaccctcctgtccacatcttcagggggaaagagcactataactcgtgtgaattcccccggaactctggctcgactcggttccgttacgcatgtgacatccttcagccacgcccctcctagttcacgcggtggttgtagtattaaggcagccgaagacgccggtacccccgttgctcatccccctgcgttctccaccagaagaaggtcctcaaccggcactactcgttctacaagcctcatggaagcagagcccgcagaacccctggcggctgccgtagaggctgccaatggagccgagcagacacgtgtcaacaaggctcccgaaggccgaagtccactctctgccgaggaactgatgaccatcgaagatgaaggcgttctcgataaaatgttagaccagagcactgacttcgaggagaggaaattaattagggccgcactgagagagctgcgacagcggaagcgggatcagcgcgacaaagagagagaaaggaggttgcaggaggcaaggggccgacccggtgagggcagggggaacacagccaccgaaaccacaacgcgtcattctcagcgggcagcggacggctcagctgtgagcaccgtcacaaagacagagcgcctcgtccattcaaatgacggcacacgaaccgccagaactaccacagtcgagtccagcttcgtccggagatctgagaatggcagcgggagcaccatgatgcaaactaagactttttcctctagcagttcttccaagaagatgggtagcatattcgatagagaggaccaagcatcccctagggccggatcccttgctgcacttgagaagcgacaggccgagaaaaagaaggaactcatgaaagcccaatcccttccaaagaccagcgccagccaagccagaaaagctatgattgaaaaattggaaaaggagggtgcggcaggctctcccggagggcctagggccgctgtccagagatctacgtcattcggcgtgcctaatgcaaattcaatcaagcagatgctgctcgattggtgtagggcaaagacgcgaggctatgagcatgtcgatatacaaaacttctcctcttcttggtctgacgggatggctttttgcgctctggtgcacaacttttttcccgaagccttcgactatggtcagctctccccccagaaccgtagacagaattttgaggttgctttctcttctgctgagacacatgcagactgccctcaactcctcgatacagaagatatggtgcgcctccgggaaccagattggaagtgcgtctacacttacattcaggagttctatcggtgtcttgtgcagaaaggactcgtgaagacgaaaaagagttag

SEQ ID NO: 240834 - DNA, 114 bp, synthetic construct
  misc_feature 1..114: note = Description of Artificial Sequence: Synthetic coding sequence
  source 1..114: mol_type = other DNA
atggccgacgaagcactggcagggttagatgagggtgcattgaggaaattgcttgaggtgactgctgatcttgcagagcgtcgacgcattcgcagcgctatccgtgagctttag

SEQ ID NO: 240835 - DNA, 2823 bp, synthetic construct
  misc_feature 1..2823: note = Description of Artificial Sequence: Synthetic coding sequence
  source 1..2823: mol_type = other DNA
atggccgatgaggccctggccggactcgacgaaggtgccttgagaaagctgcttgaggttacagccgatctcgcagagagaaggcgaataagatccgccattcgggagctccagagacaggagctagaaagggaagaggaagcgctcgcttctaagcgattcagggccgagcgacaagacaacaaggagaattggcttcatagccaacagagggaagccgaacaacgggcagccctggccaggctggccggacagctcgaaagtatgaacgatgtggaggagctcactgccttgctgcgcagcgcgggagagtacgaagaaaggaagctcatcagggccgcaatccgcagggtgagagcacaggagatagaggcagcgacactagccggacggctctactccggacgtccaaattccggttctcgcgaggatagtaagggtcttgccgctcacagactggagcagtgcgaagtgccggaaagagaggagcaggagcagcaggcggaagtgtcgaagcctacacccaccccagagggaacctcacaggatgtcactactgtgacgctccttctgcgcgctcctccaggctccaccagctcctcccccgcaagccccagctcatcccccacccctgccagtccagagccccctttagaaccagctgaggcccagtgccttactgcagaggtccctgggtcaccagaaccccctccatctcccccaaaaacaacctcaccagagccacaagagagtccaaccctaccatccactgaaggtcaggtagttaacaaactgcttagcggccctaaggagacacctgccgctcaaagcccaacacgtggcccttctgacacaaagagggcggacgtcgctggaccgagaccctgtcagagatccctttctgtcctctccccaaggcaaccagcgcagaaccgggagtccaccccgctggcgagcggtccgtccagtttccaacgcgctggatcagtccgagatcgggtgcacaaatttacttccgatagccccatggccgcacgactacaggacggtacccctcaagctgctttgagcccgctcactccagccagacttcttgggccatccctcacttcaaccacccctgcatcttcctcatcaggaagttctagccgagggccatccgacacctccagcagattcagtaaggagcagcgaggcgtggctcagccactggctcagttgagatcgtgcccacaggaggaagggcctcgcggtcggggactcgcagccaggcctctagaaaacagagccggtggacccgtcgcgcgttctgaggagcctggcgcacctctgcccgtcgcggtcggtaccgccgagcccggtggctccatgaaaactacctttacgattgaaattaaagacggaagagggcaggcttcaactggaagagtgctccttccaacagggaatcagcgagcggagctcactctgggccttagggcaccccctactcttctgagtacatccagcggagggaagtccacaatcactagggtaaattctcctggcactttagccaggcttggttccgttactcacgtgaccagcttttcacacgctccaccatcttccagaggcggttgctccattaagatggaagcagagcctgcggaaccgctggctgctgctgttgaggccgcaaatggtgccgaacagacccgggttaacaaagcccctgaaggcaggagtcctcttagtgctgaagaattgatgacaatcgaggacgagggtgttctggacaaaatgctggatcagagcactgactttgaggagaggaaactgatccgcgcagctctgcgagagctgagacagcggaaaagggatcagcgggacaaggaaagggaacgacggttgcaggaggctaggggaagacccggtgagggtcgaggcaacacagcaacagaaactacgacccgccattcacagcgcgcagccgatggctccgcagtttccactgtcactaaaactgagcggttagttcactcaaacgatgggacaagaacagcaaggacaacgaccgttgaaagtagtttcgtgagacgatctgagaacgggtcgggctcaacaatgatgcagaccaaaactttctcctcctcctcttcgagcaaaaagatgggtagcatcttcgatcgagaagaccaggcctcacctagggccggaagcttagctgccctggaaaagagacaggcagaaaagaagaaagagctgatgaaagcgcagagccttcctaagacaagcgctagccaggcgcgaaaggcaatgatagaaaagctggaaaaggagggcgctgcaggatcacctggcggtcccagggcagccgtgcagagatccaccagctttggtgtgcccaacgcgaatagcatcaagcagatgttgcttgattggtgtcgtgccaaaacaaggggatatgaacacgtcgacatccagaatttcagctcctcctggtccgatggcatggctttctgtgctttggtgcacaattttttccctgaggcgtttgattacggacagctttcaccccagaaccgtagacagaacttcgaagttgcgttttcaagcgccgaaacgcacgctgattgcccgcagctgctcgacactgaagacatggtgcggctccgcgagcccgactggaaaatgttagttgattgcgtgcccctggtggaggtggacgatatgatgataatgggaaagaagcctgaccctaaatgtgtctttacctacgtccagtcactgtacaaccacctccggagacatgagctgagattaagaggtaaaaacgtttag

SEQ ID NO: 240836 - DNA, 1374 bp, synthetic construct
  misc_feature 1..1374: note = Description of Artificial Sequence: Synthetic coding sequence
  source 1..1374: mol_type = other DNA
atggagcagaaagagggaaagctgtctgaagatggcaccaccgttagccccgcagcagacaaccctgaaatgagtgggggaggcgctcctgctgaagaaaccaagggcactgccggaaaggctataaatgaaggacctcctacggaaagtggcaagcaggagaaggcccctgccgaggatgggatgtctgctgaattacagggcgaagcaaatggtcttgacgaggttaaagtagaatcccagcgggaagccggaggaaaggaagacgctgaagcggagctgaagaaagaggacggcgaaaaggaagaaacaactgtgggctcccaggagatgacgggacgcaaggaggagacaaagtcggaaccaaaggaggctgaggaaaaagaaagtacgttggcctctgaaaagcaaaaggccgaggaaaaagaggccaaacctgagtccggacagaaggcagatgcaaatgatagagacaaaccggagccaaaagcgactgtcgaggaggaagacgccaagacagcctcgcaagaggagacagtcgtggaggacgaagcaaaggcggaacccaaagaaccggatgggaaagaggaggccaaacacggtgccaaggaagaggccgatgaaccaggctctccttcggaggaacaggaacaggatgttgagaaggaacctgaaggtggagcgggtgtgatcccttcttcacctgaggagtggccggagagccccactggggaggggcacaacctctctacggatggccttggacccgattgtgttgcttccggccagacaagtccttctgcctccgaatccagcccctccgacgtcccccagtctccacccgagtccccatcgagcggcgaaaagaaggagaaggctccagagaggagggtttcagccccagctagaccacgcggacccagagcccagaatcgcaaggcaatagtggacaaatttgggggtgcggcaagcggaccaactgctctgtttagaaacacaaaggctgccggtgcggcaattggcggtgtgaagaatatgctcctcgagtggtgtagggccatgacaaagaagtatgaacatgtggatatccagaactttagtagctcatggtcaagcgggatggctttttgcgccctcattcacaaattttttcctgatgcatttgattatgccgagctggatcccgctaaacgacggcacaactttaccctggccttctcaactgctgagaagctggccgactgtgcacagctacttgacgtggacgatatggttcgtttggctgtccctgattcaaagtgcgtgtacacatacatccaggagctgtataggtccctcgttcaaaaaggcctggtgaagaccaaaaaaaaatag

SEQ ID NO: 240837 - DNA, 1539 bp, synthetic construct
  misc_feature 1..1539: note = Description of Artificial Sequence: Synthetic coding sequence
  source 1..1539: mol_type = other DNA
atgctgcccggagctgtgggtgagagtgattgctcagcggaggcccgagagaaaatggagcagaaagagggcaaactgtctgaggatggcactactgtatcccctgcagccgataatcctgaaatgtccgggggaggagcacctgccgaagagaccaagggaactgccggtaaagccatcaacgagggccctccaacggagtctgggaagcaagaaaaggcccctgctgaggatggtatgtctgctgagctccagggtgaggccaacggattggacgaagtgaaagttgagtctcaacgagaagcgggaggtaaggaagatgctgaagctgaactaaagaaggaggatggggaaaaagaagaaaccactgtggggtcgcaggagatgacggggcgaaaggaagagactaaatctgagcctaaggaagccgaggagaaagaatcgacactcgcttccgaaaagcagaaagccgaggagaaggaggctaaaccagaaagcggacagaaagccgatgctaacgacagagacaaacccgagccgaaagcaacagtagaagaagaggacgctaaaacagcttctcaagaggagactggacagcgaaaagagtgtagtacagaacccaaagaaaaagcaacagatgaagaagccaaggctgagtcccaaaaagcagttgtggaggatgaggccaaagccgaacctaaagagcccgacggaaaagaagaggcaaagcacggtgcaaaggaggaagcggacgctaaggaggaggcagaggacgctgaagaagccgagccaggcagccctagtgaggagcaagaacaggacgtagaaaaggaacccgagggaggtgctggagtcataccctcctcgcctgaagaatggcctgagtcacccactggcgagggtcacaatctttcaactgatggcctgggaccagattgtgtcgctagtggacagacttcccctagcgcttctgagtcctcaccatctgacgttcctcagtctcctccggagagcccctcaagcggcgagaagaaagagaaagcacccgaaaggagagtgagcgccccagccaggcctcggggacctcgtgcccagaatcggaaagctattgtggacaagttcggcggagccgcatcgggtcccaccgcacttttcaggaacacgaaagctgccggtgcagccatcgggggagtaaagaacatgcttctggagtggtgcagagcaatgaccaaaaaatacgaacacgtcgatattcagaattttagctctagttggagttctggaatggcgttttgcgcactgatccataagtttttccccgatgcgttcgactacgctgagctggacccagccaaacgtcggcacaacttcacacttgccttctctacagcggagaagttggctgactgcgcacagctgctggacgtggatgacatggtgcggctagcagtcccagactccaagtgcgtctatacctatatccaggaactctatagatccctggttcagaaaggcctggtcaagaccaagaagaaatag

SEQ ID NO: 240838 - DNA, 1485 bp, synthetic construct
  misc_feature 1..1485: note = Description of Artificial Sequence: Synthetic coding sequence
  source 1..1485: mol_type = other DNA
atggagcaaaaggagggcaagctgtctgaggatggcaccactgtatctcctgccgcagataatcccgagatgtctgggggaggcgcacctgcagaggagaccaaaggtactgccggaaaggccataaacgaggggcctcccaccgaaagcgggaaacaggagaaagctccagccgaagatggcatgtcagccgagctgcagggcgaagccaacggactggatgaggtcaaggttgagtctcagagggaggctgggggtaaagaggatgccgaggccgagctgaaaaaggaagacggcgagaaggaggaaaccacagtgggctcccaggaaatgactggaaggaaggaggagacgaagagtgagccgaaggaggccgaggaaaaggaatctaccttagcctcagagaaacaaaaagccgaagagaaagaggccaagcctgagagcggacagaaagctgatgccaatgatcgagacaagccagaaccaaaggccacagttgaagaggaagatgcaaaaactgccagtcaagaagaaaccggccagcgcaaggagtgtagcacagagccaaaggagaaagcgacggacgaggaggcaaaagccgagagtcagaaagctgttgtggaggacgaggccaaggcagaacctaaagagccagatggaaaagaggaagcaaaacacggtgctaaggaggaggctgatgccaaggaggaggcagaagacgcggaggaagctgaaccgggaagcccatcagaagaacaggaacaggacgtcgagaaggaacccgaaggcggtgccggtgtgatacctagttctcccgaggaatggcccgagtccccaaccggcgaaggacacaacctgtcgacagatggtctgggtcctgactgtgtcgcatctgggcagaccagtccctcagcttcggaaagctcacctagcgatgtgccacagtctccgccagaatctccatcttctggcgagaagaaggaaaaagctcctgagaggcgggtatccgccccagcacgacccagaggaccgcgagcgcagaatcggaaggccattgtggacaaatttggcggtgccgcttccggccctacggctctcttccgcaatactaaggccgctggagccgcaatcgggggagtgaagaatatgctgctggaatggtgcagggcaatgactaaaaagtatgagcatgtcgacatccagaattttagcagctcatggagcagcggcatggccttttgcgctctgattcataagttctttccagacgcctttgactacgctgagctcgatcccgcaaagcgcagacataattttaccttggcattttcaaccgcagaaaaactcgcagactgcgctcagctcctggacgtcgacgatatggtcaggctggccgtgcctgattctaaatgcgtgtacacctacatacaggagctgtatcgatccctggtacagaagggtctggtcaagactaagaaaaaatag

SEQ ID NO: 240839 - DNA, 312 bp, synthetic construct
  misc_feature 1..312: note = Description of Artificial Sequence: Synthetic coding sequence
  source 1..312: mol_type = other DNA
atgagtgaagaaaagcccaaggagggcgtgaagacagaaaacgatcacattaacctgaaagtggcagggcaggatggcagtgtagttcagttcaagattaaacgccacacacccctgagcaaactcatgaaagcctactgtgagcgccaaggattatctatgagacagattagattccggttcgacggccagccaatcaatgagaccgataccccagctcagctggaaatggaagatgaggacacgatcgacgtttttcaacagcagaccggaggagtcccagagagctccctggcaggacatagcttctag

SEQ ID NO: 240840 - DNA, 426 bp, synthetic construct
  misc_feature 1..426: note = Description of Artificial Sequence: Synthetic coding sequence
  source 1..426: mol_type = other DNA
atgtcagaggaaaagcctaaagagggcgtgaagaccgaaaatgatcacatcaatttaaaggtggcgggtcaggatggctccgttgtgcagtttaaaatcaagcggcacacccctttgtccaaactcatgaaggcttattgtgagcgacaggttagacatctcgctcctccacagtccctccccgtgtgcgctctggtcttgtgcgtacctggcatacccagggccagggctagtagggggtggacacaaatgcagctgcccgagggtttgtccatgaggcaaattcggttccgctttgatggccaacccattaatgagaccgacacacctgctcagctggagatggaggacgaagacactatcgatgtatttcagcagcagacaggcggagtgcctgaatcttccttagctggtcattccttctag

SEQ ID NO: 240841 - DNA, 288 bp, synthetic construct
  misc_feature 1..288: note = Description of Artificial Sequence: Synthetic coding sequence
  source 1..288: mol_type = other DNA
atggccaacgagaaaccgacggaggaggtgaaaacagaaaacaacaatcacatcaacctcaaggtcgcaggccaggacggttctgtagtgcagtttaagatcaagagacagaccccactgtcgaagctgatgaaagcgtattgtgagcccaggggtctgtctgttaagcagatcagattccggttcggaggccagcccatttccggtacagacaagccagcacagctcgaaatggaagacgaagacacaatagatgtgttccagcagcctaccggaggcgtttattag

SEQ ID NO: 240842 - DNA, 411 bp, synthetic construct
  misc_feature 1..411: note = Description of Artificial Sequence: Synthetic coding sequence
  source 1..411: mol_type = other DNA
atggcgggagccggaagcgctgccgtatccggagcaggaacacctgtggccggtccaacgggcagagatctcttcgcagagggactcctcgaatttctgcgacctgccgttcagcagctcgattcccacgtgcatgctgtgcgggaatcgcaggtcgagttgcgagagcagatcgacaatcttgcaaccgaattgtgcagaattaatgaggatcagaaagtcgccctagatcttgacccatatgttaagaaactcctgaacgcaagaaggcgcgtggtacttgtcaacaatatcctacagaatgcccaggagagactcagaagacttaatcacagcgtggccaaggagactgcccgacggagggctatgctcgattctggcatctatccccctggtagcccaggcaaatag

SEQ ID NO: 240843 - DNA, 2298 bp, synthetic construct
  misc_feature 1..2298: note = Description of Artificial Sequence: Synthetic coding sequence
  source 1..2298: mol_type = other DNA
atggccggattcaaacgtggttacgacggaaagatcgccggtttgtacgacctggacaaaacactaggcagaggtcattttgccgtggtcaagctcgctcggcacgtcttcactggcgaaaaggtggccgtaaaggtgatcgacaagactaagttagatacgttagcaaccggccacctatttcaagaagtgaggtgtatgaaactcgtgcagcatccaaacatagtgaggctctacgaggtgatcgatacccaaaccaaactttaccttattctggagcttggggacggcggtgacatgttcgactacatcatgaaacatgaggaaggtctgaatgaagacttggctaagaagtattttgctcagattgtgcatgcaataagctactgtcacaaactccatgtcgtacatagggaccttaaaccagagaacgtggtgttcttcgagaaacaagggcttgtgaaactaactgacttcgggttctcaaacaaatttcagcccggaaagaaactgaccactagttgtggatccctggcctactccgccccagagattctattaggcgatgaatacgatgcacctgcagttgatatttggagcctgggggtgatactatttatgttggtgtgcggccagccaccatttcaggaagccaatgactccgaaactctgacgatgattatggattgcaagtacacagtcccaagtcatgtgtcaaaggagtgcaaggatttgatcacccgcatgctccagcgggatcctaagcgacgcgcttcactggaagagatcgaaaatcacccgtggctgcagggagttgatccctcaccagcaactaagtacaatatccccctggtttcatacaaaaatctgagcgaggaggaacataactccattatccagcggatggtcttgggcgatattgccgatagagacgcgattgtcgaggctctggagacaaacaggtataaccatatcaccgctacatatttcctactagcagaaagaatcttgcgggaaaagcaggaaaaggaaattcagactcgctctgcctcaccgtctaatattaaagcccagttcaggcagtcttggccaacaaagatagatgtgccccaagacctcgaggatgatttaacagcaacaccactgtcgcatgctaccgtgcctcagtcacctgctcgggcagcggactctgtgctgaacggccatcggagcaaggggctgtgcgattcggcaaagaaagatgacctcccagagctagctgggcctgccctgagtacagttcctcccgcatcacttaaaccgacagccagcgggagaaagtgcctgttccgggtggaagaagacgaagaggaggacgaagaggacaaaaaaccaatgtccctatccactcaggtcgtactgcgtaggaagccaagcgtcacgaacagattgaccagtaggaagtcagcaccggtcttgaatcaaatttttgaggagggggaatccgacgacgagttcgatatggacgagaaccttcctcctaaacttagtcgcttgaaaatgaacatcgcctcccctggtacggttcacaaacgttaccaccgccgaaagtcccaaggaaggggctcatcctgctcttcgagcgaaacttctgatgacgactcggaaagtcggaggagacttgataaggattccggcttcacgtatagttggcaccgcagagactcaagtgagggcccaccgggttcggaaggcgatgggggaggccaaagcaagcccagcaatgccagcggtggagttgataaagcttcgccctcagaaaacaacgccggaggaggctcaccttctagcgggtccggcggaaacccaactaacacctcaggtacaacccgacgctgtgctgggccatctaacagtatgcagttggctagccgaagtgcaggggagctggtcgaaagcttaaaactcatgtctctctgcctgggaagtcagctgcacggtagtaccaaatacatcattgacccccagaacggcttatccttttcttctgtcaaggtacaggagaaaagcacatggaagatgtgtatttcctctactggaaatgccggacaagtaccagccgtgggagggatcaaatttttctcagatcatatggccgatacaaccaccgagctggagcggattaaatcaaagaacttgaagaataatgtgctccagctgccactgtgtgaaaaaacgatttctgttaatatccagcggaacccgaaagagggactcttatgtgctagctcccccgcttcgtgttgccatgttatctag

SEQ ID NO: 240844 - DNA, 2298 bp, synthetic construct
  misc_feature 1..2298: note = Description of Artificial Sequence: Synthetic coding sequence
  source 1..2298: mol_type = other DNA
atggccggattcaaaagaggctatgacggaaagattgctggcttgtacgaccttgacaagacacttgggagagggcactttgcagttgttaaattagccaggcacgtcttcacgggggaaaaggttgctgtgaaggtgattgataaaaccaagctcgacacactggcaactggtcaccttttccaagaagtcaggtgtatgaagttagtgcagcatccaaatattgtgagactttacgaggttattgacacccagactaagctctacctgatcctcgagcttggcgatggaggagacatgttcgattacataatgaagcatgaagagggactgaatgaggatctggccaaaaagtactttgcccagatagtgcacgccatatcttattgtcataaacttcatgtagtacacagggacctgaagcccgaaaatgtggtttttttcgaaaagcaaggtctggtgaagctcactgactttggattttcgaacaaattccagcccggaaaaaagcttaccacatcatgcgggtctctcgcctactccgccccagagattctcctgggcgatgaatacgacgcccctgcagtagacatttggtccttaggcgttattctgtttatgttggtctgcggccagccacccttccaagaagccaacgactctgagaccttgactatgatcatggactgtaaatacactgtgccttcacatgtctcaaaagagtgtaaagatctgatcacgcgcatgctgcagagggatccgaagaggagagcttcactggaggaaattgagaaccacccatggctgcaaggcgtggacccctcccctgcaacaaagtacaatatacctctggtgtcctataagaacctgtccgaagaagagcataattctattatccagcgcatggtgcttggcgacatcgcggatcgcgacgctatcgtggaggccctcgagacaaaccgctacaatcacattactgccacctacttcctgctagctgagcgtattctgcgtgagaagcaggagaaggaaattcaaacacggtctgccagcccttctaacataaaagctcagttcaggcaatcttggcccaccaaaatcgacgtgccacaggaccttgaggatgatctgactgccacccccctgagccatgcgacggttccccaaagcccagctcgtgccgctgatagtgttctgaatggacaccgtagcaaaggcctttgcgacagcgcgaagaaggacgacttgcccgagttagcaggaccagctctctctaccgttccaccggctagtttgaagcctacagcgtccggcagaaagtgtctgtttcgggtggaggaagacgaggaagaggacgaagaggataaaaaacctatgtccttgagtacccaggttgtgctgcgccgaaaaccttcagtgacaaataggctgacgtctaggaagtctgcccctgtgttgaatcaaatcttcgaagagggagagagcgacgacgagtttgatatggatgaaaaccttccccctaaactctctcgcctcaagatgaatatcgcctctcctggaacggtgcacaaaagataccatcgcagaaagtcccaggggagaggctccagctgtagctccagcgaaacctctgatgacgactctgagagtaggagaaggctagataaagacagtgggttcacttatagctggcataggagagactcttcagaaggtccacctgggtcggaaggcgacggcggtggccagtccaagccaagcaatgcaagtggaggggtagataaggcttcaccatctgagaataacgccggaggcggaagcccatcatcgggatcgggtggtaacccaaccaacacgtccggtactactagaaggtgcgccggtccctctaacagcatgcagctcgctagtcggagtgctggagaattggtcgagagccttaaactcatgagtctctgcctgggctctcagttgcacgggtccacaaaatacattattgacccccagaatggcctgtctttctcgtcagtaaaggtgcaggaaaaatccacctggaaaatgtgtatcagctctacaggcaatgccggacaggtgcctgccgtgggcggtattaaatttttctccgaccacatggccgatacgactacagaactggaacgcattaaaagtaaaaaccttaagaacaatgtacttcagctgccattatgtgagaagaccatttccgttaacatccaaagaaacccgaaagaaggcttgctctgtgctagttcccccgcatcttgttgccatgtcatctag

SEQ ID NO: 240845 - DNA, 2298 bp, synthetic construct
  misc_feature 1..2298: note = Description of Artificial Sequence: Synthetic coding sequence
  source 1..2298: mol_type = other DNA
atggctgggttcaaacgcggatacgacgggaaaattgctggcctgtacgatctggataagacactgggcagaggtcacttcgcggtagtaaagctggctcgccatgttttcactggcgagaaagtcgctgtgaaagtgatcgacaagacaaagctagacaccctggcgaccggccacctttttcaggaggtgcgatgcatgaagctggtacagcacccgaacatcgtgagactctacgaggtgatagatacccagacaaaactgtacctgatactcgaactgggtgacggcggtgacatgttcgactacatcatgaagcacgaagagggccttaatgaagacttggctaagaagtatttcgcccagatcgtacacgccatttcctattgccataagctccacgtggtgcaccgtgacctgaaaccagagaatgttgtttttttcgagaagcaaggcctggtgaaacttacagacttcggcttttcaaacaaatttcagcccggtaagaaacttactacctcctgcgggagcctggcctacagtgcccctgaaatcctcctgggagacgagtatgatgctccggctgtcgacatctggtcacttggcgtgatcctcttcatgcttgtgtgcggacagcccccatttcaggaggcaaacgactcagagacacttacaatgattatggactgtaaatatactgttccttcacacgtgagcaaagaatgtaaggaccttatcaccagaatgctgcaaagggacccaaaaagacgcgcatcactggaggagattgagaatcatccctggttgcagggtgtcgatccctcacctgcaacaaagtacaatatccctctggtgtcttacaagaatctgtccgaagaggagcataatagcatcatccaacggatggtcctaggagacatcgccgacagagacgcaatcgttgaagctttggaaaccaatcggtataaccacattactgccacttacttcctcttggcagaaagaatcttgcgagagaagcaagaaaaggaaattcagacgcgaagcgctagccccagcaacattaaagcgcaatttcggcagagctggcccacaaaaatcgatgtgcctcaggacctcgaggatgatcttacagccacgccgctatcacatgcaactgttccacagagccctgctagggcagctgactcagtcctgaatgggcatcgctcaaaaggcctatgtgactcagccaagaaggatgacctgcctgaactcgcaggaccagctctgtcgaccgtgcccccagccagcctgaagcctactgcatccggacggaagtgtctgttcagagttgaggaagacgaagaagaagacgaagaggacaaaaagcctatgtctctgagcacccaggtggtgctgcgccgaaagccctctgtgaccaaccgactaacctcaaggaaatcggcacctgtactgaaccagattttcgaagagggggagtcagacgacgaatttgatatggacgaaaaccttcctcctaagttaagtaggctaaagatgaacattgcctcccctggaaccgtccacaaaaggtaccatcgaagaaagtcgcaggggcgtggctcttcctgctcctcttctgagacctccgacgacgactctgaaagtcggcgacgccttgacaaagatagcggtttcacttactcgtggcacagacgagacagtagcgaggggccacctgggtctgagggcgacggaggcggacagtctaaaccatccaatgcatctggtggcgtggataaggcaagcccatccgaaaacaatgcaggagggggatcaccttccagcggtagcgggggaaatccaactaatactagcggcactacaaggcgatgcgccggaccttcaaatagcatgcagcttgcgtcaagatcagctggagagctggttgagtcactgaaattgatgagcctctgcttaggctcccagctgcacggctcgactaaatacatcatagatccccagaacggtctatccttctcatccgttaaagttcaggagaagagtacgtggaagatgtgcatcagcagcaccgggaatgccggtcaggtgccagccgtcgggggaataaagttttttagtgaccatatggctgacaccaccaccgagctggagcggatcaaatccaagaatcttaagaataacgtcctgcagttacccctgtgcgagaaaactatatctgttaatatccaaagaaaccccaaagagggtctgttatgcgccagcagtccggctagttgctgtcacgtgatctag

SEQ ID NO: 240846 - DNA, 9693 bp, synthetic construct
  misc_feature 1..9693: note = Description of Artificial Sequence: Synthetic coding sequence
  source 1..9693: mol_type = other DNA
atgcagtcttccccaagtcctgcccacccacaactgcccgtattgcagacgcagatggtcagcgacggcatgaccgggtctaaccctgtatcccctgcttctagtagctcaccggcttcatccggcgcagggggtatttccccacagcacattgctcaagactcttccctcgatgggcctccgggaccacccgacggagcgaccgtgccactggagggctttagcctttcccaggcggcagacctggccaataaggggccaaagtgggagaaatctcatgccgagatcgccgagcaggccaaacacgaagccgaaattgaaactcggatcgccgagctcaggaaggaggggttctggtcattgaaaagactgcccaaggtgcccgagcctccccgaccaaaaggacactgggattacctttgtgaagagatgcagtggctatctgccgacttcgctcaggaacgccgatggaaaaggggagtcgcgcgtaaagtggtcagaatggtgatccgccaccatgaggagcagaggcagaaagaggagcgagcccgtcgtgaggagcaggcaaagctcagacgcattgcttctacgatggctaaagatgttcgacagttctggagcaacgtggagaaagtggtgcaattcaagcaacagagtcgcctcgaagagaagcgcaagaaagcacttgatctgcaccttgactttatagtgggtcaaactgagaagtacagcgatttgttgtctcagagcttaaaccagccgcttacatcaagcaaggccggatcaagtccttgcctgggttcttcaagcgccgcatcatctccgcctcctccagctagcagactggatgatgaggatggcgacttccaacctcaagaggacgaagaggaggatgacgaagaaaccatcgaggtggaggagcagcaggagggaaatgacgcggaggcgcagaggagggaaattgaactcctccggagagaaggcgagctgccgttggaagaactcttacgcagcctacctccacagctgctcgagggaccctcttctccctctcagacgccatcgagccatgacagcgataccagggacggtcccgaagagggcgcagaagaggaaccgcctcaagtcttagagatcaaacccccaccaagcgctgtaacccaaaggaataagcagccttggcatcccgatgaggacgatgaggaatttacagccaacgaagaggaggctgaggacgaggaggataccatcgcagccgaagaacagttagaaggcgaggtggatcacgcaatggagctgtcggagttggctcgtgaaggcgaattgagtatggaagaactcttgcagcagtacgctggcgcttatgcgccaggcagtgggagttctgaagacgaagatgaggacgaagtcgatgctaattcatccgactgcgagcccgaggggcctgttgaggccgaagagccacctcaggaagattccagcagccagagtgactcagtggaggatcggtctgaagacgaagaagatgaacattcagaggaagaggaaacgtctggaagctctgccagcgaagagagcgagtccgaggaatcagaagacgcccagtcacagtcccaagccgatgaggaggaagaagatgacgattttggggtggaatacctgctggccagagatgaggagcagtctgaggcggacgctgggtccggcccacccacgcctggtccaaccacccttggccctaaaaaggagatcaccgacatcgcagccgctgcagaatcgctgcagcccaagggctacacattggctactactcaggtgaagacccctatcccgctgctgctccgtggccagttacgagagtaccagcacataggcctggattggctggttaccatgtacgaaaagaaactgaacggaatacttgccgatgagatgggcctgggaaagaccatccaaactatctctctcctggctcatctcgcatgcgagaaaggtaattggggtccgcacttaatcattgtgcctaccagcgtgatgctgaactgggagatggagctgaaaagatggtgcccttctttcaagattctgacatactacggagctcagaaggagcggaaactgaaacggcagggttggaccaagcctaatgcctttcatgtgtgtataacgtcgtataaactggtgttgcaggatcaccaagcattcagaagaaaaaattggagatacttgatattggacgaagctcagaacatcaagaattttaaatcgcagcggtggcagtcactcttgaattttaactcacaaagacgcctgcttcttaccggcacaccactccaaaactccctcatggagctgtggtccctcatgcatttcctgatgccacatgtgtttcaatcgcatcgtgaatttaaggaatggtttagtaaccctctcactggcatgattgagggctcccaggaatataacgagggattggttaagaggctgcataaggtgctaaggccttttttgctgaggcgggtcaaagttgacgtggagaagcagatgcccaaaaagtacgagcatgtgatccggtgtaggctctctaaaagacagcggtgcctatacgacgactttatggcacaaaccacgactaaggagaccctggcaactggccacttcatgagcgtcataaacatactgatgcagctgcggaaagtctgtaaccatccaaacctcttcgatccacggccagtaaccagcccctttatcacccctggcatttgtttttctaccgcctctttagtcttgagagcgaccgatgtacacccccttcagaggatcgacatgggtagattcgacttaatcgggctggaaggtcgtgtcagtagatatgaggccgataccttcttgcctaggcaccgacttagccgccgagtgctgctggaagtggccaccgccccagaccccccacctcggccaaaacctgttaagatgaaagtgaacaggatgctacaacctgtgccaaaacaggaagggaggacggtagtggtcgtcaataacccacgggctcctctgggcccagtaccagtcagacccccacccggacctgaactgagcgctcagccaactcccggtccagtccctcaagttttgcctgcctctttgatggtcagtgcctcccccgctggacctccgctgattcccgctagtcgaccccctgggccagttctgctgccaccgctacagcctaatagcgggtctctgccacaggtgctcccttctcctctcggtgtgctgtcaggtacatctcggcctcccaccccgaccctgagcctgaagcccacacccccagcgcctgtgcgtctctccccagcacccccacctggcagttctagccttctgaagcccttgactgtgccgcctggctatacctttcccccagccgctgctaccaccacctccacgacgaccgccactgctacaaccacagccgtgccagctcccactcccgctccacagcgcctcattctgtctcctgacatgcaggcgagacttccgagtggcgaagttgtgtcgattggacagctagcctccctggcacagaggccagtggcaaatgcaggcggaagtaagcccctgacgtttcagatccaaggcaacaagctgaccttgacgggtgcccaggtgagacagctggcagtgggccagccaaggccactgcagaggaatgtcgtgcacctggtttctgcgggagggcagcatcacctgatctctcagcctgcgcacgtggctctgatacaggctgtggcccctacaccaggccctactcccgtgagcgtgctgccttcatccaccccctccacaactcctgcaccaaccggcctgtccttgccactggcagcaaaccaggtgcctcccactatggtcaacaatacaggcgtcgtcaagattgtagtccggcaagctcccagagatggacttacgcccgtgcctcctctggctccagccccaaggccaccgagctcaggactgccggctgtgctaaatcctcgacccacactgactcctgggcgtttgccgacacctactctgggcacagccagggcccctatgccaactcctaccctagttcgcccacttctgaaactggtccacagtccgtccccagaggtgtcagctagtgctccaggtgcagcacccttgaccatttcctctcccctgcacgtgccttctagtctgcctggacctgctagttcccccatgcctatccctaatagttcaccactcgcctctcccgtgagtagcacagtcagcgttccactgagctcaagcctgcccatcagcgtgccaacgaccctgcccgcacccgcttcagctcccctgacgatccctattagtgctccacttacagtctccgccagcgggcctgctttgctcaccagtgtaacgccacctctcgcacccgttgtccccgcagcccctgggcctcctagtttggctccatcgggtgcttcacctagcgcttccgcccttacactaggcctcgctacagccccttcattgagttcctctcagactccagggcacccgctgttgcttgctcccaccagctcccacgttccaggattgaatagtacagtagcccctgcctgctctcctgttctggtaccagcatctgcactcgcttccccctttccaagtgcccctaacccagcaccagcccaggcttccttgttagcgccagcttcatcggcttcccaagccctggctactccattggctcctatggcggcaccacagaccgccattttggcaccaagcccagcccctcccctggccccacttccagtgcttgcaccctcgcctggggcagccccagtgctggcctcttctcagactcctgtgcccgtgatggcaccaagtagcactcctggaaccagtctcgccagcgcgtctccggttccagcacctacccctgttttggcacccagctccactcaaaccatgctcccagctcccgtcccttcccctctgccaagtccggcatccactcagactctggctctagccccagcactcgcccctacattgggcggatcaagcccaagtcagactctgagcctgggcacgggtaatcctcaaggacccttccccactcagaccctttctctcacacccgcttcttcactggtgcccacgcctgcccaaacactttcacttgctccaggaccaccgctaggccctactcagacactgtcactggctcctgcccctccgctcgcccctgcctcccccgtcgggccagccccagctcacaccctcaccctcgccccagcctcctcaagcgcgtcactcctggcgcctgccagcgtccagactctgacgttgtcacccgctcccgttccaaccttgggcccagccgcagcccagacactcgccctagctccggcttccacccagtcgccagcttcccaggcttcctctctcgtggtgtctgcgtctggggctgctcccttacccgtaaccatggtgtcaagactgcccgtgtcaaaggacgaaccggatacactcactctcagaagcgggccaccctccccaccaagtacggcaacaagctttgggggtcctcggcctcggagacagccccctccgcctccccgatctcctttctacctcgactcgctggaggagaaaaggaaacgccaaagatctgaacgcctcgagcgcatatttcagctgagcgaggcacacggcgctcttgcacctgtatatggtaccgaggtgctggacttttgcactctcccacaacccgtagctagtcccatcggacctaggtcacccggaccaagtcacccaaccttttggacgtatactgaggccgctcaccgcgctgtgcttttccctcagcaacgtctcgaccagttatcggaaatcatcgagaggttcatctttgtcatgcccccagtcgaggcccctcccccttcactgcacgcctgtcatccccctccctggcttgcccctaggcaggctgcatttcaagagcagctcgcatccgaactctggcccagagcaaggcctcttcatagaattgtgtgtaatatgcggactcagtttcccgaccttcggctgatccaatatgactgcgggaaactgcagactctggccgtgttgttacggcagctgaaagctgagggtcacagagttcttattttcacccaaatgactcggatgttggacgtgctggagcaattccttacttaccacgggcatctgtatctacggttagacgggtcgactcgggtggagcagcgccaggccctgatggaacggttcaatgcggataaacgtatcttttgcttcattctgagcactagatctgggggagtaggcgtgaatctaaccggagcagacaccgttgtcttctacgatagcgactggaacccgaccatggatgcccaagcacaggatagatgtcaccgtattgggcagactagagacgtgcatatctaccgattgatttccgaaaggactgtggaggagaacatccttaagaaggctaaccagaaacgcatgttgggcgacatggcaattgaggggggaaactttaccacggcctacttcaagcagcaaactattcgggaactgttcgatatgcccctggaggagccctcctcgagctcagtgccctctgccccagaggaggaagaggaaactgtagcctccaaacagacacatatcttggaacaggcgctgtgccgggctgaggacgaggaggatattcgagctgcgacccaggcaaaagcagagcaggttgcagaactggccgaatttaatgagaatgatggatttcctgcaggggagggtgaagaagccggtaggcccggagccgaggatgaggagatgtcccgggctgaacaggagattgccgcactggtcgaacaactcactcctatcgaaaggtatgcaatgaagttcttagaggcctccctagaagaggtgtccagagaagaactgaaacaggccgaagaacaggtggaagcagcaaggaaagaccttgatcaggctaaggaagaggtttttcggttgcctcaagaggaagaggaaggccctggtgctggggacgagtcctcttgcggcacaggtgggggaacacaccgacgatcaaagaaagctaaagcccctgaacggccaggcacaagagtcagcgaaaggctgcggggagctagagctgaaactcagggggctaaccacacaccggtgatctcggcgcaccagactagatctacaaccacaccccctcggtgctcacccgctcgtgaacgggtgcctagacctgcacccagaccacgacctaccccagcgtccgccccagcggctatacctgcactcgtccctgtccctgtttcagcacctgtacctatctccgctccaaaccccataactatcctgcctgtccacattctgccctctccgcctccaccttcacaaattcccccttgcagcagccccgcttgcacccctccccctgcctgtacacctccacccgctcacacccccccacctgctcagacctgtcttgtcacacccagctcccccctgttgcttggtccaccctccgtgcccattagcgcctcagtgactaacctccctctgggcttgagaccagaggccgaactctgcgcccaggcactggcttcgccagaaagcctggaattagcgtccgttgcctcttcagagacgtccagcctgtccctcgtgcctcctaaagacttactccctgtggccgtggagattctgcctgtgagcgaaaaaaacctgagcctgaccccttccgcgcctagtctcactcttgaagccggttccatccccaacgggcaagagcaggaggccccagacagcgcagaaggaactacactgacggtgctgccagagggcgaggaactccctctttgcgtttctgagagtaacggccttgaattaccgcctagtgctgcatcagatgagcccctacaggaaccactggaagccgatcgtactagcgaagaacttacagaggctaagaccccaacctctagccccgaaaagccccaggagctggttactgcagaagtggcggcaccctccactagctctagtgcgactagcagccccgaggggccttctcccgctcggccacctcggcgacgcacctctgcagacgtggaaattaggggacagggaacagggaggcctgggcagcctcccggacccaaagtattgaggaaactgcctggaaggctggtaactgtggtggaggagaaagagctcgtgcggaggcgccgacagcagagaggcgcagctagtactcttgtacccggagtgtctgaaaccagcgcatcacctggcagcccctccgttagaagtatgtctggaccagaatcgagcccccctattggtggtccatgcgaggctgcccctagcagctctcttcctacaccgcctcagcaaccgtttatcgccaggcggcatattgaactgggggtcactggcggtggcagccccgagaacggtgacggtgcattgctcgccataactcctcccgctgttaagagacgcaggggcagaccccctaaaaagaacagaagccctgcagatgctggtaggggggtggacgaggctccttctagcacccttaagggaaaaactaacggcgcagacccagtgccaggccctgagaccctgatcgttgctgacccggtccttgagccgcaactgataccaggaccccaacccctggggcctcagcccgtgcacaggcctaaccctctcctgagtcctgtcgaaaaacgcagaagaggtaggccaccaaaggcccgagatctgcctattcccggaacaataagcagcgcaggcgacggtaatagtgagtcacgtacacaaccccctccccatccctctccactgacacctctgcctcccctgttagtctgccccaccgctaccgtggcgaacacggtgaccacagtgacaataagcacaagcccgccaaagagaaagagaggacgaccacctaagaaccctccttcccccagaccctcccagctcccggttctggaccgagatagtactagtgtactggaaagctgtggtctcgggagaagaagacagccacagggtcagggcgaaagtgaaggctcaagcagcgacgaggatggtagccgacctctgacacgcctagcccgactcaggttggaggcggaggggatgcgcggaaggaaaagcgggggttcaatggtggtggccgtgattcaagacgacttggacctggccgactccgggccaggcggattggagctgacccccccagttgtctctctcactccgaagctgagatccacccgtctcagaccgggatccctcgttccccctttggagaccgagaaactaccacgtaagagggctggagctcctgtgggcggaagcccaggcctcgccaagaggggtcgcctgcaacctccctctcctctgggacctgaaggcagcgtggaggaaagtgaagcagaagccagtggggaggaagaagaaggcgatggcacccctcgcagaaggcccggtccacggcgactggtgggtacgacgaatcagggagatcagcgcatactacggagttccgcccctccctcccttgcaggcccagcggtgagccacaggggacgcaaggccaagacctaa

SEQ ID NO: 240847 - DNA, 9218 bp, synthetic construct
  misc_feature 1..9218: note = Description of Artificial Sequence: Synthetic coding sequence
  source 1..9218: mol_type = other DNA
atgcagtcctccccaagccctgcccatcctcagctccctgtcttgcagacccagatggtttccgatggcatgacaggctctaatcctgtcagccctgccagctcatcatcacctgcgagtagtggcgctgggggtatcagcccgcaacacatcgcccaggattccagtctggatggccctcccggtccgccagatggagccactgtgcctctggagggattttccctgtcccaggcagcagatctggctaataagggccctaaatgggaaaagagccatgccgaaatagcagaacaggccaagcacgaagctgaaatagagacccgcattgcggaactaagaaaagagggattctggtccttgaagcggctcccaaaggtaccagagccgccaagaccgaagggacattgggactatctttgcgaagaaatgcagtggttaagtgccgatttcgcccaagaacgcagatggaagcggggtgttgcgaggaaagtcgtgcggatggttatacgccatcacgaggagcagcgccagaaagaagaaagagcaaggcgagaggaacaggctaagcttcgacgaatcgcctcaaccatggcaaaggatgtgaggcagttctggagcaacgtggagaaagtggtacagtttaaacagcagagccgcctggaggaaaagcgcaaaaaggccctcgacctacatctcgacttcatcgtcggccagacagaaaagtactccgacctcctgtctcagtctctgaatcagccacttacttcctcaaaggctggaagttccccgtgccttggctccagcagcgctgcttcttccccccctcctcctgccagcagactcgatgatgaggacggcgattttcagccccaggaggacgaagaggaggatgatgaagagacgattgaggtggaagaacagcaagagggaaacgacgccgaggctcaaagaagagagattgagctgctcagaagggaaggcgaactgccgttagaggaactgctgaggagcctgcctcctcagctgttggagggcccttcatctccaagccaaaccccaagttcacacgactcagacacgagagatggcccagaggagggagccgaggaggagccccctcaggtgctggagatcaagcctcctcccagtgccgtgacacaacggaacaaacagccttggcacccagacgaggacgacgaggagtttaccgcaaatgaggaggaggctgaagacgaggaggacacaattgccgcagaggagcagttggagggagaggtggatcatgccatggagctgagcgagcttgccagggagggagaactgtctatggaagagttgctgcagcagtatgcgggtgcctacgccccaggttctgggtcttctgaggacgaggacgaggacgaggtggacgcaaacagctcagattgtgaaccagaaggtccagtagaggccgaggaacccccacaggaggatagcagcagccaaagcgacagcgtcgaagatagaagtgaagacgaggaagacgagcattcagaagaggaggaaacaagcgggtcctctgcatcagaggaatctgagagtgaggagtcagaggacgcccagagccaaagtcaggcggacgaggaggaggaggacgacgatttcggcgtcgagtacctgctcgcacgagacgaagagcagtcagaggcagatgcaggctctggccctccaaccccaggaccaacgacgcttgggccaaaaaaagagatcaccgacattgccgctgcggctgagagcctacagccaaagggttatacactcgctactactcaagtgaagacgcctattcccctgctgttgcgaggccagctcagagaataccagcatatcgggctcgactggctggtgaccatgtacgaaaagaagctgaacgggatcctcgccgatgaaatgggcctgggcaagaccattcagactatcagcctgcttgctcaccttgcctgcgaaaagggtaattggggtccccacctgatcatagtgcctactagcgtgatgttgaactgggaaatggagctgaaaaggtggtgccccagcttcaaaatactgacgtactatggtgcacagaaagagcgcaagcttaaacggcagggctggaccaagccaaatgccttccatgtttgcatcacaagctacaaactggtcctccaggaccaccaggcttttcggcgaaagaactggcgctaccttattcttgacgaggcccagaacataaagaacttcaagtcccagagatggcagtctttactgaacttcaattctcaacgtaggttgttgctcaccggaactccgctgcagaatagcttgatggagctgtggtccctgatgcattttttaatgccccatgtgtttcagagccaccgggagtttaaagagtggttctcaaatcctctaaccggaatgatcgaagggtcacaggaatacaacgaaggtcttgtgaagcggctacataaagtcctccgaccttttctgctaagaagagtgaaggtggacgtcgagaagcaaatgccgaaaaaatacgaacacgtaatccgctgccggctttctaaaaggcagcgatgcctgtacgatgacttcatggctcagactaccactaaggaaacacttgctaccgggcactttatgtctgtcattaacatcctgatgcagttaagaaaggtgtgtaaccacccaaacctctttgacccaaggccagttactagccccttcatcactcctggcatctgcttcagcacagcatctctggttctccgggctacagatgtgcatccactgcagaggatcgacatgggacgcttcgatctcattggcctggaaggtcgagttagtcgctacgaggcggatacttttttacccaggcacagactgtctcgcagggttcttctcgaggtggccacagccccagacccgcctcctagacccaagcccgtaaagatgaaagtgaatagaatgttacaacccgtacccaaacaggaggggagaaccgttgtcgttgtgaacaacccacgcgctccgctggggcctgtgcccgtacgtccccctccagggccagaactcagtgctcagcctactccgggaccagtgccccaggtgttacccgcatcacttatggtttcagcctcccccgcaggaccgccactgatcccagccagtcgcccacccggtccagtgttgctgccccctctgcagcctaactctggatctctgccacaggcgggagaggtggttagcataggacagctggcctccctggcgcagcgaccagtggcaaacgccggtgggtccaagcctctcacatttcagatccagggcaataagctgacgcttaccggggctcaagtgcggcagttggccgtgggccaaccgcgacccctgcaaatgccacccacgatggtgaacaatactggagtggtcaaaattgtggtgcggcaggccccacgagatggactcactcccgtcccccctctggcccctgcgcctcgcccacccagctctggacttccagcagtgctaaaccccagaccgactctgacaccaggtagactcccaacacccaccctcggcacagccagggccccaatgcctacacccactctggtacgcccactgctgaagttggtgcactccccatcacccgaagtgtcagcaagcgctccgggtgcggctcctctgaccatcagttctcccctccatgtcccatctagtctgcctgggccagcttcaagccccatgccgatccctaactcttctcccctggcctcaccagtgtctagcaccgtgtccgtccctcttagctccagcctgccaatttcagtacccacaacactacctgcaccggcatcggctccacttacaattccaatctctgcaccactcaccgttagtgcttctggccctgctctgttaacctctgtcactccaccactggcaccagttgttcctgctgctccgggacctcctagtctggccccaagcggcgcatcacccagcgccagcgccctcactctaggattagctacagctccaagtttaagctcgagtcagaccccaggccacccattactgctggcaccaacatcctcacatgttcccggattgaacagcaccgtagccccagcttgctcaccagtcctggtgccagcctcagcactggcttccccgttccccagcgccccaaatcccgcaccagcccaggctagcctgctcgcaccagcctctagcgcttcacaggccctggccacgccgctggccccaatggcagcccctcagacagctattctggcaccttctccggctcctccactggcccctctgccggtgctcgctccctcacctggggctgcccctgttctggccagttcccaaacaccagtgcctgtgatggccccatcttctacccctggcacgtctcttgccagcgcctctcccgtgccggctcccactcctgtcttggccccttcttctacacagaccatgttgccagccccagtgcccagccctctgcccagtcccgcatctacccagacattagccctcgctccggctcttgcacctactttggggggtagtagcccctcccagacgctgagtctcggaaccggcaatccacaaggtccatttcccactcagacgctgtctctgacaccagccagcagtctggttccaacccccgcacagaccctctccctggccccaggccctcccctcggtcctactcaaactctgtctctagccccagcaccaccgctcgcacccgctagtcccgtcggacctgccccagcccacacactgacactcgccccagcctcctcctccgctagcctgcttgcgcctgccagtgtgcagacgttaactctgtccccagcaccagtgcctactttgggaccagccgcagcccagaccctcgcactggcccctgccagtacacaatccccagccagccaagcatcaagtctggtggtgtccgctagtggagctgccccattgcctgtgactatggtgtctcgcctgcccgtgtctaaggacgaaccagatacccttaccttgagatcagggccaccctctcctccatctaccgccaccagcttcggaggacctcgtcctcgcaggcagccaccgcctcctccaaggagtcctttctacctggactccctcgaagagaaacgcaaacgtcaaagaagcgaacggctggagcggatctttcagctgagtgaagcacacggtgccctagcgcctgtgtatgggaccgaggtgctagacttttgtacgctgcctcagcctgtggcctctccaattggcccacgatcccctgggccttctcaccctaccttttggacttataccgaagccgcacaccgggctgttctgtttccccaacagcgcctcgaccaactgtccgaaatcatcgagagattcatctttgtaatgcccccagtggaagcccctcccccatctctgcacgcatgtcacccaccaccctggctggcgcctcggcaagctgccttccaggaacagctggcttcggagctgtggcctagggcccgtcccctgcatagaattgtatgtaatatgcgcactcagttccctgatctgcggctgatccagtatgactgtggtaaactgcaaacacttgctgttctcctcaggcagttaaaggcagagggtcaccgtgtcttgatttttacacagatgacaaggatgctcgacgtactcgagcaatttttaacctaccatggtcacctgtatctcagactggacgggtccaccagggtggaacaacggcaggccttgatggagagattcaacgccgacaaacggattttctgttttattctgtcgacacgctccggcggtgtgggtgttaatctaactggtgcggacaccgtggtgttctatgacagcgactggaaccctaccatggacgcgcaggctcaggaccgctgtcaccggatcgggcagactagggatgtgcacatctatcgtctcatctccgagcgaaccgtagaggagaacattctgaagaaggcaaaccagaagcgaatgctgggtgatatggccatcgaagggggaaattttaccaccgcctatttcaagcaacagactattagagagctctttgatatgccactggaggagccttcctcttcaagcgtacctagtgcaccagaagaggaggaagagaccgttgcctcaaagcagacacatattctggaacaggctctctgccgcgctgaagatgaggaggacatccgcgcagcaactcaggctaaagcagagcaagtcgcagagcttgctgaatttaatgaaaacgacggcttcccagccggtgagggagaagaggctggaagaccaggcgctgaggacgaggaaatgtctcgcgcagagcaggaaatagccgcactggtcgagcagttaaccccaatcgagagatatgcgatgaaatttcttgaagcttccctagaagaggtatccagggaggagctcaagcaggctgaggaacaggtcgaggcggctaggaaggatctggatcaggccaaagaagaggtctttcgcttgccccaggaagaggaggaaggccctggagctggcgacgaaagctcttgcggcactggtggcggaacacaccgcaggagtaagaaagccaaagctcctgaacgacccggtaccagggtgtctgagcggctgcgaggagccagagcggaaacacagggcgctaatcatacccctgttatatcagcccaccagactagatcaacgacgactccccctaggtgctcacctgctcgcgaaagagtaccacggcctgcgcctcggccaaggcccacaccggcatccgcccctgccgcaatcccggctttggttccggtccctgtgtccgcgcctgtcccaataagcgccccaaatcccatcactatccttccagtgcatattctgcctagcccccctccaccatcccagatacctccttgtagctcacctgcatgcacccctcccccagcctgcactccaccacccgctcacacgccacccccagcccagacttgcctcgtaacccctagcagccctctgctgttgggcccaccatccgttccaatttccgcgtccgtcacaaacctcccactcgggctaagacctgaagccgagctgtgcgcacaggccttggcttcacctgaatctctggagctggcaagcgtggccagctcagaaacatcctcactcagtctggttcctcccaaggacctactcccagtggcagtggaaattctcccagttagcgagaagaacttaagtctgactccttcagctccatcgctgaccctggaagcaggctcaattccgaatggccaagaacaggaggcccctgattctgccgagggaaccacgcttacggtcctgcccgagggagaagaattgcctctatgcgtctctgagagcaatggtctggagctgccacccagtgctgcatctgacgaaccattacaagagccactcgaagctgacagaacctcggaagagctgactgaagctaaaactccaacctcgagcccagagaagcctcaggagcttgtcactgctgaagtagccgctccaagcacttcctctagcgccacaagcagccccgagggtccgtctcctgctagacccccaaggagacgaacaagcgccgatgttgaaattcggggacagggcactggccgtcccggacaaccacccggtccgaaggtcctccgaaaattacctgggagactagttacagtggtcgaagagaaggaactggtacggcgtcgcagacagcagcgaggcgctgctagtacattggttcccggagtgagcgagacttccgcctcacccggaagtccgtctgtgaggtctatgagtggaccagaaagctccccgccaattggaggtccttgtgaagccgctccgagctcgtccctgcctaccccaccgcagcagcctttcatcgcacgacgccatatcgagcttggggtcaccggagggggatcgccggaaaacggagatggggctttgttggcaataacgccacctgcagtaaagcgccgaaggggcagaccgccaaagaaaaatcgtagccctgcagacgccggtcgtggcgtagatgaggccccatcctctactttgaaggggaaaaccaacggagccgatccagtcccaggtcccgagaccctgatcgtggccgacccagtactggaaccccaattgattccagggcctcagccactcggccctcaaccagtgcaccgcccaaacccattactgtcccctgtggagaagcggcgacggggaagacctcccaaggccagggacctgccaattcctggtacaatatcaagcgctggtgatggcaattctgaaagccgcacgcagccacctccgcacccaagcccactgactcctctgccacctttgctcgtgtgcccaacagcgacagttgctaacactgtgacaaccgtcaccattagcacgtcacctccaaagcgtaaacgtggcagaccccctaagaacccaccaagcccgcgacctagtcagctcccagtgctggacagggatagcacatcagtgcttgagagctgtggtcttggacggcgtcggcagccgcagggccagggtgagagcgaaggaagcagctccgatgaagatggctctagacctctgacccggctcgcacggttgcgccttgaggcagagggcatgcggggaaggaagtctggaggctctatggtcgttgctgtgatccaggacgaccttgacctggccgactctggccctggcggactcgagttaacacctccagtcgtctcgctgaccccaaagttgcggagtaccagactcagacctggttctttggtacccccactagagaccgaaaagctcccccgaaaaagagccggtgctcctgtagggggttctccaggattggccaagcggggacgcctccaacccccttctccccttgggcctgaaggatccgtagaagaatcagaggctgaggcctcaggggaagaggaagagggagatgggaccccacgcagacgcccaggaccccgaagactggtggggactacgaatcagggtgaccaaaggatcctccggtcctctgcccctcccagcctggccggacccgcagtgtcccaccgtggtagaaaggctaaaaccta

SEQ ID NO: 240848 - DNA, 9506 bp, synthetic construct
  misc_feature 1..9506: note = Description of Artificial Sequence: Synthetic coding sequence
  source 1..9506: mol_type = other DNA
atgcagtccagcccaagcccggctcacccacagttgccagtgctgcagacccagatggtcagtgatggtatgaccgggagcaaccctgtaagcccagctagtagctccagcccagcttcctccggagcgggagggatcagtccccaacacatcgcgcaagactcatccctagacggcccacctggcccacctgacggagccaccgtccctttagaggggttttcgttgtcgcaggccgcagatctggccaataaagggcctaaatgggagaaatctcacgctgaaatcgccgaacaggcaaagcacgaagcggaaattgagactaggatcgccgaattgagaaaggaaggattctggagcctgaagcgcctgcccaaagtccctgagccccctaggccgaagggtcactgggattatttatgcgaggagatgcagtggctgagcgcagactttgctcaggaacgtcggtggaaacgaggcgtggcaaggaaggtggtccgcatggtgattagacaccacgaggaacagaggcagaaagaggagagagctcggagagaggagcaggccaagctgcgcaggattgcgtccactatggctaaagacgttcggcagttctggtctaatgttgaaaaagtggtacaatttaagcagcaatcccgtctggaagagaagcgtaagaaagccctagacttacatctggacttcatcgtcggccagaccgaaaagtactccgatctgctgtctcagtccctgaatcagcccctgacctcttcaaaagctgggagcagtccatgtctcggttcaagctctgcggcatcatctcctccccctccagccagcagactggacgacgaggacggcgacttccagccccaagaggacgaggaggaagatgacgaagaaacaatcgaagttgaagagcaacaggagggcaatgacgcagaggcacagcgccgagaaatcgagcttctgcgccgagagggagaactgccgttggaggaactcctgcgtagtctcccaccccagctcttggagggaccatcctccccttctcagacaccttcctcccatgacagtgatacacgcgatggaccagaggaaggcgcagaggaagagccccctcaggtgctagagattaaaccccctcccagcgctgtgacccagcgcaacaagcaaccatggcaccccgacgaagacgatgaggagtttaccgctaatgaagaggaagcggaggacgaggaagacaccatcgccgctgaggagcagcttgaaggcgaagtggatcatgccatggaactctctgaactggccagggaaggggaactctccatggaagagttgcttcagcagtacgccggtgcatatgctcccggatccgggtctagcgaagatgaagatgaggacgaagtggatgctaatagcagcgattgcgagcctgagggacctgtggaagccgaggagccgccacaggaagattcctcttcacagagcgattcggtggaagatcgctcagaagacgaagaggacgagcatagcgaggaggaggaaacctcaggcagttcagcgagcgaagagagtgagtccgaggagagtgaagacgcacagagccagtcacaagcagacgaggaagaggaagatgatgatttcggggtcgaatacttgttagcgcgagacgaggaacaatcggaggccgacgctggatccggccctccaacacccggaccgaccacactgggacccaaaaaggagataaccgatattgccgctgctgccgaatctctccagcctaaaggctatactctcgctaccacgcaggtcaaaacccctatcccattgcttttacgtggccagctccgagaataccagcacataggtctggactggctcgtgaccatgtacgaaaagaaattgaatgggatcctggccgatgaaatgggcctgggaaagacgatccagactatcagtctgctggcccatcttgcttgtgagaaaggcaactggggacctcacctcattatcgtgccgaccagtgtgatgttgaactgggagatggagctcaaaaggtggtgtccttcttttaagattctgacgtattacggagcccagaaggaacgcaagctgaaaaggcagggctggactaagccgaacgcattccatgtgtgtatcacaagttataagctggtgctccaagatcaccaggccttccgcaggaaaaattggcggtacctaatcttggacgaggcccagaatattaagaactttaaatcacaaaggtggcaatcccttctcaacttcaatagccagagacgcctgctgctgacgggcactccactgcagaattctcttatggagctatggagcctaatgcacttcttaatgccccacgtgttccagtcacaccgcgagttcaaggaatggttttctaacccactcaccgggatgatagaagggtcacaggagtataacgagggccttgtcaaacgcctacacaaagtccttcgaccatttcttctgcggagggtgaaggttgacgtggagaaacagatgccaaaaaaatatgagcacgtgattcgctgccgtctgtcaaagaggcagagatgcctgtatgacgactttatggcccaaactaccacaaaagaaacattagccaccggccactttatgagcgtaatcaacattctgatgcagctccggaaggtttgtaatcaccctaacctgtttgaccccaggccggtgactagcccattcattacacccggtatttgtttttcgaccgcttcacttgtgctgcgcgctacagatgtgcatcccttgcagcgtattgacatggggcgattcgaccttataggacttgaaggcagggtgtctaggtacgaagctgatacattcctccctagacatcgactgagcaggagggtgttgctcgaagtggccaccgcacccgatccaccacctagacctaagcctgtgaaaatgaaggtcaataggatgttgcagccagtacctaagcaggagggcaggacggtagtggtcgtgaacaacccccgagcccctcttggacctgtccccgtacgacctccgcctggccctgaactttcagcacaaccaacacccggtcctgtacctcaggtgcttcccgcaagcctgatggtgtctgcatcccccgcagggccacccctgatcccagcgagccgtcccccagggcctgtgctgcttccaccactacagcccaacagcgggtctctgccacaggtgctgcctagccctctgggcgttctcagtggtacctccagacccccaactcccacgctgtctctaaaacctactccacctgcccctgtgcggctctccccagctccccctcctggctccagctctctgttgaaacctcttaccgtcccccctggatacacatttccccctgctgctgcgacaacaactagcacaacaaccgctactgctaccaccaccgccgtgcctgcccctactccagcgcctcagagactgatcctcagccctgacatgcaagcccgtctgccctcaggcgaggtggtgtcaattggtcaactggcctccctcgcccagcgcccagtcgccaacgctgggggatctaaacccctgaccttccagatccagggaaataagttgaccttaacaggagctcaggtgcggcagttggcagtggggcagcctcgtcccctacagatgccaccaacaatggtcaataatactggcgtggtgaagatagtcgtgagacaggctcccagagacgggctgacacccgtgccccctctcgcaccagcccctcgcccaccctcttcaggtctgccagccgtcttgaatcccagacccacgctcacaccgggaagacttccaacccccaccctgggaactgcaagagcacctatgccaacgccgaccttagtcaggccactcctgaagctggtgcacagccctagtccagaagtgagcgcaagcgcacccggtgcagctcccctgactatctcatccccattgcatgtaccaagctccttacctggtccggcaagtagccctatgcccatcccaaatagtagtcctctggccagtcctgtgagtagtactgtgagcgttccactgagctcatccttgcccatctctgtgccaaccacgttacccgctcctgctagtgctccactgacaatccccatttcagccccactgacggttagcgcctctggacctgcgctgttaacatccgtgacccctcctctggctccagtggttcccgcagccccaggcccaccctccctggcaccctctggggcatcaccttcagcctcagccctgaccttggggctcgccactgcgcctagtctgtcatcctcgcagaccccgggacaccctctcttgttggcaccaacttccagtcacgtccctggactcaacagcactgtggccccagcgtgtagccccgtgctggtgcctgcctcagcgctagcttctccatttccaagcgcccctaaccccgctccagcccaggcctcacttttggcgccagccagctcagcaagccaggccctggccaccccactagcccctatggccgctccacagaccgcaatactggcaccttcccctgccccaccattagcccctctccctgtgctggcgccttcccccggagccgcacctgttctcgcttccagccagacaccagtgccggtaatggcaccatcaagcaccccgggaacatcattggctagcgcttcccccgtacccgcaccaacgccagttcttgccccttcctcgactcaaacgatgttaccagcgccagtgcctagtccgctgccaagtcctgctagcacccagaccctggccttagcaccagccctggccccaacgcttgggggaagcagtcccagccaaacactgtccctgggaacaggtaatccgcaggggccatttccaacacagacactgtctctgaccccggcatcttcactggtcccaactcctgcacaaaccctctccctggcacccggtcctcctctcgggccaacacagactctttccctggcgccagctcccccattagctccggcttctcctgtcggtcctgctcccgcacacacactgaccctcgctcccgcttccagttctgcctctctgctcgctccagcaagcgtgcaaaccctaacattgtctccagcccctgtacctaccctgggcccagccgcagcccaaaccctcgccctggccccagccagtacccagtcccctgcttcccaggcctcttccctcgtggtgtctgcctccggcgcagcacccctaccagtgactatggtgtctcggctcccagtttccaaggacgaacccgatacactgacacttagatcagggcctccatcaccaccttcaaccgctaccagttttggaggcccacgtccgagacggcaacccccaccacctcctcggagcccgttttacctcgactccctcgaggaaaagcggaagcggcagcgcagcgaacgactggaacgaatctttcaactttcagaagcccatggggcactcgcccctgtctatggaacagaggtgctggatttctgcactttaccccagcccgtagcctccccgatcggaccacgctcacccggtccaagccacccgactttttggacttataccgaggcggcacatcgggcagtcctatttccccagcagagactggatcagctgagcgagataattgagcgctttattttcgtgatgcccccagttgaggcgcctccccctagccttcacgcctgtcatccccctccctggctggcccctcgccaggccgctttccaggagcaactcgctagtgagctgtggcccagggcgaggcctcttcatcgcattgtatgtaatatgaggacccagttccccgacctccgcctcatccagtacgattgcggcaagttacagaccctggccgtgctcctgcggcagctgaaggccgaagggcacagagtgctgatattcacccaaatgactcgcatgctggatgtgctggaacagttccttacctaccacggtcatctttacctgaggctggatggtagcaccagggtagaacaacgacaggcgctgatggagcgattcaacgctgacaaaaggatattttgtttcatcttatctacccggtctggtggagtgggagtaaacctgactggagccgatacagttgtgttttatgacagcgactggaacccgactatggatgcccaggctcaagacaggtgtcatagaatcgggcagaccagggacgtgcacatctaccgccttataagtgaaaggacagtcgaggagaacatcctgaagaaggctaaccagaaaagaatgctgggcgacatggcaatcgaagggggaaattttaccactgcgtacttcaaacaacagactattcgcgagttgttcgacatgccgctcgaagaaccaagttccagtagcgtacccagcgccccagaagaggaggaagagacggtagcaagtaagcaaacccatattctggagcaggccctgtgtagggctgaagatgaggaggacattagggctgccacccaggctaaagcagaacaggtcgcagaactggcagagtttaacgaaaatgatggctttcccgctggtgagggggaggaagccggtcgaccgggagccgaggacgaggaaatgtctcgtgctgagcaggagatcgctgcactggtggagcagttgacccctattgagcggtatgctatgaaatttttggaagcctccctcgaggaagtgtccagggaggaattgaagcaggcagaggagcaggtcgaggccgctaggaaggacttggatcaggccaaagaagaggtgtttcggctcccacaagaagaggaggaaggacccggagctggtgacgagagcagctgcggcacaggaggcggtacgcacaggcgctctaagaaggcaaaggccccagagagacccggtactcgagtctcagaacgactccggggtgcgagggctgagacccagggggctaaccatacacctgtgatatccgcccaccaaactcgatctactacaaccccacctcggtgctcaccagcccgagagcgtgtacctcggcctgccccaaggccaaggcccacaccagcttccgcccctgcggctatccccgctttggtgcctgtgccagtgtctgcgcctgtcccaatatccgctcctaatccgatcacgattctccctgtgcatatactcccatcccctcctcctccatcccaaatacctccatgctcttcgccagcctgcacacctcctcccgcatgcacaccccctcctgcccacacaccgccacccgcacagacttgcctagtcactccgtcctcaccactgctactcggaccgccatcagtccctatttccgccagtgtgactaaccttcctctaggactgaggcccgaggctgagctatgcgctcaggccctggcaagccccgaaagcctggaactcgcatcagtcgcttcaagcgagacctcgtctctttcactagtaccaccaaaggatctgctccccgtggccgtcgagattttaccagtgtccgaaaaaaatctctccttgacaccgtcagctccaagtctgacacttgaggccggatccatccctaatggacaggaacaagaggcaccagactcagccgaggggacgacactgactgtgctccccgagggcgaggagctgccattgtgcgttagcgagtccaacgggctggaactcccgcctagcgccgcttcggacgagccgctgcaggaacctttggaggcggaccggacctctgaagagttaacagaggccaaaactccaacttctagtccggagaagccccaggagctggtgaccgcagaggtagctgccccaagtacatctagttctgcaacctcatctcctgagggcccatccccagcccgacctcccagaagaagaacctcagcagacgttgaaatccgtggtcaagggactggaaggccaggccaacccccaggtcccaaggtattacgcaagcttcccggaaggttggtgacggtcgttgaggaaaaggagcttgtgaggaggaggagacaacagcgcggagcggcaagtacccttgtgccaggagtgtcagaaacttcggcctccccaggtagtccttcagtgagaagcatgtccggtccagaatcgagtcctcccatcggaggtccttgtgaagccgctcccagtagttctctccccactcccccacaacaaccatttattgcacgtcgccatatcgaactgggcgttaccgggggaggcagtcccgaaaacggtgacggggctctcttggcaatcactcctcccgcagttaaacggcgacgcggaagaccgccaaaaaagaacagatctccagccgatgcaggaagaggagtggatgaggcgccatctagtactttgaaggggaaaacaaatggtgcagaccctgtaccagggcctgagactctcatcgtggccgatccggtattggaaccccaacttatcccaggcccacaacccctgggaccccaacctgttcaccgtcctaacccgttgctctctccagtggaaaagagaagacggggaagaccgcctaaggctagggatctccccatcccagggaccatcagctcggccggagatggtaatagcgaaagtcggacccagcccccaccacaccctagccctctaacacccctcccccctctgctcgtgtgccccacagcaactgtggccaatactgttacaacagtgacgatttctacttctccacccaagcggaaacgtggaaggccacctaagaaccccccttcacctcgtccttcccaacttcccgttttggacagggactcgacaagcgtgttagagagttgtgggctgggacgtcgcagacagccacagggacaaggggagtcggagggctcatctagcgacgaagacggatcccggccattgaccaggctggctagattgaggttggaagcggagggcatgagagggcgtaaatctgggggatccatggtggtagccgtgatccaagacgacctggatttagcagactcaggaccaggaggtctggaattgacccctccagtggtgtctctgacaccgaagctaaggtcaacaagattgagacccggtagtcttgtcccaccactcgaaaccgaaaagctccccaggaagcgggctggggctccggtggggggttcacccggactggccaagagaggcaggcttcagcccccttctccactggggccagagggctcagtggaggaaagcgaagctgaggcctcaggcgaggaggaggagggggatgggactcccaggcgtcgccctggacccagaagactggtcggaactaccaaccagggcgaccagaggatcctcaggagcagcgcccctccctctcttgctggtcctgcagtcagccaccgcggaaggaaggctaagacata

SEQ ID NO: 240849 - DNA, 180 bp, synthetic construct
  misc_feature 1..180: note = Description of Artificial Sequence: Synthetic coding sequence
  source 1..180: mol_type = other DNA
atgcagagttctccatcacctgcccatccccaactcccagtcctgcaaacccagatggtgagcgacggcatgaccggcagcaaccctgtgagccctgcttcaagctcatcacctgctagctccggtgctgggggaatctcacctcagcacattgcccaggattcgagcttggatggctag

SEQ ID NO: 240850 - DNA, 774 bp, synthetic construct
  misc_feature 1..774: note = Description of Artificial Sequence: Synthetic coding sequence
  source 1..774: mol_type = other DNA
atgcatcgccgtggggtgggtgcgggagccatcgccaaaaagaagttggccgaagctaagtacaaagaaagaggtaccgtcctggccgaagaccagctggcccagatgagtaagcagctggacatgtttaagacaaacctggaggaattcgcttctaaacataagcaggagattaggaaaaatcccgaattccgcgtccagtttcaggatatgtgtgcaactattggcgtggatccactggcatctggcaaaggcttctggagcgagatgttgggcgtgggcgatttctattacgagctgggggtccagataattgaagtttgcctcgcccttaaacaccgcaacgggggactgattactcttgaagagctccaccagcaggtgttgaaaggccgtggcaaattcgcccaggacgtgagtcaagacgatctcatacgtgcgattaaaaagctgaaagcacttggcactggtttcggtatcattccagtgggcggtacttaccttatccagtctgtcccagctgagctcaacatggatcatacggtggttctgcagctcgccgagaatggatatgtgacagtgtctgagattaaggcctcattaaaatgggagacagagcgagcaagacaagtccttgagcacttgctcaaggagggcttggcctggctggatttacaggctcccggagaagcccattattggctccctgcccttttcactgacctctactctcaggagatcaccgccgaggaagctcgcgaggccctcccttag

SEQ ID NO: 240851 - DNA, 777 bp, synthetic construct
  misc_feature 1..777: note = Description of Artificial Sequence: Synthetic coding sequence
  source 1..777: mol_type = other DNA
atgcaccgtcgaggggtgggtgccggagcaattgcgaaaaaaaaactcgctgaagctaaatacaaagagaggggcacagtcctagctgaagaccaactggcgcagatgtccaagcaactggatatgtttaagactaacctggaagagtttgctagtaagcacaaacaagaaatccggaagaatcctgaattccgagttcagttccaggacatgtgcgccacaatcggggtagatccattggcgtcaggcaagggattctggtcagagatgctgggggtcggagacttctactacgaactcggggtccaaatcatcgaggtgtgcctcgccctgaagcaccgtaacggaggtttgatcactctagaggagcttcaccagcaggtgctgaagggccgtggaaaattcgctcaggacgtgagtcaagacgacctgatccgcgctattaagaagttaaaggccctagggacgggttttggaattattcctgttggcggtacatatttaatccagtcggtacctgcagagctgaacatggatcatacagttgtcctgcagctggctgagaaaaacggctatgtaacagtgagcgaaattaaagcttctcttaaatgggagactgagcgcgctcgccaagtgcttgaacacctcctcaaggagggtctggcatggctagacctgcaggccccaggagaagctcattactggctgcctgccctgttcacagacttatacagccaagagattacagctgaggaagctcgcgaggctctcccctag

SEQ ID NO: 240852 - DNA, 1611 bp, synthetic construct
  misc_feature 1..1611: note = Description of Artificial Sequence: Synthetic coding sequence
  source 1..1611: mol_type = other DNA
atgagctcgtctctcgggaaggaaaaggactcgaaggagaaggatcctaaggtacctagtgctaaggaaagggagaaggaagctaaggccagcggcggatttggtaaggagtctaaggagaaagagccaaagaccaaagggaaggatgccaaagacggaaagaaagattccagtgcggctcaaccgggtgtcgccttctcagtcgataacaccatcaaaagacccaatcccgctcccggaacacgcaagaaatctagcaatgcagaggtgatcaaggagctgaataagtgcagagaagagaatagtatgagattggatctgtcgaagaggagtatccacatccttccctcgtcaataaaagaactgacccagctgacagagctctacttatacagtaataaactgcagtctctcccagccgaagtgggttgtttggtgaaccttatgaccctggccctcagtgaaaactctctgacttctctgcctgattcgctggacaacctcaagaagttacgcatgctggacctgcgccataataaactgcgggagattccaagcgtagtgtaccggctggacagcctcaccactctttacctcagatttaacaggattacgacagttgagaaggacatcaaaaacctcagcaagctttctatgctttctatccgagagaacaagattaaacagctgcccgctgagatcgggaacttatcctctctttctcgcttgggtttgcgatataatagactctccgcaatacctcggagcctggctaagtgctcagcattggaggaactcaacctggagaataataacatttccacactccccgagtcactgctttcctccctggtcaaactgaattccttgactctggccagaaactgtttccagctataccccgttggcggtccgtctcaattcagtactatttattctctgaacatggaacataacagaatcaacaaaatacccttcggtattttttcacgcgctaaagtcttgtcaaagttaaatatgaaagacaatcaactgacctctttacctctcgacttcggaacgtggactagtatggtggagttgaatttggcgactaatcagctgaccaagataccggaagacgtgtcgggcctggtctcactcgaggtgttgatcctatccaacaatctgcttaagaaactgcctcacggacttggtaacctgagaaaattgcgagagttggacttggaagaaaacaaactggaaagcttgccgaacgagattgcgtacctgaaggacctccagaagctggtgttgaccaataaccagttgacaaccctaccgaggggtataggccatctcaccaaccttactcatcttggactgggcgagaatttgttgacccatctgcctgaggagattggtactctcgagaacctggaggagctgtacctgaatgataacccaaatctgcatagcctgcctttcgagcttgccctgtgctccaaactttctataatgtccatcgaaaactgccccctgtctcacttgccaccacagatcgtagcgggaggaccaagtttcatcatccaattcttaaaaatgcagggaccatatcgggctatggtctag

SEQ ID NO: 240853 - DNA, 1749 bp, synthetic construct
  misc_feature 1..1749: note = Description of Artificial Sequence: Synthetic coding sequence
  source 1..1749: mol_type = other DNA
atgtcatctagcttgggaaaagagaaggactccaaggagaaggatccaaaagttccctctgcaaaagagcgggaaaaggaggcgaaagcctctgggggatttgggaaggagtcaaaggagaaggaacccaagacaaaggggaaagacgccaaggatgggaagaaagattcatccgctgctcaaccaggcgtggctttttccgttgataacaccataaagcgcccaaacccggcacctggaacacgcaaaaagtcatcaaacgctgaagttatcaaagagctgaataagtgtcgcgaggagaattcgatgcgcctcgatctgtcaaagagatctatacacatactgcctagcagtatcaaagaactcacccaattaacagagctgtatctctacagtaacaagctgcagagtctgcctgcagaggtcggatgtctagtaaatctgatgacattagccctttcagagaattctctaacctcccttcccgattccctagataatctaaaaaaactcagaatgctggatctgagacataataagttgcgcgaaattcctagcgtagtgtatcgcttagatagcctgaccacactgtatctgaggttcaacagaattacaacggtcgagaaagatatcaaaaacctgtccaaacttagcatgctttccattcgcgaaaacaagattaagcagctgccagcagaaattggagagttgtgcaatcttatcacccttgatgtggcccataatcagctcgagcacctgccaaaagagatcgggaattgtacccagattacgaacttggacctacagcataatgagctgctcgatctcccagacactatcggaaatctatccagcctatctcgactcggcctaaggtataatcggctgagcgccattccaagatccctggctaaatgtagcgctctcgaggagctcaacctggaaaacaacaacatctccacgttgccggagtccctgttgtcatctctggtgaagcttaacagtttgacgctggctagaaactgtttccagctctacccagtgggtggaccaagtcagttcagcaccatctacagtctgaacatggaacacaacagaattaacaagataccatttggaatcttcagccgcgcaaaggtgctgtccaagctgaacatgaaggataaccagttaaccagcctccctctggatttcgggacctggacgagcatggtcgaacttaatctcgcgaccaatcagctaaccaaaataccagaggatgtcagcggtctagtgtctttggaggttctgatcctgagcaacaatctgttgaaaaaactgccacatggccttggaaatctgcggaaactccgcgaactggatttggaggaaaacaagttggagtcactgcctaacgaaatcgcctacctgaaagacctccagaaactagttcttaccaataaccagcttaccacacttcctagaggtattgggcatcttaccaatttaacccacctgggtttgggcgagaatctgcttacgcacctcccagaagagattggcactttagagaaccttgaggagctttacctgaatgacaaccctaacttacacagcctcccatttgagctcgccctgtgttcaaaattgtccattatgtccatagagaattgtccactgagccatctaccccctcagatagtggctgggggtccctcatttatcattcaatttcttaaaatgcaggggccttatagagcgatggtttag

SEQ ID NO: 240854 - DNA, 1119 bp, synthetic construct
  misc_feature 1..1119: note = Description of Artificial Sequence: Synthetic coding sequence
  source 1..1119: mol_type = other DNA
ctcgacaatctgaaaaaactgagaatgctagatttacgccataataagctccgcgaaataccaagcgtagtatatcggctagattctttgaccactctgtacctcagattcaatagaataacgacagtagagaaggacattaagaacctctcaaagctaagcatgctgtcgataagagagaataagatcaagcagctgcccgctgaaatcgggaatctcagcagcctgagcaggcttggcctacgctacaatcgcttaagcgctatccctcggtctctagcaaaatgctcagccctggaagagctgaacttggagaacaacaacatatccacacttcccgagtctttactgtccagccttgtgaagctgaattcccttaccctcgccaggaattgctttcaactctatccggttgggggtcctagccaatttagcacaatttattctttaaatatggaacacaatagaatcaataaaattccctttggtattttttcccgagccaaagtgctgtctaaacttaacatgaaagataaccagctcacttctttgcctctggactttggcacctggacctcaatggttgagctgaatctggcgaccaatcagctgacaaagatcccagaagatgtgtcaggcctcgtctcactggaagtgcttatcttgtccaacaatttacttaaaaagctcccacacgggcttgggaatctccgcaagctccgcgagttggacctcgaagagaataaactcgagtccctcccaaatgaaatcgcttacttaaaggatctccagaaactagtgctgaccaacaatcagctgaccacccttcccagaggtattggacatctcaccaatttaacacacctggggctgggcgagaatcttctgactcatctgccagaagaaattgggactctggagaacctggaggagctgtatttgaatgacaatcccaatctgcactcattaccttttgaattggctctgtgtagtaagttgtcaatcatgagcattgaaaattgcccgttgagtcacctgcctccgcagattgtcgccggtggaccctcttttataattcagtttctgaagatgcaggggccttaccgggctatggtgtag

SEQ ID NO: 240855 - DNA, 588 bp, synthetic construct
  misc_feature 1..588: note = Description of Artificial Sequence: Synthetic coding sequence
  source 1..588: mol_type = other DNA
atgctaagagacgggagattcgcatgcgctatttgtccccacaggccggtactggacacactggccatgttgacagcgcaccgggctgggaaaaagcacttaagttcccttcagctgttctacggcaagaaacagccaggtaaagagaggaaacaaaacccaaaacaccagaatgaacttcggcgtgaggaaaccaaggccgaggccccactattaacccagacacggctgattacccaaagtgccttgcacagggccccacattacaacagctgctgccgcaggaagtaccggccagaagcacccggtccctccgtgtccctttccccaatgcctccgtctgaggtcaaattgcagagtggcaagattagtagggaacccgagcccgcagccggtccacaagccgaagaatctgccactgtgagcgcccctgctcccatgtcccctacacgtcgcagagcacttgatcactatctcacgctcaggtcctctggatggatacctgatggtcgcggtcggtgggtcaaggacgaaaacgtggaattcgactctgacgaggaggaaccgcctgacctgccgttggattag

SEQ ID NO: 240856 - DNA, 693 bp, synthetic construct
  misc_feature 1..693: note = Description of Artificial Sequence: Synthetic coding sequence
  source 1..693: mol_type = other DNA
atgagttttaaaagagagggggatgattggtctcagttgaacgtgctgaagaagcggcgagtgggcgatctccttgcgagctatattcccgaggatgaggccttgatgcttcgcgacggtcggtttgcatgcgcgatttgcccacatcgacccgttcttgacaccctggccatgctcacagctcatcgggctggcaagaaacatctgagtagccttcagctgttttacggcaagaagcaacccggaaaagaaagaaaacagaaccccaaacatcagaacgagctgcgcagagaagagacaaaagccgaggcaccgctgttgacacaaactcgcctcatcacacagtcggctttgcatagggctccgcattacaatagttgttgccgaaggaagtatcgcccagaagctccagggccttcagtgtccctgagccctatgccgccaagtgaagtgaagctacagtcgggaaagatttctagagaacctgaacctgcagctggacctcaagccgaggaatcagctaccgtatccgcccctgcacctatgtctcctaccaggcgacgagctctggaccattacctgacgctccgatcctcaggctggattcctgatggcagaggcagatgggtgaaagatgagaatgttgagtttgatagcgacgaggaggagcctcccgacctccccctcgactag

SEQ ID NO: 240857 - DNA, 1038 bp, synthetic construct
  misc_feature 1..1038: note = Description of Artificial Sequence: Synthetic coding sequence
  source 1..1038: mol_type = other DNA
atgtataaagactgtatcgagagcacaggggactattttcttttgtgcgacgccgaaggaccctgggggatcatcctggaatctttggccatcctggggatcgtggtcaccattctgctgctgcttgcgtttcttttcttgatgagaaaaatccaagattgctctcagtggaatgttcttccgacccagttgttgttcttactgtccgtcctcgggctctttgggcttgccttcgctttcatcatcgagctgaatcagcagacggcccctgttcgctacttcctattcggtgtgcttttcgcgctgtgcttttcatgtctactggctcacgcatccaatcttgtgaaactcgtgcgcggttgtgtgtcattctcatggaccacaattctctgtatagcgattggctgcagcttgttacagatcattatagccaccgaatatgttacgttgattatgacccgaggcatgatgtttgtgaacatgacaccatgccagcttaatgtggattttgtagttttgcttgtttacgtcttgttcctgatggccctgacctttttcgtctctaaggcaaccttttgtgggccttgtgaaaactggaaacagcacggcagattaatcttcataacagtgctgttttcaataataatctgggttgtgtggatctccatgttgctccgtgggaaccctcagttccaacgacagccgcaatgggatgacccggtggtttgtatagctctggttacaaacgcctgggttttcctgcttctgtacatcgttcctgagctttgcatcctgtacagaagctgtcgacaggagtgtccactgcagggaaacgcatgccctgttaccgcgtatcaacacagctttcaggtagaaaaccaagagcttagtagggctagggattccgatggagcagaggaggatgtcgcgttaaccagctacgggactcctattcaaccacagaccgtggatcccacccaggaatgctttattcctcaggcaaagctgtcacctcaacaagatgcaggtggagtgtag

SEQ ID NO: 240858 - DNA, 2076 bp, synthetic construct
  misc_feature 1..2076: note = Description of Artificial Sequence: Synthetic coding sequence
  source 1..2076: mol_type = other DNA
atggagggaaataaactcgaggaacaggattcgagtccaccacagtcaacgccagggcttatgaaggggaacaaacgggaagagcaaggacttggcccagagccggctgcgccacagcaacccactgcagaggaagaggctctgattgaatttcacagaagttacagggagctgttcgaatttttttgcaataacacaaccatccatggagccatccgcctggtctgttcgcagcacaataggatgaagaccgccttttgggcggtgctctggctctgtaccttcgggatgatgtactggcagttcgggctcctgtttggggagtacttctcatacccagtgtctctgaacatcaacctaaattccgataagttggtctttccggctgtgaccatttgtaccctgaatccttatcggtatcctgagattaaagaggagctggaggagttggataggatcaccgaacagaccctgttcgacctgtataaatatagctccttcacgacgcttgtggctgggtccaggtccagaagggatctgcggggtactctgccacaccctttacaacgtctacgagtgccgccacccccacacggagctaggcgtgcaaggtctgtggcctcctcgcttcgggacaacaaccctcaagtggactggaaggactggaagatcggcttccagctctgcaatcagaataaatctgattgcttctaccagacttactcaagtggcgtggacgcagtgcgggagtggtatcggtttcactatatcaacatcctctctcgtctacccgagactctcccctccctggaggaggatacattgggcaactttatttttgcttgccgattcaatcaggtttcttgcaatcaggctaactacagtcactttcaccatcccatgtacggtaactgctacactttcaacgataagaacaactcgaacctgtggatgagcagtatgcctggcattaacaatgggcttagccttatgcttagagctgaacagaatgatttcatcccactgctgtctactgtgactggggcaagagttatggtgcacgggcaagacgaaccagcctttatggacgacggcggtttcaatcttaggcccggagtcgaaacgtccatatctatgcggaaggagactctggatcgtctgggaggcgactacggcgactgtactaagaatgggtcagatgtcccagtcgagaacctttatccctccaagtacacccagcaggtgtgcatccatagctgttttcaagagtccatgataaaggagtgcgggtgcgcctatatcttttatccccgtccacagaacgtggaatattgtgattatagaaagcactcaagctggggtcaagtgagatcactcacacccgtgatccccgctctatgggaagctgaggctggacgcagtcggggatactgctattacaagctgcaggtggactttagtagcgaccaccttgggtgcttcaccaaatgcaggaagccctgttcagtgaccagttaccagctttctgctggctacagccggtggccttcagtgacaagtcaggagtgggtttttcaaatgctgtcgaggcagaataattacaccgtgaataataagcgtaatggcgttgcaaaggtgaatatcttcttcaaggaactgaactataaaactaacagtgaaagcccgtcagtcacaatggttacactcttgagcaacctgggtagccagtggtccctgtggttcggctcatcagtcttaagtgtggtggaaatggccgaactggtgttcgatctgttggtgatcatgtttctgatgctcctgcgcaggtttcgctctcgatactggagtcctggcagggggggaaggggtgcccaggaggttgccagcaccttggcttcgtctcccccaagtcacttttgtccacatcctatgtccttgtctttaagccagccaggccctgctcctagtcctgcccttaccgcccctccaccagcctacgccaccctggggcctaggcccagcccaggcggatccgcaggcgcaagcagtagtacatgcccactgggcggaccatag

SEQ ID NO: 240859 - DNA, 2058 bp, synthetic construct
  misc_feature 1..2058: note = Description of Artificial Sequence: Synthetic coding sequence
  source 1..2058: mol_type = other DNA
atgctgctgcatatcaacccggcatacttgttcaaactgctgcatgggttccccccatggattatgcctaccgacggcaacttaggcgacaaaaattttcagatgggtaaacccggtcatagagagggggctacaatgcacgtcaagaagtatctcctgaaaggtttacataggctccaaaagggcccaggctatacgtataaagagttgcttgtgtggtactgtgataataccaacacccacggacccaaaagaatcatttgtgagggcccaaaaaagaaggctatgtggttccttctcacactcttgtttgccgcactggtgtgttggcagtggggtatttttattaggacttatctcagctgggaggttagtgtgagtctttccgtcggatttaaaacgatggattttccggcagtaacaatttgcaacgcctccccttttaagtactccaagatcaagcacttgctgaaggaccttgacgagttgatggaggcagtgttggaacggattctggccccagagctttcacacgctaatgcaacccgcaatctgaacttctcaatctggaatcatacacccctggtgctgattgatgagagaaacccgcatcaccctatggttctggacttgttcggagacaaccacaatggccttacctcatcctcagcctcagagaagatctgcaatgcccacggctgcaagatggcaatgcgcctctgctctctgaaccgtacccagtgcacttttcgcaacttcacttctgccacacaggccctgactgagtggtacattctccaggcaactaacatctttgcccaagtgccccagcaggagctcgtggagatgtcctatcccggagaacagatgatactcgcctgtttgttcggagccgagccctgtaactacaggaacttcactagtattttttacccacactatggaaactgctacatattcaactgggggatgacagagaaagcactgcctagcgccaacccaggcaccgagtttgggctaaagctgatcctggatatcggccaggaggactacgttccattcctggctagcaccgccggtgtgcgtctgatgttgcatgaacagcgctcatatcctttcataagggatgaaggcatatatgctatgtctggcaccgagacatccatcggagtgctcgttgacaaactccagcggatgggggagccatactctccttgcacggttaacggctctgaggtgccagttcagaatttctacagcgattacaacacaacctatagcatccaggcttgccttaggtcctgctttcaggatcacatgattagaaactgtaactgtggccactacttgtacccactgccacggggagaaaaatactgcaacaatcgggactttcctgactgggcgcactgctactcagatcttcaaatgagcgtggcccaaagggagacttgcatcggaatgtgcaaagagtcctgtaacgacacacagtataagatgaccatcagtatggccgattggccttctgaggcttcggaggattggatattccatgtcctatcacaggagcgagaccagtctactaatatcacactgtcgcgaaagggcatcgtgaagcttaacatttacttccaggagtttaactatagaaccatagaagaaagcgctgccaataacatagtatggctcctgagcaatctcggtggacagttcggtttctggatgggtggctccgtgctgtgtctcattgaattcggcgaaattatcatagacttcgtttggattaccattattaagcttgtcgccctggcaaaatctctgagacagaggagagctcaggcgagctatgccggaccaccacccaccgtggcagaactggtagaagcccacaccaatttcggattccagcctgacacagcgcctaggtctccaaacacaggcccttatccctccgaacaggcgctccctatcccagggaccccacctcccaattatgattcactcaggcttcaaccactcgacgtgattgagtcagattctgaaggcgatgccatttag

SEQ ID NO: 240860 - DNA, 1923 bp, synthetic construct
  misc_feature 1..1923: note = Description of Artificial Sequence: Synthetic coding sequence
  source 1..1923: mol_type = other DNA
atgcatgtcaaaaagtatcttctgaaggggctgcacagattacagaaaggtcccggatatacttacaaggaactgctggtctggtactgcgacaatacgaacacccacggaccaaagagaattatttgcgagggcccaaaaaagaaagcgatgtggttccttctgaccctcttattcgccgcactggtgtgttggcagtggggcatttttattcgaacctaccttagctgggaggtgagtgtgtccctgagcgtggggttcaagacgatggatttcccagccgttaccatatgtaacgcgtctccctttaagtactccaagataaaacatctgctgaaagacctggacgaactcatggaggcagtgttagaaaggatcctggcgcctgaattgagccacgcgaatgccacgcggaacctcaacttctcgatctggaatcacactccgttggtactcattgacgaacggaatccccaccacccaatggtccttgaccttttcggcgacaaccacaacgggttgacatcatcaagtgctagtgaaaaaatatgtaatgcccacggctgtaagatggccatgcgcctgtgtagtctcaatagaacacagtgtacctttcggaactttacttctgccacccaggcactcaccgagtggtacattctgcaggcgaccaatattttcgcccaggtcccacaacaagaattagtcgagatgtcctaccctggcgagcaaatgattcttgcctgcctgttcggtgccgaaccgtgcaattacagaaacttcactagcatattctacccccattatggaaactgctacatcttcaattgggggatgacagagaaggccctcccatcagctaacccaggtactgaatttggcttgaaactgattttagatattggccaggaggactatgtaccatttctggccagcaccgccggtgtgagactcatgctgcatgagcaacgctcctatccttttatccgagatgagggcatatatgcgatgtctggtaccgagacctctatcggcgttctggtggacaagctgcagcgtatgggcgagccctactccccttgtactgtgaatggctctgaggtcccagttcagaatttttactcagactataacactacatacagcatacaggcctgcctgcggagctgctttcaggaccacatgattagaaactgtaactgcggccactacctgtacccgctgcctaggggggagaagtactgcaataatagggacttccccgattgggcccattgttattcagacctgcagatgtctgtagcgcagagagagacttgcattgggatgtgtaaagagtcctgcaatgatacgcaatacaaaatgaccatcagcatggctgattggccctccgaggctagtgaggactggatctttcacgtgttgagtcaggaaagagaccaaagtactaacatcaccctgtcacgcaagggcatcgtgaaactaaatatttacttccaggagtttaactataggacgatagaggaaagcgccgctaacaacattgtgtggctcctgagtaatcttgggggacaatttggtttctggatggggggaagcgtgctctgcttaattgaatttggcgaaattataatcgactttgtgtggattaccatcatcaaattggtggccctagccaaatccctacggcagcggcgagcccaagcgtcttacgccggacccccacccaccgttgctgagttggttgaagcccatacaaatttcgggttccagcccgacacagctcctaggagccctaacactggaccttatcccagtgaacaggcgttgccaattcctgggacccctccccctaactatgattctttgcgactgcagccactggacgtgatcgaaagcgactccgagggcgatgccatttag

SEQ ID NO: 240861 - DNA, 2115 bp, synthetic construct
  misc_feature 1..2115: note = Description of Artificial Sequence: Synthetic coding sequence
  source 1..2115: mol_type = other DNA
atggcttttctctctcggacatccccggtggctgccgctagctttcagtcgagacaggaagctcgtgggtcaatcctgctgcagagctgtcagcttccgccacagtggctgagtactgaggcctggaccggggagtggaaacaaccacatggtggggctctcacaagtagatcacctggaccagtggcacctcagaggccgtgtcatctgaaggggtggcagcatagaccaacacagcataacgctgcatgcaagcagggccaagctgccgcacagaccccacccaggcccggtcctccaagcgcaccccctccaccacccaaggaagggcaccaggaaggattggtggaattgccagcaagcttccgggagcttctgacatttttttgcacaaacgctactattcacggcgctattagactagtgtgcagccgtgggaataggttgaagaccacgtcttggggcttactgagcttgggcgcattggtggctttgtgctggcaacttggactgcttttcgagaggcattggcacagaccggttctcatggcagtatctgttcacagcgagaggaaacttctgcccctggttactctttgtgacggcaacccacgcagaccaagtccggtgttgcggcatctggaattattggacgaattcgcccgagaaaatattgacagtctgtataatgtgaaccttagcaaaggtcgtgcggcactgtccgccacagtgccgagacacgaaccaccttttcacctggacagggaaattcgtctccagcggctgtctcacagcggatctcgcgtccgtgtgggattccggttgtgcaattctacaggcggagattgcttctacagaggatacacttccggcgtggccgctgtccaggattggtatcatttccactacgttgacattctggccctcctgcccgctgcttgggaggattctcacgggagtcaagatggccacttcgttctgagctgctcttatgatggcctcgactgccaggccaggcagttccgtacctttcatcatcctacctacggctcttgttacaccgtcgatggggtttggactgcccaacgacctggcatcacgcacggggtgggcttagtcttgagggttgagcaacaaccacacctgccactgctgtcaactctcgcaggtattcgggtgatggtgcatgggcgtaaccatacaccattcttaggtcaccactctttctccgtgcggccaggcacggaagccaccatctcaattcgggaagacgaagttcaccggctaggctccccatatgggcattgcaccgccggtggagagggtgttgaggtcgagctgttgcacaacacatcctatactcggcaagcctgcctggtctcatgttttcagcagctcatggtagaaacctgttcttgtggatactatctgcatcctttacccgctggggcagagtattgtagttctgcacggcaccccgcttggggacactgtttctacagactctaccaggatctagaaacacaccgcttgccctgcaccagtcggtgccccaggccctgccgcgagtccgccttcaagctcagcaccggcacttccaggtggccttcagccaaatcggctggatggacgcttgcgaccctgggcgaacaaggtttaccgcaccaatcccaccgacaacgcagtagtctggccaagatcaatatcgtttaccaggaactgaattatcggagcgtagaggaggctccagtatacagtgtcccccagttgttatctgcaatgggctccctctgttccttgtggttcggtgctagtgtcttgagcttactggagctgttggagctcctgctcgacgccagcgctctgaccctcgttctcggaggacgacggttgcggagagcctggttctcatggcctagggcaagtccagcatccggcgcttctagcataaagcccgaagcaagccaaatgcctcccccagcaggcggaactagcgacgatcccgagccatctggacctcacctgcctagagtcatgttacctggggtcttagccggtgtatccgccgaggaatcttgggctggtccccagcccttagaaacccttgacacatag

SEQ ID NO: 240862 - DNA, 1917 bp, synthetic construct
  misc_feature 1..1917: note = Description of Artificial Sequence: Synthetic coding sequence
  source 1..1917: mol_type = other DNA
atggccgagcaccgtagtatggacggaagaatggaagcagccactcggggaggatcacacctccaggccgctgcacagacacctcctcgcccaggtcctccctccgccccaccacctcctccgaaagaagggcaccaagagggactggtggagctcccagcttcttttagggagttactgacattcttctgcacaaacgcaactattcacggtgctatccgactcgtttgtagtagaggaaaccgtctgaagactacgagttggggcttgttgtcactcggcgcattggtggccctgtgctggcaattaggcctgttgtttgaacgacactggcacagacctgtattgatggccgtttccgttcactctgagagaaagctcctgcctctcgttacactgtgtgacggtaacccacgtcggccttctcctgtgctccgtcacctcgaattgctggatgagtttgctagagaaaatatcgacagcctgtataacgtgaacctgtcgaagggaagagcggcactgtccgctaccgttccaagacacgagcctccattccatctagaccgagaaatccgcctgcaacgtctgtctcactcaggtagccgggtcagggtgggcttccgtctctgcaatagtacaggcggtgattgtttctatcggggatacacgagtggtgtggccgctgtgcaggactggtatcactttcactatgtggacattctggcactgctgccagcagcttgggaagactctcatggcagccaagatgggcactttgtgctgtcctgttcctatgacggtttggactgccaggcgcgtcagtttagaacctttcaccatccaacttacggctcttgctacaccgttgatggcgtgtggacagcccagcgaccgggtattacgcacggcgttggcttggtgctcagggtggaacaacagccccacctgccattgctctcgaccttggcaggtattagagttatggtccatggcaggaaccacactccctttctgggccaccatagtttctctgtaagaccgggaacggaagcaactatctctattagggaagatgaagtacatcgattaggatctccatacgggcactgcacagctggaggcgagggggtagaggtggaactgcttcataacacctcttacacgagacaagcctgcctggtgtcatgcttccagcagctcatggttgagacttgtagttgtggatactacctgcacccacttcccgctggtgctgagtactgctcatcagctcgccaccctgcatggggccactgcttttaccgactttaccaagacttagagacacataggctgccctgtaccagcagatgcccccgtccttgccgggaatccgcttttaagctctctaccggaacaagccgctggccgtcagctaaatccgccggatggactctcgccaccctgggagagcaagggctcccccaccagtctcatagacaacgctccagtctcgccaaaatcaatattgtgtaccaggagctgaactatcgttcagtcgaggaagccccagtgtactccgtgccccagctgctgtcagcgatgggttcattgtgctctctgtggtttggagcctcggttttatctctgcttgagctgctggaactgctgttagacgccagcgctctgacattggtgttggggggtagaaggctgaggagggcctggttcagctggcctcgggcttcccccgcatccggggcatcatccatcaagccggaggcaagccagatgcctccacccgcagggggaacttcagatgatcctgagcccagcggaccccacctcccgagggtgatgcttccaggggtcctcgctggggtttctgcagaagagtcttgggctggccctcaacctctggaaaccctggacacgtag

SEQ ID NO: 240863 - DNA, 927 bp, synthetic construct
  misc_feature 1..927: note = Description of Artificial Sequence: Synthetic coding sequence
  source 1..927: mol_type = other DNA
taagccacagccagagccgcaactgctttcacagaggccacccggcaagcgtggaggctgtctaggactgggaccacctctactatgtggatttcatggccatgctgcccaagacatggcaggactgcgacaggtgcaaggaccgctacctcctccagcccagctgtgaccatggcttggacggccagaccagattccagcggcccttctacaacccccccaaccgctgccgcaacgcgcagcatggcaagtggtcagctgtctgcccctgcctccccaaccgttggcgcttccccatggccagtgaggggacagggctgtaggtccgggggacttacccctgctctcggacttccaggcgtgggactcgtgttgagggtcgaacagcagcctcacctgcctttactcagtactctagccggaattagagttatggtgcatggacgcaatcatacacccttcctcggacaccactccttttctgtcagacctgggaccgaagcaaccatctccataagggaggatgaagttcacaggctgggaagtccgtacggtcattgtaccgcaggaggagagggtgttgaggtcgagctgttgcacaacacatcgtacaccagacaggcatgtctcgtgtcatgtttccagcaactaatggtcgaaacttgctcctgtggatactatctgcatcccctgcccgctggagctgagtattgttcatcggctcgacaccctgcctgggggcactgtttctataggctttatcaagatctggagacccatagattgccttgcacatcaaggtgccctcgaccctgtcgggagtccgcgtttaagttgtcgaccggtacctcccggtggccctccgcaaagagtgctggctggactctggccacactaggcgagcaaggtctgccacaccagtcctag

SEQ ID NO: 240864 - DNA, 2010 bp, synthetic construct
  misc_feature 1..2010: note = Description of Artificial Sequence: Synthetic coding sequence
  source 1..2010: mol_type = other DNA
atggccgagcaccgcagcatggatggcagaatggaagccgcaacccggggtgggagccacctacaaatcgcctgggcttgcggttcacctgaagccctgcctcccgaaggaatggctgcacagacacatagtgctcagcgctgcctacagactgggccaggctgtagtcctgatgccccacaacctgggcctcctagtgcaccaccacccccacccaaagagggccatcaggagggtctcgtggagttacccgcatcttttcgggagctgctgacctttttctgtactaacgctacaatccatggcgctattagactcgtttgttcgcgcggaaacagactgaagactacctcctgggggttgttgagcctaggagccttggtcgctttatgctggcagctgggactactgtttgaacgccactggcacagaccagtgcttatggctgtgtcggttcattccgagaggaaactgctgcctctggtgacgctctgtgatgggaatccgaggcgcccaagccctgtgctgagacatctcgagttgctggacgaattcgctcgcgagaacatcgacagcttgtataatgtaaatctgagcaaaggcagggctgcactgagcgcaaccgtccctcggcacgagccccctttccaccttgaccgcgagattcgcctgcagcggcttagccattctggcagtcgggttcgagtgggtttccgcctgtgtaattctaccggaggagattgcttctacagaggttacacttcaggtgtggcggctgtgcaagattggtaccacttccactacgtggacattctggcattactgcccgcagcctgggaggacagtcatggatcacaggatggccactttgtccttagttgttcatatgacggtctcgactgtcaggctcgccagtttcgaactttccaccatcccacctacggctcttgctataccgtcgatggcgtctggacagcacagagacccggtattactcacggtgtggggctcgtcctgcgcgtcgagcagcagccgcatctgccgttattaagcacactggccggaattcgcgtgatggtgcacgggagaaaccatactccattcctgggccaccattcattctccgtacggccaggtacagaagccactatcagcataagggaagatgaggtgcatcgcctcggcagcccttacggacactgcaccgctggcggtgagggtgtcgaagtcgagctcctccacaacacctcctatacccggcaggcatgtttagtttcctgtttccagcagctgatggtggaaacctgcagctgcggatactatcttcacccattgccagccggagcagaatactgctcttctgcacgccaccctgcatggggacactgtttctatcgactgtatcaggatttagagacacataggttaccttgtacaagcaggtgtcctcgaccatgcagggagtccgcctttaaattgtcaacaggaacaagccggtggcctagtgccaaatcagcaggatggacgctggccacactaggtgaacagggactgcctcaccaaagccaccgccaaaggagctcactcgccaagattaatatcgtctaccaagagctgaattaccggtctgtggaggaagctcccgtgtactctgtgccacaattactttccgcgatgggatccctctgcagtctctggttcggcgctagcgtattgtcacttctggagctgctggaactgctcctcgacgcgtcggctctcacgctcgtacttggcggtcgtcgcctgcggagagcctggttcagctggcctcgagccagccccgctagtggcgcttccagcataaaacctgaagcgtctcagatgcccccacctgctggtgggacctccgatgatcctgagccatccggccctcatctgcctcgggtaatgctccctggcgtcttggctggagtttcggccgaggagtcctgggccggtccacagcctctcgagactttggatacttag

SEQ ID NO: 240865 - DNA, 2409 bp, synthetic construct
  misc_feature 1..2409: note = Description of Artificial Sequence: Synthetic coding sequence
  source 1..2409: mol_type = other DNA
atgcgcgcagtgctgtcacagaaaaccactccactacctcgttacctgtggccaggacatctatctggaccaagacggctaacatggtcctggtgcagcgaccaccggaccccgacttgcagagaactcggttcccctcatcccacaccatgtaccggcccagcgcgtgggtggccgcgacgcggtggtggcccatgcggcttcacgagcgcgggtcacgtgctatgcggatatcctctttgcctgctgtcaggcccaattcaggggtgcggcacgggactcggcgattctagtatggcctttctcagtcggacatcccccgtggctgccgcttccttccagtcccgccaggaggctagaggaagcattctgttgcaatcatgccaactgccaccacagtggctgagtaccgaggcctggacgggggagtggaaacaaccacatggaggagctctgacgtccaggtcaccaggacctgtggcgccacagcggccatgccatctgaaaggatggcagcatcgccctacacagcacaacgctgcctgcaaacagggacaagccgctgcacagacacccccacgacctgggcctccctccgcccctcctcctcctcctaaggaggggcatcaggaagggctggtagaactgccagccagctttcgggaactgcttacttttttttgtacaaatgcgacaattcacggcgctatccgtctggtatgctctagaggtaacaggttgaaaacgacgagctgggggctactgtccctgggtgctttagtggccctctgctggcaacttggactcctgttcgaaaggcactggcaccggcctgtcctgatggccgtcagcgtccactcagagagaaaacttctgccactagtcacactgtgcgatggcaatccccgacggccttccccagttctaaggcacctggaactgttagacgaatttgccagggagaatattgatagtctttacaacgtgaatctcagcaagggacgcgcagccttgtctgccaccgtccccaggcacgagcctcctttccacctggacagagaaatccgacttcagagactctcacatagcgggtcccgggtccgtgtaggcttccgactctgcaattccaccggcggagactgtttctataggggatacacaagcggggtggctgccgttcaggattggtaccacttccattatgtcgacatccttgctctgttaccagctgcctgggaagactcccatgggtctcaagacggccacttcgtgctctcctgttcatatgatggattggattgccaagcaagacagttcagaacttttcaccacccaacatatggatcttgctatacagtggacggcgtctggacagcgcagagacctggtatcacacatggagtgggacttgtgctgcgggtagagcagcaacctcatctgcctctcctgtcaaccctagcaggaatcagagtgatggttcacggacgcaaccataccccattccttggacatcacagcttctctgttcgccctggcactgaagccacaatttctataagagaagacgaagtacaccgccttggcagtccatacgggcattgtaccgccggtggggaaggggtggaggttgagctgttgcataatacatcatacacccgccaggcatgtctcgtgtcatgctttcaacagctgatggttgaaacctgttcctgcggatactaccttcatcctcttccggcaggagctgaatattgctcctcagctcgccatcccgcttgggggcattgtttctataggttgtatcaggatttggagacccatagattaccctgcacaagcaggtgtcccagaccctgccgagagagcgcattcaaactgtccaccgggacctccaggtggccatccgcaaagagcgctggctggactctggcaacgctcggggagcaagggctgccccatcaatcccatagacaaaggagttcgctggccaagattaacatcgtgtaccaggagctgaactaccgaagcgttgaagaagctcctgtgtattccgtgccccaactactttccgctatgggatctctgtgctccctttggtttggcgcttcagtgctctctctgctcgagctcctggaattactgttagacgcatcagctctgaccctagtactcggaggccgtaggctgagacgcgcttggtttagctggcctcgggcatcccccgctagcggagcgagttctataaagcctgaagcatcacaaatgccaccccctgccggagggacaagcgacgatcctgagccatctggcccacacctgccccgagtgatgttgccaggagttttggctggcgtgtccgccgaagagtcctgggccggaccgcaacctttggagacgctagacacttag

SEQ ID NO: 240866 - DNA, 1917 bp, synthetic construct
  misc_feature 1..1917: note = Description of Artificial Sequence: Synthetic coding sequence
  source 1..1917: mol_type = other DNA
atggcagagcatagaagcatggacgggagaatggaggccgctacacgcggtggctctcatttacaagcagctgcccagacccctccccgtccaggcccaccctcagcccctcctccgcctcctaaagaaggacatcaggagggattggttgagcttccagccagctttagggagctacttactttcttctgcacaaatgccacgatacacggcgcaatccggctggtgtgcagcagaggcaaccgcttaaaaacaaccagctgggggctgctcagtttgggggcactcgttgccttgtgttggcaactcggtttgctattcgagcggcattggcaccgacccgtgctgatggctgtgagtgtccactccgaaaggaaactacttcctttggtcacactgtgtgatggaaatcctcggaggccgagtcccgttttgaggcacctcgagctgcttgatgaattcgcccgagaaaatattgatagcctctataatgtcaatttaagcaaaggaagagcggcactcagcgccaccgtgccaaggcacgagcccccatttcacctggaccgggagattagactgcagaggctgtcccactctggatccagagtgagagtgggcttccggctctgtaactctaccggcggtgactgtttttatcgcggttacaccagcggtgtggccgcagtgcaagactggtatcacttccactacgttgacattctggccctcctgcccgctgcgtgggaggatagccacggaagccaggacgggcacttcgtgttgtcctgcagctatgacggacttgactgccaggcccgacagtttaggaccttccaccaccccacttatggatcctgctataccgtcgatggcgtgtggactgcacaacgaccagggatcacccacggggttgggctcgtcctccgcgtggagcagcagccccatttgccactccttagtactctagctggcatccgcgtgatggtccatggcagaaaccatactccatttctgggtcaccacagcttttccgtgagaccagggacggaagctaccatcagcatcagagaagatgaggtccacaggctaggctcaccttacggacactgtactgccggaggcgagggtgtggaggtagagctcctacataataccagttacacaagacaagcctgtctggttagctgtttccagcagcttatggtggagacatgcagctgtgggtactatctacatccactgccagccggtgccgaatactgctcctcagccaggcatccagcatggggacactgcttctatcgcctgtaccaggacctcgagacccatagactgccatgtactagccggtgcccacgcccatgcagggagagcgcttttaagctgtctaccggaacgagccgatggcctagcgccaagtccgccggttggacactcgcaactctgggcgagcagggactgccccatcaatctcacagacagcgctctagtctggccaaaatcaacattgtgtatcaggaactcaattataggagcgttgaggaggccccagtgtactcagtccctcagctactctcagccatggggtccttgtgctctctgtggtttggcgcaagcgttctaagcctcctggagctgctggaactgttgctggacgcgtccgctctgacgttggtgttggggggacgaagacttagaagggcttggttctcgtggcccagggcatctcctgcgagtggcgctagcagtatcaagcccgaggcctcccagatgcctccacccgcaggagggacaagtgacgaccctgagcccagcggcccacacctgcctcgcgtgatgctgccgggagtgctcgcaggagtgagcgcagaggagtcctgggccggaccacagccgctggagactctcgatacctag

SEQ ID NO: 240867 - DNA, 1950 bp, synthetic construct
  misc_feature 1..1950: note = Description of Artificial Sequence: Synthetic coding sequence
  source 1..1950: mol_type = other DNA
atggccccaggcgagaagatcaaggctaaaatcaaaaagaatctgccagttacagggcctcaagcacccaccataaaagaattaatgcggtggtattgtctgaatacaaacacccacggttgccggagaattgtcgtaagccgcggacggttgcggaggctactgtggatcgggttcaccctaacagctgtcgcgctgattctgtggcagtgtgccctgttggtcttcagcttctatacagtgtctgttagtatcaaagtccacttccgcaagctggatttccccgctgtgactatctgtaacattaatccttacaagtattcgacggtaaggcatttactggcggacctggaacaagagaccagagaagccctgaagagcctgtatggattccctgagagtaggaagcgccgtgaggccgagtcttggaattctgtgagtgagggaaagcagccaaggttttcgcaccgtatccccctgttgatttttgatcaggatgaaaaagggaaggctagagacttttttacagggaggaaacggaaagtggggggaagcatcattcacaaggcaagcaatgtcatgcacattgaatccaaacaggtggtcggttttcaactctgctctaatgatactagcgattgtgccacctataccttctcctctgggataaacgcaattcaggagtggtataagctgcattacatgaatatcatggcgcaagtgccgctggaaaagaaaattaacatgagttacagcgccgaagaactgctcgtaacatgcttcttcgatggcgtgtcatgcgatgctcgaaacttcaccctgtttcaccacccaatgcatggtaactgctatacatttaataaccgtgagaacgagactattctttcgacctcaatgggcggatctgagtatggcttacaggtgatcctgtatataaatgaggaggaatataacccttttttagtgtcgagcactggcgctaaggtgatcattcatcgtcaggatgagtaccccttcgtggaggacgtgggtaccgaaattgaaactgccatggtgacgtcgatcggcatgcatcttacagagagctttaagctgagtgagccctactcccagtgcaccgaagacggctctgacgtccccatacgcaatatctacaacgctgcttactccctacaaatctgtttgcatagctgtttccaaaccaaaatggtggagaagtgcggttgtgcccagtattcacagccactgccacctgccgctaattattgcaattatcagcaacacccaaactggatgtactgttattaccagttacatcgagcttttgtccaggaggaactcggttgtcagagtgtttgcaaggaggcgtgtagcttcaaagagtggaccctgaccactagcttggcccagtggccatcggtggtctctgaaaaatggctactgccggtactcacctgggaccagggtcggcaggttaataaaaagctcaacaagaccgatcttgctaaactgctgattttctataaagatctgaaccaaaggtctattatggaatcccccgctaacagtattgaaatgctcttatctaacttcgggggtcagctcggactgtggatgtcctgctccgttgtgtgtgtcattgaaatcatcgaggtgttttttattgacttcttcagcatcatcgcacggagacagtggcagaaagcaaaggagtggtgggcctggaagcaggccccaccttgccctgaagcacctagaagcccgcaaggccaggataaccctgctctggatattgatgatgatttgccgaccttcaacagcgcattgcatttaccacctgctttggggacgcaggttccgggaacccccccacctaagtataacaccttgcggctggagagggcttttagcaatcaattgactgacacccaaatgctcgatgagctctag

SEQ ID NO: 240868 - DNA, 5942 bp, synthetic construct
  misc_feature 1..5942: note = Description of Artificial Sequence: Synthetic coding sequence
  source 1..5942: mol_type = other DNA
atggcagctaggctcctggcccctcctggtcctgacagctttaagccgttcacgccagaatcattagctaatatcgaacgtaggattgccgagagtaaacttaagaaaccaccgaaggccgacggttcccatagagaagacgacgaggacagtaagcccaagccaaacagcgacctggaagcaggaaagtccctgccttttatttacggggatataccgcaaggcctggtggccgtgcctctggaggatttcgacccttattatctgacgcagaaaacctttgtggtgctgaacaggggaaagacactgttcagattcagcgctacaccagccctgtacatcctctctcctttcaatctcatacgaaggatcgctatcaagattctaattcactctgtcttctccatgattatcatgtgcaccatactgactaattgcgtcttcatgacgttttctaaccctcccgattggagtaagaacgtggagtatacctttaccggcatttacacattcgagtctctagtcaaaatcatcgcacgcggtttttgtatcgatgggtttaccttcctgagggacccatggaactggctagactttagcgtcattatgatggcttacataaccgaatttgtcaatctgggtaacgtctctgcgctgcggacattcagagtcctccgggcactcaaaactatctctgtgattcccggactaaagaccattgtgggggcactcattcagtccgtgaaaaagctgagcgacgtaatgatcctgacagtgttttgtttatctgtcttcgccctgattggcttacagttgtttatgggtaacctcaggaataagtgcgtcgtgtggccaattaacttcaatgaaagttatcttgaaaacggcacgaaaggttttgattgggaggaatacatcaacaataagacaaacttttacacagtaccaggcatgctggaacccttgctctgtggaaatagtagcgatgccggtcagtgcccggaagggtatcagtgcatgaaggccggtagaaatcctaactacggttacaccagtttcgacaccttctcatgggcctttctagctttattccgcctcatgacccaggactactgggagaatctttatcaattgacgttgcgagcagccggaaagacctatatgattttcttcgttttagttatctttgtgggttctttttacctcgtgaacctcatcttggccgtcgtcgcaatggcgtacgaggaacagaaccaggctaccctggaggaggcagagcaaaaggaggcggaattcaaggcaatgctggagcagctcaagaaacagcaggaagaggcacaggcagcagccatggccacaagcgctggtacagtttctgaagacgcaatcgaagaagagggtgaagaagggggaggatctcctaggtcctccagtgagatctccaaattatcaagcaaatctgctaaagaaagacgtaacagacgcaagaaacgtaaacaaaaagaactgagcgaaggagaggagaaaggagatcctgagaaagtgttcaagtccgaaagtgaagacgggatgagaagaaaggcgtttcggttacccgacaaccgcatagggaggaagttctccattatgaaccagagcttgttaagtattccaggatctcccttcctgtcacggcataacagcaagagttccatctttagcttcagaggcccaggccgtttccgtgatcccggaagcgagaatgaattcgccgatgacgagcacagtacagtggaggagtctgagggacgtcgcgatagcctgttcattccgatccgggcaagggaacgacgatcgtcatactctgggtacagtggctactcccagggctcccgcagcagtcggatctttcctagtttaaggcgaagcgtgaaacggaactctacagtggattgcaacggcgtggtgagcctgatcgggggacctggctcacacatcgggggtaggctactcccagaggcaaccactgaggttgaaattaagaagaagggccctggctccttactggtaagcatggaccagttggcctcctatggaagaaaggacaggatcaattcgataatgagcgtggtcaccaatacgttggtggaagaactggaggagtcccaaaggaagtgccccccatgttggtataagttcgccaatacctttctcatttgggaatgccatccctactggattaaattgaaagagatcgttaacttgatcgttatggacccttttgtggacctcgccatcactatctgtatcgtattaaacaccctgtttatggcaatggagcatcaccctatgaccccccagtttgagcacgttctggcagtggggaacttggtattcaccggtatcttcacagctgagatgtttctcaaattgattgcaatggatccgtactactactttcaagaaggatggaacatcttcgatggattcatcgtcagtctgtcacttatggagctcagcctcgctgatgtggaagggctgagcgtacttcgatcctttaggttgctgagggtgttcaaactggctaaatcctggccaaccttaaacatgctcatcaagataatcgggaactccgtgggagccctgggaaacctcactcttgtgctggctataattgtcttcatatttgccgtggtgggcatgcagttgttcggaaaaagttacaaagagtgcgtctgtaaaatcaaccaagactgcgagctgcccagatggcatatgcatgatttcttccacagttttttgatcgtgttcagagttctgtgcggcgaatggattgagaccatgtgggattgtatggaagtagccggtcaggcaatgtgtttgattgtgtttatgatggtaatggtgattgggaacttagtcgtgttgaatctgtttcttgcgctacttcttagtagtttcagtgccgataacctagcagccaccgacgatgacggggaaatgaacaacctgcagataagcgtgatcagaattaagaaaggagttgcctggactaaactgaaggtgcatgcttttatgcaggctcatttcaaacagcgggaagctgatgaggtcaaacccctggatgagttgtacgagaaaaaagccaattgcatagccaatcacaccggggctgacattcatcggaacggggattttcagaagaacgggaacgggactacctccggaatcggcagttctgtggagaaatacattatagacgaagaccacatgtctttcatcaataacccaaatctgacggtccgagtgcccatcgctgtaggtgagagcgactttgaaaacctaaacacagaagatgtatcatcagagtctgatccagagggttccaaagacaagctcgatgacactagtagcagcgaaggcagtaccatcgatataaagccagaagtagaggaggtgcctgtggaacaacccgaggagtatcttgaccctgacgcctgcttcacagaaggttgcgtgcagagattcaaatgctgtcaggtcaacatcgaagaagggctgggaaagagctggtggatcctgcgaaaaacgtgctttctgatcgtggagcataactggttcgaaacttttatcatcttcatgatcttactctcatccggagccctagctttcgaggatatctatattgaacaaaggaagaccattagaacaatcctggaatacgcagacaaggtatttacctacatatttatcctagagatgctgctgaaatggaccgcctacggatttgtgaaattttttaccaatgcttggtgttggttagatttcctgattgtcgctgtgagtctcgtcagtctcattgccaatgccttgggttatagcgagttaggggctatcaaaagtctcaggacattacgcgctctgcggcctctcagggccctttctaggttcgaaggtatgcgggttgtcgtgaacgcgctcgtgggagctattccaagcatcatgaatgtgctactggtgtgtttgatattctggttaatcttttctattatgggagttaacctatttgccggtaagtaccattattgctttaatgagacatcagagatcaggtttgagattgaggacgtcaacaacaagaccgaatgcgagaagcttatggagggaaataacactgaaatcaggtggaaaaacgtgaaaatcaactttgacaatgtgggggctgggtatttagcccttttacaggtagccaccttcaaagggtggatggatataatgtacgccgctgtggattccagaaaaccggacgagcagcccaagtacgaggataatatatacatgtacatctacttcgtgatattcattatattcggcagcttctttacactgaacctgtttatcggggtgattattgataattttaaccagcagaagaaaaagttcggcggacaggacatattcatgacagaagaacagaagaaatactacaatgcaatgaagaagctgggaagcaagaagcctcagaagcctatacctaggccgctcaacaaaatccagggcattgtttttgattttgtgacacagcaagctttcgacatagtaattatgatgttgatttgtttaaacatggtaaccatgatggtggagacagatacccagagcaagcagatggagaacattctgtactggatcaatcttgtgttcgtaattttcttcacctgtgaatgcgtcttgaagatgtttgctttacgacactattatttcactataggctggaacattttcgattttgtagtcgttatcctgagcattgtgggaatgttcctggcagacataatagaaaagtacttcgttagcccaactctgttccgcgtgatccgcctggcacgaattgggaggattctccggctgataaaaggagcgaaggggattcggacattgctgttcgcattaatgatgtccctgcccgctcttttcaacatcggattgctcctatttctcgttatgtttatttttagcatttttggcatgtccaattttgcgtacgtgaaacacgaggccggtatcgacgacatgttcaacttcgagacgtttgggaatagcatgatatgtctctttcagattactaccagtgccggatgggatggccttttactgcccattcttaatcgtcctcctgactgttcgcttgacaaagaacatcccggatctgggtttaaaggtgactgtggcaatccgagcgtagggatcttctttttcgtgtcttatatcatcatatcttttctgattgtcgtcaatatgtacatcgccattattcttgaaaactttagcgtcgccacagaagagtccgctgacccactttctgaggacgactttgagacattttacgagatttgggaaaagttcgatcccgatgccactcagttcatcgaatattgcaagcttgctgatttcgcagacgctctggagcacccccttagagtgccgaagcctaatacaatcgaactgatagccatggatctgcctatggtttccggcgataggatccattgcctggatattctcttcgccttcaccaagcgtgttttaggcgacagcggcgagctggatatcttgcgccagcagatggaggaaaggtttgtggcgtctaatccatcaaaagtcagctatgagcctatcacaacaacccttagacgtaaacaggaggaagtctctgcagtggttctccagagggcgtatagaggccatctcgcccgaagaggtttcatctgcaagaagaccacctcaaataagctcgaaaacgggggaacacatagggaaaagaaagagtcaaccccttcgaccgcatctctcccctcctatgactcggttaccaaacctgaaaaggagaagcagcagagggccgaagaagggaggcgcgagcgagcgaaaaggcagaaggaggtccgcgagtctaaatgcta

SEQ ID NO: 240869 - DNA, 4674 bp, synthetic construct
  misc_feature 1..4674: note = Description of Artificial Sequence: Synthetic coding sequence
  source 1..4674: mol_type = other DNA
atggctgcccgacttctggcgccacctggtcctgatagcttcaagccctttactccagaatccttagccaatatagaacgaaggatcgctgaatctaaactgaaaaaacctcccaaggccgacggttcccatagggaggatgacgaagatagcaaacccaagcctaacagcgatctcgaagcgggaaagtccttgccattcatctacggggacattcctcagggtcttgtagccgtgccactcgaagacttcgatccatattacctgactcagaagacttttgttgttttgaaccgcggaaagactctgtttcgattttctgcgacgcccgctctgtacattttgtcccctttcaatctgatccgcagaattgccatcaagatcctcattcatagtgttttttctatgatcataatgtgtacgattctgaccaactgtgtgtttatgaccttctctaatccacctgactggtcaaaaaacgtggagtacacattcactggtatatataccttcgaatctctcgtgaagattatcgcacgtggcttctgtattgacggatttacctttctcagggacccctggaactggctggacttctccgtaataatgatggcctacatcaccgaattcgtgaacctgggaaatgtgtccgctcttaggacgttcagagttctccgcgctctcaagactattagcgttattccaggccttaaaacgattgtaggggcactaatccagtctgtaaagaaactttcggacgtgatgattctcacagtgttctgtctgtcggtgtttgccctgatcggcctacagctcttcatgggcaacttgaggaacaaatgcgttgtgtggccaataaacttcaacgagtcctacttagagaatggcacaaaaggattcgactgggaagaatatatcaacaataaaaccaatttctacactgtacctggtatgttggagcctctgctgtgtgggaactcatccgatgctggccagtgtccagagggataccagtgtatgaaggcaggtcgcaacccaaactacggatacacatcttttgatacctttagttgggcctttctggccttgttccgcctcatgactcaggattactgggaaaacttgtatcagcttactctccgagctgccggaaaaacatacatgatatttttcgttttggttattttcgtggggtctttctatttagtaaatctcatcctcgcagttgtggcaatggcgtatgaggagcagaatcaggcaacacttgaggaggcggagcaaaaggaggccgagttcaaggccatgctcgaacaacttaagaaacagcaagaagaggctcaggctgccgcaatggcaacctccgccggaaccgtatccgaggacgcgatcgaagaggagggggaggaggggggtggcagccccaggagtagctccgaaatctccaaattgtcatcaaagtccgctaaagagcggaggaatagacggaagaaacgtaaacagaaggagctttcagagggcgaggagaagggggaccccgagaaagtgttcaagtccgagtctgaagacggcatgcgccgtaaggcattccggctgccagacaatagaatcggcaggaaatttagcatcatgaatcagtccctactgtccattcctggtagcccctttctgagtcgccacaacagcaaaagctcaattttctcgttcagggggcctggcagattccgcgaccctggaagtgaaaacgagtttgcggacgatgaacacagtacggtggaggagtctgaaggaagaagagatagcctcttcatcccaatccgggcaagggagcgaagatccagctatagtggatactctgggtatagccagggcagcaggtcctctagaatcttcccgagcctacggagaagtgtgaagcgaaactcaacagtggactgtaatggcgtcgtttctcttataggcggaccaggtagtcacatcggcggaagattactccctgaagcaacaaccgaagtcgaaatcaaaaagaaaggacccggttccctgctggtatctatggatcagctggcatcttacgggagaaaggaccgtatcaatagtatcatgagcgtagtgacaaatactttagttgaagagctcgaagagtctcagagaaagtgtcccccatgttggtacaagtttgctaataccttcctaatttgggaatgtcatccatactggattaaattgaaggaaattgtcaacttgattgtgatggatccttttgtcgacctggccatcaccatctgtattgttctgaacacgctcttcatggcaatggaacaccaccccatgaccccccagtttgagcacgttctcgccgttggaaatttggtcttcaccggcatctttaccgccgaaatgtttctgaagttgatagccatggacccttattactactttcaggaaggatggaacatcttcgatggctttattgtgtctctctccttaatggagctcagcttggccgacgtggaaggactgagtgtgctccggtccttccgattactccgagtctttaaattggccaaaagctggcccactctaaacatgctaatcaagatcatcggtaattcagtcggtgctttgggcaacttaacccttgttctggctataattgtgttcatattcgcagtggttggcatgcaactgtttgggaaatcctacaaggagtgcgtttgtaaaattaaccaagactgtgagctacctcggtggcacatgcacgacttcttccattccttcctcatcgtttttcgtgtcctttgtggagagtggattgagaccatgtgggactgtatggaggtggctgggcaggccatgtgtctcatcgtgttcatgatggtgatggtgatcggaaacctcgtggtcttaaacctgtttcttgctcttttactctcgtcctttagtgccgacaacctcgccgcaacagacgatgatggagaaatgaataatttgcagattagcgtgatcagaatcaaaaagggggtggcatggacaaaactgaaagtgcacgcatttatgcaagcgcacttcaagcagagagaagcagacgaagtaaaacctctcgatgagctttatgaaaagaaagccaattgcattgccaaccatacaggagctgatatacacagaaatggggactttcagaaaaatggcaacggtaccaccagcgggataggtagctcggtggaaaaatatataattgacgaggatcatatgtcattcattaacaatcccaacctgactgtaagagtaccaatagccgtgggggaatctgatttcgaaaatctgaacaccgaagacgtgtctagcgagtccgatccggaagggagtaaagataagctggatgacaccagcagcagcgaaggcagcactatcgatataaagcctgaagtagaagaggttccagtggagcagcctgaggaatacctggaccctgatgcttgttttactgaggggtgtgtccagcgctttaaatgctgtcaggtaaatattgaggaggggttaggcaaaagctggtggatcttgcgaaagacatgcttcttgatagtggaacataattggtttgaaacattcataattttcatgattctgctcagtagcggcgctttagccttcgaagatatttacattgagcagagaaagactattagaaccatcttagaatacgcagataaggtgttcacttacatatttatattggagatgctcctgaagtggaccgcgtatgggttcgttaagttttttacgaatgcctggtgctggctggacttcttaatcgtcgcagtcgtcgtcaacgcactcgtcggcgcaataccatctatcatgaacgtgttactggtgtgtctaattttctggcttattttctcaatcatgggcgtaaacctgtttgctggtaagtatcactactgcttcaacgagaccagtgaaataaggtttgagatagaagacgtcaataacaaaactgagtgtgagaagctgatggaaggaaacaataccgaaatacgctggaaaaatgtaaagatcaattttgacaatgtaggggctggttacctggccctgcttcaggtagcaacctttaagggctggatggacatcatgtatgctgctgtggatagtcgtaaacctgacgagcagcccaaatacgaagataacatttacatgtatatctatttcgtcatctttattatcttcggaagcttctttacattaaacctgtttatcggggttattatcgataattttaatcaacagaagaagaaattcggtggccaggacatatttatgaccgaagagcaaaaaaagtattataacgctatgaaaaaacttggcagtaaaaagccacagaagcccattcctaggccgcttaacaagatacagggaatcgtgtttgacttcgtcactcagcaagcatttgatatagttattatgatgctgatctgcctaaatatggtgacaatgatggtcgaaacagacacacagtccaagcagatggagaacattctgtactggatcaatctggtgtttgtaatttttttcacatgcgaatgtgtgctgaaaatgtttgctttgaggcattactatttcaccatcgggtggaatattttcgattttgtggtcgttatactctccatcgtgtag

SEQ ID NO: 240870 - DNA, 3588 bp, synthetic construct
  misc_feature 1..3588: note = Description of Artificial Sequence: Synthetic coding sequence
  source 1..3588: mol_type = other DNA
tttttgtcccctcagactttcgtggtcttaaaccggggaaaaacgttgttccgcttctctgctacaccagcactgtacattctgtcaccttttaaccttatccgccgtatcgctatcaaaatcttgatccatagtctgttttccatgatcataatgtgtacgattcttacgaattgtgtgtttatgactttttctaacccaccagactggagtaaaaacgttgaatacacttttactggtatctacacattcgagagcctcgtgaagatcatcgcaagggggttctgcatagacggtttcaccttcctgagggacccctggaactggcttgacttctccgtgattatgatggcgtacatcaccgaattcgtgaacctcgggaatgtgagtgccctgcggactttccgggtgctgagggccctgaaaaccatttcggtgattccagggctcaagacaatcgtgggcgctctcatccagtccgtcaagaagttatcagatgtgatgattctgactgtgttttgcctgagcgtcttcgcgttgataggcctccagctcttcatgggtaaccttcggaacaagtgtgtcgtgtggccaatcaacttcaacgagtcctacctcgaaaatggcaccaaggggttcgactgggaagagtacatcaacaataagactaacttctacacagtccccggaatgttagaacctttgctctgcgggaactcttccgatgccggacaatgtcctgagggctaccagtgcatgaaggccggacgcaaccctaattacggctatactagctttgatacgttctcatgggctttcctggccttattcagattgatgacacaggattactgggaaaatctttatcaacttactctaagggctgcagggaaaacttacatgatattctttgtcctggtaattttcgtgggcagcttttacctcgtgaatctaattctggcagtggtggctatggcttacgaggagcagaaccaagccaccctagaggaggccgaacagaaggaggcagagttcaaggctatgctggagcagctcaaaaaacagcaagaggaagcgcaggctgctgctatggcaaccagcgctggtactgtgtccgaggatgcgatcgaggaggaaggtgaggaaggtgggggatctcccagatcgtcttccgagatcagcaagctctcatccaagtcagccaaggagcgcagaaaccggcgtaaaaaacgtaaacagaaggaattgtccgaaggagaggaaaagggggatcctgagaaggttttcaaatctgagagcgaagacggcatgcgacggaaagctttccgtctccccgacaatagaatagggaggaaattcagtatcatgaaccaaagtttactgtccattccagggagtcctttcctgagccgtcataactctaaaagctcgattttttcctttcggggacctggacgattccgggatcccggtagtgaaaatgagtttgccgacgacgaacacagcactgtggaggagtcagagggaagacgcgattcccttttcattcctattcgtgccagggagcgaaggtcttcctactccggctactccgggtactcacaaggcagtaggagttcgaggatctttccttccctcagacgttcagtgaaacgcaacagcacggtggattgcaatggagtggtttctcttatcggaggtcctgggagtcacattggaggcaggttgctgccggaagccaccaccgaggtcgagataaagaagaagggaccaggatccctcctcgtgtcaatggaccagctcgcctcgtacggcagaaaagatcggattaattccatcatgagcgtcgttaccaatacgcttgtcgaggaactggaagaaagtcagcgcaagtgtcctccgtgttggtataagtttgccaataccttccttatatgggagtgtcatccttactggatcaaattgaaggagattgtcaaccttattgtaatggacccattcgtagatctggctatcacaatctgtatagtcctgaacacgctcttcatggctatggagcatcatcccatgacacctcagttcgaacatgttctcgccgtgggtaatttggtatttaccgggatctttacagctgaaatgtttctcaaactgatcgcgatggatccatactactatttccaggagggctggaacatatttgatggtttcatcgtgtccctgagcctaatggagctgagtctggccgatgtcgagggtctcagtgttcttagatcatttcgacttttgcgcgtgttcaaactagctaagagttggccaactctgaatatgctgattaaaatcatcgggaatagcgttggcgcactgggaaacctgacattggtgctcgctattatcgtgttcattttcgctgtcgtgggcatgcagctttttggtaagtcatacaaagaatgcgtctgcaaaataaaccaggactgcgaattaccgaggtggcacatgcacgactttttccactcattcttgatagtgttccgcgtgttgtgtggggaatggatcgagacaatgtgggattgcatggaggtggccggacaggcaatgtgcttgatagtatttatgatggtgatggttataggcaacttggtggtattgaatttgttcctcgccctgctgctgtccagtttctccgcagataacctggctgccactgatgatgacggggagatgaacaacttacaaatttccgtaatccgcatcaagaagggcgttgcctggaccaaacttaaggtgcacgcttttatgcaggcacactttaaacagagggaggctgatgaagtaaagcctctggacgaactatacgaaaaaaaggcgaattgtattgcaaaccacacaggcgcagacatacacagaaatggggactttcagaagaatgggaacggcacgacgagtggaatcgggtcatcagtggaaaaatacatcatcgacgaagatcatatgtcattcataaacaatccaaatctaacggtccgggtcccgatcgccgtgggggaatccgacttcgagaatctaaacacagaggatgtgtcaagtgagagcgaccctgaaggatcaaaagataagttagatgacacatcctcaagcgaagggtcgacaatcgacattaaacccgaggtagaagaggtccctgtggagcagcctgaagagtacttggatcccgacgcttgtttcacagaggggtgcgttcagagatttaaatgctgccaggtcaatatagaagagggtcttgggaagagctggtggatcctccggaagacttgctttctgattgtcgaacacaattggtttgaaacattcatcatctttatgatcctcctgagttcaggcgctttggcttttgaggatatctatattgaacaacgtaagacgataagaacaatacttgagtatgcagataaagtgtttacctacatcttcatactggaaatgctgctcaaatggacagcctatgggtttgttaaattttttacaaacgcttggtgttggctggacttcttgatcgtcgctgttcccctcaacctctctggccttatctag

SEQ ID NO: 240871 - DNA, 5819 bp, synthetic construct
  misc_feature 1..5819: note = Description of Artificial Sequence: Synthetic coding sequence
  source 1..5819: mol_type = other DNA
atggctgccagactcctagctcccccagggccagacagttttaaaccctttactccagaatctctcgcaaatattgaacggagaattgccgaatcgaagctaaagaagccacctaaggccgatggatcccacagggaagatgacgaagactccaaaccaaaacccaactcagacctggaagccggtaaatctttaccttttatatacggtgatatccctcagggcctggtcgccgtgccccttgaggacttcgacccttattatttgacccagaagacttttgtagtcttgaatagagggaagactctatttcgattctccgctaccccggcactctacatcctgtccccctttaacctcatccggagaattgcaatcaagatcctgatccatagtgtctttagtatgatcattatgtgcacgatcttgactaactgcgtgtttatgacgttttccaacccacccgactggtctaaaaatgtggaatatacatttactggtatctacacctttgaatctctagtcaagatcattgcacggggtttctgcattgatggcttcaccttcctacgggatccttggaactggctggacttttccgttattatgatggcgtacataactgagttcgttaacctcgggaatgtatctgcccttcgaaccttcagggttctgagagcactgaagaccatctccgtcattcctggcctgaaaacaattgttggtgctttaatccagagtgtgaagaagctaagtgacgtgatgatcctcaccgttttctgcctttcggtgtttgccctgatcggacttcagttgtttatgggaaacctgcgcaacaaatgcgtagtgtggccgataaacttcaacgaatcctaccttgagaacggaactaagggctttgactgggaggaatatatcaacaataagacaaacttttacacggtaccaggaatgctggagcccttgctgtgtggtaactcctccgacgcaggccagtgcccagaaggttaccagtgcatgaaagccggaagaaaccctaactacgggtacacatctttcgacacattcagttgggctttcctcgcgttattccgccttatgactcaagattattgggaaaatctttaccagttgactttgcgagccgctggaaagacttacatgatcttttttgttctggtgatttttgttggctcattctatctggttaatctgatattggctgtggtggctatggcatatgaggaacagaaccaggcaacccttgaagaggccgagcagaaggaagctgagtttaaagctatgcttgaacagctcaaaaagcagcaggaagaagcccaagccgcagctatggccacgagcgccggtacggtgagtgaagatgctattgaggaagagggtgaagagggtggcggaagcccaagatccagctctgaaatcagcaaattaagctctaagtccgctaaagagcggcgtaacagaagaaagaaaagaaaacagaaagagcttagcgaaggcgaagagaaaggtgatcctgagaaggtttttaaatctgaaagcgaggacgggatgcgacgcaaggcctttcgactgcctgacaatcggatagggaggaaatttagtatcatgaaccagtcccttttgtcaattcctggctccccattcctttctagacataatagtaagtcctctatcttctccttcagagggccaggaaggtttagggaccctggctcagaaaacgagttcgctgatgatgaacattctaccgttgaggaatcggaaggacgacgggactcattatttatacctatccgtgctcgggaacgacgctcctcatattcaggctacagcggatattcacagggaagtagatccagtcgcatcttcccatctctcagacgaagtgtcaaacggaattccacagtggattgtaacggcgtggtctctctcatcggtggcccagggtctcacattggtggacgcctactacctgaagccacaacagaagttgaaatcaaaaagaagggacccggatccctgcttgtgagtatggatcagctagcctcatatggacggaaggaccgaataaatagtataatgtctgtggtcactaacactctggtcgaagaactggaagaatctcagcgcaaatgccccccttgctggtacaaattcgcgaacacttttctcatctgggaatgccacccatactggattaagctcaaagaaattgttaatctcatcgtcatggacccctttgtggacctcgcaataacgatttgtattgtgctcaacacattgtttatggccatggagcaccatcccatgacacctcaattcgagcatgttctcgctgtggggaaccttgtttttactgggatcttcacggcagagatgtttcttaaactgatcgccatggacccctactattattttcaggagggatggaacatctttgacggctttatcgtgagcctgtcactgatggaactgagcctcgcggacgttgagggactttctgtactccggagcttccggctgctccgggtcttcaagctcgccaagtcatggcccactctgaacatgcttattaagataatcgggaactccgtgggggctctggggaatctcactctagtgctggccatcatcgtttttatcttcgccgtggtaggaatgcaactgttcggcaaatcctacaaagaatgcgtgtgtaagattaatcaggactgcgagctccccagatggcatatgcacgactttttccatagcttcctgatcgtgtttcgagttctttgcggtgagtggatagagacaatgtgggactgcatggaggtggctggccaagctatgtgcctgatcgtgttcatgatggtgatggttattgggaatctcgtcgtcttgaacctgttcctcgcactgctgctttcctcattctcagccgacaatctggctgcaactgatgatgacggcgagatgaataacttacagatcagcgtgatcagaatcaagaagggggtggcttggactaagctgaaggtgcacgcttttatgcaggctcacttcaaacagagagaggctgacgaggtgaagccgctggacgaactctacgagaaaaaggccaactgcatcgccaatcacacgggcgcagacattcaccgaaatggcgattttcaaaagaacggtaatggcaccaccagcggcatcggctcttccgtcgaaaaatatataattgacgaagaccacatgagcttcataaataacccaaatcttacagtgagggttccaatcgctgttggcgagtcggacttcgagaacttgaacacagaagatgtttccagtgaaagcgaccccgaggggtctaaagacaagcttgatgatacctcctcatccgagggctccacaattgatataaagcctgaagttgaggaggtgccagtagaacaacccgaagaatatcttgaccctgacgcatgcttcacagagggttgtgttcaaagattcaagtgctgtcaagtgaacattgaggagggtctgggtaagagctggtggatcctgagaaaaacatgcttcctgatcgtcgaacacaactggttcgaaacatttattatcttcatgatcctgctgtcttccggggcattggctttcgaagatatttatatcgaacaaaggaaaaccattcgcaccatcttggaatacgccgacaaggtgttcacttacatcttcatacttgagatgctgttgaaatggaccgcgtacggttttgtaaaattcttcactaacgcatggtgttggctcgatttcttgatcgtcgccgtggttgtcaatgccctggtgggggctatcccgagcatcatgaatgttctgctggtgtgtctcatattctggctgatcttctctatcatgggtgtgaacctgtttgccggaaaatatcactattgttttaatgaaacctcagaaatcagatttgaaatcgaggatgtcaataacaaaactgaatgcgaaaaactaatggaggggaataatactgagattcggtggaagaatgttaagattaacttcgataacgtaggcgctggataccttgccctcttacaagtcgctacattcaagggatggatggatattatgtatgctgcagtggactcccgcaagcctgacgagcagcccaaatatgaggataacatctacatgtacatctattttgtgattttcataatctttgggagtttttttacccttaatctgttcatcggagtgattattgacaactttaaccagcagaagaagaagttcgggggtcaggatatcttcatgacggaagaacaaaagaagtattacaatgccatgaagaaactgggctctaaaaagcctcaaaaacctattccacgcccattgaacaaaatccagggcatcgtgttcgattttgtcactcaacaggcattcgacattgttattatgatgttgatatgcctgaacatggtgaccatgatggtggaaactgacacccagagcaagcagatggagaacattttgtattggatcaacctggtcttcgtcatcttttttacttgcgaatgcgtgctgaaaatgttcgcactgcgccactattacttcacgattggctggaacatttttgattttgtggttgtgatcttatctattgtcggaatgttcctggccgatattatcgaaaagtactttgtctcccccacactattccgcgtcatcaggctggcgcgaatcggtaggattttgcggctcatcaaaggtgccaagggcatccgtacgctgctgttcgcactgatgatgtccttgccagccctcttcaatatcggcttgctccttttcctcgttatgttcattttcagcatttttggaatgtcaaactttgcatatgtgaagcacgaggcaggtatcgacgatatgttcaactttgaaactttcggaaacagcatgatttgtctgttccagatcactacttctgcaggctgggacggtctgttgctgcctattcttaaccgtcctccggattgttccctggacaaagaacacccgggaagcggcttcaagggagactgtggaaatccttccgtggggatcttctttttcgtatcctatataatcatctcctttcttattgttgtcaatatgtatatcgccattattctggaaaacttctccgtggcgactgaggagagcgcagaccctctctctgaggatgactttgagactttttatgagatctgggaaaagtttgaccccgacgccacccagttcattgagtattgcaagctggctgattttgcagatgcgctcgagcaccccctacgcgtgccaaagccaaatacaatcgagctgatcgccatggatctgcccatggtgagcggggatcgtattcactgtttggatatcctcttcgcatttacaaagcgcgtgcttggcgattcgggagagctggacatactgcggcaacagatggaagagaggttcgtggcttcgaatcccagcaaggtgtcgtatgagcccatcactactactctcagaaggaagcaagaggaggtgagtgcagtcgtcctgcagagagcctacagaggacacctagcccgacgcggattcatttgcaagaaaactaccagtaacaagctcgaaaatgggggaacccacagagaaaagaaagaaagtactccctctaccgcgtcattgccatcttatgactctgtcacaaagcctgagaaggagaaacagcagagggcagaagaagggaggcgtgagcgagccaagcggcagaaagaggtgagggagtctaaatgcta

SEQ ID NO: 240872 - DNA, 2919 bp, synthetic construct
  misc_feature 1..2919: note = Description of Artificial Sequence: Synthetic coding sequence
  source 1..2919: mol_type = other DNA
atggccgcacggctactcgcgccacccggaccagattcgtttaaacccttcacacctgaaagcctggccaacatcgagcgaaggatcgcggagtctaagctgaaaaaaccccctaaggccgacggaagtcatcgggaggatgatgaggactctaagcctaagcccaatagtgacctggaagccggaaagtcgctgccctttatctacggtgacatcccccaggggctggtcgctgttcctctggaggacttcgatccatattacctgactcagaaaacgttcgtagtgctcaatcgcggaaaaaccttatttcgcttcagcgcgacccccgcactgtatatattgtccccctttaatctaatccggagaatagccatcaagatcctcattcacagcgttttctccatgatcatcatgtgcactatcctgaccaactgcgtatttatgactttttcaaaccccccagattggtcaaaaaatgtcgagtacacgtttacaggtatttatacctttgagagtctcgtgaaaatcatcgcgaggggattctgcatagacggcttcacattcctacgcgacccgtggaactggttggatttcagcgtgattatgatggcatacgtcaccgagtttgtggatttaggcaatgtctccgcactgagaacctttagggtcctgcgggctctaaagactatatcagtcatcccgggactgaagacaattgtcggggctctcatccagtcggtgaaaaagctcagcgatgttatgattttaacagtcttttgcctgagcgtgttcgcactgatcgggctacagctgtttatggggaatctgcggaataaatgcgttgtctggccgataaacttcaacgaaagctatctggaaaatggtacaaaaggcttcgactgggaggaatatattaacaataaaaccaatttttatactgtaccaggcatgctcgagccgttactttgtggcaactcttctgacgccggtcagtgtcccgaaggatatcagtgtatgaaggcaggacggaaccctaattatgggtatacaagttttgacaccttttcatgggcttttctagctctctttcggctcatgacgcaggattattgggagaacctctatcaactcactctgcgtgctgccggaaaaacatacatgattttcttcgtgctagtgatcttcgttggatcattctacctggttaatttaatcctcgcagtcgtggcaatggcttacgaggagcaaaaccaagcaactttggaggaggccgagcagaaagaggccgaattcaaggctatgctcgaacagctcaagaaacaacaggaggaggcccaggccgcagctatggccacttcggccggtaccgttagtgaagacgctatcgaagaggaaggagaggaaggtggtggttctccacgctcctcaagtgaaattagcaagttaagttcaaagtcagctaaagagcgcagaaaccggagaaagaagcgcaagcaaaaagagttgtccgaaggggaagaaaagggcgacccagagaaagtctttaagtctgaaagtgaggacggcatgcggcgtaaagcgtttcgcctgccagacaaccggattggacggaaattctcaataatgaatcagtcattattgagtattcctggctctccttttctcagtagacacaactccaagtctagtatcttctctttccgcggacctgggagattccgcgatcccggaagtgaaaacgaatttgccgacgacgagcactctaccgtggaagagtcagagggaagacgagacagcctctttatacctattcgtgccagagaaaggagatcatcatactctggctactcaggctactcccagggttccaggtccagcaggatcttccctagccttcgccgttcagtcaagagaaactctaccgtggattgcaacggcgttgtgagtctgataggagggcctgggtctcacatcggagggaggctgttacctgaggctactacggaggtggagatcaaaaagaaaggaccgggttctcttctggtttcaatggaccagctcgcctcctacgggaggaaagaccggattaattctatcatgtccgtggttacaaacaccttggtggaagagctcgaagagagccagcgcaaatgccctccatgctggtataaattcgctaatactttcctcatctgggaatgtcacccctactggatcaagctcaaggagattgttaacctcatcgtgatggacccattcgttgatctggctataacgatctgtatagtcctgaataccctgttcatggctatggaacaccaccctatgactccacagtttgaacacgtcctggccgttggtaacctggtgtttaccggaattttcactgcagagatgtttctcaagctgatcgccatggacccctactactacttccaggagggatggaacatattcgacgggtttattgtatcactgtctctgatggagctttccctagcagacgttgagggcctgagtgtgctgcggtcttttcgattgcttagggtgttcaaactcgcaaagagttggcccacgctgaatatgctgatcaagataataggtaatagcgttggtgcattagggaacctgacactggtgctggccatcatcgtctttatttttgccgtggtcgggatgcaactcttcggcaagtcatataaagagtgcgtgtgtaaaatcaaccaggattgtgagctcccccgatggcatatgcacgactttttccactcatttcttatcgtgtttagggtgctctgcggtgagtggatagagacaatgtgggattgcatggaggtggctgggcaagctatgtgcctaatcgtctttatgatggtgatggttatcggcaacttggtggtttctacaaatttgtag

SEQ ID NO: 240873 - DNA, 6030 bp, synthetic construct
  misc_feature 1..6030: note = Description of Artificial Sequence: Synthetic coding sequence
  source 1..6030: mol_type = other DNA
atggaacaaaccgttctcgttccccctggtcccgacagctttaattttttcacacgagaatcgttggcagctatcgagcgacgaatcgctgaggaaaaagccaagaaccctaagccagataagaaggatgatgacgagaatggcccaaagcctaactctgatctggaagccggaaaaaacctaccatttatttatggtgatatcccacctgagatggtgtcagaacccctggaagacttggacccttactacatcaataagaaaaccttcatcgtgcttaataaaggcaaggcaatctttaggttctcggctacgtctgccttgtacattttgacgccgtttaaccccctcaggaaaatagctattaaaatcttagtccactctctctttagcatgctgataatgtgtactattctgacaaactgcgtgttcatgaccatgagcaacccaccagattggacaaagaacgtcgaatatacatttactggaatttataccttcgaaagcctcatcaaaatcattgctcggggtttttgcctggaggactttacatttctgcgggatccatggaactggctcgactttacagtcatcacgttcgcctatgtgaccgagtttgtggacctgggaaacgtgagtgccctgcgcacattccgggtcttacgagcactcaaaactatttccgtgattcctggtctgaaaaccattgtgggagccctcattcagtcggtaaagaaactgagtgacgtgatgatattgactgtattctgcctttccgtgttcgcactcataggattgcagcttttcatggggaacctgagaaacaagtgcatccagtggccacctaccaacgcttccctggaggaacactccatcgagaagaatattacagtcaactacaacggaacactgatcaatgagacagtttttgaattcgactggaagagttacatccaggatagccgctatcactatttccttgaagggttcctggacgcccttctgtgcggtaattccagtgacgccggtcagtgccccgaaggatatatgtgtgtgaaagctgggcgtaacccgaattacggatacacttcatttgatactttctcttgggccttcctgagtctttttcgactgatgacccaagatttttgggaaaacctttaccagcttactctgcgcgctgcaggcaagacatatatgatctttttcgtgctggtgatcttcctcggaagtttctatctcattaatctgatcctggccgtggttgccatggcctatgaggaacaaaaccaggctaccttagaggaagccgaacaaaaagaggccgaattccagcagatgattgagcagctgaagaagcagcaagaagccgctcaacaggctgccacggccaccgcatcagagcattcccgtgagcccagcgccgcaggcagactctctgactccagctcagaggccagcaaactgtcatccaagagtgcaaaagaaaggaggaatcgccgtaaaaagcgaaaacagaaagagcagtccggcggagaggagaaagacgaagatgagttccagaaaagcgagtctgaggattcaatccgtcggaaagggttcaggttctcaatagaagggaacaggcttacatatgaaaaacgatactcttcgccccaccagtccctcctctcgatacggggtagccttttttcgccccgaaggaattccaggacttccttgttctcctttagagggcgtgcaaaagacgtggggtctgagaatgacttcgcggacgacgagcattcgacgtttgaggacaacgagtcacgcagagacagtctcttcgtgcccaggcggcacggcgagcgtaggaacagcaacctatctcagactagccgctcgagcagaatgctggccgtgttccccgcaaatggtaagatgcactctaccgtggattgtaacggagtggtcagcctggttggaggcccttccgttcctacatcccctgttggtcagctgcttccagaagtgatcattgacaaacccgcaacggacgacaatggtaccactaccgaaaccgagatgcgcaagcggaggagctcaagtttccacgtgtcaatggatttcctcgaggatccatcacagcgacaacgcgcaatgagtatagcatcaattttgactaataccgtggaggaactggaggaaagccgacaaaaatgccctccctgctggtataagttcagcaacattttcctgatctgggattgttctccctactggttgaaggtaaaacatgtggttaatctggtcgtcatggacccatttgtggacttggccatcaccatctgtatcgttctgaacaccctctttatggctatggagcactatcctatgactgatcacttcaacaacgtgttgaccgtgggcaatctcgttttcaccggcatatttaccgctgaaatgtttctgaaaattatcgcgatggatccctactactatttccaggagggttggaatatttttgatggattcatcgtgactctgagcctcgttgagcttggtttggctaacgtggaaggactgtccgtgcttcgaagcttccggttactgcgcgtgttcaaactcgccaagagctggccaaccctgaacatgctgatcaagattataggaaactctgtgggcgctctgggtaatctgacattggtactcgccattatcgtattcatttttgcggtagtggggatgcaacttttcggtaaatcatacaaagactgtgtctgcaagattgcgagtgactgtcaattacctagatggcacatgaatgatttctttcacagttttttaatagtatttcgagtcttatgcggggagtggatagaaactatgtgggactgcatggaagttgcaggacaggcaatgtgcctgaccgtgttcatgatggttatggtcatcgggaacctggtggtcttgaacctgttcctcgccctcttactgtccagcttttccgcagataacctcgctgcgaccgacgatgacaatgaaatgaataacctgcaaatcgccgttgacaggatgcacaagggggtcgcctacgtcaaacgaaagatttatgaattcatccagcagtcctttattagaaagcagaaaattctggatgaaatcaagcccctcgacgatttaaacaacaagaaagattcctgtatgtctaatcacacagctgaaatcgggaaggatctagactatttaaaggacgttaatggtactacctcggggattgggactggctcatcagtggagaagtatatcattgatgagtctgattacatgtccttcatcaataacccttcactgaccgtcaccgtgcccatcgcagttggtgagagtgactttgagaatttgaataccgaggatttttccagcgagagtgatttggaagagtccaaggaaaagttgaatgagagtagctcatcttccgaagggagcactgtcgacatcggagccccagtggaagagcagcccgttgtcgagcccgaagaaaccctggagccagaagcttgttttactgaggggtgcgtgcagagattcaaatgctgccagatcaacgtcgaagaggggcgaggtaagcaatggtggaatctcaggcggacgtgtttcaggatcgttgagcataattggtttgaaacattcattgtcttcatgatcctactgagtagtggcgctctcgccttcgaagatatttacatcgatcagcgtaagacaatcaagaccatgctagaatacgccgacaaggtattcacctatatttttattctggagatgctgttaaaatgggtggcttacggataccagacttacttcacaaacgcttggtgttggttggacttcttgatcgtcgacgtgtccctagtgtctctgacggccaacgccctaggatattccgaactgggggctatcaagtccctccgcactctcagagctctgcgccctctgcgggcactgtcccggtttgaaggaatgcgagtggtggtgaacgccctgttaggcgctatcccctcaataatgaatgtcctgctggtctgtcttattttttggctcatctttagtatcatgggcgtcaatctgtttgccggtaaattctaccactgtattaatacaacaaccggggaccgcttcgacattgaggacgtaaacaatcatacggattgtcttaagctcattgagcgcaatgagactgcaagatggaagaacgtgaaggtgaatttcgacaacgtgggctttggctacctgtcgctccttcaggtcgccacgttcaaaggctggatggatatcatgtatgctgctgtggatagccggaatgttgagctgcagcctaagtatgaagagtctctctatatgtatttatacttcgtcatctttatcattttcggatccttctttaccctgaacctgttcatcggggtgatcatcgacaattttaaccagcagaaaaagaagttcggcggacaggacatcttcatgaccgaagaacagaaaaaatattacaacgctatgaaaaagttaggcagtaagaagccacagaagcccatccccagaccgggtaataaatttcaaggaatggtttttgacttcgtgacccgacaggttttcgacatttcaatcatgatcctcatttgcttaaacatggtgactatgatggtcgagacggacgatcagtctgagtatgtgacaaccatactgtctcgaatcaaccttgtgtttatagttctttttacaggggagtgcgtgctgaaactgatttcactgcgccattactattttaccatcggttggaacatattcgattttgtagtcgtgatactctctattgtgggcatgttccttgcagagctgattgagaagtattttgtcagcccgacattgtttagggtaatcagactggcccgaatcggacgaatattacgcttgattaaaggcgcaaagggaatccggactcttctgttcgctcttatgatgtctctccctgctctgttcaacatcggtttgctactgtttctggtaatgttcatttatgcaattttcgggatgtcaaactttgcttacgtgaagagagaggtcggcatcgatgacatgttcaacttcgagaccttcggcaacagcatgatctgcctgtttcaaatcaccacctctgcaggatgggatgggctcctggctcctatcctgaactccaaacctcccgactgcgatcccaacaaagtgaacccgggaagtagcgtcaagggggactgtggcaatccttctgtgggtatcttcttttttgtgtcctatatcataatttcattccttgtcgtggtgaatatgtatatcgccgtaatccttgaaaacttcagcgtagcaaccgaggagtcagcggaacctttgagcgaggatgatttcgagatgttctacgaggtatgggagaagttcgaccctgatgcaacccaattcatggagtttgaaaaactgtcccaattcgccgctgccttggaacccccactcaacctgccacagccaaacaaactgcagctgatcgctatggacctgcccatggtctctggggacagaatccattgcttagatatcttgtttgcctttaccaagcgggtactgggggagtcgggtgaaatggatgctctgcgcatacagatggaggaaagattcatggcttctaatcccagcaaagttagctatcagccaataaccactacacttaaacgcaagcaggaggaggtgagtgcagtcatcattcagagggcataccggagacacctgctgaagaggactgttaaacaggccagcttcacctacaacaagaacaagataaaagggggagccaacctgctgattaaggaggacatgattatcgacaggatcaacgaaaatagcattaccgaaaagactgacctgacaatgtcaacggcggcttgccccccatcttacgaccgcgtgacaaagccgatcgtagagaagcatgagcaggaaggcaaggacgagaaggccaagggtaagtat

SEQ ID NO: 240874 - DNA, 5996 bp, synthetic construct
  misc_feature 1..5996: note = Description of Artificial Sequence: Synthetic coding sequence
  source 1..5996: mol_type = other DNA
atggaacagaccgtcctggtccctccaggccctgactcgttcaacttttttactcgggagagcttggccgctatagagagacgcatcgccgaggaaaaggcaaagaacccaaagccagacaagaaggatgacgatgagaatgggccaaaacccaattccgaccttgaagccggaaagaacctgcccttcatttatggtgacatcccacccgagatggtttccgaaccgttagaagacctcgatccctactacatcaataaaaaaacgttcatcgtattgaacaagggcaaagcaatctttcgcttctccgccacatccgctctctatatcttgacgcccttcaaccctctgcgaaagattgccattaagatactggtgcacagcttgttttccatgcttataatgtgcacaatcctgacgaattgtgtatttatgaccatgtctaacccgcctgattggactaaaaatgtagaatatactttcacagggatctatacctttgagagcctgataaagattatcgccagaggattttgtctcgaggactttacattcctacgggatccttggaattggcttgatttcaccgtcattaccttcgcttacgtgacggaattcgtagacctgggaaatgtctcagcattaaggacgttccgtgttctgcgggctctgaagactatttcggtgattcctgggctcaaaacaattgtgggggctctgatacaaagtgtgaagaagctctctgacgtcatgatcttaacagtgttctgtctgtcggtatttgccttaataggactccagctgtttatgggaaacctgagaaacaaatgcattcagtggccaccaacgaacgcttccctggaagagcactcaattgaaaaaaatatcacagtgaattataacggcacacttatcaatgagacagtcttcgagtttgactggaagtcttatattcaggattcaagataccattatttcttggagggtttcctggacgccttattgtgcggaaactcctcagatgcaggtcagtgtcccgagggctatatgtgcgtaaaggcaggccgaaatcctaactacgggtataccagctttgatacgtttagttgggcttttcttagcctgttccgactgatgacgcaggacttctgggaaaatctgtatcagctaactctgcgagctgccggaaaaacctacatgatcttcttcgtgctggtgatcttccttgggagtttctatcttattaatctgattctcgcagtagtggccatggcatatgaagaacagaaccaggctacgctggaggaagccgagcagaaagaagctgaatttcagcaaatgattgagcagctcaagaagcagcaagaggcggcacaacaggcggctaccgctacggcttccgagcatagccgcgaacccagcgccgctggcagactgtcagacagctccagtgaggcttccaagctttcaagtaagagcgccaaggagcgtagaaaccgcagaaaaaagcgtaaacagaaagagcagtcaggaggagaggagaaggacgaagatgagttccagaaatctgaatcagaggatagcattcgtaggaaagggttccgcttttcaatagagggaaacagactcacctacgagaaacgctatagttcaccccaccagagcttgttgagtattagaggcagtctcttcagcccccgaagaaacagtagaacaagtctctttagcttccggggaagagctaaagatgttggaagcgaaaatgacttcgcagatgacgaacactcaactttcgaggataatgagtccagacgggattctctctttgtacctcgtcgacatggggaaaggcgtaactccaacctgtcccagacatcacggagctctcgaatgctcgcagtgttccctgctaatggcaagatgcactctaccgtggactgcaacggcgtagtgagcttagtcggagggcctagcgtgcctacatcacccgtcggacagctgctgcctgagggcactaccactgaaacggaaatgcggaagaggcgctcctccagctttcacgtgagtatggattttctcgaagatccctcacagaggcagcgcgctatgtccatcgcctccatcttgaccaatactgtagaggaactggaagagagtaggcagaaatgcccaccttgttggtataagttcagcaatatttttctcatctgggactgcagtccctattggctgaaagttaaacatgtagtaaatcttgtggtcatggatccattcgtggacctggccatcaccatatgcatcgtccttaataccctgtttatggcaatggagcattatcccatgaccgaccattttaacaacgttttaaccgtgggtaatttagtctttacaggcatctttacggccgagatgtttcttaagatcatcgccatggatccatactactacttccaggaaggatggaacatttttgatggattcattgtcactctcagcctcgttgagctcggactggccaacgtggagggtttatcagttctgcgctcttttcgattactaagggtgtttaagttggcaaaaagctggcccacgctcaacatgctaataaaaatcataggcaactcggtcggagctctggggaatctaactctcgtgctcgccattattgtctttatatttgctgttgtgggcatgcagttgtttggcaagagttacaaagattgtgtttgcaagatcgcgtcagattgccagctgccccgttggcacatgaatgatttcttccactctttcctgatcgtcttcagggtcttgtgtggtgagtggatcgagactatgtgggattgtatggaggtcgccggacaagcaatgtgtctcacggtttttatgatggttatggttatagggaatttggtggttttgaatttgtttttggccctcctgctgtcatccttctcagcagacaatctggctgccactgatgacgataacgagatgaataatttgcaaatcgccgttgaccggatgcacaagggtgtagcctacgtcaagcgcaagatttatgaattcattcaacaatctttcattcgaaagcagaagatcctcgatgagataaaaccactggatgatctcaataataagaaagactcttgcatgtcaaatcacactgccgagatcgggaaggatctcgactacctaaaggacgtgaacgggaccacatccggaataggcaccggaagtagcgtcgagaagtatattattgatgagagtgattacatgtcatttattaacaatcccagccttaccgtcactgtgccaattgctgtcggcgagtccgattttgagaatctcaatactgaggacttctctagcgaaagcgacctggaggagagcaaggagaaactcaatgaatcatcctcatcctctgaaggctctacggttgatatcggcgcacccgtggaggagcagcccgtggtggagccggaagaaactttggagcccgaagcctgcttcactgaagggtgtgtgcagagattcaaatgctgtcaaatcaacgtagaagaaggaagaggaaagcaatggtggaatctgcggagaacctgttttagaattgtggaacataactggtttgagaccttcatagtcttcatgattttgctgtccagcggagctttagcatttgaagacatctacattgaccagcgcaagaccatcaaaacgatgttggaatacgctgacaaagtgttcacgtacatatttatcctggaaatgttactgaagtgggtggcatacggataccaaacgtactttaccaatgcttggtgttggctcgattttctgatcgtggatgttagtctggttagcctgaccgccaatgcgctgggctattcagagctgggcgctataaagtcacttaggacgctgcgggcacttcgcccactgagagcactaagccgatttgaaggaatgcgggtggtcgtaaacgctttgctcggggcaattcccagcatcatgaatgtgctgctggtatgcttgattttttggctgatcttctccatcatgggggtgaacctgttcgccggaaagttctatcactgcataaatactactactggggatcgatttgatattgaggatgtcaataatcacactgactgcctcaaactgattgagcggaacgagacagcccgatggaagaacgtgaaggtaaatttcgacaatgttggctttggctacttatcactcctccaggttgccacttttaaaggctggatggacattatgtacgcagccgttgacagcaggaacgtggagctgcagcccaagtatgaggagagcctgtacatgtacctgtacttcgtgatatttatcattttcggcagcttctttacactaaatctgttcatcggcgtgatcatcgacaacttcaaccagcagaaaaaaaagttcggagggcaggacattttcatgactgaggagcagaaaaaatactacaacgcaatgaagaaactgggtagtaaaaagcctcagaagccgattccacggcctggaaataaattccaaggcatggtttttgattttgtaacccggcaggtgttcgacatctctatcatgatcttgatctgtttaaacatggttacaatgatggtggaaactgatgaccagagtgagtacgtcacaaccatattaagccgaattaatttggtctttattgtgttgttcactggtgagtgtgtgctgaaactaatttccctcaggcattattacttcaccatcggatggaatattttcgattttgtggttgtgatcctctctattgtgggcatgtttctggccgaactgattgaaaagtattttgtgtcccccaccctcttcagagtgattagattagccaggatcggacgtattctgcgcctcataaaaggtgccaagggcatacgcacactgttgttcgcgctgatgatgagtctgcctgcactgttcaatataggactgctactcttcttagtgatgtttatttacgctatattcgggatgagtaacttcgcatatgtgaaaagggaagtggggatcgatgatatgttcaactttgaaacattcgggaattccatgatctgtcttttccaaatcactacaagtgctggatgggacggcttgcttgccccaatcctaaactccaaacccccagattgcgaccccaacaaggtgaaccctgggtcttctgtgaaaggtgattgtggaaatccatcagtcggcatattttttttcgttagttacattataattagtttcttggtggtggttaacatgtatatcgctgtgattctggagaacttctccgtcgccacagaggagtcggccgaacctctgtctgaagatgacttcgagatgttctatgaagtgtgggagaagttcgaccctgatgctacccagttcatggaatttgaaaagttgtcccagtttgccgcagccctagaaccacccctcaacctcccacagccaaataaattgcagctgatcgccatggacttgcctatggtctctggtgacaggatacattgcctggatattttattcgcttttaccaagcgcgtcctcggcgagtccggcgaaatggatgcgctacgcatacagatggaagagagattcatggcatcaaatccgtcgaaagtgtcctaccaacctatcaccacaactttgaaaaggaagcaagaagaagtcagcgccgtcataatccagcgtgcatacaggaggcacctgctgaagaggactgttaagcaagctagttttacctataacaaaaacaagatcaaaggtggcgctaacctgctgattaaagaggatatgataattgataggataaatgagaattccattactgaaaaaaccgacctcacaatgagtaccgctgcctgtcctccaagttatgaccgggttacaaagcccatagtcgaaaagcatgagcaagagggaaaggacgagaaagccaaaggcaagta

SEQ ID NO: 240875 - DNA, 5945 bp, synthetic construct
  misc_feature 1..5945: note = Description of Artificial Sequence: Synthetic coding sequence
  source 1..5945: mol_type = other DNA
atggagcaaactgtcctggtacctccgggacctgacagcttcaacttctttactcgggaaagcctggcggctattgaacgtcgtattgcagaggagaaagcaaagaatcccaagccggacaaaaaggacgatgatgagaatggaccaaagccaaattccgatctggaggcaggcaaaaacctgccatttatttatggagatattcccccagagatggtctccgagccattggaagacttagacccttattacataaacaagaagaccttcatcgtgctgaacaaagggaaggccatcttcagattttcagctacaagcgccctgtacatccttacccccttcaacccccttaggaagatcgcaataaaaattctagtgcattcattgttttctatgctgataatgtgcacgatcctgacgaactgcgttttcatgacaatgtccaatcccccagactggacaaagaacgttgagtacacattcaccggcatctataccttcgaaagtttgatcaagatcatagctaggggtttttgcttagaagacttcacattcctgcgcgacccctggaactggctggactttaccgtgatcaccttcgcctacgttactgagttcgtcgaccttggcaacgtctctgccctgagaacgtttagagtgctgagagcgcttaaaaccatcagcgtgattcctggactaaaaactatcgtgggagcactcatccagtccgtaaagaaactatcggacgtgatgattcttacggtgttttgcctctccgtgttcgccctgattgggctgcagctgttcatggggaatctacgcaacaagtgtatccagtggcccccaaccaatgcgtccctggaggaacactctatcgagaaaaacatcacagtcaattataacggaactttaataaacgaaactgtcttcgagtttgactggaaatcctatatccaggactctaggtaccactactttctggagggatttctggatgccctcctatgtggtaacagtagcgacgcagggcaatgtccagaagggtacatgtgcgtgaaggcaggaaggaatcccaactatggatacacctctttcgacacttttagctgggccttcctttcgctgttccgcctgatgacacaagacttctgggaaaacctgtatcagctcactctgcgcgcagcagggaaaacttacatgatcttcttcgtcctggttatttttctaggctccttttacctgatcaacctgatcttagctgtcgtcgccatggcttacgaagagcagaatcaggccactttagaagaggccgaacagaaggaggctgagttccagcaaatgatcgagcagctgaaaaagcagcaggaggccgctcagcaggcagcgaccgctacggcaagtgagcacagtagagagcccagcgccgctggacgtttatctgatagctcatccgaagctagtaagctaagctctaagtccgcaaaagagcggaggaatcgccgaaaaaagcgcaaacaaaaggagcagtcgggtggagaggagaaggacgaggacgagttccagaaatcggagtccgaagactctatcaggagaaaaggtttccgtttttccatcgaaggaaatagactcacatatgaaaagaggtactccagtccccaccagtcactcctgtcaataagaggaagcctcttcagtcccagacggaacagccgtacatcgttgttttccttcagagggagagctaaagatgtgggtagtgaaaatgatttcgccgatgacgaacacagtacgtttgaagataacgagagtagacgagactctctattcgtgccccgaaggcacggcgagagaagaaacagcaatctttcccagacctcccgctcctcacggatgctagccgtattcccagcaaacggcaagatgcatagtacagtcgactgcaacggggtcgttagcctcggaacaaccaccgagaccgagatgcgcaagcgaaggtccagtagcttccacgtgtccatggatttcctcgaagatccaagccagcggcagagagccatgagcatagcgtccattctgaccaacaccgtggaagagctggaggaaagtcgccaaaagtgtcccccttgttggtataagttctctaacatcttcttaatttgggactgctctccgtactggcttaaggtgaaacacgttgtcaacctggtagtgatggacccgtttgtcgatctggccatcaccatttgtattgtattgaacactctgtttatggccatggagcactaccccatgactgatcactttaataatgtcctgaccgtcggcaatctggtattcaccgggatttttaccgccgagatgttccttaagatcatcgctatggatccttattactattttcaagaaggatggaatatcttcgacggctttatagtcactttatccctcgtggagctcggtctggccaatgtggaaggcttgtcggtcctgcggtctttccggctgcttcgcgttttcaagctggctaaaagttggccaacactcaacatgctgattaagattattgggaacagcgtcggagctctcggtaatctgactctggtgctggctataatcgtttttatttttgccgttgtgggtatgcagttatttgggaaaagctacaaggattgcgtgtgcaaaatagcaagtgactgtcaactgcctcgttggcatatgaatgacttcttccacagtttcttaatcgtgtttcgggtgttatgcggcgaatggattgaaactatgtgggattgtatggaggtggccggtcaggccatgtgcctaacagtctttatgatggtcatggtcattggcaatctggtggttctgaatctgtttctcgctctccttctctcttcctttagtgccgacaacctggctgccaccgacgatgacaatgaaatgaataatttacagatagccgttgatagaatgcataagggggtagcctacgtgaaaagaaagatctatgaattcatacagcaatcattcattagaaagcagaagatattggatgagataaagcccctggacgatcttaacaataagaaggattcctgcatgtccaatcacacagccgaaatcggaaaagacctggattatctcaaggacgtgaacggaacaacttccggaatcgggactggatcgtctgtggaaaagtacattattgacgagtccgattatatgtcttttataaacaacccaagcctgaccgtcactgtgccaatcgccgtgggagaatcagacttcgagaacctgaataccgaagacttctccagtgagtccgaccttgaggagagcaaggagaagctgaacgagagttcgtccagctccgagggatcgacagtcgatataggggcacctgtcgaagaacaaccagtggtggaaccagaggagacactcgagccagaagcgtgttttacagaaggctgcgtgcaacgttttaaatgttgccagatcaacgtcgaggaaggacggggaaaacagtggtggaatcttaggcggacatgctttcggattgtagaacacaactggttcgagacctttatagtttttatgattcttctgtcttccggcgctctggccttcgaggatatatatatcgaccagaggaagactatcaagaccatgctggaatatgctgataaagtgttcacatacatctttatcctggaaatgttgttgaagtgggtagcatacggatatcaaacttatttcaccaacgcgtggtgctggctggacttcctgattgtcgacgtgtccctggtgagcctcaccgctaacgcactcggctattcagagctgggggctattaagagcctgcggaccctgcgggcattgagaccgctgagggcactgtcacggttcgagggtatgcgtgttgtggtgaacgcactgctcggagccatcccaagcattatgaacgtccttctcgtctgcttgatcttttggctcattttctctatcatgggagtgaatttgtttgcaggaaaattttatcactgcatcaacacgacaaccggcgatagattcgatatagaggatgtcaacaaccataccgactgcttaaagctcatagaaagaaacgagaccgctagatggaagaacgtgaaagttaatttcgacaatgtggggttcggttacttgagccttctccaggtagccactttcaagggatggatggatattatgtacgctgcagtggacagccgaaacgttgagcttcagcccaagtacgaagaatctctgtacatgtacctctactttgtgatctttatcatatttggttctttcttcactctgaatttgttcatcggcgttatcatcgataatttcaaccagcaaaagaaaaaattcggaggacaggatatctttatgaccgaggaacaaaaaaaatactacaacgcaatgaagaagctgggctctaagaaaccccagaagcctatccctcgcccaggaaacaaattccagggtatggttttcgattttgtcacccggcaggtgttcgacatcagtataatgattctgatttgtttgaatatggtgactatgatggtggagaccgacgaccagtctgagtacgtgacaacaatcctgagcagaattaatttggtgttcattgtcctgtttacgggcgaatgtgtgttgaagctgattagtttaaggcattactatttcaccattggttggaacatcttcgattttgtggtagtcattctctctatcgtaggcatgtttctggcagaactgattgaaaaatatttcgtgagccctacactttttcgggtgatacgtttggcaagaatcgggcgtattctccgtctgattaaaggagcaaagggcatacggactctgttattcgcactgatgatgtcacttcctgctttgtttaatattgggctcttgctctttctcgttatgtttatttacgccattttcggcatgagtaacttcgcatacgtcaagcgggaagtggggatcgacgacatgttcaatttcgagactttcgggaactccatgatatgcctcttccagattaccacaagtgcagggtgggatgggcttttagcacctatcctgaattctaagcctccagattgcgaccccaataaggttaatcccggaagctccgtgaagggggactgcggcaaccccagtgtcggcatcttctttttcgtttcttatatcattatctcgtttcttgtggtggttaacatgtatattgccgttattctggagaatttcagcgtggcaactgaagagagcgcagagcctctctctgaggatgactttgagatgttctatgaggtttgggagaagtttgatccagatgcgactcagtttatggagttcgaaaagttatcccagtttgctgcagccctcgagccacctttgaacctgccacagccgaataaacttcaattaatagccatggaccttccgatggtctccggggaccggattcattgcctcgatatactctttgcttttacaaaacgtgtactaggcgagagtggagagatggatgctctgcgcatccagatggaggagaggtttatggcgtctaacccttccaaagtgagctaccagccaattacaacaacgttgaaacgaaaacaggaggaggtcagcgcagtcatcattcaacgggcttatagaagacacctcctgaagagaacggtcaagcaggcctcgtttacatataataagaataaaatcaagggcggtgcgaacctgctgataaaggaagatatgataatcgatcggatcaacgagaattccattaccgaaaaaaccgatctgaccatgtctaccgcggcatgtcctccctcctacgacagggtcaccaagccaatcgtggagaagcatgaacaggagggaaaggatgagaaggctaaggggaagta

SEQ ID NO: 240876 - DNA, 6029 bp, synthetic construct
  misc_feature 1..6029: note = Description of Artificial Sequence: Synthetic coding sequence
  source 1..6029: mol_type = other DNA
atggagcagacggtgctcgtgccccctggacccgactcctttaatttttttacccgagagagtctagcggcaatcgagcgaaggattgcggaggaaaaagcaaaaaatccaaaacccgacaaaaaagacgatgacgagaacggaccgaagccaaactccgatttggaggctggcaagaatcttccattcatttacggcgacatacctccagagatggtttcagaacccctggaagacctggatccgtattatataaacaagaagaccttcatcgtcctgaataagggcaaagcaattttccgattctctgccacatccgccctttacattctgaccccttttaatccattacgtaagatcgctattaagatcttggtgcatagtctgttttccatgctcattatgtgcaccatattgacaaactgtgttttcatgacaatgtctaatccacctgattggacgaagaacgtggagtacacctttacaggcatatataccttcgaatccctgataaagattatcgctcgcggtttttgtctcgaagacttcacttttctgcgagatccatggaactggctggatttcacagtcattacttttgcttacgtcactgagttcgtggacctcggcaacgttagcgccttgagaaccttcagggtcttaagagctctgaaaacaatatcagtgatccctggcctaaagaccatcgtaggcgctcttattcagagtgtgaagaagctgtcagacgtgatgatcttgaccgttttttgcctcagtgtgtttgctctaataggcctccagctgttcatgggcaacctgaggaacaagtgtatccaatggccccctacaaacgcatccttggaagaacatagcattgagaaaaacataacagttaattataacgggaccctgatcaatgagaccgtttttgagtttgactggaagagttatatacaggactcccgctaccattactttctcgaaggctttttagatgccctgctgtgcggtaattcctctgatgccggtcagtgccctgaaggctacatgtgtgtgaaggctggacggaatcccaactacggatacacttcttttgatacattttcttgggccttcttatctctgttcagactaatgacccaagatttttgggaaaatctataccagctgaccttaagggcggcaggtaagacctacatgatctttttcgtgcttgtaatctttctgggcagtttctacctgataaatctcatcctcgccgtcgtcgccatggcctacgaggaacaaaatcaggccacactggaagaggccgaacagaaggaagccgagtttcagcaaatgattgaacaactgaaaaagcagcaggaggctgcacagcaagcggcaactgccactgcaagtgagcactctcgcgaaccctcagcagctggacgcctcagcgacagctcgtctgaggcttcgaagctgtcctccaagtcagctaaagaacggcgtaataggcggaagaaacgcaaacagaaggagcaatccggcggtgaggagaaggacgaggatgagttccagaagtccgaaagtgaggattccatcaggcgcaaaggtttcaggtttagtatagagggcaatagactcacgtacgagaagcgttactcatcacctcaccagtctttattgtcaatccgcggaagtctcttttcccctcgcaggaacagccggacaagcttgttctcatttcgcggaagggctaaggacgttgggtccgagaacgacttcgccgatgacgaacattcaacgtttgaggataacgagtcaagacgagacagcctgttcgtcccaaggaggcacggtgagcgccgaaacagtaatctgagccagaccagccgcagcagtcgaatgcttgctgtgtttccagctaacggcaaaatgcacagcaccgtcgactgcaatggagttgtttcgctggtgggcggtccttccgtccccaccagcccagtgggccagcttctacccgaagtgattatcgacaagccggctacagacgacaacggcactaccacggaaacggagatgaggaagcgtaggagctccagtttccacgtgtcgatggacttcctggaggacccctctcagcgacaaagggcaatgagcatcgcctctatactgactaatacagtggaggagcttgaggaaagcagacagaaatgcccaccttgctggtataaattctctaatatatttcttatttgggactgctccccatactggctgaaagtgaagcacgtcgtaaatctggttgttatggacccatttgtggatctcgctattaccatttgcatcgtcctgaatacactcttcatggctatggaacattacccaatgacagaccattttaacaatgtgctgacagtgggaaatctggtgtttacaggaatatttaccgcagagatgttcctcaagattatagccatggacccttactactactttcaggagggctggaatatctttgacggttttattgtgactctctctttggtggaactcggattggcaaacgtagaggggctctctgtactgcgctcctttcgcctacttcgtgtgttcaagctcgctaaatcttggcctaccctgaacatgttaataaagatcattggcaattcagtgggagcacttggcaacctgactcttgttctggccatcatcgtgttcatattcgcggtagtgggcatgcagctattcggtaagagctataaagactgtgtgtgcaaaatcgcaagtgactgccaactgcccaggtggcatatgaatgacttctttcattcttttctgattgtgttccgggtcctgtgtggagaatggattgaaaccatgtgggactgcatggaagtggctggacaagcaatgtgtctgaccgtattcatgatggttatggttatcggaaaccttgtggttttgaatctgtttctggcgctgttgctcagcagtttcagtgctgacaacctcgcggctaccgatgatgataacgagatgaacaacctccagattgccgtcgaccgcatgcacaaaggggtggcatacgtcaaacgcaagatttacgaatttatacagcagtcgtttatccgtaagcaaaaaatcctcgacgagatcaagccactggatgacctcaataataaaaaagatagctgcatgtccaatcacaccgctgagattggaaaggacctggactacctgaaagacgttaatggaaccacgtccgggattggtacgggatcgtcagtcgagaagtacatcatagacgaatctgactatatgtcttttattaacaacccgagcctcactgtcacagtccccattgccgtaggagaaagtgactttgagaacctcaataccgaggacttcagtagtgagtctgatctggaagagtcaaaagaaaagttaaacgagtcaagtagttccagcgaggggagtactgttgacattggagctccagtggaagagcagcccgttgtagagcctgaggagacgttggaacctgaggcttgcttcacggaaggctgcgtgcagcggttcaaatgctgtcaaattaacgtcgaggagggtcgaggcaagcagtggtggaacctgagaaggacctgctttcggatcgtggaacacaattggtttgagacatttatcgtcttcatgatactgctgagcagtggagcacttgcctttgaagacatttacatcgatcagagaaagacgattaagactatgctcgaatacgctgacaaggtattcacttatatctttattctcgaaatgctacttaagtgggtggcctacgggtatcaaacctattttaccaacgcctggtgctggttggatttccttatcgtagatgtatctctcgtcagcctaacagccaatgccctgggatattcagagcttggcgcaattaagtctctgagaaccctgagggcactacgtcccttgcgggcactcagccgattcgaaggtatgcgggtagtcgtgaacgcgttactgggcgctatccctagcatcatgaacgtactgctggtatgcctgattttttggttgatcttttccattatgggagtgaacctgttcgctgggaagttttatcactgtattaacaccactaccggggataggtttgacattgaggatgtgaataaccacaccgactgccttaaactaatagagaggaatgaaacagcacggtggaagaatgtgaaggtgaactttgataatgtcggctttggctatctctctctgctgcaagtggccacgtttaagggatggatggacattatgtacgctgcagtcgatagccgcaatgtcgaactgcagccaaaatatgaagagtcactttatatgtatctgtatttcgtaattttcataattttcggtagcttcttcactctgaaccttttcatcggtgtgattattgataactttaaccagcaaaagaaaaaatttgggggacaggatatctttatgaccgaggagcagaaaaagtactataatgccatgaaaaaactggggtctaagaaaccgcagaaacccattccacgccctggtaacaaatttcagggaatggtgttcgacttcgtgacacggcaggtgttcgacatctctatcatgattctcatttgtctaaacatggtcacaatgatggtcgagactgatgatcagtcagagtacgtgacaactatactgtcacgcatcaacttggtttttatagtactcttcaccggagaatgcgtactcaaactgatttctctgagacattactattttaccatcggctggaatatttttgattttgtggtggtgatcctctctatcgtcggcatgttcctggccgagctgattgagaaatattttgtgtctcctacactgtttcgggtgatccggctggctaggatcggtagaatcctacgcctgatcaagggggctaaggggatccgaactctgctcttcgctctgatgatgagcctcccagcgttattcaacataggcctgcttttgttcctggtgatgttcatttacgcaatcttcggaatgagtaacttcgcctatgtcaaaagagaggttgggattgacgacatgttcaatttcgagacgttcggcaacagcatgatctgtctattccagataaccactagcgcgggatgggatggtttactcgcacccattctgaactcaaagcctcctgactgcgacccgaacaaggtaaaccccggttctagtgtcaagggggactgtggcaatccctctgttggtatttttttttttgtgagttatattatcatctcgtttctggtggtcgttaacatgtatatcgcagtgatattagagaacttcagcgtggcaaccgaggaatcagcggagcccctgtccgaagacgacttcgaaatgttctatgaagtgtgggagaaatttgacccagacgcaacacagttcatggagtttgagaaattgtctcagtttgctgccgcactcgagcctccattgaacctgcctcaaccgaacaagttgcagctgattgccatggatctcccaatggtcagtggcgacaggatccactgcttagacattctgttcgcctttactaagagggtgctgggagagtctggcgagatggatgcccttcggattcagatggaagagcgctttatggcttctaatcctagcaaggtgagctatcagccaattactaccacattgaaaagaaagcaggaagaggtgtcagcagtgattattcagagagcttatcgcaggcacctcttgaaaagaacggtgaaacaggccagttttacatacaacaagaataagataaaagggggtgctaacttgctcattaaagaggatatgattattgatagaataaacgagaacagtatcacagagaagaccgacctaactatgagtaccgccgcttgccctccttcctatgatagagtgactaagcctattgtggagaagcatgaacaggagggaaaagatgagaaagccaaaggtaaata

SEQ ID NO: 240877 - DNA, 657 bp, synthetic construct
  misc_feature 1..657: note = Description of Artificial Sequence: Synthetic coding sequence
  source 1..657: mol_type = other DNA
atgggtcggttactggcgttggtcgttggcgctgctctcgtttcctcggcttgcggcggttgtgtggaggtggacagcgaaacagaggccgtttacggtatgaccttcaagattttgtgtatttcctgcaaacgtaggtctgaaaccaatgcagagacatttacagagtggaccttcaggcagaagggaacagaagagtttgtgaaaatcctgaggtatgagaatgaggttctccaacttgaggaggatgagagatttgagggcagagtggtctggaacggatcccgcggtacaaaggacttgcaagacctgtcgattttcattacaaacgtaacttataaccatagcggagattatgaatgccatgtgtatcgtctgctcttcttcgagaactatgaacataacacaagtgtggtgaagaagatacacatcgaggtcgttgacaaggccaatagagacatggccagcattgtgtcagagattatgatgtatgtgctcattgtggtcctcacaatttggctggtggccgagatgatttactgctataagaaaatagccgcagctaccgagactgcagcccaggagaacgcgtctgaataccttgctataacttctgaatcgaaagagaattgcaccggcgtgcaggtggcagagtag

SEQ ID NO: 240878 - DNA, 807 bp, synthetic construct
  misc_feature 1..807: note = Description of Artificial Sequence: Synthetic coding sequence
  source 1..807: mol_type = other DNA
atgggcaggttgctggcgttggtcgttggcgcagctttggtatcttcggcgtgcggtgggtgtgtagaggtggatagcgaaaccgaggccgtctacggaatgactttcaagattctctgcatcagctgcaagcgaaggtcagaaactaatgccgagacttttactgaatggaccttcaggcagaaaggcaccgaggaatttgttaaaatcctgcgatatgagaacgaggtgttgcagcttgaggaggacgaacgtttcgagggacgggtagtatggaatggctccaggggcacgaaggacctgcaggatctgtcgatttttattactaatgttacatataatcactccggcgactatgagtgtcacgtgtatcgcctgctgttcttcgaaaattacgaacataatacgtctgtagtgaagaagatccatatcgaagtggtggataaaggggaaagcggcgctgcctgccccttcactgtgacccacagacgcgctcgatggcgtgatcgctggcaggccgtggacaggaccggctggctgtgtgcatggccagccaacaggcctcaacaaagggcagagggtgaaggaagctcaccctcctgccctctgcaattgtggcccctgttcctaagttcaccccgaagggggcaatcgatgcctgtaccccaccggaggtcgggctatcggacgcagctgtgccatctgtgttgcatgactagcggtcggtgccttctgtctctgtcacaacgcgttgtactgggccttcccggaattataatcagatgcgtgagcaggggggtggtgtag

SEQ ID NO: 240879 - DNA, 6018 bp, synthetic construct
  misc_feature 1..6018: note = Description of Artificial Sequence: Synthetic coding sequence
  source 1..6018: mol_type = other DNA
atggcacagagcgtgttagtgcctccagggcctgatagcttcaggtttttcacaagggaaagtctggccgctattgagcaaaggatcgctgaggagaaagcaaagaggcccaaacaggagcgcaaggacgaggacgatgagaatggcccaaagcctaattccgatctcgaagccggtaaatccttaccatttatctacggagacatcccccctgagatggtgagtgtgcctctcgaggatcttgacccatactatatcaacaaaaagacatttatcgttctgaacaaagggaaagccatatctaggttcagcgccacccccgctctgtatatcttgactccgttcaatcctatccggaagttggcgataaaaattctcgttcacagcctgttcaacatgcttattatgtgcactatcttaacgaattgtgtgtttatgactatgagtaatcccccagactggactaagaatgtggaatacacattcaccggcatttatacatttgagtctctaatcaagattctggcaagagggttctgcttagaggatttcactttcctgagagatccatggaattggctggatttcacagttatcacgttcgcctacgtaaccgagtttgtcgatctcgggaacgtcagcgcattgagaacattcagagttctacgcgcattgaaaacaatctccgtgatccctggactgaaaacaatcgtcggtgcattgattcagtccgtaaagaaactcagtgacgttatgatcctaaccgttttctgcttgtccgtcttcgccctcatcggactgcagctgtttatgggcaaccttcgtaataagtgcctgcagtggccgcctgacaactcaagtttcgagattaatatcaccagcttcttcaataattccctcgatggaaatggaacaactttcaacaggaccgtgtccatcttcaactgggacgaatacattgaagacaaaagccatttctattttctagaaggccagaatgatgcactcctgtgtggtaactcgtctgatgcagggcagtgcccagaaggttatatttgcgtcaaagctgggcgtaatcctaactacggttacacatcttttgataccttctcatgggcctttcttagtttgttcagactcatgacgcaggatttttgggagaatctgtatcaactgaccctgcgcgcagcagggaaaacttacatgattttcttcgttttagtgatttttctgggcagtttttatcttatcaaccttattctggctgttgttgcgatggcttacgaggaacagaaccaggcgactctggaggaagctgagcagaaggaggcagagttccagcaaatgttagagcagctcaagaaacagcaagaggaggctcaagcagccgctgctgctgcttccgcagagagcagggacttctcaggcgctgggggtattggcgtcttctccgaaagctcgagtgtagcctcaaagcttagttccaaatccgagaaagagctgaagaaccgtcgtaagaagaagaaacaaaaggagcaatccggcgaggaagaaaagaacgaccgagtgaggaagagcgagtcagaggactctatccgcaggaaagggtttcggttctcactcgagggctccagattgacatacgaaaaacgcttttctagtccccaccaaagtctcttaagcatacggggttctcttttttctccacgacgcaactctcgggcaagcctgttctcctttaggggcagagccaaagacattgggtctgagaacgactttgcagatgacgaacactctacttttgaagacaatgactctaggagggatagtctgttcgtgccacacagacacggagaaagacggcatagtaacgtgagtcaagccagtcgggcatcccgggtgttgccgatactgcctatgaatggcaaaatgcactccgccgtggactgtaatggggttgtttcacttgtcggaggaccctctacgctgaccagtgcgggtcagctcttaccagaaggcactaccacagaaaccgagataagaaagcgcaggagttcgtcatatcacgtgagcatggatctgctggaggaccccaccagtagacagcgggctatgtcaatcgccagcattttgaccaatacaatggaagagctcgaagagtctcgacagaagtgcccaccttgttggtataagttcgccaacatgtgcctgatttgggattgttgcaagccatggctcaaagtgaagcaccttgtaaatttagtcgtgatggacccattcgtcgatttagcaataaccatatgtatagtgcttaataccctcttcatggcgatggaacactaccccatgactgaacaattctccagcgtactgtcagtcggtaatctggtctttacagggatctttaccgccgagatgttcctgaagatcatagcaatggatccatattactattttcaggaaggatggaatatttttgacggattcatcgtaagcttgtcactcatggaactgggcctggccaacgtcgaaggtttgtctgtgctcagaagcttcaggctccttagggtcttcaaattagcaaagtcgtggcccacgcttaacatgcttatcaaaattataggaaatagcgtcggtgccctcgggaatctgacgttggtgctggccatcatcgtgttcatctttgctgtggtcgggatgcagctttttggtaagtcgtacaaggagtgtgtttgcaaaatttctaacgactgtgagcttcctcggtggcacatgcatgactttttccactctttcttaatcgtttttcgggttctatgtggcgaatggatagaaacaatgtgggattgtatggaggtagctggtcagactatgtgcctgaccgttttcatgatggtgatggtcattggcaacctggtagtactgaacctgttcctggcattgctcctttcatctttttcttccgacaatctagctgcaactgacgacgataatgaaatgaataacctgcagatagctgttggccgaatgcagaaaggaatcgattttgttaagcgcaaaataagagagtttattcaaaaggcgttcgtgcggaagcaaaaagcactagatgagatcaagcctctcgaagatctcaacaataagaaagacagctgtatctctaaccacaccaccatcgagattggaaaagacctgaattatcttaaggatggaaatggcacaacctctggcattggctcaagtgtggaaaagtacgttgtggatgagagcgactatatgtcctttattaataacccaagcctgacggtcaccgtccccatagccgtgggcgaatctgattttgagaacttgaacacagaggagttcagttcagagagcgatatggaagaatcaaaggagaagctcaatgcgacaagtagctcagagggaagcaccgttgacataggagcacctgcagagggggaacagccggaggtcgagcccgaggagtctttggagcccgaggcctgtttcacagaagactgtgtgagaaaatttaaatgctgtcaaatatcaatcgaggaggggaaaggaaaactctggtggaatctccgcaaaacatgctacaagatcgttgaacataactggttcgagactttcattgtttttatgatcctgctaagcagcggggcactggctttcgaggacatctacattgagcagcggaagaccatcaagactatgctcgaatacgctgacaaagtgtttacgtacatattcattctggagatgctgcttaagtgggttgcctacggctttcaggtttatttcacaaacgcctggtgttggcttgatttcctgatagtggacgtctctctggtgagccttacagcaaacgccctcggctactctgaacttggtgctattaaatccctccgaacgctgcgtgccctcaggccccttcgcgctctctcccggttcgaaggtatgagggtggtagtcaacgccctgttgggtgccataccttccattatgaacgtcctcctcgtttgcctgatcttctggctcatcttctccattatgggcgtgaatcttttcgctggcaagttctatcactgcatcaattacactacaggcgaaatgtttgacgtaagtgtggtcaacaactattctgagtgcaaagctctgattgaatcaaaccagacagcaagatggaagaatgtgaaggtcaactttgataacgtgggcctcggctatttatctctcctccaggttgcgaccttcaaaggctggatggatattatgtatgcggctgtcgattctcgcaatgtggaacttcagccaaagtatgaggataatctttacatgtacctgtacttcgtgattttcattattttcggatccttctttacgctcaatctgttcatcggcgttattattgacaatttcaaccagcagaaaaaaaaatttggcggacaggatatcttcatgacagaggaacagaagaagtactacaacgccatgaaaaaattgggctctaagaaaccccagaaaccaatcccccgacccgcaaacaagtttcagggcatggtcttcgattttgtgacaaagcaggtgttcgacatctccattatgatactgatctgtctgaacatggtgactatgatggttgaaacggacgaccagagccaagaaatgaccaatattctgtattggatcaatcttgtgtttatcgttctgttcacaggggagtgcgtgttaaagttaatttcgttgaggtattattacttcacaattgggtggaacatctttgatttcgtagtggtgatattaagcatcgtgggaatgttcctcgccgagcttatagagaaatacttcgtcagcccaacactcttccgcgtcataagacttgcgaggatagggaggatcctgcggctcattaagggagctaagggcattcgaacactcttgttcgctcttatgatgtcactgcccgcactgttcaacattggtttactgcttttccttgtgatgttcatctatgccattttcgggatgtcgaactttgcctacgtgaaaagggaggttggtattgatgatatgttcaacttcgagacgtttggcaactccatgatttgtcttttccagatcacaaccagtgcgggatgggatggattgctcgcgccaattctcaattctggaccacctgattgcgatcccgacaaggaccatccgggatcctctgtgaagggagattgcggaaacccctcagtcggaattttcttttttgtgtcttatattatcatcagcttcctggtcgttgtgaacatgtatatcgctgtgatcctcgagaatttttccgtggccaccgaggagtcagcagaacccctttctgaggacgacttcgagatgttttatgaagtctgggagaaatttgaccccgacgctactcaatttatcgagttcgctaaactaagcgatttcgcggacgccttagacccacccttgttgatagctaagcctaataaggtccagttaattgcaatggatctacccatggtcagtggagataggatacattgcctggatattttattcgcctttacaaaaagggtccttggcgaaagcggcgagatggatgccctgcgcatccagatggaggagcgattcatggcatcaaatccaagcaaagtatcatacgagcccatcacaaccaccctgaagagaaaacaggaggaagtaagcgccatcattatccagcgcgcatatcggcgatacctgctgaaacaaaaagtgaagaaggtttcatctatctacaagaaagataagggaaaagaatgcgacgggacacccataaaggaggatacactgatagacaagctgaacgagaatagcactcctgaaaagacagacatgacgcccagtacaacatcccccccttcgtatgattcggttacaaagcccgagaaagagaaattcgagaaagataaatccgagaaggaagataagggaaaagatatccgggagagtaaaaaatac

SEQ ID NO: 240880 - DNA, 6017 bp, synthetic construct
  misc_feature 1..6017: note = Description of Artificial Sequence: Synthetic coding sequence
  source 1..6017: mol_type = other DNA
atggcccagagcgttctcgtgccgcctggaccagactcctttcggtttttcaccagagagtcccttgcagcaatcgagcaaagaattgccgaggagaaggctaagagacccaaacaagagcggaaggatgaggacgatgagaatggccctaagcccaactccgatctggaggcagggaaaagtttacccttcatttacggagacatccctccagaaatggttagtgtgccattggaagatcttgacccttattatattaacaaaaagacgttcatcgtgctgaacaaggggaaggcaatctccagatttagtgcgacccccgctttgtacatactcaccccattcaaccctattaggaaattggccattaaaatcctagtgcattcactctttaacatgttaattatgtgcacgatcttgaccaattgcgtatttatgactatgagcaacccccctgattggaccaagaatgtggaatatacgttcacagggatctatacatttgagagcttgatcaagattctggccagaggtttttgcttagaggattttacttttctgagggatccctggaattggctggacttcacggtaatcacctttgcttatgtcactgaattcgtgaatcttggaaatgtgtccgcactccgcacttttagggtgcttcgcgcactgaagactatatcagtcatacctggcctgaaaactattgtgggtgcccttattcagtctgtaaaaaaattaagcgatgtgatgattctgaccgttttttgcctgtccgtgttcgcactgatcggcctgcagctgtttatgggcaacttgaggaataaatgccttcagtggcctccagacaatagcagcttcgaaataaacatcacctcgttctttaataattccctcgacggcaacggcacaacgttcaacagaactgtgtctatctttaactgggacgagtacatcgaagacaagtcacacttttattttcttgaaggccagaacgacgccttattgtgcggcaacagctctgatgctggacagtgccctgaaggctatatttgcgtcaaggccggaagaaaccctaactacgggtacacgagctttgatactttttcctgggctttcctgagcttgtttcgcttaatgacgcaggacttttgggaaaatttataccagcttactttaagggccgcaggtaagacttacatgattttttttgtgctggtaatatttctgggatcattctacctgatcaacctgatcctagccgtcgtggccatggcatatgaagagcagaatcaagctaccttagaggaagccgaacaaaaagaggccgaattccaacagatgctcgagcaactcaaaaaacagcaggaggaggctcaggctgccgcagctgccgcatcagcagaaagcagagatttcagcggagccggtgggattggggtcttctcagagtctagctcagtggcgtccaagctttcaagtaaatctgagaaagagctgaagaacagacgcaagaaaaagaaacagaaagagcagtccggtgaagaagaaaaaaacgaccgagttcggaaatccgagtctgaagactctattcgacggaaagggtttaggttttccctcgaaggctcccgattaacatacgaaaaacggttttcctcgcctcaccagtccctgcttagcattagaggctcgctgttcagtcccagacgaaactcgcgcgcaagccttttttcattcagaggcagggcaaaagacatcggttctgagaacgactttgctgacgatgaacacagcaccttcgaggacaacgacagcagaagggattcgctttttgtgcctcaccgccatggagaacgaaggcattcaaatgtgtcacaggcttccagagcaagcagggtcttgccgattctgcctatgaacggaaagatgcacagcgcagtggattgtaatggggtggtgtccctagtggggggaccatcaaccctgacgagtgctggccaactgctgccagaaggtacaacaacagagactgaaattcgcaaaaggcgtagctccagctatcacgtctcgatggatctgctggaggatcccacttctagacaacgggctatgagcatcgcttcgattttgacaaacacaatggaggaactggaggagagcaggcaaaagtgtcccccttgctggtataaattcgctaatatgtgtttgatatgggattgttgtaaaccctggctcaaggtcaaacacctggttaacttggtggtgatggacccttttgtggacctggccattacgatttgtattgttctgaacactctattcatggcaatggagcactatcctatgaccgaacagttctcttccgttctcagtgtaggcaacctggtgtttacagggatatttactgccgagatgttcctcaagatcatcgccatggatccttactattattttcaggaaggctggaacatctttgacgggttcatcgtgtctctaagcctcatggaactggggctggcgaacgtagagggtctgagcgtcttgaggagctttagactcctccgtgtgttcaaactcgccaagtcctggcccactttaaatatgctgatcaagattatcgggaacagcgtaggcgctctgggtaatttaaccctcgtgctcgcaatcatcgtttttatatttgctgtcgtcggtatgcagctgttcgggaaaagctacaaggagtgtgtatgcaagataagcaacgactgtgagctacccagatggcacatgcacgattttttccacagcttcctcattgtgtttagagttctctgcggagagtggattgaaactatgtgggactgtatggaagttgccggtcaaacaatgtgtttgacagtgtttatgatggttatggtgatcggaaacctggttgtacttaatcttttcttagctttgctgctgtcctcatttagttctgataacctggcagctaccgacgacgacaacgaaatgaacaacctgcaaatagccgttgggagaatgcagaaggggatagacttcgttaaaaggaagattagggaattcattcagaaggcattcgtgcggaagcaaaaagcattagatgagatcaaaccgctcgaagacctcaataacaaaaaagacagctgcatcagtaaccacaccaccattgaaataggcaaggacctgaactatcttaaagacggaaatggtactacaagtggcatcgggagttcggttgagaaatacgtggtggatgagtccgattacatgtcctttatcaataacccgtccttgacagttactgtcccaatcgctgtgggagagagcgacttcgaaaacctcaacaccgaagagttcagctctgagagcgatatggaggagtcaaaagaaaagttgaacgcaacttccagtagtgaaggatctacagtcgatataggggcacccgctgagggggaacagccggaggtggaacctgaagagagtctggaacctgaagcgtgcttcacagaggattgtgtgcgcaaattcaaatgctgccagatttccatagaggaagggaagggcaagttatggtggaatctacggaagacctgctataagatcgtggagcacaactggttcgaaactttcattgtgtttatgatacttctgtcaagtggggctttggccttcgaggacatttacatagagcagaggaagaccattaagactatgttggaatacgccgataaggtgttcacatatatcttcattctggaaatgttgctgaagtgggtagcatacggtttccaagtctactttactaacgcttggtgttggctcgactttctcatagtagatgttagccttgtgtcactgaccgcaaatgccctcggctatagcgaactgggggctattaagagtctgcggaccttgcgagccctgaggccattgcgggctctgagcaggttcgagggcatgcgcgtagtggtaaatgctcttctcggcgcaatccctagtattatgaacgtgttattggtgtgcctcatcttttggctgattttctctatcatgggggttaatctgtttgctggtaagttttaccattgtattaactatacaactggagaaatgttcgatgtgagtgtggtgaacaattacagcgagtgtaaagccttgatcgaatccaaccagaccgccagatggaagaacgtgaaggttaactttgacaacgtggggcttggctacctgtctctattacaagtcgctacctttaaaggctggatggatataatgtatgctgctgtagactccaggaatgtggaacttcagcccaagtacgaagacaacttgtacatgtacctttatttcgtaatctttattatattcggttccttcttcacccttaatctgtttataggagtaattatcgacaactttaatcaacagaaaaaaaagtttggcggacaggacatcttcatgacagaagagcagaagaagtattacaacgccatgaagaagctgggtagcaagaaaccccaaaagcccattcctcgcccagcaaacaagtttcaagggatggttttcgactttgtgaccaaacaggtcttcgacatttccattatgattctaatatgcctgaacatggtgaccatgatggtggaaaccgatgaccaatcccaggagatgaccaacatcctgtattggattaacctcgtttttatcgtccttttcacaggcgagtgtgtgttaaagctgatttctctgagatactactatttcacgattggctggaacatattcgacttcgtagtagtgatcctctcaatcgtggggatgtttctggccgagttaatcgaaaaatacttcgttagtccaaccttgtttcgggttataagactagcaagaatcggacggatactgcgcttaataaaaggcgctaagggtatccggactctgctctttgcgttgatgatgtctttacctgctctttttaatatcggacttttactattcctggtgatgtttatctacgctatttttgggatgagcaactttgcctacgtgaaaagagaagtgggtatcgacgacatgtttaactttgaaaccttcggtaacagtatgatctgtttgttccagatcaccacctccgctgggtgggatggcttgctggcacccatcctgaatagcgggccaccagattgcgacccagataaagatcaccccggatcctctgtgaagggggattgcgggaatccctcagtgggcattttcttttttgtcagttatatcatcatttcatttctggtcgtggtaaacatgtatattgctgttatcctggagaatttcagtgtcgccaccgaggaaagtgcagagccacttagcgaggacgactttgaaatgttctatgaagtgtgggaaaagttcgatcccgacgccacccagttcatcgagttcgctaaactctctgatttcgcggatgctctggacccaccgctcctgatcgcaaagcctaataaggttcaactgattgccatggacctgcctatggtcagcggtgatagaattcattgtctcgatattttgttcgcattcaccaaacgtgtgctcggggagtcaggtgaaatggacgctctccgcattcagatggaggaacggtttatggcctctaatcctagcaaggtgtcgtacgagccaatcacaacaaccctaaagagaaagcaggaggaggtctccgctataattattcagagagcctacaggaggtacctgctgaaacagaaagtaaaaaaggtctcttccatttataaaaaggacaagggtaaagagtgcgatggaactcccatcaaggaggacacattaatcgacaagcttaacgaaaacagtacaccggaaaagactgacatgacaccctccaccacctcaccaccgagctatgattcagtgacaaagccagagaaggaaaagtttgaaaaggataagtccgaaaaagaagacaaggggaaggacatccgtgaaagtaaaaaata

SEQ ID NO: 240881 - DNA, 6017 bp, synthetic construct
  misc_feature 1..6017: note = Description of Artificial Sequence: Synthetic coding sequence
  source 1..6017: mol_type = other DNA
atggctcagagtgtgctggtcccccctgggccagacagcttcagattttttacgcgggagagcctggccgctattgagcagagaatcgccgaggagaaagccaaaagacccaagcaggaacggaaggatgaggatgacgagaacggcccaaaacctaacagtgatctggaggcgggaaaaagcctgccatttatctacggcgacattcctccggaaatggtttccgtcccactggaagacctggacccatattacataaataaaaagacttttattgtcctcaataaaggcaaggcaatctcacgattttctgcaactcccgctctgtatatattaaccccatttaacccaatccgaaaactcgcgattaagatcctggtccactctctttttaatatgttaatcatgtgcaccatcctgactaactgtgtgttcatgaccatgagtaatcctcctgattggaccaagaatgttgaatacaccttcaccggtatctatacatttgaatccctcataaagattctggccagggggttctgccttgaggatttcaccttcctcagggatccatggaattggcttgacttcaccgtgatcacatttgcttacgttacagaattcgtaaatctcggcaacgtttcagcattgcgcacttttcgagtcctgcgggctctgaaaaccatatccgtgatcccaggcttgaaaaccatcgtgggggctctgattcagtccgtcaagaaattatctgacgtgatgatcttaaccgtgttttgtttgagcgtttttgcacttattggcctccagctcttcatgggaaacttgcgcaataaatgcctgcagtggccgccagacaactcttcttttgaaattaatataacaagcttttttaataattctcttgatggcaacggcacaacatttaatagaaccgtctctatctttaattgggacgaatatatcgaggataagtcccacttttattttttggaaggacagaatgacgccctcttgtgtggcaactcgagtgacgctggacaatgccccgaaggatatatttgcgttaaagccggacgaaacccaaactatggatacacaagttttgatactttctcatgggcatttctcagtctgttccgcctcatgacccaggacttctgggagaatctgtaccagttaacacttcgcgctgccggtaagacctatatgatcttttttgtgcttgtgatcttcctgggctctttttacctaatcaaccttattctggccgttgtcgccatggcgtatgaggaacaaaaccaagctaccctcgaggaagcggaacagaaggaagccgaattccagcagatgctggaacagctgaagaagcagcaggaagaggcccaggccgctgcagcagcggcaagcgcagaatcccgcgatttttccggtgccggaggcattggagtgttttccgagagttcaagcgtagcttctaaactgtcatcaaaaagtgagaaggaattaaaaaatagacggaagaaaaaaaagcagaaggagcaatccggcgaggaggagaaaaacgatcgtgtccgaaagagtgaatctgaggacagcatacgccgtaaaggatttcgctttagcttagagggatccagattaacatacgaaaagcggttctcctccccgcaccagtcactgctgagtatccggggatccctgttttcgccacgcaggaatagtcgggcaagtctgtttagctttcggggtcgagcgaaagacatcggcagtgagaacgactttgccgacgatgagcacagtacatttgaggataacgactcgagacgagatagcctgtttgttcctcatagacatggggagagaaggcatagtaacgtgtctcaagcttcgagggccagtcgcgtgcttcctattctgcccatgaacggcaagatgcactcagccgtggattgcaacggggtagtaagcctcgtcgggggtcccagtacactaacatcagccggacaactgctccccgagggcacaacgacagaaacggagattcgaaagcgacggagttcatcctaccatgtgtccatggatctcctcgaggatcctacctccagacagcgggctatgtccatcgcatctatcctcacaaataccatggaggagctggaggaatcacgtcagaaatgccctccctgctggtacaagtttgctaacatgtgcttaatttgggactgctgtaaaccgtggctcaaggtaaagcatctcgtgaatcttgttgtgatggacccctttgtggacctagctataaccatctgtattgtcctgaacacactgttcatggcgatggagcactacccgatgacggaacagttcagttccgtgttgtctgtgggtaatctagtgtttacgggcatttttacagcggaaatgtttttaaagataatcgctatggacccatactactacttccaggaggggtggaacattttcgacgggttcatcgttagtctcagcctgatggagctgggtctcgcaaatgtggaaggtttgagcgtgcttcgaagcttccggctgttacgggttttcaagctggccaagtcatggcccaccttgaatatgctcattaagatcatagggaattctgtgggggcactgggtaatttgaccctggtcctagctatcattgtctttatctttgctgtcgtgggaatgcaactttttgggaagagttacaaggagtgtgtatgcaagatcagcaatgactgtgaactgccacgctggcacatgcacgatttctttcactccttcctgatagtctttcgcgtgctgtgcggcgagtggatcgaaactatgtgggattgtatggaagtcgctggccagacaatgtgtctcactgtcttcatgatggtcatggtgatcggaaacctggtcgtgctgaacctcttcctagcactgctgctgtccagcttctcatccgataatctagctgccaccgatgacgataacgaaatgaacaacctacagattgccgtcgggaggatgcagaagggaattgactttgtcaaacgcaaaatacgtgaatttattcaaaaggcgttcgtaaggaaacagaaggctctggatgaaataaaacccctggaggaccttaataataagaaagactcctgcattagtaaccacaccaccattgaaatcgggaaagacctcaattacttaaaagacggcaatggaacaacatcaggcatcggcagctctgtcgaaaaatatgtggtggatgaaagcgattacatgagcttcatcaataatcccagtctaaccgtgaccgtcccaattgctgtgggcgagtcagatttcgagaaccttaacaccgaggaattcagcagcgagtcggacatggaggagagcaaagagaaactgaacgcgacctcgtcgtccgaaggaagcactgttgatataggggcacctgccgagggcgagcaacccgaggtcgaacctgaggaatcactggagcctgaggcatgctttaccgaggattgcgtcaggaagttcaaatgctgccaaatttccatcgaagaaggcaagggtaagttgtggtggaatctccggaagacgtgttacaagattgtcgagcacaactggttcgagacctttatagtcttcatgatcctgctgtctagtggagcgttagcgttcgaagatatctacatcgagcaacgcaaaacgataaagaccatgctggaatacgcagacaaagtctttacttacattttcatcctggaaatgctgttgaaatgggtggcctacggattccaagtttatttcacaaatgcttggtgctggttagatttcctcatagtggatgtttccttggtgagcctaacggcgaacgccctgggatatagcgagctcggagctattaaaagcttacggacccttagggcactgcgccctctgcgcgcactgtcaaggttcgagggcatgagggtggtagtcaacgcgctactgggggctatcccctcaatcatgaatgtgctgctggtgtgcttgatcttctggctgatctttagcatcatgggtgtgaacctgttcgctggcaaattttatcattgtatcaactacacgacgggagagatgttcgatgtgtccgttgtgaataattactcggagtgtaaggcattaatcgaaagtaatcaaaccgccagatggaagaatgtgaaggtgaacttcgacaacgttggcctcggctaccttagcttgctgcaggtcgccacctttaaaggatggatggacataatgtacgcggctgtggacagtcgaaacgttgaactgcagcccaagtacgaggataacttatatatgtacctttacttcgttatttttattatctttggatctttctttaccttgaatctgttcattggagtgattatcgacaattttaatcagcagaagaaaaaattcggcggtcaggacattttcatgaccgaggagcagaagaagtattataacgcgatgaaaaagctcggcagcaaaaagcctcagaaacctataccacggccagctaataaatttcagggtatggtgtttgattttgttacaaaacaggtatttgatatcagcatcatgatcctgatttgtctgaatatggtgactatgatggttgaaacagatgatcagtcccaagaaatgactaatattctctattggatcaatctcgtttttatcgtgctcttcaccggcgagtgcgtgctgaagctgatttcactgaggtactattacttcacaatcggatggaacattttcgactttgtcgtcgtgattttgagcatcgtcggaatgttcctggcagaattgatcgaaaagtactttgttagcccgacccttttccgcgtcattcgcctcgccaggatcggacggattctgagattgatcaagggcgcaaagggcatcaggacactgttgttcgcactaatgatgtccctgccagcactgttcaatatcggtctgttgctattcctggtgatgtttatttacgccatatttgggatgtcaaattttgcctacgtgaaaagagaggtgggtattgacgacatgttcaacttcgaaacctttggaaacagcatgatctgtctgtttcagattacgacctccgccggatgggatggcctacttgcaccgatccttaacagtgggcctcctgattgtgatccggacaaggaccaccctggtagctctgtgaaaggcgactgcggaaacccttctgtgggcatctttttctttgtcagctacatcataatctcatttctggtcgtggtgaatatgtatatcgccgtaattcttgaaaacttttccgtcgctaccgaggagagtgcagaacccttgtctgaggacgattttgaaatgttttatgaggtttgggagaagtttgatcctgacgcaacccagttcatcgagtttgctaagctctcagattttgcagacgccctggatcctccattactgatcgccaagccaaacaaggtgcagttgatcgccatggacttgcccatggtgagcggcgacagaatccactgcttagatatactatttgcatttactaagcgggtgctgggggagtccggggagatggatgccctgcgcattcagatggaggagcgattcatggcatctaacccctcaaaagtttcctacgaaccgatcacgacaactctgaaaaggaagcaggaggaggtgtctgctataattatccaacgagcataccgcagatatttgctgaaacagaaagtcaaaaaggtgagctctatctataaaaaggacaagggcaaagaatgtgacgggactcctatcaaagaagacacactgatcgacaagctgaatgaaaattccaccccggaaaaaacagacatgactcctagcactacaagtcctcctagctatgactccgtgaccaagcccgagaaggagaaattcgagaaggataaaagcgagaaggaggataagggcaaggacatcagagagtcaaagaaata

SEQ ID NO: 240882 - DNA, 6017 bp, synthetic construct
  misc_feature 1..6017: note = Description of Artificial Sequence: Synthetic coding sequence
  source 1..6017: mol_type = other DNA
atggcgcaatcggtcctagttcccccagggccagactcattccggtttttcactcgcgaaagcctagcagccattgaacaaaggatcgccgaagagaaggccaagcgtcccaagcaggagcggaaagatgaggatgacgagaacggaccaaagcctaacagcgacctcgaagctgggaagagcctgccgttcatctatggggatattccacccgagatggtaagtgtgccactcgaagacctggatccttattacataaataagaagacgttcattgtcctgaacaaaggaaaagcaatctctaggttcagcgctacccccgctctatatatccttacacccttcaacccaatacgtaagctcgccatcaagattttggtacattccctcttcaatatgctgataatgtgtaccatcctcacgaattgtgtgtttatgaccatgtcgaatcccccagactggactaagaatgttgaatacacttttacaggaatctacacctttgagagtctgataaagatactggctcggggattctgtctggaggatttcacattcttgcgggatccctggaactggctggattttaccgtgatcaccttcgcctacgtcacagagtttgtagatctgggcaacgtgagcgccctcagaacattcagagtcctcagagccctgaaaaccatttccgtgatccctggcttgaagaccatcgtcggtgccctgattcagagcgtcaagaagctgagtgacgttatgatactgacagttttctgcttgtccgtatttgcactaattgggctccagctgttcatggggaatctgcgaaataagtgcctgcagtggcccccagacaatagcagttttgagatcaatataacctcatttttcaataatagtctggacggcaatggcactacctttaaccgcactgtgtccatcttcaactgggacgaatacattgaagacaagagccatttctattttttggagggacagaatgatgctcttctgtgtgggaacagttcagacgctggccagtgccctgaggggtacatttgcgttaaggccggaaggaatcccaactacggctacacttcttttgataccttcagctgggctttcctaagtctcttccgcctgatgacgcaggacttctgggagaacctctatcagctaacacttcgcgcagctggaaaaacatatatgatcttctttgtgctggtgattttcctgggaagtttctatctgataaatctgatattggcagtggtcgccatggcttatgaggagcagaaccaagccacccttgaagaggcagagcagaaggaagcggagtttcagcagatgttggagcagcttaagaagcagcaggaggaagcccaggctgcagctgccgcagccagcgccgagagccgagatttctccggtgctggcggaatcggagttttctctgaatcaagctctgtcgctagcaagttgtcgagtaagagcgaaaaggaactgaagaatcgacgaaaaaagaaaaaacagaaggaacaatctggcgaagaagaaaagaacgaccgagtgagaaagtccgagtccgaggactccatcagacgtaagggattccgatttagcctagagggctcgaggcttacttacgaaaaacggttcagtagtccccatcagtcattactctctatacggggtagtctttttagccctagaagaaatagtagggccagcctgtttagctttcgtggtagagcaaaagacatcggaagcgagaatgattttgctgatgacgagcactctacctttgaggacaatgattctcggcgagattcgctgtttgtcccacatcggcacggggagcgacgacacagcaatgtttcacaagcttcaagagcctcccgagttctgcccatcctgcctatgaatgggaagatgcattccgcggtggactgcaatggagtcgtgtctctcgtcggcggtccttctacgctcacgtccgctggtcaacttctacccgaaggcaccactaccgagacggagatccgtaagagaagaagcagttcttaccatgtgtctatggacctacttgaggatcccaccagccggcagcgggcaatgtcaattgcttcaatcctcacaaatacaatggaggagctggaggagtctaggcagaaatgccctccatgctggtataaatttgccaatatgtgtctgatttgggactgctgtaaaccctggctcaaggtgaagcacttagtcaacttggtggtgatggacccatttgtggatctagccataacaatttgcatagtgttgaatacactgttcatggccatggaacattatcctatgacagaacagttcagcagcgtgctttcagtcgggaatctggtgttcactggtatattcaccgccgaaatgttcctgaaaattatcgccatggacccatactactatttccaagaggggtggaatatttttgatgggttcatcgtctctctgagtctcatggaactgggattagccaatgttgaagggttatctgttttaaggtccttcagattgctgagggtgttcaagctggccaagtcctggccaactctgaatatgctgattaagattataggtaacagtgtgggagccctggggaacctaacactcgttcttgccatcatcgtctttattttcgcagtggtgggaatgcaactgttcgggaagtcttataaggaatgcgtctgtaaaatatcaaatgattgtgagctccctcggtggcacatgcacgacttcttccattcgtttcttatcgtgtttcgggtgctgtgtggggagtggatagaaaccatgtgggactgcatggaagtggccggtcagacgatgtgccttaccgtgtttatgatggtgatggttataggcaatctggtggtgctgaatctcttcttggcactccttctgtcatccttttcatccgacaatctcgccgctaccgatgacgataacgaaatgaataacctgcagatcgccgtcggacgaatgcaaaagggcattgactttgtgaagaggaaaatccgggaattcatccagaaagctttcgtgagaaagcaaaaggccttggacgaaatcaagcccctggaggacctgaacaacaagaaagattcttgcatcagcaatcatacgaccatcgagattggaaaggacctgaactatttaaaggatggaaatggcactaccagtggtatagggtcatctgtagagaagtacgtggtggacgagtctgattacatgtccttcatcaacaatccctcactgactgtcaccgtgcctattgctgttggagaaagtgacttcgaaaacctgaatactgaggagttctcatccgagagtgacatggaggagagcaaagagaagttgaacgccacctcatctagcgagggctcaaccgttgacattggggctccggctgagggcgaacagcccgaggtggagcctgaggaatcattggagcctgaagcctgtttcaccgaggactgcgtgcggaagtttaaatgttgccaaatatctatagaggagggaaagggcaagctgtggtggaatctccgaaagacttgctataaaattgtggaacacaactggtttgaaacctttattgtgtttatgatccttctctctagcggagctctggcctttgaagatatctacattgaacagagaaagacaattaaaaccatgctggaatatgctgataaagtgtttacttacatctttatcttggaaatgttgctgaaatgggtcgcgtacgggtttcaggtgtactttacgaatgcgtggtgctggttggacttcttaatcgtggacgtgtcactcgtctccctgaccgctaatgcactaggctattctgaactgggcgcaatcaagtctcttagaacattacgagcactgcgcccactgcgcgcactctcccggttcgaggggatgcgggtagtggtaaacgctttgctcggcgctataccaagtatcatgaacgtgttgctagtttgcctgatcttctggttaatcttcagcatcatgggggtgaacctttttgccggtaaattctaccattgtattaactacaccaccggtgaaatgttcgatgtctctgtcgtcaataactactctgagtgcaaagccctgatcgagagcaatcagaccgctagatggaagaacgtgaaagtgaactttgataacgttgggctgggctacctgtccctgctgcaggttgccacctttaagggttggatggacattatgtacgccgcagtggactcacggaacgtggagctgcaaccgaagtatgaagacaacctgtacatgtacttatacttcgtgatcttcataatttttgggtcttttttcacacttaatctttttattggcgtcatcatcgataatttcaatcagcagaagaagaagttcggaggccaggacatctttatgaccgaagaacaaaaaaaatattacaacgcaatgaaaaagttgggctccaagaaaccgcagaagccaattccaagacccgctaataagtttcagggaatggtatttgactttgtgacaaagcaggtgtttgacatttcaatcatgattctgatttgcctaaacatggttactatgatggtagaaaccgacgaccagtcacaggagatgactaacattttgtattggattaacctagtgtttatcgtactgtttacgggcgagtgtgtactgaagctaattagcttacggtattactattttaccattggatggaacatattcgacttcgtagtggtcatattaagtattgtgggaatgtttttagcagagttgatcgaaaagtactttgtgtcgcccacgttgtttcgggttatacgcctcgctcgaattggaaggatcctacgcttgatcaaaggcgcaaaaggtatccgaaccctgctgtttgcactgatgatgagcctcccggctctgttcaatatcggccttctcctgttcctggtgatgttcatctatgccatttttgggatgtctaacttcgcctatgttaagcgcgaggttgggattgacgacatgtttaactttgaaactttcggaaatagcatgatctgcctctttcagattacaacaagtgccggatgggacggactgctggcccctatcctgaattccggaccacccgattgcgacccagataaggaccatcctggcagctctgttaaaggggattgtgggaatcctagcgttggaatattcttttttgttagttacattatcattagcttcctcgtggttgtcaacatgtatatcgctgtgattctggagaacttcagtgtggctacggaagagtccgcggagccactctccgaagacgactttgagatgttttacgaagtgtgggaaaagtttgaccctgacgcaacgcagttcatcgaatttgctaaactgtccgattttgctgacgccctagacccacccctgcttatcgctaaacctaacaaagtgcaactgattgcaatggaccttcctatggtcagtggggatcggatacattgtctggacattctattcgcttttacaaaacgggtcctgggggagtctggcgaaatggacgcgcttcgcattcagatggaagaaagattcatggcgagcaacccctccaaggtgtcatatgaacccatcacaaccactctgaaacgcaagcaagaggaggtatctgcgatcatcattcaacgtgcctacagacggtacttgctgaagcagaaagtgaaaaaagtttcgagtatatacaagaaggacaagggaaaagaatgcgatggcacgcccatcaaagaggatactctgatcgacaagctcaatgagaactctactcccgagaagacggacatgacgcctagcactacctcgccaccatcttatgacagcgtgacaaaaccggagaaagagaagtttgagaaagataaatctgaaaaggaagacaagggaaaagacattagggagtcaaagaagta

SEQ ID NO: 240883 - DNA, 1512 bp, synthetic construct
  misc_feature 1..1512: note = Description of Artificial Sequence: Synthetic coding sequence
  source 1..1512: mol_type = other DNA
atggctcagtctgtcctggtaccacccggtcccgattctttcaggtttttcacaagagaaagccttgccgcaatcgaacagcgcattgcggaagaaaaggccaaacggcctaaacaagagcggaaggatgaagacgacgaaaacggtcctaaaccaaactccgacctggaggccggaaagagtctcccgtttatttatggtgacatcccccctgaaatggtgtccgtgccccttgaggacttagatccgtattacattaataagaaaaccttcattgtgctgaataaaggaaaggccatctcgaggttctccgcaaccccagcattgtatattcttaccccctttaatccaatcagaaaactggctatcaagattctggtgcattccctgttcaacatgctcatcatgtgcactatcctcacgaactgcgtgtttatgacaatgagcaatcccccagattggactaagaatgtggaatataccttcacagggatctacacttttgaatctctgattaaaatcctagcacggggattctgcctcgaagatttcacattcttaagagacccttggaactggctggatttcaccgtgataacatttgcgtacgtcaccgagttcgtcgacctgggaaacgtctccgccctgcgcacgttcagagtgctgcgggctctgaaaacaatatcagtgatcccaggactcaaaactatagtgggagccttaattcagtctgtgaagaagctgagcgatgttatgattctgactgtgttctgtctgtctgtgttcgcccttattggcttgcagctgttcatgggcaatctgagaaataagtgcctgcagtggccacccgataactcatctttcgaaatcaatatcaccagctttttcaacaattcactggatggcaacggcacaactttcaacagaacagtttctattttcaactgggatgaatacatagaagacaaatctcacttctacttcctcgaggggcagaacgacgcattgctgtgtgggaatagtagcgatgctggccagtgccccgaagggtacatatgtgtgaaagccggacgtaatccgaattacggctatacctcctttgatactttttcctgggcatttctgagcttatttcgcctcatgacacaggacttctgggaaaacctttatcaactgactcttcgcgcagccggtaagacgtacatgattttttttgttctggtgatttttctgggaagtttctacctgattaacttgatactggccgttgtcgccatggcatatgaagagcagaaccaggccaccctagaggaagccgagcagaaagaggccgaattccagcagatgctggagcaactgaaaaagcagcaggaagaggcccaggcggctgccgcagcagcctctgcggaaagcagagatttttctggtgcaggcggaattggggtcttctcagagtcatcgtccgtcgccagcaagctcagctctaagagcgagaaggaactgaaaaattag

SEQ ID NO: 240884 - DNA, 648 bp, synthetic construct
  misc_feature 1..648: note = Description of Artificial Sequence: Synthetic coding sequence
  source 1..648: mol_type = other DNA
atgcaccgcgatgcttggctgccgaggccagctttttccctgaccggattgtcgttgtttttcagccttgtcccaccgggaagatcaatggaagtcacagtcccagctaccctgaatgtgctgaacggatcagatgccagactgccctgtacctttaactcctgctatactgtgaatcacaaacaattcagtttgaactggacataccaagaatgtaacaactgtagtgaagaaatgtttctccagttccggatgaagattatcaatttgaagctggagcgctttcaggatcgggtggaattctcaggtaacccctccaaatacgacgtgtctgtgatgttgcggaacgtgcagccagaggatgagggcatctacaattgctacatcatgaatcctccagaccgccacagagggcacggcaaaattcaccttcaagtgctgatggaagagcccccagagcgcgattctaccgtggctgtcatcgtgggcgcatccgtgggaggttttcttgcagtcgtcattctggtcctgatggtggtgaaatgcgtccgcagaaaaaaggagcagaagctgtccacagacgacttaaaaactgaggaagaaggcaaaacggacggcgagggaaatcctgacgatggagcgaaatag

SEQ ID NO: 240885 - DNA, 6003 bp, synthetic construct
  misc_feature 1..6003: note = Description of Artificial Sequence: Synthetic coding sequence
  source 1..6003: mol_type = other DNA
atggcgcaggcacttttggttccgcctggacccgaaagctttcggttgtttaccagagaatcactggccgcaatagaaaaacgggctgctgaagagaaggccaaaaagcctaagaaagaacaggacaacgacgatgagaataaacctaaacccaactcagacttggaagctggcaagaaccttcctttcatttatggtgatattccacctgagatggtgtctgaacccttggaggacctggatccatactacattaataagaagacgttcattgtgatgaacaagggtaaggcaattttccgattctcagcaacctctgcgctctatattctcactcccctcaatcctgtgagaaagatcgcgatcaagatcctggttcacagccttttttccatgttgatcatgtgtaccattttaacgaactgtgtgtttatgactctgagcaacccaccagactggactaagaacgtcgagtacacttttacaggtatttatactttcgaatctctcattaaaatcctcgccagagggttctgcctggaggattttacatttttgcgagatccatggaactggctcgacttctctgtgattgttatggcttatgtcactgagttcgtcgatctaggaaatgtgtccgctctgcgaaccttcagggtgctcagggcccttaagacaatatctgtcatccccggattgaagacaatcgtcggggctttgatccagagtgtcaaaaagcttagtgacgttatgatactcaccgtgttctgtctctctgtgttcgcattaattggattgcagctgttcatgggcaatcttcggaataagtgtttgcagtggcccccatctgattccgccttcgaaaccaacactacgtcctacttcaatggaaccatggactcaaatggaactttcgtgaacgtcactatgagtacctttaattggaaggattatatcggagatgatagccatttctacgtcctcgacggccaaaaggatccgctcctgtgtgggaatgggtctgacgctggccagtgccccgaaggctacatatgcgtcaaagctggtagaaaccctaactacggatatacttcctttgacaccttctcttgggcgtttctttctttattcaggctgatgacccaggattactgggagaacctgtaccaactgaccctgagggccgcaggaaagacatacatgattttctttgttttggtcatttttcttggaagcttctatttggtgaatcttattcttgcggtggttgccatggcctatgaagaacagaatcaggcgacactggaagaggccgagcagaaagaagctgaatttcagcagatgctggaacagctcaagaaacagcaggaggaagcacaagcagtggctgctgcaagcgccgcaagccgtgatttttctggaatcggcggactcggtgagctgttggagtctagcagtgaggccagtaagttgtccagcaagtctgccaaagaatggcgcaaccggaggaagaaaaggaggcagagagaacatctggaggggaacaataaaggcgaaagggacagctttccgaagagcgagtccgaagattccgtgaaacgctcttcattcttgttttctatggatgggaacaggttgactagcgataagaagttctgtagtccccaccaaagcttgcttagtattaggggctcactgtttagccctcgcagaaactcgaaaacatctatcttcagcttccgaggccgagcgaaggacgtgggttccgagaatgattttgctgacgatgagcactctacatttgaggattcggaaagtaggcgggattctctctttgtgccccatagacacggcgagaggcgcaattcaaacgtgtcacaggcatcgatgtctagcagaatggtgcctggactgccagccaacggaaaaatgcatagtactgtggactgcaacggggttgtcagcttagtggggggaccatctgcccttacgtcacccactggccaactcccgcctgaaggtaccaccaccgagaccgaggtgaggaagagaaggctaagttcatatcagatttcaatggaaatgttggaggacagtagcggtaggcaacgggcagtctccattgctagtatcttaaccaacactatggaagagcttgaggagtcgagacagaagtgccctccttgttggtatagatttgctaacgtatttcttatctgggactgctgtgatgcctggctcaaggttaagcacctggtaaatctcattgtgatggaccccttcgtggacttggcaattacaatctgcatcgtactgaacaccctttttatggctatggagcactacccaatgaccgaacagttcagctcggtgttgactgtggggaacctggtgttcacaggtatctttacagctgagatggtgttaaagattattgccatggatccctactactattttcaggaaggatggaacatctttgacggcataatcgtcagcctctcactgatggagctcggcctgagcaacgtggagggcctgagcgttctgcggtcttttcgcctcctgcgagtcttcaagttggctaaatcctggccaaccctgaacatgctaattaaaatcataggaaactccgtgggtgcattaggtaacctcacgctagtcctagccataatcgttttcatttttgcagtggttggtatgcaattgttcggaaagagctataaagaatgcgtgtgtaaaatcaatgacgactgcacactacctcgctggcacatgaacgacttctttcacagtttcctcatagtattccgcgtgctgtgtggcgaatggattgagactatgtgggattgtatggaagtagctggacaaaccatgtgcctgattgtcttcatgctagtgatggtcattgggaatctggtcgtgcttaatttgtttctggctctgctgctgtccagtttctcatctgacaatctggcagctacagatgacgacaacgagatgaataatctccaaatcgcagtgggtcgcatgcagaaagggattgactacgtgaagaataagatgcgcgagtgtttccagaaagccttttttcgaaagccgaaggtgattgagattcacgaaggaaataagatcgatagctgcatgtctaataatactggaatcgagatctctaaggagctcaattatctgcgggacggtaatggcaccacatctggagttggtaccggttccagcgtcgagaagtatgttatagatgagaatgactatatgtcatttataaacaacccatccctcactgtgacggtgccaatcgcagtgggtgagagtgattttgagaatcttaacactgaggaattcagctctgagtctgaactggaggagtctaaagagaagctgaacgcaacttcttccagtgaagggtcaaccgtcgatgtggtgttaccccgagaaggagagcaggccgaaacggagcccgaagaggatctaaagccagaggcatgttttaccgagggatgtattaagaaattccctttttgtcaggtaagcacagaagaagggaagggaaagatttggtggaatctgcgcaagacctgctactccatcgtggagcataactggttcgaaacgttcatcgtattcatgatactcctgtcctccggtgccctggctttcgaagatatctatattgagcaacgaaagacgataaagacgatgctggagtacgctgacaaagtgttcacgtacatttttattcttgagatgctgctcaaatgggtagcctatggctttcagacatacttcactaacgcctggtgttggttggactttctaatcgtggacgttagtctcgtgagcctggttgctaacgccctcggatatagcgagttgggcgcaattaaaagccttaggacattgcgggcactgaggcctctacgcgcactgtctaggtttgagggaatgcgtgtcgtcgtcaacgccctggttggcgcaattcccagtattatgaacgtgttactggtgtgcttgatattttggcttattttctcaataatgggagtgaatctgtttgccggtaagttttaccactgcgtcaacatgactacaggcaacatgttcgacatctccgacgtaaacaatctaagcgattgccaagcgctcgggaagcaggctcgatggaaaaacgttaaagtaaatttcgataatgttggtgctggctacctggccttactccaggtcgctacattcaaagggtggatggacataatgtatgccgctgtggactccagagatgtgaaactgcagcctgtttacgaggaaaatctgtacatgtatctctacttcgtcatctttatcattttcggtagttttttcacattaaatctcttcatcggggtgataattgacaatttcaaccagcagaagaagaagtttggcggacaggacatcttcatgaccgaggagcagaagaaatactacaacgcaatgaaaaaactaggatccaaaaaaccccagaagcctattcctcgaccggcaaacaagtttcagggaatggtgttcgacttcgtgacaagacaggtttttgatatatccattatgatcctgatttgtctgaacatggttaccatgatggttgagactgacgatcaagggaaatatatgacactggttctgtcccgtatcaacctggttttcatcgttctcttcaccggcgaatttgtgctcaagctggtctctctccggcactattacttcacgatcggctggaatatatttgattttgtcgtcgttattctgtccattgtgggtatgtttctggccgagatgattgaaaaatattttgttagtcctactctattcagggttattcgccttgcacgaatcggcaggattcttcggctaatcaagggggctaaaggcatcaggactctactatttgccctgatgatgagcctgcccgctctatttaatattgggcttctcctctttttggtaatgttcatctatgccatcttcggaatgagcaacttcgcatatgtcaagaaggaagctgggatcgatgatatgtttaattttgagacgtttgggaattctatgatctgtctattccagatcacaaccagcgcgggatgggacgggcttctggccccaatcttgaactcggccccacccgattgcgaccccgacaccatccatccgggttcctctgtgaagggagactgtggcaacccgagcgtggggatcttctttttcgtgagctatattattatcagttttctggtggttgtgaacatgtacattgcagttatccttgagaatttttcagttgccactgaagagagtgcagagcccctgtcagaagacgacttcgaaatgttctacgaagtttgggagaagttcgatccagatgccacccagtttattgagttcagtaaacttagtgattttgctgccgcattggatcctccactcttgatcgccaagccgaataaggtgcaactcatagcaatggatctgcctatggttagcggagatcgaattcattgcctggatatcctttttgcctttacgaagcgggttttgggcgaaagtggcgagatggatgctctgcgcatccagatggaagaccgctttatggcctccaatccgagtaaagttagctacgagccaatcactactaccctcaagaggaaacaggaggaagtcagcgccgcaatcatacaacgcaacttccgctgctacctgctaaagcagcggctgaagaatataagcagcaactataataaggaggctattaagggcaggatcgatttgcctatcaagcaggatatgatcattgataagctgaatggcaattcaacacccgaaaaaacagacggaagctcgagcactaccagtccgccttcttacgacagcgttaccaagcctgataaagaaaaattcgagaaggacaagccagaaaaagagtctaagggcaaagaagttcgcgagaaccagaaatat

SEQ ID NO: 240886 - DNA, 6002 bp, synthetic construct
  misc_feature 1..6002: note = Description of Artificial Sequence: Synthetic coding sequence
  source 1..6002: mol_type = other DNA
atggcccaagcccttttggtccccccaggacctgaatccttcagactgttcactagagaaagcttggctgctatcgagaaacgcgctgcggaggagaaggctaaaaagcctaaaaaggagcaggacaacgatgatgagaacaaacctaagcctaatagcgaccttgaggccggtaaaaatctcccatttatttatggagacataccgcctgagatggtttcagagccactggaggacctcgatccttattacatcaataaaaaaaccttcattgtgatgaataaaggaaaggccattttcagattcagtgctactagtgctctgtacattttgacccctctgaatcccgtacggaagattgcaatcaagatactcgtgcactccttgttcagcatgctgattatgtgcaccatccttacgaactgcgtgtttatgacactctcgaatcccccagactggacaaagaatgtggagtacacgttcaccggtatatacacgtttgagtctctgattaaaatattggcccgaggattctgcctagaggactttacctttttgagagatccttggaattggttggatttctccgtgattgtgatggcttatgtaactgagtttgtctccctggggaacgtaagtgccctacggacgttccgggtgctcagagcgctgaaaactatctctgtcattcccggattgaaaaccattgtgggagcactcatacagagtgtgaagaaactgagcgacgtcatgatcctcactgtgttttgcctttcagtgttcgcgctgattggcctccagctctttatgggaaacttgcgtaataagtgtttacaatggcccccttccgattcagcctttgaaacaaacaccaccagctattttaacggaacaatggactctaacggtactttcgtgaacgtgaccatgtcaacatttaactggaaggactacatcggcgacgactctcacttttatgtcctggacggccagaaggatcctctcctctgtggcaatggcagcgacgccggtcagtgtcccgagggctatatttgcgtgaaggcaggcagaaaccccaactatggatatacaagtttcgatacatttagttgggcgtttctatccttgtttcggctgatgacacaggactactgggagaacctgtaccagttgaccctgcgagccgctggtaagacatacatgatctttttcgtcctggtgattttcctgggatcattctacctggtgaacctgattttggctgtcgttgcaatggcctatgaggaacagaatcaggccactctggaagaagcagagcaaaaggaggccgagtttcagcagatgctggagcaattgaagaagcaacaggaggaagcacaagcagtggctgccgcttctgccgctagccgtgatttttccggaatcgggggactgggtgaattgttggaatctagctcagaggcatccaagctcagcagtaaaagcgcaaaggagtggcggaaccgacggaagaagagacgacagcgtgaacacctggagggcaataacaagggcgaacgggactctttccccaaaagcgagtccgaggactccgtcaagaggtccagcttcctgttcagcatggacgggaaccggcttacaagcgacaaaaaattctgtagccctcaccaatcacttctgagcatccggggatctttgtttagcccacgacggaattccaagaccagtatcttttcctttcgagggagagccaaagacgtgggaagcgagaacgactttgctgatgacgagcattccacttttgaggacagtgaatctaggcgagactctctattcgtcccacatcgccacggtgaaagacgtaattccaacgttagccaggccagtatgagtagccgcatggtgcctgggctccctgcaaatggcaaaatgcactcaacagtcgattgcaatggggtggtgagcctggtggggggaccatccgcattaacgtccccaaccggtcagctgcccccagagggaacgactaccgagaccgaggtccgcaagagaagactgtccagttaccagatctctatggaaatgctagaggatagcagcggccgacagcgcgctgtctctatcgcttcaatcctgactaacaccatggaagagcttgaagagtcgcggcagaagtgcccaccttgctggtatcgattcgcgaatgtgttcctgatctgggattgttgcgatgcctggcttaaagttaaacacctcgtgaatttgatcgtgatggatccctttgtagacctggctataacaatttgcattgttctcaacactctgttcatggcaatggaacactatcccatgaccgaacagttttcttcagtgctgaccgttggaaacctcgtctttacagggatcttcacggcggagatggttctgaaaattattgccatggatccatactactattttcaggaagggtggaatatcttcgatgggatcatcgtgtcactgtctctcatggaactgggcctgagcaacgtcgaggggttgtcagttctgcgaagcttccggctgttaagggtatttaagctcgcgaaaagttggccaactctgaatatgctgataaagatcatcggcaactcagtaggagcactgggaaatctaactttggtgctagctatcatcgtgtttatattcgcagtcgttggaatgcaactctttgggaaaagttacaaggaatgtgtgtgtaaaattaatgatgattgcactttgccacggtggcacatgaatgattttttccatagctttctcatcgtgttccgtgtgctgtgtggcgagtggatcgagacgatgtgggattgcatggaggtggccggtcagactatgtgcctcattgtctttatgctggtgatggtgattggaaatctcgtggtgctaaatctctttcttgcactcctgcttagctctttctcaagcgacaatctggccgctaccgacgacgacaacgaaatgaacaatcttcagattgctgtcggccgaatgcagaagggcatagattacgtaaagaataaaatgagggaatgcttccaaaaggcgtttttccgaaagcccaaggtgatcgagatccacgagggcaataaaatcgatagctgtatgtccaacaatacgggcatagaaatctcaaaggagctgaattacttgcgggacggtaatggaaccaccagcggcgtaggaaccggctcctctgtcgagaaatacgtgattgacgagaatgattacatgtccttcatcaataatccatccctcacggtgaccgtgccgattgctgtcggggagtctgatttcgagaatctcaacaccgaggaattctcgtctgagtccgagcttgaagaatctaaggagaagctcaacgctactagtagttccgaagggtctaccgttgatgttgtgctcccccgtgaaggggaacaggccgagactgagcctgaggaagatctgaagccggaggcatgcttcacagaggggtgtataaagaagttccctttctgtcaggtgagcaccgaggaagggaagggcaagatctggtggaacctgcgaaagacatgttatagcatcgtggaacataactggtttgagaccttcatagtctttatgattctgctgagctccggtgcgttggcgtttgaagacatatacatagaacagcggaagacaatcaaaacaatgctcgaatacgcggacaaggtctttacgtatatcttcatactggaaatgctcctgaaatgggtggcttacggtttccagacctattttaccaatgcatggtgttggttggacttcctgattgtagacgtgagtcttgtgagtctggtagccaacgcgttgggctattccgagttaggagccattaagtcgttgaggactctgagggctctccggcctttgagggcacttagtcgttttgaaggaatgagagttgttgtcaacgctctggtgggcgctataccttcaatcatgaacgtgctgctcgtttgcttaattttctggctgatcttcagcatcatgggtgtcaacctcttcgctggaaaattctatcactgcgtcaacatgacaaccggaaatatgtttgacatctcagatgtcaacaacctttccgattgccaggccctgggaaaacaggctcgttggaagaatgtgaaagtgaatttcgataatgtgggagccggatacctggctctgctccaggtcgcaacatttaaagggtggatggacatcatgtacgccgctgtcgacagtagagacgtaaaactccagcctgtctacgaggaaaacctgtacatgtatttatattttgtgatctttatcatattcggctcattttttacactgaacctttttataggagtgataatcgacaatttcaaccagcagaagaagaaattcggaggccaggatatctttatgacagaagaacaaaaaaaatactataacgccatgaaaaagcttggcagcaaaaaaccccagaaacccattcctcgcccagcaaacaagtttcagggcatggtgtttgattttgtgacacggcaagtgtttgacatttctatcatgatactcatctgcctcaacatggtgaccatgatggtggagacagacgatcagggtaagtacatgactttggttctctcccggattaatcttgtttttatcgttttatttaccggcgagttcgttctgaagttggtttccctgcgtcattactactttaccattgggtggaacatatttgactttgtggtagtgatcctctcaattgtgggtatgtttctggccgagatgatagagaaatactttgtgagccccacattgtttagggtcattaggcttgcgagaattggcaggattctcagattgattaagggtgccaaagggatccgaactctgctttttgccttgatgatgagtctgccagcgttgttcaacatcggattactgctgttccttgtgatgtttatttacgctatcttcggcatgtctaacttcgcctacgtgaaaaaagaggccggaattgatgacatgtttaactttgagaccttcggcaactcaatgatctgcttattccagataactacatcagccggttgggacgggctactggcccctattctcaactccgccccacctgattgtgatccagacactattcatcccggatcttccgtaaagggcgactgtggaaatccgagcgtgggtatattctttttcgtgtcctacataatcatctctttcctcgtggttgtgaacatgtacattgccgttattcttgagaatttttcagtggctacggaggagagcgctgaaccgctctctgaagacgacttcgagatgttctacgaagtgtgggagaagtttgatcccgatgcgacacagttcatcgagtttagtaagctcagtgactttgccgctgctctggatccaccccttctgatagcaaaacccaacaaagtccagcttattgccatggatcttccaatggtgtccggggataggatccactgtctcgatattctgttcgcatttaccaagagagtcttaggagagtcaggtgagatggacgctctgagaatccagatggaagacaggtttatggcctcaaatcccagcaaggtctcctacgaacccataacgacaacactgaaacgcaagcaggaggaggtgtccgcagcgattatccaacgcaatttccgctgttatttactgaagcagcgtcttaagaacatttcaagcaactataacaaagaagccatcaaaggtcggatcgaccttccgattaagcaagacatgatcattgacaaactgaacggcaattcaacaccagagaagactgacggctcttcaagtaccacgagtccacctagttatgattctgtgactaaacccgataaggagaaattcgagaaggacaaaccagaaaaggagagtaagggtaaggaagtacgggaaaatcagaagta

SEQ ID NO: 240887 - DNA, 5855 bp, synthetic construct
  misc_feature 1..5855: note = Description of Artificial Sequence: Synthetic coding sequence
  source 1..5855: mol_type = other DNA
atggcacaggccctgttggtcccaccaggccctgaatctttcaggctgttcaccagggagagtctggctgccattgagaaaagagcagcagaagagaaggcaaagaaacctaaaaaggagcaggataacgacgatgagaacaagccaaaacctaacagcgatctagaagctgggaagaacctgcccttcatttacggcgatattccccctgagatggtgtccgagcccctcgaggaccttgacccatactatatcaacaaaaaaactttcattgtgatgaataagggaaaagccatatttcgattctcggccacaagcgcactctatattctgactcctctgaatcccgtgcggaagatagccataaaaatactcgtgcacagtctattctctatgctcatcatgtgcacaatcctgactaattgtgttttcatgactttgtctaacccgcctgactggaccaaaaatgtcgagtacaccttcaccggaatctacaccttcgaatcattgatcaaaattctggcgcgagggttctgtttggaggacttcacattccttcgcgatccgtggaactggcttgatttcagtgtgattgtgatggcttacgttacagaatttgtcagtctcgggaatgtctctgcacttcggaccttccgcgtcctgcgcgcactgaaaaccatttccgtgatccccggactaaagacaatcgtcggagctcttatacagagcgtgaagaaactctccgacgtgatgattttaacagtgttttgcctgtctgtgttcgcgttaattgggttacaactttttatgggaaacctgcgaaacaaatgtctgcagtggcctccttcggattcagcctttgagacaaatactacaagctattttaatggaaccatggactccaatggcacgtttgtgaacgtgactatgtctactttcaactggaaagattatattggagacgattcgcacttctacgtgctcgacggccaaaaagatcccctgctatgtggtaacggcagcgacgctggacagtgccctgaagggtacatctgtgtgaaggctgggaggaacccaaattacggctacacgtcgttcgatacgttctcatgggcttttctatctctgtttcgcctcatgacccaggattattgggagaatctttatcagctgacactgagggcggcaggtaagacatacatgatattttttgtgctggtgatcttcttggggtctttctacttagttaacttgatcctggctgttgtggcaatggcatatgaagaacagaatcaggccaccttggaggaagcggaacagaaggaggcagagttccaacaaatgctggaacaactcaaaaagcagcaggaagaggcccaggcggtggctgccgcatctgctgcatccagagacttttccggaatcgggggtcttggagagctcctagagtcttcttccgaagcttctaaactgagctccaagtccgccaaggaatggcggaataggagaaagaagagacgacagcgcgagcatctggaaggaaacaacaagggcgaaagggacagcttccctaagtcagagtccgaggattcagttaagcgtagctcttttcttttctctatggatggaaaccgtctgactagcgataaaaaattctgctccccccaccagtctctgctttccattcgaggctcactctttagcccaaggcggaattctaaaacctccattttctccttcagagggagagccaaggatgtcggaagtgaaaacgatttcgccgatgatgaacacagcactttcgaggactcagagagccgtcgcgacagtcttttcgtgcctcacagacacggagaaagaagaaacagtaacgggaccaccactgagaccgaagtgcgtaagagaagactctcttcctaccagataagtatggaaatgctcgaagatagtagtgggcgtcagcgggcagtctcaatcgcaagcattctgacgaatacgatggaagagctggaagagtcgcgccagaagtgcccaccttgttggtacagattcgcaaacgtcttcctgatctgggactgctgcgacgcatggctgaaggtgaagcatttggtgaatctgatcgtgatggatccattcgtagacttagcgataactatttgcattgtcctcaatacacttttcatggcaatggaacactatcccatgactgagcagttttcatcagtgctgactgtgggcaatcttgtgttcaccggcatattcactgcagaaatggtactcaaaatcatagccatggatccgtactactactttcaggagggatggaatatatttgatggcatcattgtatctttatcacttatggagttgggcctgtctaacgtagaaggactttctgtcctccggtctttcaggctgctccgggtcttcaagctagccaaatcctggccaaccctgaacatgcttataaaaatcatcggaaatagcgttggcgctttagggaacctgactttggtgctggccattatagtttttatcttcgctgttgttggaatgcaactcttcggtaagagctataaggaatgcgtgtgtaagattaatgacgactgcactctcccaaggtggcacatgaacgatttttttcattctttccttatcgtctttcgcgtgctgtgtggtgagtggatcgagacaatgtgggattgtatggaagtggctggtcaaacaatgtgcctgatcgtatttatgttggtgatggtaatcggcaacctggtagtgctaaatctgttcctcgccctgttgctgagctctttcagcagtgataatctggctgcaaccgacgacgacaatgagatgaataatctgcagattgccgtggggagaatgcagaagggtatcgactacgtcaagaacaaaatgcgagagtgctttcaaaaagcattttttaggaaacctaaggtgatcgagatacacgagggcaacaaaatagacagctgcatgtccaacaatacaggaatcgagattagcaaagagttaaattatctgagggatggtaacggcacgacttccggggtcggcactggaagttccgtggagaagtacgtgattgatgagaacgactatatgtcattcatcaataacccatcactcacggttaccgtgcccatcgccgtcggtgagtccgactttgagaacctaaacacagaggagttctcttccgaatctgaactcgaggaaagtaaagagaaactcaacgcaaccagctcctccgagggatcaacagtcgacgtggttctgcccagagaaggagaacaggccgagaccgaacctgaagaggatttgaagcctgaagcttgcttcacagaaggatgcatcaaaaagttcccgttctgccaggtgtctaccgaagaagggaagggaaaaatctggtggaacctccgaaaaacgtgttatagcatcgttgaacataactggttcgagacattcattgtatttatgatactcctatcttccggcgcattggccttcgaggatatctacattgaacagcgcaaaacaattaagaccatgctggaatacgccgataaagttttcacatacatttttattctggagatgctcctgaagtgggttgcgtatggcttccagacatatttcaccaacgcttggtgttggctcgattttcttatagtggatgttagccttgtctccctggtggctaacgctctgggttactccgaactgggagctattaagtctcttaggaccctaagagctttacgccctttgcgcgctcttagcagattcgagggaatgcgtgtggtggtaaatgctctggttggagcaataccttccattatgaacgtgctgctggtgtgcttgatcttctggctgatattctctattatgggagttaatctgttcgcaggaaaattctaccattgcgtgaatatgacaacagggaacatgttcgatatttcagacgtgaataacctaagcgattgtcaagcccttggcaagcaggcccgatggaagaatgtgaaagtcaatttcgataatgttggtgctgggtacctcgccctactccaggtggctacgttcaaaggctggatggacataatgtacgccgctgttgactcccgcgacgtgaagctgcagcctgtctatgaagagaacctgtacatgtacctgtactttgttatctttattatttttggatctttcttcactctcaatcttttcatcggggtcatcatcgacaactttaaccagcaaaaaaagaagtttggcggtcaagatatttttatgacggaagaacagaaaaagtattataatgccatgaagaaacttgggagtaagaagccacagaaacctataccgcgtcctgcgaacaagttccagggcatggtattcgactttgtgacacgccaggtcttcgacatttctatcatgatcctgatttgtctgaatatggtgaccatgatggtcgaaaccgatgaccaaggcaagtacatgaccctggtgctctccaggattaatctggtattcatcgtgctgtttaccggcgagtttgtgctgaaactcgttagcttgcgtcactactatttcaccatcggatggaacatcttcgattttgtagttgtaatcctcagcattgttggaatgttcctggccgagatgatcgaaaagtactttgtgagcccaactctgtttcgagtgatcaggttggctcggatcggcagaatcctgcgcttaataaagggtgctaagggaattcgcaccctgttgtttgccctaatgatgagtcttcctgctcttttcaacataggactccttctctttcttgtgatgttcatttatgctatctttggaatgagtaatttcgcctacgtgaaaaaggaggccggaatcgatgacatgttcaacttcgaaaccttcggtaacagcatgatctgtctcttccaaatcaccacctcggccggttgggacggactgctcgccccaatcctgaattcagcccctcccgactgcgatccagacaccattcaccctggatccagtgtgaagggcgattgcgggaacccaagtgtcggaattttctttttcgttagttatattatcatctcctttctggtggtcgtcaacatgtacattgccgtcatactcgagaacttctctgttgcgactgaagagtccgctgaaccgctgagcgaagacgattttgagatgttctatgaagtttgggaaaaattcgaccccgacgccactcagtttatcgaattcagcaaactgagcgacttcgctgctgcactcgatccgcctttgctgatagcgaaacctaacaaagtgcaactgatcgccatggatctccctatggtcagcggcgataggatccactgcctggacattctgttcgcctttacaaagcgagtcctgggggaatctggcgagatggacgccctgcgcattcagatggaagataggttcatggcatcaaatccctccaaggtcagctacgaaccaattacaacaacacttaaacgaaaacaggaggaagtctccgccgcaataatccaaaggaatttcagatgttacctgcttaagcagaggttgaaaaacatatccagtaactataataaggaagccatcaaagggcgaattgacctgccgattaagcaggatatgataattgataagcttaatgggaactccactccggagaagacagatggttcctcttccaccacctcaccgcctagctatgatagtgttaccaagccagataaagagaaatttgaaaaagacaaacccgagaaggaatcgaagggtaaagaagtccgcgaaaaccagaaata

SEQ ID NO: 240888 - DNA, 4095 bp, synthetic construct
  misc_feature 1..4095: note = Description of Artificial Sequence: Synthetic coding sequence
  source 1..4095: mol_type = other DNA
atggcccaggccctgctcgtgccacccggtcccgaaagctttcgactgttcacccgcgagtcgctggcggcaattgagaagagagctgcggaagagaaggcgaagaaacccaagaaggagcaagacaacgatgatgagaataaacctaagccgaattctgatcttgaagctggaaaaaatctgccattcatatatggcgacattccaccggagatggtctcagaacccctggaggacctcgacccttactatattaataagaagacgtttattgtgatgaacaaaggaaaagccatcttccggttttcggcaactagtgccctgtacatcttgacccctttaaacccagtgagaaagattgcaattaagatcctcgtgcattccttgttcagcatgctcattatgtgtacaatcctaaccaattgcgtcttcatgaccctttctaatcccccagactggacgaaaaacgtcgagtacacttttactggcatctatacctttgagtcattaattaagattctggcccgaggcttctgtctggaggatttcactttcttgcgagacccctggaattggttagatttctccgtgatcgtgatggcttatgtcaccgagttcgtcgatttggggaatgtttcagctctgaggacattccgcgtactgagagcccttaagacaatctcagtcatccccggtctgaaaactatcgtgggagctttaattcagtctgttaagaaactgagcgacgtgatgatactcactgtcttctgcctgagcgtatttgcccttatcggattacaattgttcatgggcaacctgagaaacaagtgtctccagtggccgcctagcgattcagcgtttgaaaccaatacaacctcctatttcaacggaaccatggacagtaacggcacttttgttaatgtgacaatgtctacttttaattggaaagactatatcggcgatgacagtcacttctatgtgcttgatggccagaaggaccccttactgtgcggaaatggctctgacgccggtcagtgtccagaaggctacatttgtgtgaaggccggtcgaaatcccaactatggatacacaagcttcgacactttctcctgggccttcttgtctttattccgacttatgacccaggattactgggaaaatctgtaccagcttactctcagagctgctggtaagacttacatgatattctttgttttggtcatatttctgggctcattttacttggtcaacttgattctagcagtcgtcgcgatggcttacgaggaacagaatcaggccaccctggaggaggctgaacaaaaagaggctgagttccagcaaatgttggagcagttaaagaagcagcaggaagaggcccaagcagtcgctgcggctagcgccgcaagcagggatttctcgggcatcgggggattgggcgaactgctggagagcagctccgaggcctccaagctgtcatctaagagcgcgaaagagtggcgcaatcggaggaagaaacggagacagagagagcaccttgagggtaacaacaagggggaacgcgactcatttcccaagtctgagagtgaggactcagtgaagcggagctcctttctcttctcaatggacgggaaccgcttgacctcagataaaaaattttgttctccacaccaatcacttcttagcatccgaggttcattgttcagcccaagacggaacagtaaaacaagtatctttagctttcgaggacgggcaaaagacgtggggagcgaaaacgactttgctgacgatgagcactccacgttcgaggactcagagagcagaagggattccctattcgtcccccaccgccacggcgagaggcgtaacagtaacggcacaactactgagactgaggttcgcaagcgccgattgtcttcctaccagatctctatggagatgctcgaagatagctcggggcgtcaaagagccgtttcaattgcctccatcctgaccaacaccatggaagagttggaggagagtcgccagaaatgccctccgtgttggtacagatttgccaatgtgttccttatctgggactgctgtgatgcttggctgaaggtgaaacatttagtcaatctcatagtgatggacccattcgtcgatctcgctatcaccatctgcattgtgctgaacacactcttcatggccatggaacattaccctatgacagaacagttcagtagcgtgctcacagtcggcaacctggttttcactggaatctttactgctgagatggtgcttaagataatagccatggacccctactactactttcaagagggatggaatatctttgacggtataattgtctccctttcactcatggagctgggactcagcaacgtggaagggctaagcgtgttgcggagctttcgtctgttacgcgtcttcaaattggctaagagctggcccaccttgaatatgttgattaaaattatcggtaactccgtcggggcactcgggaacctcacattggtgttggccattattgtctttatattcgcagtcgtggggatgcagctgttcgggaaaagctataaggaatgtgtttgtaagatcaacgatgattgcaccctgccccgttggcatatgaatgacttttttcactcgtttctgatcgtatttcgcgtgctgtgcggggaatggattgaaacaatgtgggactgcatggaggtggctggccagaccatgtgcctcatagtatttatgttggtgatggttattgggaacctggtagtattaaacctgttcctggcccttctgctgtcatcctttagctccgacaatctcgccgcaacagatgacgacaatgagatgaacaacctacagatcgccgtggggcgtatgcaaaaagggatcgattatgtaaaaaataagatgcgggaatgtttccagaaggcgtttttcaggaaacccaaagtgatcgagattcacgaagggaataagatagattcttgtatgtccaacaacacaggcatcgaaatttctaaggagctgaattatctaagggatgggaacgggacgacgagcggtgtagggactggaagtagtgtcgaaaaatatgtgattgatgagaatgactacatgagctttatcaacaatcctagcctaaccgtaacagtcccaattgccgtgggagagagcgattttgagaatctgaataccgaagagttttcaagcgagagcgagctggaggagtctaaagaaaagctgaacgctacatcctcttccgagggcagtacggtggatgtagtgctgccgcgtgagggcgaacaggcagagactgaacctgaagaagaccttaaacccgaggcgtgcttcaccgagggttgtataaaaaagttcccattttgtcaggtgtctactgaggaaggcaaagggaagatttggtggaacctcaggaaaacctgctactctatagtggagcataactggtttgagacgtttatagtctttatgattctgctgagttctggggctctggcttttgaagacatctatatcgaacagaggaaaactatcaagactatgctggaatacgctgataaggtttttacttatatattcatactggagatgctgcttaaatgggtggcatacggcttccagacctatttcaccaatgcgtggtgctggctggacttcctgatcgtggacgtgtcattggtgtcattggtggccaatgccctcggttactctgaattgggtgctatcaaaagtctccgaacactcagggctttaaggccactgcgtgcactctctaggtttgaggggatgagggtagttgtgaatgccctggtgggagcgatcccctcaatcatgaatgtgttgttggtgtgcctgatcttttggctgattttctccattatgggcgtgaacctgttcgcgggaaaattctaccactgtgtgaatatgacgacaggcaacatgtttgacatctcggacgtcaacaatctgtccgattgccaagccctcggcaagcaggcaagatggaaaaatgtaaaggttaatttcgacaatgtgggtgctggttatcttgcacttctgcaggtctag

SEQ ID NO: 240889 - DNA, 603 bp, synthetic construct
  misc_feature 1..603: note = Description of Artificial Sequence: Synthetic coding sequence
  source 1..603: mol_type = other DNA
atggcccaagcccttctggtcccccctggacccgaatcattccggctattcactcgagaatctttggcagctatagagaagagggccgctgaagagaaggccaagaagcctaagaaggaacaggacaacgatgacgagaataagcccaagcccaatagtgatctggaagcagggaaaaatttgccatttatctacggagacattccgcctgagatggtgagcgagcccctggaagacctggacccctattacattaacaaaaagacatttattgtcatgaacaaaggtaaagctatatttcggttttccgccacttctgccttgtacatccttacccctctgaaccccgtacgcaagatcgccattaaaattctggtgcattctctgttctcaatgttgattatgtgcaccattttgaccaattgcgtttttatgacactgtccaaccctccggattggaccaaaaatgtggaatacaccttcaccgggatatataccttcgagagcttaattaagatactagcacgcggattctgtctggaagatttcacctttctgcgagacccttggaactggctcgatttctcggtcattgtgatgtag

SEQ ID NO: 240890 - DNA, 1452 bp, synthetic construct
  misc_feature 1..1452: note = Description of Artificial Sequence: Synthetic coding sequence
  source 1..1452: mol_type = other DNA
atggtcttcgacttcgtcacccggcaggtatttgatattagcataatgatcctgatctgtctgaatatggttaccatgatggtggagaccgatgatcaagggaagtacatgaccctggtgttgtctcgcatcaaccttgtgtttattgtgctgtttacaggtgagtttgtgcttaagcttgtctctctccgccactactactttacaattggctggaacattttcgatttcgttgtagttatcctctctattgtcggaatgttcctggccgaaatgatagagaaatatttcgtgtctcccacactgtttcgcgtcatccgactagcgagaattggacggatactgcggctcattaagggcgcaaagggaattaggactctcttgttcgccctcatgatgtccctgccggcactgtttaatatcggcttgctgctgttcctggtgatgtttatctacgcaatctttggcatgtctaatttcgcatacgtgaagaaggaggcaggaatcgatgatatgttcaatttcgagacattcggaaatagcatgatttgcctgttccagatcaccactagtgccggatgggatggactgttggcacctatcttaaatagcgcccctccagactgtgatccagataccatccacccaggatctagcgttaagggcgattgcgggaatccgtctgtaggcattttcttcttcgtcagctacatcatcatatcatttcttgtcgtggtgaatatgtatatagctgtcattctggagaacttctccgtcgcgacagaggaatcagcggagccactctcagaggatgatttcgagatgttttacgaagtatgggaaaagtttgatccagacgccacccaattcattgagttctccaagctgagtgactttgccgcagctttggatcccccattgctgattgcaaagccaaacaaggtgcagctgatagcgatggaccttccgatggtgtctggggaccgaatacactgcttagatattctctttgcttttactaaacgggtccttggcgagtccggtgaaatggacgctctcagaattcagatggaagataggtttatggcctcaaacccgagcaaggtaagctacgaacccataacaacaactcttaaaaggaaacaggaagaggtctctgctgcaatcattcagaggaattttaggtgctatctactaaaacaaagactcaaaaacatctccagcaactataataaagaggcgatcaaagggcgtatagatcttccgataaagcaggatatgatcatcgacaagttaaatgggaattcaacacccgagaaaacggacgggtcctccagcactacctccccgccaagctatgactctgtaacaaagccagataaagaaaaattcgagaaggataaacctgagaaggaatcaaagggcaaggaagtacgcgaaaatcagaagtag

SEQ ID NO: 240891 - DNA, 648 bp, synthetic construct
  misc_feature 1..648: note = Description of Artificial Sequence: Synthetic coding sequence
  source 1..648: mol_type = other DNA
atgcctgctttcaatagactttttccactagctagtcttgttctaatttattgggtgagtgtatgcttccctgtgtgcgttgaggtgccgagcgaaaccgaggccgtgcagggcaacccaatgaagctcagatgcattagttgcatgaaacgtgaggaggtggaggctaccactgtcgtggaatggttctacagaccggagggtggaaaagacttcttgatttatgagtaccggaacgggcaccaagaggttgagtcccccttccagggcaggctgcagtggaacggaagcaaggacctgcaggacgtctctatcacagtgctaaatgtgactctgaacgatagtggtctgtatacatgtaatgtttctcgcgagtttgagttcgaggcacaccggccttttgttaagactacgcgcctcatacccctgcgagtcacagaggaggcaggcgaggacttcacatctgttgtctctgaaattatgatgtatatcttgttggtgtttctgactctgtggctcttaattgaaatgatttattgctacagaaaagtatctaaggcggaagaggccgcacaggaaaacgcgagcgactacctggccattccctcagagaacaaggaaaactcagccgttcccgtggaagagtag

SEQ ID NO: 240892 - DNA, 648 bp, synthetic construct
  misc_feature 1..648: note = Description of Artificial Sequence: Synthetic coding sequence
  source 1..648: mol_type = other DNA
atgcccgcttttaacagactcttcccattggctagtctggtgttgatttattgggtctccgtctgctttccggtatgcgtggaagtgccttctgagaccgaggccgtacaagggaaccctatgaagcttcggtgcatatcatgtatgaagagggaggaggtcgaggccaccaccgtggtggaatggttctatcgtcctgaaggaggtaaggattttctcatctacgagtaccgaaatggtcaccaggaagtcgaaagccctttccagggccgtcttcagtggaatggttctaaggacctgcaagacgtcagcatcacggtgctcaacgtgacattaaatgactctggtttatatacctgtaacgtgtctagggagtttgagttcgaggcccaccggccattcgtgaaaacaacgaggttaatacctttgagggtgactgaagaggctggtgaagacttcaccagtgtggtttccgaaatcatgatgtatattttactggtctttctgacgctatggctcttaatcgagatgatttattgttaccgtaaggtgtctaaggcagaggaggctgcccaggagaatgctagcgattaccttgcaataccctctgagaataaagaaaactcagccgtacccgtcgaagagtag

SEQ ID NO: 240893 - DNA, 426 bp, synthetic construct
  misc_feature 1..426: note = Description of Artificial Sequence: Synthetic coding sequence
  source 1..426: mol_type = other DNA
atgcctgcttttaataggcttttcccactggcctcattggtcttgatctactgggtgtctgtgtgtttcccagtatgcgttgaagtaccttcggaaaccgaggcagtgcaaggcaaccccatgaagttacgctgtatctcttgcatgaaaagagaagaggtggaggctactacagtggtagagtggttttaccgaccggaagggggaaaggacttcctgatttatgagtaccggaacggacaccaggaggttgagtctccatttcaggggaggttacagtggaatggatccaaagatctgcaggacgtctccatcaccgttttaaacgtcacattgaacgactccggattatacacctgcaacgtgtctcgggagtttgaattcgaggcacaccggccatttgtcaaaacaacacgtctgatctag

SEQ ID NO: 240894 - DNA, 648 bp, synthetic construct
  misc_feature 1..648: note = Description of Artificial Sequence: Synthetic coding sequence
  source 1..648: mol_type = other DNA
atgccagcctttaaccgactatttccacttgcatcactggtgctgatatattgggtgagcgtttgctttccagtctgcgtagaagtccctagcgagaccgaagccgttcaggggaaccctatgaaactcaggtgtatctcttgcatgaagagagaagaagtggaggctacgaccgttgtcgaatggttctacaggcctgaaggcggtaaggactttctgatatatgagtaccggaacggccatcaggaagttgaaagcccattccagggtagactgcaatggaacggaagcaaagatctccaggacgttagtattaccgtgctgaacgttacgttgaatgatagcggcttatatacctgcaacgtgagccgagaattcgagtttgaggctcaccgtccatttgttaaaaccacgagactaataccactgcgcgtgactgaagaagctggtgaagatttcacctccgtcgtgtctgaaataatgatgtatatactcctggtctttctgacactgtggctgctgatcgaaatgatttattgctataggaaggtcagcaaggcagaggaggctgcacaggagaacgcatcagactaccttgccataccatccgagaataaggaaaactcggccgtcccagttgaagagtag

SEQ ID NO: 240895 - DNA, 5510 bp, synthetic construct
  misc_feature 1..5510: note = Description of Artificial Sequence: Synthetic coding sequence
  source 1..5510: mol_type = other DNA
atggcccgtcctagtctctgcaccctcgtgcccttaggtcccgagtgcctccggccatttactcgggaatctcttgcagcaatcgagcagagggcagtggaagaggaggcacggctccagcgcaacaagcaaatggagattgaggagccggagagaaaacccagaagcgacctcgaggctggtaaaaatctgcccatgatctacggggatccacctcctgaggttatcggcattccccttgaggacctagatccatactacagcaataagaagacatttatcgtcttgaacaagggcaaagccatcttcaggttcagtgctactcctgccctgtatcttttaagcccctttagcgtcgtgcgtaggggggcaataaaggttcttatccacgctctttttagcatgttcatcatgattacaatactcacaaattgcgtgttcatgaccatgtctgatccccctccatggagcaagaatgtagaatacaccttcactggaatttacacatttgaatcgctgataaaaatactagccagaggattctgtgtggatgatttcacctttcttcgggacccttggaattggctcgactttagtgtgataatgatggcttatctgacagagttcgttgacttgggtaacattagcgccctaagaaccttccgggtgctgcgcgctctaaagactattactgtcatccccggattgaaaaccatcgtcggagccctgattcagtctgtgaagaaactgagcgacgtcatgattttaacagttttttgcctttcagtcttcgccctcgttgggcttcagttgtttatggggaatctgagacagaagtgtgtccggtggcctcccccattcaacgatactaacacgacttggtactcgaatgacacatggtatgggaatgatacttggtacggaaatgaaatgtggtatggaaatgactcgtggtatgctaatgacacctggaatagccatgcatcttgggccacaaacgatacttttgactgggacgcctacattagtgatgaagggaacttttatttccttgaagggtctaatgatgctctactgtgtgggaattcttctgatgctgggcactgtcctgaagggtatgagtgcatcaagacaggcaggaatccaaattacgggtacacatcctacgacacattttcatgggccttcttggcactgttccgtctcatgacccaagactactgggaaaatctgttccagctgacccttcgggcagccggtaagacctatatgattttcttcgtggtcatcatcttcctgggatccttctacctcattaacctgattctggccgttgtggccatggcgtacgctgaacaaaatgaggcaactctggccgaagataaggagaaggaagaggagttccagcagatgcttgaaaagttcaagaagcaccaggaagagctggagaaggccaaggccgctcaggctcttgagggaggggaagcagacggcgatcctgcccatggcaaggactgtaatggatctctcgatacctcccagggagaaaaaggagcgcctaggcagagtagtagcggggactcaggaatttcagacgccatggaggagctagaggaagcccatcagaagtgccctccttggtggtacaaatgcgctcacaaagtcctaatctggaattgctgcgctccgtggcttaagttcaagaatatcatacatctgatagtgatggacccctttgtggacttaggcattactatctgtattgttcttaatacactcttcatggcaatggaacattatccaatgaccgaacattttgacaatgtgcttacagtcggcaatctcgttttcaccggaatcttcaccgccgagatggtgctcaagctgatcgcaatggatccctatgagtacttccagcagggttggaacatcttcgattctattattgtcacgcttagtctggttgaactgggactcgccaacgtgcaggggctgagtgtgctaaggtcctttaggctcctgcgcgtgtttaaactggctaagagctggcccaccctgaatatgctcataaagataataggcaactccgttggcgctctggggaatctcacgctggtgcttgctatcatagtgtttatatttgccgtggtgggaatgcagcttttcggcaaatcatacaaggaatgcgtgtgcaaaattgcattagattgtaatcttccacgttggcacatgcacgattttttccattcgttcctgatcgtgtttaggattctgtgcggagaatggatagagaccatgtgggactgcatggaggtagcgggacaggcaatgtgcctgacggtgtttctgatggttatggtaatcggaaatctggtcgtactgaacctgtttctagcacttttactgtcatccttttctgccgactccctcgcagccagcgacgaggacggtgagatgaataacttacagattgcgattggtcgaattaaattgggcatcgggttcgctaaagccttcctattgggtctgctgcatggcaaaatactgtctcccaaagacataatgctcagtttgggggaggccgacggtgcaggtgaagccggtgaagccggagagacagctcctgaagacgagaagaaggaacctccagaggaggatctgaagaaggacaatcacattcttaaccacatggggctagccgatggacctccttcaagcctagaactggatcatctgaactttattaacaacccttatcttactatccaggtgcccatcgcctctgaagagagcgacctagagatgcccactgaggaagaaacagataccttttcagagcccgaagatagtaagaagcctccacagccgttatatgacggtaattcatcagtatgcagcactgccgattacaaacctcccgaagaagaccccgaggagcaagccgaggagaaccctgagggcgagcagccagaagaatgctttactgaggcatgtgtgcaacggtggccttgcctttacgttgatattagccagggcagaggtaagaaatggtggaccttaagacgggcttgctttaagatcgtggagcataattggttcgagacctttatcgtctttatgattcttctgtcatcaggagcgctggcctttgaggacatctatatcgagcagcgaagagttattagaacaatcctggaatatgccgacaaggtcttcacttatatcttcattatggagatgctgttgaaatgggtcgcatatgggttcaaggtatacttcactaacgcctggtgctggctggactttctgatagtggatgtttctatcatttcactggtggccaactggttggggtattcagaactgggtcctataaagtctttaagaacgctgagggcgctgcggccactgcgcgctctcagccggttcgaggggatgcgggtggttgtgaatgccctcctgggcgcaattccctccataatgaatgtgcttctggtctgcttaatcttttggctgatcttttccattatgggcgttaatctgttcgctggtaagttctactattgtataaacacaacaacctccgaaagattcgacatctccgaagtgaataacaagagcgaatgcgaatcactgatgcataccggccaagttcgttggctaaatgtcaaagttaactacgataatgtgggactgggatatctatccttactacaggtggctacctttaaagggtggatggatattatgtatgccgctgtcgactctagagagaaagaggagcagcctcagtacgaggtgaacctgtacatgtatttatatttcgtgatttttattatctttggctccttcttcacgcttaatttattcattggtgtgattatcgacaatttcaatcagcagaaaaagaagctgggcggaaaagacatatttatgaccgaagaacagaaaaaatattacaatgctatgaagaaactcggcagcaagaaaccccagaagcccatcccaagacctcagaataaaattcaggggatggtatatgaccttgtgacaaaacaggctttcgacatcaccataatgatcctgatctgtctgaacatggtaactatgatggtagaaaccgataaccagtcccagctaaaagttgacatactgtataatatcaatatgatctttattattatctttactggagagtgcgtgctgaagatgcttgccttgaggcagtactacttcacagtaggctggaacatttttgatttcgtcgtagtgatactgtctatcgtgggtctggcgcttagcgatctcattcagaagtactttgtgagccccaccctgttccgcgtgattcgcctagcgagaattggaagagttctaagactaatacggggagctaaagggatccgaacattgctgttcgccctcatgatgagtctgccagctctctttaacattggacttctgctgtttctggtcatgtttatatattctattttcggaatgtccaacttcgcctatgtgaaaaaggagagtgggatcgatgatatgttcaattttgagacattcggtaactcaattatttgcctgtttgaaatcacaacctccgccggttgggatggactgctgaatcctatactgaactctgggccacccgactgcgatccaaacctcgaaaatcccggaactagtgtgaaaggggactgtggaaacccttccataggcatttgttttttctgtagttacataattattagctttctcatagtcgttaacatgtatatcgcaatcatcctggaaaatttcaatgtggcaacggaagagtcttccgaaccactgggtgaagacgactttgagatgttttacgaaacatgggaaaagttcgatcctgacgctacgcagttcattgcatattcccggctgagtgactttgtagacactttgcaggagccacttagaattgcaaaacccaacaagatcaaactcatcactcttgatcttccaatggttccaggcgacaaaatccactgtttggacatacttttcgcccttacaaaagaggtcctgggagactccggggagatggacgccctaaaacagaccatggaggaaaagtttatggccgctaacccatcgaaggtgtcatatgagcccataacgactacgctgaaaaggaagcacgaggaggtttgtgccatcaagatacagcgtgcatatcgaaggcacctcctgcagcgctctatgaaacaggcctcctatatgtaccggcatagtcacgatgggagtggggacgatgccccagaaaaagaaggcctgttggccaacactatgagcaaaatgtacgggcacgaaaacgggaacagttcaagtccatcccctgaggaaaagggtgaggccggagacgcgggtcctaccatgggattaatgccgatatctccaagtgatacagcctggccacctgctccccctcctggccagaccgtgagacctggcgtgaaagagtccctggtgta

SEQ ID NO: 240896 - DNA, 687 bp, synthetic construct
  misc_feature 1..687: note = Description of Artificial Sequence: Synthetic coding sequence
  source 1..687: mol_type = other DNA
atgcccggagctggagatggagggaaggctcctgcacgatggctaggtacgggcctactgggactgtttctgctgcccgtaacactgagtttggaagtttctgtgggcaaagctacagacatttacgccgtgaacggtactgaaattctgctcccgtgcacctttagctcatgcttcgggtttgaggacctgcacttccgctggacgtacaactcaagtgatgccttcaagattctcatagagggcacagtcaagaacgaaaaatctgaccccaaggttactttgaaagacgatgaccgcataactctggtgggcagcacgaaggaaaagatgaataatatttctattgtgttacgtgacctcgagtttagtgatacagggaaatacacatgccatgtgaagaacccaaaagaaaacaacttgcagcatcatgcgacaatttttctacaggtggtcgataggctggaggaggtcgacaacaccgttacacttatcatcttagctgtggttggcggagtaattgggctgcttattctcatcctgctgatcaagaagcttataattttcattttaaagaagactcgagaaaaaaagaaggaatgcttggtcagtagcagcgggaatgacaacacggagaatggactacctggatcaaaggcagaggagaaacccccttccaaggtgtag

SEQ ID NO: 240897 - DNA, 285 bp, synthetic construct
  misc_feature 1..285: note = Description of Artificial Sequence: Synthetic coding sequence
  source 1..285: mol_type = other DNA
atgccaggcgctggggacggcggaaaggcacccgcaagatggctcgggaccggtttgctggtggaagaagtggacaacaccgtgacattaattatattggcagttgtaggtggtgtgattggcctccttatactgattctcctgatcaagaagctgatcatttttatcctcaaaaaaacaagagaaaagaaaaaagagtgtctagtctcttcatccggaaatgataatacagaaaatggtctgcctggaagtaaggcagaagagaaacctcccagcaaagtgtag

SEQ ID NO: 240898 - DNA, 5970 bp, synthetic construct
  misc_feature 1..5970: note = Description of Artificial Sequence: Synthetic coding sequence
  source 1..5970: mol_type = other DNA
atggccatgctacctcctccagggccacagtcttttgtgcattttacaaaacagagcctggctttgatcgaacaacgtattgcagagaggaagtcaaaggaaccaaaggaagaaaagaaggacgatgacgaggaggctcccaaaccctcctccgaccttgaggccggaaagcagctcccatttatatatggcgacattcccccaggcatggtgtcagagcccctggaagatttggatccatactacgcggataagaaaacatttattgtgctgaataaaggtaagacaatcttccgcttcaacgcaactccagcactgtatatgttgtcaccttttagccccctgcggaggatcagcattaaaatcctggtgcacagcaccctgttctccatgctcatcatgtgtaccatcctcaccaattgcatattcatgacgatgaacaatccccctgattggacaaaaaatgtggagtacacattcactggcatctatacgttcgagagtctcgtgaagattttggctaggggcttttgtgtgggggagttcacgttcctcagagatccctggaactggttggactttgttgtcatcgtcttcgcctaccttacagagttcgtcaacctgggcaacgtatcagctttaagaacttttagggttctccgtgctttgaagactatctctgtcattcccggacttaagactattgttggggcacttatacaatctgtcaagaagctgtcagacgtgatgatcctcactgtcttctgcttgtcagttttcgcacttattggactccagctgtttatgggcaatttaaagcacaagtgttttagaaactctctggagaataacgagacgctggagagtatcatgaatactctggagagcgaggaggatttccggaagtatttttattatctcgaggggtcaaaggatgcccttctgtgcggatttagcacagattccggccagtgcccagaggggtacacttgcgtaaaaataggcagaaaccctgactatggctatacgtcatttgacaccttctcctgggccttcctggctctgttccgattgatgactcaggattactgggaaaatctgtatcagcagacactgcgggcagctggaaagacatacatgatcttctttgtggttgtgatcttccttggttcgttttacttgatcaatctcatacttgccgtggtggccatggcatatgaagaacagaatcaagcaaatattgaggaggctaagcagaaggagctggagtttcagcaaatgctggatagactgaagaaggaacaggaggaggccgaagcgatcgcagcagcagccgctgaatatacaagcatcaggaggtcccggatcatgggacttagtgagagcagcagcgagactagcaagctcagctcaaaaagcgcaaaagagagaaggaatagaagaaaaaagaaaaatcagaaaaaactatcttccggtgaagaaaagggggatgccgaaaagctaagcaaaagcgaatccgaagactctatcaggaggaaaagctttcatcttggggtggagggtcacagacgcgcacacgagaagcggttatcaacacctaatcagtctcccctgtccattcgtggctcattatttagcgccagacggagtagtcgcacaagcctattctcttttaagggtcggggacgggacattgggagtgaaaccgagttcgccgacgacgaacactccatctttggggacaacgaatccaggcgcggatccctgtttgtgccacatcgtccccaagagaggcgttctagtaatatctcccaggcgtcccgatcccccccaatgctcccagttaacgggaagatgcactcagctgtggactgcaatggagtggtgtctcttgtcgatggtcggtccgctcttatgttgccaaacggccagctgctgccagaagtgatcatcgataaggctacttctgacgattctggcacaacaaatcagatccacaagaaacggcgatgttccagttacctgctgagcgaggatatgttgaacgacccaaaccttaggcaacgcgctatgagccgagcctccatactgactaacaccgtggaggaactggaggaaagcagacaaaagtgccctccctggtggtatcgattcgcccataagttcctcatctggaattgctctccgtactggattaaattcaagaaatgcatctacttcatcgttatggacccttttgttgatctggcaataactatttgtatcgtattgaacacactctttatggctatggaacaccatcccatgactgaggaattcaagaatgttctcgcaatcgggaacttggtctttacgggcatcttcgccgctgaaatggtgctgaaactgatcgcaatggacccatatgaatatttccaggtcggttggaacatcttcgactcactgatagtgacactgagtctggttgagttattcctcgcggacgtggaggggctgtccgtcctgcggagcttcaggctgctgagggtcttcaagctggctaagagctggcctaccttgaacatgcttataaaaatcattggaaattctgttggcgcactaggcaacctgacactggtcctggcaatcatcgtcttcatctttgccgtggtcgggatgcagctgttcggcaaatcatataaagagtgtgtgtgtaaaatcaacgatgattgcacactcccgagatggcacatgaacgacttttttcacagcttcttgatcgtattccgagtcctatgcggagagtggattgagaccatgtgggattgtatggaggtggccggtcaggctatgtgtcttatcgtttatatgatggtaatggtgatcggcaatctggtggtgctcaatctctttcttgcattacttctgtcgtcattctctagcgacaacttgaccgcaatcgaagaagacccggatgccaacaatctgcagatagccgtaacgcgaatcaaaaaaggaataaattacgttaaacaaaccctacgagaatttatcctaaaagccttctccaaaaagccaaaaatctcccgcgaaatacgtcaagccgaggacctgaacaccaagaaggagaattatatctctaatcacacccttgctgaaatgtcaaaaggtcacaacttcttgaaagagaaagacaagataagcggattcggatccagtgtcgacaagcacctcatggaagactcagacggccagtcttttattcacaatccaagcttgacggttactgtgcccatcgcccctggtgaaagcgaccttgagaacatgaacgccgaggagctctcctcggacagtgattcggagtacagcaaggtgagactcaacagatcctcctcttccgagtgctccaccgtcgacaatcccctgcctggggaaggagaggaggctgaggccgagccgatgaattccgacgagccggaggcctgcttcacggacggatgcgtttggagattttcgtgttgtcaagtcaacattgaatcaggcaagggcaagatttggtggaatatccgcaagacttgttacaagattgtcgaacacagctggttcgaatcattcatcgtactgatgatacttctgagctctggggctctggctttcgaagacatctacattgaaagaaaaaaaacaattaagattattctggagtacgctgataagattttcacttacatcttcatcctggagatgctcctcaagtggattgcttacggttacaagacctatttcacaaatgcctggtgctggctcgactttctgatcgttgatgtcagcctggttaccctcgttgcaaatacccttggctatagtgatctggggcctataaagtccttgcggaccttacgggctctgagacctctgagggccctatctcgcttcgagggcatgagagtggtcgttaatgccctgatcggagctattccctcaataatgaacgtattactcgtctgcttgatcttctggttgatcttctccataatgggcgtaaatctgttcgcaggcaaattttacgaatgcatcaataccaccgatggaagtcgcttccccgcttcccaggtgcccaaccgatctgagtgtttcgctctgatgaatgtaagtcagaacgtgcgttggaagaacctcaaagtcaatttcgataatgttggcttaggttacctctctcttcttcaggtggctacttttaagggatggaccattatcatgtacgcagcagtggactctgtgaacgtagacaagcaacccaagtacgagtatagtctttacatgtacatttattttgtcgtgttcatcatcttcggcagcttctttactcttaacctgtttattggcgtgatcattgataacttcaaccagcaaaagaaaaagctcgggggacaggatatctttatgaccgaggagcaaaaaaaatattacaatgcaatgaagaagcttggatcgaaaaagccacagaagccaatccctaggcctggaaacaagatccaggggtgtatatttgatctggtgaccaatcaagccttcgatatctcaataatggtcttgatctgcctgaatatggtgaccatgatggtggagaaagagggccagtctcagcacatgacagaggtgctgtattggataaatgttgtgttcatcattttgtttaccggggagtgcgtattgaaattaataagcctgcgccattattatttcaccgtgggatggaacattttcgactttgtggttgtgatcattagcatagtgggaatgttcctggccgatctcatcgaaacatacttcgtgtcaccgaccttatttagagtaatccgccttgccaggataggcagaattttgcgactagtcaagggcgcaaaaggaatccgcaccctgctcttcgccttgatgatgtcccttccagccctctttaacatcggtctgctgctgtttttggtgatgtttatttatgctatctttggcatgtctaatttcgcctacgtgaaaaaggaagacggcattaacgatatgttcaacttcgagacttttggaaacagtatgatctgtctgtttcagattacgacctcggcgggttgggatggactcctcgcgccaatattgaactccaaacccccagattgtgatcccaagaaagtacaccctggctcttctgtggagggggactgcggcaatccgagcgtgggaatcttttattttgtttcctacatcataatttcttttttagtggtcgttaatatgtatattgcggtgatcctggagaacttttcagtagctacagaggaatccaccgaacctcttagtgaagacgacttcgaaatgttttatgaggtctgggaaaaattcgatcccgacgcaacccagtttattgagttttctaagttatccgactttgcagctgcactggacccaccgctgctgatcgctaagccaaataaggtgcaactgattgcaatggaccttccgatggtctcaggagacaggatccactgtctcgatatcttatttgcttttaccaagcgtgtgttgggcgagagcggggagatggacagcctgcgaagtcagatggaggagcgctttatgagcgccaacccatctaaggttagttacgagcccataacaacgaccctcaaacgtaaacaagaggacgtgtctgctactgtcatacagcgcgcttataggcgctacaggctgagacagaacgtgaaaaatatctccagtatatatatcaaggacggggatcgcgacgacgatctactgaataaaaaggacatggcttttgataacgtgaatgagaattcctcacccgaaaaaactgacgctacatcctctactacttctcctccctcttacgattcagtgaccaaaccggataaagagaaatatgaacaggaccgcaccgagaaggaggacaagggcaaggatagcaaggagagcaaaaagtag

SEQ ID NO: 240899 - DNA, 5969 bp, synthetic construct
  misc_feature 1..5969: note = Description of Artificial Sequence: Synthetic coding sequence
  source 1..5969: mol_type = other DNA
atggccatgctgcctccccctgggccacagagctttgtgcacttcaccaaacagagcctggcactgatcgagcaacgtattgctgaaagaaaaagcaaggagccgaaggaggagaaaaaagacgacgacgaggaagcgcctaagcccagctcagacctggaagccggaaaacagttgccatttatttacggcgacattcctcccggtatggtgtccgagcccttggaagatttggacccttactacgctgataagaaaacctttatcgtgctaaacaaagggaagactatcttccgctttaatgctacacccgcattatatatgctgtctccattctcccctctgcgtcgcatctctatcaaaatcctggtgcattccacactgttctctatgttaataatgtgtaccatattaaccaattgcatcttcatgacaatgaataacccacctgattggaccaagaacgtggaatacacctttacagggatctatacttttgagagcctggttaagatcttggcaaggggcttctgtgtgggcgagttcacctttcttcgggatccatggaactggcttgacttcgtcgttatcgtctttgcctacgtgacagaatttgtagatctaggcaacgtttctgctctcagaaccttcagagtgctcagagctctaaaaaccattagcgtgatccctggcctcaagactattgtcggcgctttgattcagtcagtcaagaaacttagcgacgtgatgatcttaaccgttttttgtctgtctgtgtttgctttaatcggactgcaattgtttatgggaaatctgaagcacaaatgtttcagaaactctctggagaacaatgagactttagagtccataatgaatacattggagtccgaggaagacttcaggaaatatttctattaccttgagggctccaaggatgctcttctgtgtgggttctctacagattcaggccagtgtcccgaaggatatacctgcgttaagatagggaggaaccctgattacggctacacatctttcgatacattctcctgggcatttctagctttattcagattgatgacccaagactactgggaaaatctctatcaacagaccctgcgggcagcaggaaagacctatatgatcttcttcgtcgttgtcatttttctcgggtccttttacctcatcaacctaattttggctgtcgtcgctatggcctatgaagaacaaaaccaagcgaacatcgaagaggctaaacagaaagaactggagttccagcagatgctcgacaggctgaagaaggaacaggaggaagctgaagccattgctgcagccgcagctgagtatactagcatacgcagatctcgtattatgggcttgtccgaatcatcctcagaaacctcgaagctctcttcgaaaagtgctaaggagcgacgaaaccggaggaagaagaaaaatcagaaaaaactgtcctctggtgaagaaaaaggggacgctgagaagctgtctaaatccgagagcgaggacagtatacgcagaaaatctttccatctgggagtagagggccaccgtagagcccacgagaagcgcctgagcaccccgaaccagagccctctctccatcagaggaagtttgttttcagcaagaaggtctagtcggaccagcttgttttccttcaaggggcgagggagagatatcggttcagaaactgagttcgccgatgacgagcacagcatttttggcgataatgagtcaaggagaggctctctgtttgtccctcaccggccacaggagaggcggagctccaacatttcgcaggcctcccgatcaccaccaatgctaccagtcaacggcaagatgcactctgctgttgactgtaacggagttgtgtctctcgtcgatgggaggagcgctctcatgctcccaaatggtcaactgctgccggaggtcataattgataaggctacttcggacgacagtggtaccacaaaccagatccataaaaaaaggcggtgttcatcctatctgctttcagaggacatgttgaatgatccaaacttgcggcagcgggctatgtctcgcgctagtattctgacaaatactgtggaggagcttgaggagagtcgccagaaatgcccgccttggtggtaccgattcgcacacaaattcttgatctggaactgcagtccatactggataaagtttaaaaagtgtatctatttcattgtgatggaccccttcgtagacctcgcaatcactatctgcattgtgcttaatacactatttatggcaatggagcaccacccaatgacggaagagttcaaaaacgtgctcgccattggcaatttagttttcacaggtatttttgctgccgaaatggtattgaagctgatcgcgatggatccttatgagtacttccaggtgggctggaacatatttgatagtctcatcgtcacgctctcactggtggagctgttcctggccgacgttgaggggctttccgtgctgaggagtttccggctgctgcgggtctttaaattagcaaaatcctggcctacattaaatatgcttataaagattatcggaaactccgtgggggctctcggcaatctgactttggtcctcgctattattgtattcatattcgctgtggtgggaatgcagctgtttggtaaatcttacaaggaatgtgtgtgcaagattaacgacgactgcactctacctagatggcatatgaatgactttttccatagtttcttgatcgtgttccgggttctgtgtggcgagtggatcgagacaatgtgggactgcatggaagtggccggacaggctatgtgcttaattgtgtacatgatggtgatggtaattggaaatctggtggtcttaaacctgtttctggccctgctactcagctccttcagttcagacaacctcaccgctattgaggaagatccagacgcaaataatcttcagatcgctgtgacgaggattaagaaaggcattaattatgtgaagcagacactgcgagaatttattcttaaagctttcagcaaaaagccgaagatttcacgtgagattcgccaggcagaggatctcaacaccaagaaggaaaattatatatcaaaccacacattagctgaaatgagtaagggccacaacttcctcaaggaaaaggacaaaatcagcggtttcggatcctcagttgacaagcaccttatggaggactcagacgggcagtccttcatccataacccgagcctgacagtaacagttcccatcgctcctggcgagagtgacctagagaacatgaacgccgaagaattgtctagcgactccgactccgagtatagcaaagtccgattaaaccgcagcagctcatccgagtgttctacagtggataatcccctgccaggagaaggcgaggaagctgaggccgagcccatgaactctgatgagcccgaggcttgcttcaccgatgggtgtgtgtggcgctttagttgttgtcaggttaacattgaaagtggtaagggcaaaatctggtggaacattcgtaagacctgttacaagatagtggagcattcctggttcgagtcatttatcgtcctcatgatccttctttcctctggcgcacttgctttcgaagatatttacatagagcgaaagaagacaattaagattatcctggagtatgcagataagattttcacatatatttttattctggagatgctactgaaatggatagcgtacggctataagacttatttcaccaatgcctggtgttggcttgactttcttatcgtggacgtcagtctggttacccttgtggccaataccctgggttactcagacctcggcccaatcaagagccttaggaccctgagagcactcagaccgctgagggctctttcacgatttgagggcatgcgagtggttgtgaacgccctcattggcgcaattccgagtattatgaacgtgttactggtatgcctgatcttctggctgatattctccattatgggcgtgaacctttttgccggaaagttttacgagtgtattaacactacggacgggagtagattcccagcttctcaggtgcccaatagatctgaatgctttgctctgatgaatgtgtcccaaaacgtgaggtggaagaacctgaaagtaaacttcgacaatgtcggtctggggtatctgtccttgttgcaggttgcaacattcaaaggttggaccatcattatgtatgctgctgtagactccgtgaatgtcgacaaacagcctaaatatgagtattccctgtacatgtatatttacttcgtcgtattcatcattttcggatccttcttcaccctgaacttgttcatcggagtcattatcgataacttcaaccagcagaaaaagaaactgggaggacaggacatttttatgacagaagagcaaaagaagtactacaatgccatgaagaaacttggttccaaaaaacctcagaagcctattccacgcccaggaaacaagattcaggggtgcatctttgatttggtgacaaaccaggcctttgacatcagcattatggtcttgatttgcctaaacatggtaacaatgatggttgagaaggagggccagtcgcaacatatgaccgaggtcctctattggattaacgtagtgttcataattctgttcacaggtgagtgcgtcctgaaacttatttcactgcggcactactattttacagtaggctggaatatttttgatttcgtggttgtgattatcagtattgtcggcatgtttttagcggacctcattgaaacttatttcgtgtcccctaccttattccgcgtcatacgtttggctcgtattggcaggatactccgcttggttaaaggggctaaagggatcagaaccctgctgttcgccttgatgatgtctcttcccgctcttttcaatattggcttattgttgttcctcgtcatgttcatctatgcaattttcggcatgagcaattttgcatacgtcaaaaaagaagacggtatcaatgacatgtttaatttcgaaacttttgggaatagcatgatctgcctctttcagataacaaccagcgcagggtgggacggactgctcgcccctatactgaatagcaagcccccagactgtgatcctaagaaggtgcaccctggcagctctgtggagggggactgtggcaacccctccgtcggaattttttactttgtgagctacataattatcagcttcctagtcgtggtcaacatgtacatagctgtgatcctggagaatttttctgtcgctactgaagagtcaacagagccactgagcgaagatgacttcgagatgttctacgaagtatgggaaaaatttgatccagacgctactcaattcatcgaattctccaagctctctgatttcgctgccgcattggacccacctcttctcattgctaaacctaataaagtccagctaatcgccatggacctgcccatggtctccggcgatcgcatccattgtctcgacatactctttgcctttacaaagagagttctcggagagagtggtgaaatggatagcctgcggtctcagatggaggaaagatttatgtccgcaaatccaagcaaagttagctacgagcctatcactactaccctgaaaaggaagcaggaagacgtttctgctactgttattcaacgggcatacaggcgctatcggctgcggcagaacgtgaaaaatatatcctctatctatatcaaggatggtgaccgtgacgatgatttattaaataaaaaagatatggccttcgacaatgttaacgagaatagtagccctgaaaaaacagacgccacctcgtccaccacatcacctccttcttacgattcagtgacaaaacctgataaagagaagtacgagcaggataggaccgagaaggaggacaaagggaaagactccaaagaaagcaaaaagta

SEQ ID NO: 240900 - DNA, 5966 bp, synthetic construct
  misc_feature 1..5966: note = Description of Artificial Sequence: Synthetic coding sequence
  source 1..5966: mol_type = other DNA
atggctatgttgccccctccagggccacagtccttcgtccactttaccaaacaatccctggctttgatcgaacagcgcatagctgaaagaaaaagtaaagaaccaaaggaagaaaagaaagacgacgacgaggaagcacccaagccatcctccgatctggaagcagggaagcagctgcctttcatttatggagacataccacctggaatggtgtcagagccactggaggacctggatccatattatgctgataagaagacatttatcgttttaaacaagggcaaaacaatcttccgttttaacgccacacccgcactttacatgttgtctcctttttcacccctgaggcggataagtattaagatcttggttcacagcctgttttcaatgttaataatgtgcaccatcctgacaaactgcatttttatgacaatgaacaaccctccggattggactaaaaacgtggagtataccttcacaggcatctatacattcgagagcttggtaaagatcctggccagaggattttgtgtgggggaatttacatttctgagagatccttggaactggctcgattttgttgtaattgttttcgcctatcttacagaattcgtcaacctgggaaatgtgtccgctcttaggacttttcgtgtcctgcgcgcactaaagactatttccgtaatcccaggtctcaaaacaatcgtgggtgctctgattcagagcgttaaaaaacttagtgacgttatgatccttacagttttctgcctttccgtgtttgccctgatcggactgcagctgttcatgggtaatctcaaacacaaatgcttcaggaatagtctcgaaaacaatgagaccctggaatccataatgaacacactggagagcgaggaggattttagaaaatatttctactatctggaaggcagtaaagatgcacttctgtgtggtttctccaccgattcaggccagtgccctgaagggtatacctgcgtcaaaataggtcgaaacccagactatggctacacatcatttgacaccttctcctgggcgtttctggctctattcaggctgatgacgcaagactattgggagaacctatatcagcagaccctgcgggctgctggaaaaacttatatgatcttcttcgtcgtcgtcatctttctcggcagtttctaccttatcaatctgatcctggccgtggtggcaatggcttacgaggaacaaaaccaggctaatattgaggaagcgaagcagaaagaactggaattccaacaaatgcttgatcggctgaagaaggaacaggaagaagctgaggctatcgcagctgcagctgctgagtacacctctatcaggaggtcacggataatgggcctgtcagaatcgtcctccgaaacatccaaactcagttccaaaagtgcaaaggagcggagaaaccggaggaagaagaagaatcagaaaaagctgagcagtggcgaagaaaaaggagatgcggagaaactctccaaatctgaatccgaagactcaattcgcagaaaaagcttccacttaggcgtagagggccataggagagcccacgaaaagaggttgtctactcctaaccagtcccccctgagcatcagaggtagcctttttagcgcaaggagatctagcagaactagccttttttcttttaaaggtagaggtcgcgacatcggaagcgagaccgaatttgccgacgacgagcactcaatattcggcgataatgagagccgcaggggctccctgtttgttccccaccgccctcaagaacggagatcgtcgaacatctcacaggctagtcggagcccccctatgctgccagtcaacggcaagatgcacagtgcggtggactgcaacggtgttgtgagcttggtcgacggtaggtcagcactgatgctgcccaacggccagctgctgcctgaagtcatcatagataaagcgacctcagatgactctgggaccacaaaccagattcataagaaaagacgctgcagctcctatttgctgtcagaagatatgctgaacgatcccaacctgcgccagcgtgctatgtctagagctagcatccttactaataccgtggaggagctggaggaaagtcgccagaaatgccctccctggtggtaccgttttgcccacaaattccttatctggaattgttcgccgtactggataaaatttaaaaaatgcatttacttcattgtcatggaccctttcgtcgatctggccatcaccatttgcattgtgctgaacaccctattcatggcaatggaacatcacccaatgaccgaggaatttaagaacgtcctggctatcggaaatctggttttcaccggaattttcgcagcggaaatggtgctgaaactgattgcaatggatccatatgagtatttccaggtagggtggaatatttttgactctctcattgtgaccctaagtctggttgagctttttctggccgacgtggaaggtctaagcgttctacgctccttcaggctgctgcgggtgttcaaattggctaagagctggccaactctgaacatgctcattaagatcattggcaacagtgtcggtgctcttggcaaccttacattagtccttgccatcatagtcttcatctttgcagtagtgggcatgcagctgttcgggaaatcatataaggaatgtgtatgtaaaattaatgatgactgcactttacccaggtggcacatgaatgacttctttcattcatttctgattgtgtttcgagttttgtgtggcgaatggattgaaaccatgtgggactgcatggaggtcgccggacaagccatgtgcctcattgtttatatgatggttatggtcatagggaaccttgttgtgttaaacttgttcttggctctactcctctcctctttctctagtgataacctgaccgccattgaagaagacccggatgctaataacttgcagattgcggtgactagaattaaaaagggtattaattatgtcaaacaaaccctccgggagtttatactgaaagcattcagcaagaaacccaaaattagccgggaaatccgccaggcagaggaccttaatactaaaaaggagaattacattagtaaccacactttggccgagatgtctaagggccataactttcttaaagaaaaggacaagattagcgggtttggcagtagcgtcgacaagcatctgatggaggacagcgatgggcaatcctttattcataacccttccctgacggtgaccgtccccatcgctccaggggaatccgacctggagaatatgaacgcagaggaactctcatcagacagtgattctgaatatagtaaggtcaggctgaaccgatcctccagtagtgagtgctctaccgtggacaacccgttgccaggtgagggagaagaggctgaggctgagcccatgaatagcgacgaacccgaggcatgttttacagatggatgtgtgtggcggttttcctgttgtcaagtcaatatagagagcgggaagggaaaaatctggtggaatattcgaaagacatgctacaaaattgtagagcacagttggttcgaaagctttatcgtcctcatgattctcctctcctccggcgcattggctttcgaggatatatacatcgagagaaaaaagaccatcaagataattcttgaatacgccgataagatcttcacctatatctttatcctggaaatgttgcttaagtggatcgcgtatgggtataagacttatttcaccaacgcctggtgctggctggacttccttatcgtggatgtgagtttggtcactctggtcgctaatacactggggtacagcgacctcggaccgatcaaaagtctgcgaacccttagggcccttagaccactgcgggctttaagcagatttgaggggatgcgtgtcgtcgtgaacgcattaatcggagccatcccatcgatcatgaatgtcttactggtgtgcctcattttctggttaatcttttctatcatgggagtgaacctgttcgctggaaagttttacgagtgtatcaacaccaccgacggctcaagatttcccgcatcccaagtgcctaaccgcagcgaatgcttcgccctgatgaacgttagtcagaacgtgcgctggaagaatctcaaagttaacttcgataatgtcggtctgggctacttaagtctcctgcaggtggcgaccttcaaggggtggaccatcatcatgtacgccgcagtcgactctgtcaacgtggacaaacagcccaagtacgagtattccttatatatgtatatctactttgttgtctttatcattttcggttctttcttcacactgaatctgtttataggcgtgattattgataattttaatcagcagaaaaaaaaacttggcggtcaggacattttcatgactgaagagcagaagaaatattataatgctatgaaaaaactcggctccaagaagccacaaaagcccattcccaggcctggaaacaaaattcagggttgtatttttgacctggtgaccaaccaggccttcgacatctccatcatggtattaatttgcttgaacatggtgacgatgatggttgagaaagagggtcagtcccagcacatgactgaggtgctatattggataaatgttgtgtttattattctatttacgggagagtgcgtgctgaagctgatttcgttgcgacactattatttcactgtgggctggaatatctttgactttgtggtggtaatcatctcaatcgttggcatgttcctggcagatctgatcgagacctattttgttagcccgacgctgttcagagttattagactggcccgaattggacgtattctccgcctagtgaagggggctaaggggataagaactctcctgtttgccctgatgatgtcactgccagccctgttcaacattggccttctcctatttttggtgatgtttatctacgcaatcttcggcatgagcaattttgcatacgtgaagaaggaggatggaattaacgacatgttcaattttgagacatttgggaacagcatgatctgtctgttccagatcaccacatctgccggttgggacgggctactggcaccaatactaaactctaagccaccagattgtgatccaaagaaagtgcaccctggctcctctgtagagggagattgcggtaatccatctgtcggaattttctatttcgtttcatatattataatatcgtttctggtcgtggtgaacatgtatatcgccgtgatcctggagaacttttccgtggctaccgaggagtcaacagagcccctgtcggaagacgattttgagatgttttacgaagtctgggaaaaattcgatcctgacgctacccagttcatagagttttccaagctaagcgactttgctgccgctctggacccacccctcctcatcgccaagccaaacaaggtccagctaatcgccatggatctgcccatggtttccggtgaccggatccactgcctggatatcctatttgcgttcaccaagagagttctgggagaaagtggcgagatggacagtctgcgcagccagatggaggagagatttatgtccgcaaacccttccaaggtgagttatgaacccatcacaaccacgctgaagcggaagcaggaagacgtcagcgccaccgtaatccaacgggcttaccggagatatcgcctaaggcagaacgtcaaaaatataagcagcatctacattaaagatggagatagggacgatgacttactcaataaaaaggacatggccttcgacaacgtaaatgagaacagcagtccagaaaagaccgatgcgacaagcagcactacatccccaccttcatacgactccgtgacaaagcccgacaaggaaaagtatgaacaagaccggaccgagaaggaagataagggcaaggattccaaggagtccaagaagta

SEQ ID NO: 240901 - DNA, 5933 bp, synthetic construct
  misc_feature 1..5933: note = Description of Artificial Sequence: Synthetic coding sequence
  source 1..5933: mol_type = other DNA
atggccatgctgccccctcctggccctcagtctttcgtacactttacaaaacagagtctggcgctaatcgaacagaggatagcggagaggaagagcaaggagccaaaggaggagaaaaaggatgatgatgaagaggcgccaaaaccgtcatcagacctcgaagcaggtaagcaactgccatttatctacggagatattccccctgggatggtgtccgagccactcgaggacctggacccatattatgctgataagaagacattcattgttctgaacaagggtaaaacgatctttcgatttaacgccacccctgcgctgtacatgttatcccccttcagccccctgcggagaatcagcatcaaaatcctggttcattctctgtttagcatgctgatcatgtgcactatactcacaaactgcatcttcatgacaatgaataatcccccagactggacaaaaaatgtagagtatactttcactggcatctatacattcgaatcgcttgtgaagatactagcgaggggtttttgcgtgggtgagtttaccttcttgagagacccttggaactggctcgacttcgtggtgatcgtgtttgcatatctgacagagtttgtgaatctgggtaatgtgtctgctttgcgtacattccgcgtactgcgtgcgcttaaaacgatcagcgttatacctgggctcaaaacgatcgttggagccctgattcagtcggtgaagaagttgtccgatgtcatgatacttacagtgttttgtttatctgtcttcgctctgatcggactgcaactgtttatgggtaatctaaagcataagtgctttcgcaacagtctggaaaataatgagacactggaatccatcatgaatactcttgagtccgaagaggattttcgaaagtacttctattatctagagggttcgaaggatgcccttctgtgtggtttcagcaccgactcaggtcagtgcccagaaggctatacctgtgtcaagatcggacgaaacccagattacgggtatacgtcattcgataccttttcttgggcttttctggccctgtttcgactcatgactcaggactactgggagaacctgtaccagcagactctccgggctgccggtaagacctatatgatcttctttgtcgtagtcatctttctgggctctttttatctgattaacctcatccttgcagtggtcgcaatggcctacgaagagcagaaccaggcgaacattgaagaagctaaacaaaaagagctcgagtttcagcaaatgctcgatcggttgaagaaggagcaagaggaggcggaggctatagccgcagcagcggcagaatatacttcaatcaggagatctaggatcatgggtctctccgaatcctcctcagagaccagtaagctgagtagcaagagcgccaaagagcgaaggaacaggcgcaagaaaaaaaaccagaagaagctgtcatccggggaagagaagggagatgcagagaagcttagcaagtctgagagtgaggattcaatacgtaggaagagtttccacttgggagtggaaggccaccgcagagctcacgagaaacgtctgtctactccaaaccagagtcctctgagtatccgcggatccctgtttagcgccagacgctcgtctcgaacatccctgttctctttcaaaggcaggggaagagacataggctcggagacagagtttgctgatgatgaacactctatctttggcgataacgaaagtaggaggggcagtttatttgtgccccatcgccctcaggaacgtcgtagtagtaatatttctcaggccagtaggtcgcctccaatgttgccggtgaacgggaagatgcactcagcagttgattgcaacggcgttgtaagccttgtcgatgggcgatcggccctgatgctaccaaacggacaactgttgccagagggcactactaatcagattcataaaaaaagacgctgctcctcctatctcctgtctgaggatatgctcaacgatcccaatctccggcagagggccatgtctcgcgcttccatccttacaaacacagtggaagaactggaagaaagcagacagaagtgtcccccttggtggtatagatttgctcacaagtttctaatttggaattgctctccttactggattaagttcaagaagtgtatttacttcatcgtgatggatcctttcgtcgacctagccatcaccatatgtatagtcttgaatactctatttatggctatggagcatcatcccatgaccgaagagttcaagaacgtactagctatcgggaatctcgtattcactggcatctttgcagccgagatggttctgaagctgattgccatggatccttacgagtactttcaggtcggatggaatatcttcgactctttgatcgtgacgctgtcgctagttgaactgttcctggcggatgtggaaggcttgagtgtgctgagatcctttcgactcctgagagtgttcaagctggccaagtcatggccaaccctgaatatgttgataaaaattatagggaacagcgtgggcgctctagggaatctcacacttgtgcttgccattatcgtgttcatcttcgctgttgtgggcatgcagctttttggcaaatcttacaaggaatgcgtgtgcaagatcaatgacgattgtactttaccacggtggcacatgaacgacttttttcacagttttctgattgtctttagggtgctttgtggtgagtggattgagacaatgtgggactgtatggaagtcgccggacaggcaatgtgtctgattgtgtacatgatggtcatggttattggcaatctcgtggtccttaatctttttctggcattactgctttcaagctttagcagcgacaacttgacagcgattgaggaagatccagacgccaataatcttcagattgccgtgacaagaatcaagaaggggataaattatgttaaacaaacacttcgggaattcatcctcaaagcatttagtaagaaaccaaagattagccgcgaaataaggcaggccgaggatctgaataccaaaaaagagaattacattagcaaccacactcttgcagagatgtctaaaggtcataatttcctcaaagaaaaagataagatcagcgggttcgggagttctgtggataaacacctgatggaggattcggatggccaatcttttattcacaacccatccctgacagtcacagtgcccatcgcccctggagagtccgacttagaaaatatgaatgctgaggagctctcatcagatagcgactctgagtatagcaaggtgagactcaataggtcatcatcgtctgagtgtagcaccgttgacaatcctctccccggagagggagaggaagctgaagccgagcccatgaactccgacgagcccgaggcctgtttcactgacggttgcgtgtggcgcttttcatgctgtcaggtgaacattgaaagcggcaagggcaaaatttggtggaatattcgaaaaacatgttacaaaatcgttgagcatagttggtttgaaagcttcattgtccttatgattctcctgagctcgggagcgctggcgttcgaagacatctatatagagagaaaaaaaacaattaaaatcatactggagtacgcggataaaatttttacatacatcttcattctggaaatgttgctgaagtggattgcttatggatacaagacttattttactaatgcttggtgttggctagatttcctgatcgttgatgtgtcgctggtgacactagttgccaataccctgggctatagcgatttagggcctattaaatcccttcggaccctgagggccctgagacctctgcgggcacttagtcgatttgagggcatgcgtgtggtcgttaatgcgttgatcggggcaatcccttctatcatgaacgtgctgctagtgtgtcttattttttggctgatcttcagcattatgggcgtgaatctattcgccggaaagttctatgagtgtattaatactacagacgggagcagatttcctgctagccaggttccaaatcggtcagaatgcttcgccctgatgaacgtgagccagaacgttagatggaagaacttaaaagtgaattttgataatgtaggtttgggatatctgtcgctgcttcaagtcgccacatttaaaggttggaccattataatgtatgctgccgtggattcagttaacgtcgataaacagcctaaatatgagtactcactctacatgtacatttactttgtggtgtttattatttttggatcgtttttcacactgaacctcttcatcggtgtcatcattgataattttaatcagcagaaaaagaaactgggagggcaagatatattcatgactgaggaacagaaaaagtattacaatgctatgaaaaaacttgggtccaagaagccccaaaaaccaattcctcgacccggaaacaaaattcagggctgtatttttgatctggttacaaatcaagccttcgatattagcattatggttcttatctgcctgaatatggtcaccatgatggtggagaaggagggccagtcacaacacatgacggaggtgctgtactggataaatgtggtttttatcattctgttcaccggggaatgcgtactgaaactgatctctctgaggcactactacttcaccgtcggctggaatattttcgacttcgttgtagtgatcatatccattgtgggtatgtttttggccgacttaattgagacatacttcgtatcccccacactttttcgtgtgattcgcctggcgcgaattggcaggatccttcgcctggtgaagggagccaaagggattagaacccttctgtttgccctgatgatgtctcttcctgctctctttaatatcggactgttgctgttcctggtgatgtttatttatgccatatttggtatgtctaatttcgcttacgtaaagaaggaagatggcattaatgacatgtttaacttcgaaacattcggtaattcaatgatttgcctctttcagatcacaacgagcgccggatgggatgggctgctagccccaatccttaacagcaaaccaccagattgcgatcccaagaaagtccatcctggctcctcagtcgagggcgactgcggaaaccccagcgtcgggatcttctattttgtgagttatatcatcatctcgtttttagtggtcgtgaatatgtacatcgccgtgattttagaaaacttctctgtcgctacagaggagtccactgaaccgttgtccgaggatgatttcgagatgttctatgaagtgtgggaaaagttcgaccctgacgccacccaatttatagagttctcaaaattgtctgacttcgccgctgctttagatcctccgctgttgatcgcaaagcccaacaaggttcagctcattgctatggatttgcctatggtctccggcgataggatccactgcctagatattctcttcgcatttacaaagagggtgttaggagagagcggcgaaatggacagcctgagaagccaaatggaggaacggttcatgagcgcaaatcctagcaaagtgagctacgagccgatcacaaccactctgaagagaaaacaggaagacgtctcagccaccgtcattcagcgagcatatcggcgttacagactgagacagaacgtgaagaacatctcgtcgatctacattaaagacggggatagggatgatgatctgctgaacaagaaggacatggccttcgataatgtaaacgaaaactcctcgcccgaaaagaccgacgctacctcatccactacgtccccaccctcctacgattccgtgactaaaccagacaaggagaaatatgaacaagatcggaccgagaaagaagataaaggcaaggattccaaggagtcgaagaaata

SEQ ID NO: 240902 - DNA, 1620 bp, synthetic construct
  misc_feature 1..1620: note = Description of Artificial Sequence: Synthetic coding sequence
  source 1..1620: mol_type = other DNA
atcttgactaactgcatattcatgacaatgaacaaccctcctgactggacgaagaacgtagaatatacatttactggcatctatactttcgaaagcctcgtcaaaatcctagctagaggattttgcgtcggcgaatttacctttctgcgcgatccctggaattggctcgattttgtagtgatcgtcttcgcatacgtgacggagttcgtggatctcggcaacgtgagtgctctccgcacttttcgagtcctgcgggctctgaaaacaatttccgtaatccccggtctgaaaactatcgtcggagcgttgattcagagtgtgaaaaaactcagcgacgtgatgatcctcacagtgttctgcctgagtgtgttcgcactgataggcttacaattgtttatgggaaacttgaaacataaatgttttcgtaactcactggaaaacaatgagaccctggaatcaatcatgaataccctggagagtgaggaggactttcggaaatatttctactaccttgaaggatcgaaggacgccttgctgtgcggcttttcgactgatagcggtcaatgtccagaggggtacacttgcgtgaaaattggaaggaaccccgattatggatacacctcttttgacaccttctcctgggcatttttagccctgtttaggcttatgacacaggattattgggaaaatctgtatcagcagaccctgagagccgcaggtaagacctatatgatcttcttcgtcgttgtcattttcctggggtccttttaccttatcaatctgattctcgccgtggtcgccatggcctatgaggaacagaaccaggccaatatcgaggaggctaagcagaaagagctagaatttcaacagatgctggatagactcaagaaagaacaggaagaggctgaggcaattgctgcagcagccgcagaatacacctcaattcgcaggtctcgcatcatgggtttgtccgagagctccagtgaaacgagtaagctcagtagcaagtctgctaaggagagacggaataggagaaaaaaaaaaaaccagaaaaagctgtcatcaggtgaggagaagggcgatgccgagaagctctccaagtccgaatcagaagactccattcggagaaaaagtttccacctgggggttgagggtcatcgcagggctcacgagaaaaggctctccacgcctaatcagtcacccctctcaattcggggttcccttttttcagccagacgctccagcaggacttctctgttttcgttcaaagggaggggcagagatatcggcagtgaaacggaatttgccgatgatgaacactctattttcggggacaatgagagcagacggggtagcctctttgtgccacaccgccctcaagaacgaaggagtagtaacatttctcaagcctcccggtcaccccctatgctgcccgtgaacgggaagatgcatagcgccgtcgattgtaatggggtggtgagtctggtcgacggacgttcagccctcatgctaccaaacggacaactacttcccgaagtgattatcgataaagctaccagcgacgactccggcactacaaatcagattcacaagaagcgtcgctgttccagttatttgtag

SEQ ID NO: 240903 - DNA, 198 bp, synthetic construct
  misc_feature 1..198: note = Description of Artificial Sequence: Synthetic coding sequence
  source 1..198: mol_type = other DNA
atggccaattttttgctgccgagagggaccagctcgtttcggcgatttaccagggaatctctggccgcaatcgaaaaacggatggctgagaagcaggctcgcggaagcaccacgcttcaggaaagtcgggaaggtcttccggaggaggaagcccctcgtccccaattggacctgcaggcatcgaaaaagttaccatag

SEQ ID NO: 240904 - DNA, 6050 bp, synthetic construct
  misc_feature 1..6050: note = Description of Artificial Sequence: Synthetic coding sequence
  source 1..6050: mol_type = other DNA
atggccaacttccttcttcctagggggacctcgtccttcagaaggttcactagagagagtctggctgccatcgagaaacgcatggccgagaaacaagccagaggctctaccacgctgcaggagtccagagagggcctgcccgaggaggaggccccacgtccccagctggacctccaagccagtaagaagttgccagacctctacggcaacccaccacaggagctgattggtgaacctctggaggacctggatcctttctacagcacacagaaaaccttcattgttttaaataagggaaaaaccatatttcggttctccgccactaacgcactgtacgtgctatccccattccaccccattcgtcgcgcagccgtaaaaatcctggtacatagcttgtttaacatgctgataatgtgcaccatcctgacaaattgcgtttttatggctcagcatgacccaccgccttggactaaatacgtagaatatactttcacagcaatttacaccttcgaaagtcttgtcaagatcctggctaggggattttgtctgcatgcatttaccttccttcgggacccttggaactggcttgacttctctgtaataattatggcctacacaaccgagttcgttgatctgggaaatgtgagcgcactcaggacatttagggtgttgcgagcactgaagaccatcagcgtgatctccggattaaagactattgttggcgctctgatccagtccgtgaagaaattagcagatgtgatggttctcacagtattttgcctgtctgtttttgcactcataggcctgcaactgttcatggggaacctgcgccataagtgcgtgcggaacttcacagccttgaacggcaccaacggttccgtggaagccgacggactggtgtgggaatcccttgacctgtacttatctgatccggaaaactatcttcttaaaaatgggacatctgacgtcctgctctgtggaaattcctcagacgctggcacctgccctgagggataccgatgtctcaaggccggagagaatccggaccatggctatacctcctttgactcattcgcctgggcctttcttgcactttttcgtctcatgactcaggactgttgggagaggctgtaccaacagactctgagatctgccggaaagatttacatgatctttttcatgcttgttattttcctgggctctttctacctggtcaatttgatacttgcagttgtcgctatggcatacgaagagcagaatcaggcgactatcgcagaaaccgaagagaaagagaagagatttcaggaagctatggagatgctcaaaaaagagcatgaagccctgaccatccggggtgtggacactgtcagcagatcatcactggagatgagccctctggcacccgtgaactcacatgagcgcagatctaaacgcaggaagagaatgtcctcagggactgaggaatgtggcgaggaccgcttgcctaagtctgatagcgaggacggaccgagggctatgaatcatctcagcctgacccgtggtctgagtaggactagtatgaaaccaaggagttcgagaggaagtatcttcacatttaggaggcgtgacttaggttcagaggccgactttgcagacgacgagaattcgaccgcaggggagtcagagtctcaccatacttccctacttgtaccatggcccctccggcgtacttccgcccaggggcagccgtcgcccggtaccagcgcccctggtcacgccctccacggcaagaagaatagtactgtggactgcaacggcgtcgtatcgttgcttggtgctggcgatcctgaagcaacctcacctgggagtcacttactgcgacctgtaatgctcgaacacccccctgacaccactacaccgtctgaggaacccggtggtcctcaaatgctgacttcccaggccccttgtgtagacggcttcgaggaacccggtgcaaggcagcgcgcacttagtgccgtgagtgtgcttacaagtgcccttgaggagctggaagagtctaggcacaaatgcccgccttgctggaaccgccttgcccagaggtacctgatctgggaatgttgcccactctggatgagcattaaacagggcgtgaagcttgtggtaatggatcctttcacagacctcacgataaccatgtgcatcgtgctaaacacactctttatggccctagaacattataacatgacgagtgagtttgaagaaatgctccaggttggaaacctggtcttcacagggattttcacagcagaaatgacatttaagatcattgctctggatccttactattacttccagcaagggtggaatatttttgactcaattattgtgattctgtccttgatggagcttggcctttcccgaatgtccaaccttagcgtcctcaggtctttccgcctcctgcgggtatttaagttagctaaatcatggccaacacttaatacccttataaagattattgggaatagcgtgggtgcactcggaaatctgaccctcgtgctcgctatcatcgtgttcatctttgcagtagtgggcatgcaactgttcggcaaaaactattctgaattacgcgacagcgacagtggactactaccccgttggcacatgatggatttttttcatgcgttcctcatcatttttcgtattctttgtggcgagtggattgagaccatgtgggactgtatggaggtgagcgggcagtccctctgcttgctcgtatttcttctcgtgatggttattgggaatctcgttgtgcttaacctttttctggcactcttactgtccagcttctccgcagacaacctgactgctcctgatgaagatcgggagatgaacaacctccagcttgctttagccagaattcagaggggcctccgcttcgtgaagcggactacatgggacttttgctgtgggcttcttaggcagagaccgcaaaaacccgctgctctcgcagcacagggacaactcccttcttgcatagctaccccttactcccctccgccaccagaaactgagaaggtgccaccgactagaaaggaaacgcggttcgaagagggcgagcagcccggacagggaacaccgggtgatccagagccagtttgcgtgcctatcgccgtggccgagtcagacactgacgaccaggaagaggatgaggagaacagcttagggacagaggaggaatcttctaaacagcaagagagccagcccgtgtcagggggaccagaagcgccaccagacagcagaacatggtcccaggtcagtgccaccgcatcttccgaggctgaggcgagcgcctcccaggcggactggcgccagcagtggaaagctgaaccacaagccccaggctgtggcgagactcccgaagactcttgtagcgagggatcaactgcagacatgactaataccgccgaactgttggagcagatccctgacttgggccaggatgtcaaggacccagaggactgtttcaccgaaggctgcgtcagaaggtgcccatgttgtgcagttgataccacacaggctccaggtaaggtttggtggaggctgcggaaaacatgttatcacattgtcgaacattcgtggttcgagacatttataatctttatgatcctgttgtcttcaggcgcactggcattcgaagacatataccttgaggaacggaagactataaaggtcctcctcgagtacgctgacaagatgttcacatatgtgttcgtccttgaaatgctgttgaaatgggttgcatacgggtttaagaaatacttcaccaatgcctggtgctggctagacttcctgatagtggacgtatcacttgtctccttagtagccaacactttaggcttcgccgaaatgggtcctatcaagtcgttacgaacgcttagagccctccggccactaagggcactcagcaggtttgaaggcatgcgagtggtggtaaacgcgctggtaggggctatcccctctattatgaatgtactgctggtttgtctgattttctggttgattttctccataatgggagttaatttgtttgcaggtaaattcgggaggtgcatcaaccaaactgaaggagatctgccccttaactataccatcgtgaataacaagtcccagtgcgagtccctcaatctgacaggcgagctatactggacaaaagtgaaagttaactttgacaacgtgggcgctggatacctggcactcctgcaggttgcaaccttcaaaggctggatggacatcatgtatgcagcggtggatagcagaggctatgaagagcagccgcagtgggagtacaacctctatatgtatatctactttgtgatcttcattattttcggcagtttcttcactctgaacctgtttatcggggtgataattgacaacttcaatcagcagaaaaagaaactgggcggtcaggatatttttatgactgaagagcaaaagaaatactacaacgcgatgaagaaactgggctctaagaagccacagaagcctatacctcggccattaaacaaataccagggttttatctttgatattgtgacgaagcaagccttcgatgtcactatcatgttcctaatatgtttgaacatggtcacaatgatggtggagaccgatgaccaatcacctgaaaagataaatattctcgccaagatcaacttgctttttgtcgccatctttacaggggaatgtatcgtgaaactggccgctctgaggcactattacttcaccaattcatggaatattttcgactttgtggtcgtcatcctcagcattgtgggcacagtgctgagcgatatcatccagaaatatttcttttcgcctaccctctttcgggttataaggctagctcgaatcggacgcatcctccgcctcattagaggcgctaagggtatccgtaccttactttttgcacttatgatgagcctacctgcactcttcaacatcgggctgctcctgtttctggtaatgtttatctactccattttcggcatggcgaactttgcctatgttaaatgggaagccggaattgatgacatgtttaactttcagacgtttgctaattccatgctgtgcctttttcagatcactacgtcagcaggttgggacggcttactttcaccaattctgaatacaggacctccttactgtgatcccacactgcctaatagcaatggctcgcgcggtgactgcggatcccccgcagtcggaatcctgttcttcaccacttacatcatcattagctttctgatcgtcgtgaacatgtacatcgccatcatcctggagaatttttcagtagccacggaggaatcaacagaaccactatccgaggatgattttgatatgttttacgaaatctgggaaaagttcgatccagaagccacccagtttatagagtatagcgtgctgtccgacttcgcagacgccctgtcagaaccgttgcgtatagccaagcctaaccagatttctctcatcaacatggatctaccaatggtctccggtgaccggatccattgcatggacatcctttttgcattcacgaagagggtattaggggagtcgggcgagatggatgctttgaaaatacagatggaggagaagttcatggccgcaaatcctagtaagatttcctatgaacctatcacgacaactctgcgccgtaagcatgaagaggtgagtgcaatggtcatccaacgggcatttaggcgccatctgctgcagcgaagtcttaagcacgcctccttcctttttcggcaacaggccggaagtggactttccgaagaggacgccccagaaagggaagggctgattgcctacgtcatgtctgaaaatttcagtcgtccgttaggtcccccatcatcatcttctatcagttccacttctttccctcccagttacgattctgtgacaagggcaacctcagataatctgcaggtgcggggttctgattattcacattccgaggatctggcggactttcccccatctcccgatcgagatcgagagtctatagttta

SEQ ID NO: 240905 - DNA, 342 bp, synthetic construct
  misc_feature 1..342: note = Description of Artificial Sequence: Synthetic coding sequence
  source 1..342: mol_type = other DNA
atggcccaacatgaccccccaccctggaccaagtacgtggagtacgtgagcgaaaacattaaactgggcaacctgagtgccttaaggacctttcgggtgctcagggcgctcaaaactatctctgtgatccccggactaaagactatcgtcggggctctaattcagtccgtgaaaaaactggcagacgttatggttctaacagtgttttgtttgagtgtgttcgctctgatcggtctacagctcttcatggggaacttaaggcataagtgtgtccgaaactttaccgccctgaacgggactaacggttctgtggaagccgatggccttgtgtgggaaagctag

SEQ ID NO: 240906 - DNA, 6050 bp, synthetic construct
  misc_feature 1..6050: note = Description of Artificial Sequence: Synthetic coding sequence
  source 1..6050: mol_type = other DNA
atggctaactttttgctgccaaggggcactagctccttcaggcggtttaccagagaatccctcgcagccattgaaaagcgtatggccgagaagcaggctagaggtagtaccacactgcaagagtctcgtgaaggcttaccagaggaggaagcccctcgcccacagctggacctccaggcgtccaagaaactgccagacctttacggcaatcccccacaggaactcatcggcgagccactggaggatctggaccccttctactcaacccagaagaccttcattgtgttaaacaaggggaaaaccatcttccgcttcagcgccacaaatgcgctctatgtgttgagtcccttccaccccatccgcagagctgctgtcaagattctcgtgcattcccttttcaatatgttgattatgtgtacaattttgaccaactgcgtgtttatggctcaacatgatcctccgccttggactaaatatgttgagtatacgtttacagcaatatacacctttgagagcttagtgaaaattctggctcggggattttgtttgcacgccttcacatttcttcgcgatccgtggaactggctggatttcagtgtcattatcatggcgtacgtgagcgaaaatattaaactggggaacttgagtgcccttcgaacattccgagttctccgtgctctgaaaacaatttccgtgattcccggtttaaaaacgatcgtgggagccctcattcagagcgtgaagaaacttgcagatgtgatggtgttgaccgtcttctgtctgtccgtgttcgccctgatcggcctgcagctgtttatgggaaatctccgacataaatgtgtgcgaaactttactgctctgaacggaacaaacggctccgttgaggccgatggattggtgtgggagagcttggatctttacttgtctgatcctgaaaactaccttttgaaaaacggtacttcggatgtgctgctgtgcggaaattcgtccgacgcgggaacttgcccggagggatacagatgtctgaaggcaggcgagaacccagatcatggttacacttcattcgattcgttcgcttgggcctttctggcattgtttcggttgatgacccaggattgctgggaacgtttatatcagcagaccctgcgctctgctggtaaaatttacatgatcttcttcatgctggtcattttcctcggatctttctacctggtcaacttaatccttgcagtggtcgctatggcctatgaagaacagaaccaggcaactattgcagagaccgaagagaaagagaaaagattccaggaagctatggaaatgttgaaaaaagagcatgaggcccttaccatccgaggggtcgatacagtctcgcgctcttcattggaaatgtccccactggcaccggttaacagccacgaaagacgatcaaaacggagaaagcgtatgtcttccggcactgaagagtgcggcgaggatcggctccccaaatccgactccgaggacggtcctagggccatgaaccatctgtccctgaccaggggactgtcccgaacgagcatgaaaccccgaagctcccgcggtagcattttcacctttaggaggagagacctcgggagtgaagcagacttcgccgacgatgaaaatagcaccgccggagagtcggagtcgcatcatacttcccttctggtgccttggcctctgaggcgtactagcgcccaagggcagccttctccgggaacttctgcccctgggcacgctttacacggcaaaaagaatagtacagtggactgcaatggcgtcgtcagcctgctcggcgcaggagatcccgaggccacaagcccaggatcccacctgctgcgcccagtgatgctggaacatccaccagatacaacaacaccctcagaggaacctggcggaccgcaaatgcttaccagtcaggccccttgcgttgacgggtttgaggagccaggtgctcgccagagagccctgagtgccgtttcggtcctcacaagcgcccttgaagaacttgaagagagtagacacaaatgccccccatgttggaaccgtttggctcaaaggtatctgatttgggagtgttgtccattgtggatgagtattaaacaaggggtgaagctggtcgtgatggatccgttcaccgacctcacgattacaatgtgcatcgttctcaacactctgttcatggccctggagcactataacatgacctcggagttcgaagagatgttacaggtcggcaaccttgtgtttaccgggatttttacagccgaaatgacctttaagatcattgctctggatccatattattactttcagcagggttggaacatttttgacagtatcatcgtgattctttccctgatggagctggggcttagcagaatgagcaacctctctgtcctccgaagctttcgtctcctccgcgtattcaagctggccaaaagctggcctactctcaacaccttgattaaaattattggcaactccgtcggggcactaggcaacctgacgctggtgctggcaatcatcgtctttattttcgccgtggtgggtatgcagctttttggtaagaattactccgaactgagagactccgactcggggctcctgccacgctggcatatgatggacttctttcacgcttttctgattatcttccggattctgtgcggagagtggattgagacaatgtgggactgcatggaggtgtccgggcagtctttgtgcttgctggttttcctgcttgtcatggtcataggaaatttggtggtattgaacctgtttctggccttacttctatcctctttcagcgccgataatctgaccgcaccagacgaagaccgcgagatgaataatctgcagctggccctcgcccgaatccaacgcggactgcgctttgttaagcggacaacctgggacttctgctgcggcctgctgcgccagagaccacaaaaacccgctgctctggctgctcaggggcaactgccctcctgtatcgcaacgccttacagccctccgcctccggagaccgagaaggttccacctacacgaaaggaaacacggtttgaggaaggagaacagccaggccagggaactcctggcgaccccgaacctgtgtgcgtacctatcgccgtcgctgagagcgacaccgatgaccaggaagaggatgaagagaactcactgggcaccgaggaggagtccagtaaacaacaggaaagccaaccggtgtctggcggaccagaggcaccaccggactctcgtacgtggagccaggtcagcgccactgcctcatctgaagccgaagcgtccgcctctcaggcagactggcggcaacagtggaaagcggaaccacaggctcccggatgtggcgagacccccgaggacagttgctccgaaggcagcactgccgatatgaccaatactgccgagcttctggaacaaatcccagatctggggcaagacgtcaaggacccagaagattgcttcactgaaggctgcgtacgtagatgtccatgctgcgccgtcgacacgacccaggcgccaggcaaggtttggtggcgcctaagaaaaacctgctatcatattgtggaacacagttggtttgagactttcatcatctttatgatcctgctgtccagcggcgcactggcattcgaagacatctacctggaagagcgcaagaccattaaagtcctcttagaatacgccgataagatgtttacctacgtcttcgtcctcgagatgctgctaaaatgggtcgcgtatggcttcaaaaaatattttaccaacgcctggtgctggctcgatttcctcatcgtggacgtgagtctagtcagcctcgtggcaaacactttgggtttcgcagagatgggccctatcaaatctctcagaacactgagagctctacggcctcttcgagctctgtcgcgcttcgagggtatgagggtagtcgttaatgccctcgtaggtgccattccgtccataatgaatgtgctgttggtctgcctgatcttctggctgatcttttcaatcatgggagttaacctgtttgcaggcaaatttggccgatgcatcaaccaaaccgagggggatttacccctaaactataccattgtgaataacaagagccagtgtgagagtctcaatctcacaggcgagctctattggaccaaagtgaaggtgaactttgataatgtgggtgcaggctacttggcgcttcttcaggtggccacgtttaagggttggatggatatcatgtatgcagctgtggattcgcggggatacgaagaacagccacaatgggagtacaatctttacatgtacatctattttgtgatcttcatcatctttggctctttcttcacactgaacctgttcatcggggtaatcatcgacaattttaaccagcagaaaaaaaaacttggcggtcaggatatattcatgacagaagagcagaagaagtactacaacgcgatgaaaaagctgggctccaaaaaaccacagaaacccatccctcgcccactaaataaataccaaggttttattttcgatatcgtaactaagcaggccttcgatgtgacaatcatgtttctcatttgcctgaatatggtgaccatgatggtggagactgacgaccagtccccagagaagattaatatcttagcaaagataaatctcctatttgtggccatattcaccggggagtgcattgtaaagctagccgctttgcggcattactacttcacgaattcctggaacatattcgactttgtggtcgttatattaagtattgtcggcaccgttttgtctgacattatacagaagtattttttcagccctacactgttccgggtgattagacttgcgaggatcggcaggatcttgcgattgatcagaggtgcgaagggtatcagaaccctgctgtttgcactcatgatgagcctgcccgctctgttcaacattggactcctccttttcctcgtgatgttcatctatagtatattcggcatggctaactttgcctatgttaaatgggaagccggaatcgatgatatgtttaactttcagacttttgctaacagtatgctctgcctgttccagatcactacgagtgctggatgggacgggctgctatctcccattttaaacaccgggccaccctattgtgaccccacactgcccaattcaaacgggagccgcggagattgcggttcaccagcggtggggattttatttttcaccacatacatcataatttcttttcttattgttgtaaacatgtacatcgctatcatcctggagaacttttctgtggccactgaggaatccaccgaacccctgtctgaagatgatttcgatatgttctacgagatatgggagaagtttgaccccgaggcaactcaattcatcgaatactctgtgctttccgacttcgcggacgctttaagcgaacctttgcggatagccaaaccgaaccagatctcattaataaatatggatctgcccatggtgtcaggcgaccgtattcactgcatggacatcctgttcgcattcaccaagcgcgtgctcggcgagtccggagagatggatgccctgaagattcaaatggaggagaagtttatggcggctaacccaagtaagatcagctatgagccgataaccacaactttgcggagaaaacatgaggaagtgtccgccatggttatccagcgagcctttcgtcggcacctgctgcagcgttctctcaagcacgcctcttttttgttccgccaacaggctgggagcggtctgtctgaagaagacgctccagagagagaggggttaatcgcctacgtgatgagcgaaaacttctcgcggccactgggacctccaagcagttccagcattagttctactagttttcctcccagctacgacagcgtgacccgagccaccagtgacaacctgcaagttagggggagcgactattctcactctgaggatctagcagatttcccaccatctcctgatcgggatcgagaatccatcgtgta

SEQ ID NO: 240907 - DNA, 5996 bp, synthetic construct
  misc_feature 1..5996: note = Description of Artificial Sequence: Synthetic coding sequence
  source 1..5996: mol_type = other DNA
atggccaacttcctgttacctagagggacttccagctttagacgcttcacgagggagagtctggccgcaatcgagaagaggatggctgaaaagcaggcaaggggaagcaccactctacaggaaagccgtgagggcctccctgaggaggaagccccacgtccccagctggatctacaggcctcgaaaaagctgcctgacttgtatgggaaccccccacaagagctcattggtgaaccactggaggatctagaccctttttattctacccaaaagacatttatcgtgctaaataaaggaaaaactattttccggttcagcgccacaaatgcgctgtatgtcttgagtccatttcacccgatacgccgagcggcagtcaagattcttgttcattctctgtttaatatgctgataatgtgtacaatcttgacgaactgtgtattcatggcacagcacgacccacccccatggaccaagtatgtcgagtatactttcaccgctatctatacattcgagtctctggtgaagattctagcaaggggattctgtcttcacgcatttacttttctgcgtgatccttggaattggctagacttttcagttattatcatggcttacgtgtctgagaacataaagttaggaaatttatcagcactgcggaccttccgggtcttgagggcccttaaaaccataagcgtcattcccggactgaagactattgtgggagctctgatccaaagcgtgaaaaagcttgccgacgtcatggtcctgacagtattctgtctttccgtgtttgccctcatcggactacagctttttatgggcaacttgcggcacaagtgtgtgcgaaacttcacagccctgaatggcaccaacggatccgtcgaggcagatggccttgtctgggagtccctggacctgtatcttagtgatcccgagaactacctcctgaaaaacggaacctcggatgtgctgctgtgcggaaattcaagtgacgctggaacttgccctgagggatataggtgcctcaaagcaggagagaatccggatcatgggtacacatcattcgacagctttgcatgggcgtttttagccctctttcggctaatgacacaggactgttgggaacggctctatcagcagaccctgagatccgctggcaagatctacatgatcttcttcatgctcgtgatattcctagggagcttctacctggttaaccttatccttgccgtggtagcaatggcctatgaggagcagaaccaagcaaccatcgccgagacggaggaaaaagaaaagcggttccaggaggctatggagatgctcaagaaggagcacgaagctctgacaatcaggggtgtcgacaccgtgagcagaagttcgttggagatgagtccactggcccctgtgaactcacacgagagaagaagcaaacgtcgcaagcgcatgagttctggcactgaagagtgtggcgaggaccggctgcctaaatcagactcagaggacggtcctcgggcaatgaaccatctgtcacttactcggggattgtcaagaacctcgatgaagccaaggtcatccaggggcagtatctttaccttccgcagaagagatttgggaagtgaggccgacttcgccgacgatgagaacagcacagcaggagaatcggagtctcatcacacaagcctgctggtaccttggcccctgcgtcgtaccagtgctcagggacagccgtccccgggtacttccgccccagggcacgcgcttcatggtaaaaagaacagcaccgtggattgcaacggtgtagtgagtctgctcggcgcaggagacccagaagcaactagcccaggatcacacctgctccgaccggtgatgcttgagcaccctccagacaccacgaccccatctgaggagcctggcggtccacaaatgctgacatcccaggcaccttgcgtcgacggctttgaggagcccggagctcgtcagcgcgctctctcagcagtcagcgtcctgacatccgccctggaggagctggaggagtcaaggcataaatgtccgccttgctggaacagactagcccagcgctatctgatttgggaatgttgtccactgtggatgtccatcaaacagggagtcaaattggtggtgatggatcctttcaccgacctgacaataacaatgtgtatcgttttaaacaccctcttcatggccctcgagcactataatatgacctcagagttcgaggagatgttgcaggtgggcaatctcgttttcaccggcattttcaccgctgagatgacctttaagatcatcgccctggacccctattattattttcagcagggctggaacattttcgattccatcattgtcattttaagcctgatggaactggggcttagcaggatgtcgaatctctcagttctgcggagtttccgactgttacgagtcttcaaactggctaaaagttggcccacactgaacaccctgataaaaattatcggtaactcagttggcgcacttgggaatctaacactggttttggcgatcatcgtttttatctttgctgtggtggggatgcagttgttcgggaagaactatagcgagcttagggattcggattccggtctgctgccacggtggcatatgatggactttttccacgcgttcctcatcatattccggattttgtgcggagaatggatcgagacaatgtgggactgcatggaggtcagcggtcaaagcctgtgcttattagtgttcctgttggtaatggttatcggtaaccttgtggtactgaacctgtttctcgcactcctcttaagttcattcagcgccgacaacctgaccgcaccagacgaagacagagaaatgaataacctgcagctggctttggccagaatccaacggggattacgatttgtgaagaggaccacttgggacttctgttgtggtctgttgcggcagcgtcctcagaagccggcagcgctggcagcccagggccagctgccgtcctgtattgccaccccatattcaccgcctccgccagagacagagaaggtgccacctacacggaaagagacccgattcgaagaaggcgaacagcctgggcagggaacccctggagatccagagccagtgtgtgtacctattgcagtggccgaatcggacaccgacgaccaggaggaggatgaagaaaactcactcgggactgaggaggagtcctcaaaacaacaagaatcccagcccgtctcggggggacctgaggcccctccagactcacggacatggagtcaggtgtcagccactgcgtcgagcgaagccgaggcctctgcctcacaggcagactggcggcagcagtggaaagccgaacctcaagcacctggctgcggagagacacccgaagactcgtgcagcgagggaagtactgctgatatgactaacaccgcagagctgttagagcagattccagaccttggacaggacgtaaaggaccccgaagactgcttcacggagggatgtgtcaggagatgtccgtgttgtgccgtggacaccacccaagccccaggtaaggtgtggtggcgtttacgcaaaacttgctaccacatcgtcgaacattcatggtttgagactttcataatttttatgatcttgctttcgagtggggctcttgcctttgaggacatttatctggaggagcggaagactatcaaagtcctccttgagtacgccgacaaaatgttcacatacgtgttcgtgcttgagatgctccttaaatgggtggcctacggcttcaaaaagtactttacgaatgcctggtgttggttagacttcctcattgtggatgtgtctctggtaagcctcgtagcaaacaccctgggattcgcagagatgggtcccattaaaagccttagaaccctgagagctttacgcccacttagagcactgagcaggtttgaggggatgagggtggttgtgaatgcgctggtgggggctattcctagcatcatgaacgttctgcttgtgtgcctgattttttggctgattttttctataatgggggtgaacttgtttgctgggaaatttggcaggtgtatcaaccagaccgagggagacctgccccttaactatacaatcgtcaataataagtcccagtgcgagagtctgaatttgacgggagagttgtattggacaaaagtgaaggtgaacttcgacaacgtgggcgcaggataccttgccctgttacaggtgtatgaagaacaaccccaatgggagtacaatctttatatgtacatttatttcgtcattttcattatatttggtagtttcttcaccttgaacttgtttatcggggtgattattgacaatttcaatcaacagaaaaaaaaattgggaggacaggacatttttatgaccgaggaacagaagaaatattacaacgcgatgaagaaactgggaagtaagaaacctcagaagccaatcccacgcccactgaataagtaccagggctttatttttgacatcgtcactaagcaggcgttcgacgtgacgatcatgttcctgatttgtcttaatatggtcacaatgatggtggagacagacgatcagagtcccgagaagattaacatactggccaaaatcaatttgctgtttgtggcgatctttactggcgaatgtattgttaaactagccgcactgcgtcactactacttcaccaactcatggaatatctttgactttgtcgtggtcatactctcaatcgtgggtacagtcctatcggatataatccagaagtactttttttcacctactctctttagggtgattcggctcgccaggattggacgcattctgcgactgatccgtggagctaagggcattcgcactctcctgttcgcactgatgatgagcctgccagctctttttaacatcggtttgctgctgttcctagtgatgtttatttactctatttttgggatggctaacttcgcatacgtgaaatgggaagcagggatagacgacatgttcaactttcagaccttcgcgaatagtatgttatgtctgttccaaatcacaacaagtgcaggatgggacggcctgctgtctcccattttgaacacgggacccccatactgcgatcccacgcttcccaactctaacggcagcaggggagactgcgggagcccagcagtcgggatcctctttttcacaacgtacatcatcattagtttcctgatcgtggtcaacatgtatatcgctattatcctggaaaacttctcggtagccaccgaggagtctacggaacccttgtccgaagatgattttgatatgttttacgaaatctgggagaagtttgaccccgaggcgactcagtttatcgaatacagtgtgttatccgactttgcggatgccctctcagaacccttgagaattgccaaacccaaccaaatcagtttgatcaatatggatcttccaatggtatccggcgataggatccattgcatggatattcttttcgcctttacgaagagggttctgggcgaatccggcgagatggatgcgctcaagattcagatggaggaaaagttcatggcggcaaacccttccaaaattagctacgaaccaatcaccaccaccctgaggcgcaagcacgaagaggttagtgcaatggtgattcagcgcgctttcagaaggcatctattgcagagaagcctcaagcacgcatcatttctttttaggcagcaggctggttcaggacttagtgaagaagatgccccagaacgggagggtctcattgcttacgtgatgtctgagaatttcagcaggccactcggcccacctagttcttccagcatttccagcacatctttccccccttcctatgacagcgtcactagagccacctccgacaatctccaggtgaggggcagcgactattcccattcagaagacctcgcggacttccccccatcacctgaccgtgacagagaaagtatcgtgta

SEQ ID NO: 240908 - DNA, 6047 bp, synthetic construct
  misc_feature 1..6047: note = Description of Artificial Sequence: Synthetic coding sequence
  source 1..6047: mol_type = other DNA
atggctaactttctgctgcccagaggcacctctagttttcgccgattcactagagaaagtctcgccgctatagaaaagaggatggccgagaaacaggctagaggcagtactactctgcaggaatcaagagaaggcctgccggaggaagaggcccctaggccccagttagacctgcaagcaagcaagaagcttcccgatctgtacggaaaccctccccaggagctcattggcgaaccactagaagatttggatccgttttatagcacccagaagacattcatagtcttgaataaaggaaagacgatcttcaggtttagtgccactaatgcgttatatgtcctgtccccttttcaccccatccggcgtgctgctgtaaaaatactcgtgcactcgttgttcaacatgttgattatgtgtaccatcctcactaactgcgtgtttatggcccagcatgatccacctccttggactaaatatgtcgagtacacgttcaccgccatttacacatttgaaagcttggttaaaatcttagctcgcggattttgtttacacgctttcacctttcttcgggacccctggaactggttggatttcagcgtgatcatcatggcttataccaccgagtttgtagatcttggcaacgtgagcgcgctcagaacatttcgtgtgctgcgcgcactgaagactatctccgtgatatccggcttgaagactatcgttggtgccttgattcaatccgtcaagaaactggctgatgtcatggttctgaccgtgttttgtctaagcgtgtttgccctgataggtttgcagctgttcatggggaatttgcgccacaagtgcgtgcggaacttcactgccctaaatggcaccaacgggtctgtagaagcggatgggctcgtatgggaatcacttgacctctacctgtctgacccagagaactatttgctgaagaatggcacatccgacgtacttctttgcggcaattcctctgatgcaggtacctgcccagagggttataggtgcctgaaggcaggagaaaacccagaccatggctacaccagcttcgacagcttcgcttgggcctttctggcgctatttagactaatgactcaagactgctgggagagactttaccaacaaacactgcggtcagctggtaaaatttacatgatttttttcatgctggtaatttttctggggtctttctatctcgttaatttgatcctggctgtagtggcaatggcctacgaagagcagaaccaggctacgattgccgagactgaggaaaaggaaaaaagattccaggaggcgatggagatgctgaagaaagagcatgaggctctgaccattagaggcgttgatacagtctcacggtctagtctagaaatgtcgcctctggccccagtgaacagccatgagcgacgctcgaaacggcgtaagagaatgtccagcgggaccgaagaatgcggcgaagacaggctgcccaaatctgactcagaagacggccctcgggcaatgaatcacctcagcctcacgaggggactgtcccggacctcaatgaagcctaggtccagccgcggatccatcttcacgtttaggcgccgtgacctcggatcagaggctgatttcgcagatgacgaaaacagcaccgccggagaaagcgaatcccaccacacctcactcctcgtgccatggccgcttcgcagaacaagtgcacagggacaaccttccccgggaacaagcgccccaggccatgctcttcatggcaagaagaattcaaccgtcgattgtaacggcgtggtcagtctgctaggggctggcgaccctgaagcaacttctccgggatctcatctcctgagacccgtcatgttggaacatcctcccgacaccactactccctccgaggaacccggaggaccccaaatgttgacaagtcaggctccctgcgtggatggttttgaggaaccaggagcgagacagcgggctttgtcagcagtttccgtgctgacgagcgccctggaggaactcgaggagagtcgccacaagtgcccgccttgctggaatagactggcccagaggtacctgatctgggagtgttgtccgttatggatgagcatcaagcagggggttaagctagtcgtaatggatcccttcacagatctgacaatcactatgtgcattgtattaaatactctctttatggcgctggaacattataacatgaccagcgaattcgaagagatgcttcaggtggggaatctcgtgttcactggtattttcaccgcagaaatgacctttaagattatcgcccttgacccatattattactttcagcagggatggaacatattcgactccataatagtcatcctctcactgatggaactgggcctgtctcggatgtcgaatctgtccgtcctgagatctttccgcctgctgcgtgtgtttaagttagctaaatcctggccaacacttaataccctgattaagattataggaaacagcgttggagccctggggaatcttaccctggtgttggctattattgtttttatctttgctgttgtgggcatgcagctgtttgggaaaaattactctgaactgcgggactccgattcggggctgctcccgagatggcatatgatggattttttccacgccttccttatcattttccgcattctctgtggagaatggattgaaacaatgtgggactgcatggaggtcagtggccaatcgctgtgcctgcttgtcttcctgctggttatggtgatcgggaatctcgtagtactgaatcttttcctggccctgctgctgagctccttttccgcggataatctgaccgcccctgatgaggatcgggagatgaataaccttcagcttgctctggcccgaatccagcgaggcctccgcttcgtgaaacgaacaacgtgggatttctgttgcggacttttaagacagcgccctcaaaagccagcagccctggctgctcaagggcagttgccttcatgtatcgccactccctactccccaccaccacccgagactgaaaaggtcccccctacaaggaaagagacgcgtttcgaagaaggggagcagcctggccaggggactcctggcgacccagagccagtgtgtgtgcccatagccgtggccgagagcgacaccgacgatcaggaggaggacgaggagaattccctgggaactgaggaggaatcatctaaacaggagtcgcagcctgtcagcgggggtcctgaagcccctccagattccagaacctggtcccaagttagcgccactgctagctctgaggccgaggcctccgccagtcaggcggactggaggcaacagtggaaggccgaaccccaggctcctgggtgcggagagaccccagaggattcttgctccgaggggtccacggccgatatgaccaataccgccgaattgctggagcagatcccagatcttggccaggatgtcaaagaccccgaggattgcttcaccgagggatgcgtgcggaggtgcccctgctgcgccgtagacaccacacaagctcctggaaaggtgtggtggagactgaggaagacatgctaccacatcgtcgaacactcatggtttgaaacatttataatttttatgattctgctgagctccggggctctggcatttgaggacatctacctggaggaacgcaaaaccattaaagtactcttagaatacgccgacaaaatgttcacttacgtttttgtcctcgaaatgttactgaaatgggtcgcatacggcttcaaaaaatacttcacgaacgcctggtgctggctcgattttctcattgtggacgtaagcctggtgagcctcgtcgccaacacattgggtttcgccgagatgggacctattaagtcccttaggactctccgagctctgcgcccattgcgcgcactgagtaggttcgagggaatgcgcgtagtggtcaacgcactggttggcgctatcccctccatcatgaatgtccttctggtgtgcttgatcttctggctgatattctctatcatgggggtgaatctgttcgctggtaaattcggaagatgcatcaaccaaaccgagggcgacctgcctctgaattacaccatcgtaaacaacaaatcgcagtgtgaaagtctcaacctgaccggagagctatactggacaaaggtgaaagtgaatttcgacaacgtgggtgccggatatctggcactgcttcaggtggctacatttaagggatggatggacataatgtacgccgctgttgacagtagggggtacgaggaacagccacagtgggaatataatttgtacatgtacatctacttcgtgatatttatcatcttcgggagcttcttcaccctgaatcttttcattggtgtgatcattgacaactttaaccagcaaaagaagaagcttggtggtcaggacatcttcatgacggaggagcaaaaaaagtactataacgccatgaagaaactgggctccaagaaaccccagaaaccaataccgagaccactcaataagtaccaggggtttattttcgacattgtgaccaaacaggcctttgacgtgactattatgttcttgatatgtctgaatatggtaacaatgatggtagagacagatgaccaatcacccgagaaaataaacattctcgcaaagatcaacttgctcttcgtggcaatcttcacaggagagtgtattgtgaagctggccgctctccgccactactatttcaccaattcctggaatatatttgacttcgttgtagtgatcctctctatcgtcggcaccgtcctgtccgatataatacagaagtacttcttttcaccaaccctcttccgggtgattcggctagcgagaattggacggatccttcgcctgatccggggagccaaaggcatcagaactttgcttttcgcactgatgatgagtctgcctgccctgttcaatattgggctgctcttgtttcttgtaatgttcatatactcaatttttggaatggcaaacttcgcttacgtaaagtgggaagctgggatagacgacatgtttaatttccaaactttcgctaattcgatgctctgtcttttccagatcacaacgtctgctggttgggacggcctcctgtcgcccattttgaacacgggcccaccttactgcgaccctacactgccaaactctaatggctcgagaggagattgtggctcccctgcagtgggtatcctgttttttactacctacatcattatctcttttttgatagtagtgaatatgtacatcgctataatattggagaacttttcagttgctacagaagaatcaactgagcccctttccgaagatgatttcgacatgttttacgagatatgggagaaattcgaccctgaggccacgcaattcattgaatatagcgtcctgtccgatttcgctgacgcccttagtgagcccctccgaatagctaaaccaaaccagataagcctgatcaatatggatcttcccatggtctcaggagatcgcattcactgcatggacatcctcttcgcgttcactaagagggtgttgggcgagagcggagagatggacgctctcaagattcagatggaggagaagttcatggctgccaatccttccaaaattagttacgaacccatcaccacaacccttcgtcgcaagcacgaggaggtgagcgccatggttattcagcgtgcctttaggcggcatctgctgcaaaggagcttaaagcacgctagttttctctttcgacaacaggctggctccggtctctcagaggaagacgcacctgagcgagaagggctgattgcttatgtcatgtcagagaacttttctcgaccgctgggaccgccatcaagctcctccatctcttctactagtttcccacctagctatgacagcgtgactagggctacttccgacaaccttcaagtgagggggagcgattactcccattctgaagatctggcagattttcccccaagcccagaccgtgaccgcgagagtatcgtata

SEQ ID NO: 240909 - DNA, 5996 bp, synthetic construct
  misc_feature 1..5996: note = Description of Artificial Sequence: Synthetic coding sequence
  source 1..5996: mol_type = other DNA
atggccaattttctgctacccagaggtacgagttcgtttcggagatttactcgggaatctctggccgcaatcgagaaaaggatggccgagaagcaggctcggggaagcaccacacttcaggagagcagggaaggtcttccagaggaggaagcaccccgtccccagcttgatctccaggctagtaaaaagttacctgacctgtatggaaaccccccacaggagctgatcggcgaacctctggaggacctggatccattttattccacgcaaaaaaccttcatcgtgctgaacaaaggaaagaccatttttcgcttcagcgccaccaatgctctgtacgtgctaagcccattccaccccatcagaagggcagccgtgaaaatcctcgtccacagcctgtttaacatgcttattatgtgcaccatcctgactaactgcgtgtttatggcccagcacgatccccctccttggaccaaatacgtggaatatacatttacagcaatttacacatttgagagcctggtgaaaatcttagcccgaggtttttgtctccacgccttcacttttctgagagacccttggaactggctggacttctccgtcattatcatggcctatgttagcgaaaatatcaaattaggaaacctgtctgccttgaggactttccgcgtgctgagagccttgaaaaccattagcgtgattccgggtctgaagacaatcgtgggagcactgattcagagcgtgaaaaaacttgcagacgtgatggtgctgaccgtgttttgtttatccgtattcgcgctcatagggcttcaactttttatggggaatttacgacacaaatgcgtgagaaactttaccgccttaaacgggacaaacggcagtgtggaagccgatggtctggtctgggaatcccttgatctgtatctctccgatccggagaattatctgcttaaaaacggtaccagcgacgtgctcttgtgtggaaatagctctgatgctggtacctgcccagagggatatcggtgcctgaaggccggtgagaacccagatcacggctatacaagttttgattcttttgcgtgggctttcttggctctgttcagactcatgacccaagactgctgggagaggctgtaccaacagaccctcaggtcagccggaaaaatttatatgatattctttatgctggtgatctttttggggtcattctacctggttaatctgatcctggcggtggtcgctatggcctatgaagagcagaaccaggcgacaatagcggagacagaagagaaggaaaaacgcttccaggaggcgatggaaatgttaaaaaaggagcatgaagctctgaccatcaggggggtcgataccgtgagccgatcctctctggaaatgtcgcctctggcacccgtgaattctcacgaaaggagatccaagcggagaaagcgtatgtccagcgggaccgaagagtgcggggaggatagactaccaaaaagcgatagcgaggatggccctagggcaatgaatcatctttccctcactcgaggactgagtcgcacatccatgaaaccccgatcttcccggggtagcatatttacatttagaagaagggatctgggtagcgaggcagattttgctgacgatgagaattctaccgccggagaaagcgaaagccatcacacttcgctattggtcccatggcctctgagacggacgtccgcacagggacaaccatctccaggaaccagcgcgccaggccacgccttacatggaaaaaagaactccaccgtggactgcaacggtgtggtgtctctgctcggagctggcgatccagaggctacatcgccaggcagtcatcttctgagaccggtgatgcttgagcacccccctgacacaaccacaccttccgaagaacctggcggtcctcagatgttgacctcacaggccccatgcgttgacggctttgaggaacccggtgccagacagagggctctatcggccgtctcagtgttaacctcggcccttgaggagctcgaagaatcgaggcacaaatgccctccttgttggaaccggttggctcagagatatctgatttgggagtgttgccccttgtggatgtcaattaaacagggggtgaagctagtggttatggaccccttcaccgacttaaccatcactatgtgcatcgttctgaatactctgttcatggcactcgaacattacaatatgacttctgaattcgaggagatgctgcaagtgggtaatctggtctttaccggcatcttcactgcagaaatgaccttcaaaataatagctctggacccttactattattttcagcaagggtggaacatttttgattccatcattgtaatcttgtcgctgatggaactaggcttgtcacgcatgagtaatctatctgtgctaaggagtttcagattgcttcgcgtctttaaattagctaagagctggcccaccttgaatacactcatcaaaattatcggcaactctgtgggcgctctcggaaatctcaccttggtcctcgctattatcgtgttcatctttgcagtagttgggatgcagctgttcggcaaaaactactccgagttgcgcgactctgacagtgggctgttgccacggtggcacatgatggatttttttcatgccttcctcattatcttcaggatcttatgcggcgagtggatagagaccatgtgggactgcatggaggtctcaggtcagtccctctgcttacttgttttcctactggtgatggtaattggtaacctcgtcgtcctcaacctgttcctggccctcctgctctcatcattttcagccgacaatttgaccgctccagacgaagaccgggagatgaataatctgcaactggcactcgctaggattcagcgcggtctgaggttcgtcaaaagaacaacctgggatttctgctgcggactgctccgccaacgcccacagaagccagctgcccttgccgctcaggggcagttaccaagctgcatcgctactccttattctcccccaccccctgagaccgagaaggttcccccaaccaggaaggagaccagatttgaggagggagagcagccgggacaagggacaccgggagaccctgagcctgtgtgcgtacctatcgctgtggcagaaagtgacacagacgaccaggaggaggatgaggagaatagcctcggaacagaagaagaatccagtaaacagcaagagtcccagcccgtctccgggggaccagaggcccctcccgacagcagaacatggagccaggtaagcgcgaccgctagcagtgaggccgaagccagcgcgtcacaggcggactggaggcaacagtggaaagcagaacctcaggctccaggatgcggagagacaccagaagacagctgttcagaagggtcaaccgcggacatgacaaataccgcagagctgttggagcaaatacccgatctggggcaggatgtaaaggacccagaagattgcttcaccgagggatgcgtgcgcagatgcccttgttgcgcggtcgacaccacacaggcaccaggaaaagtatggtggaggctgcgtaagacttgctaccacatcgtagaacattcctggtttgagacattcatcatattcatgatcctgctttcaagtggcgcactcgccttcgaggatatctatctcgaggagcgcaagacaattaaggtgctgcttgagtacgcggacaagatgtttacttatgttttcgtcctggagatgctgttaaagtgggtggcatatgggtttaagaaatattttactaacgcatggtgttggttggactttctaatcgttgacgtcagcctggtctctctggtggcaaacaccctcgggtttgctgaaatgggcccaataaagagcttaagaacgctgagagccctccgaccgctgcgggcactcagcagattcgagggcatgcgtgttgtggtgaatgcacttgtcggcgctattccatctatcatgaatgtgctgcttgtgtgtctgattttttggctcatattctcgatcatgggcgtaaatctgtttgcaggaaagttcgggagatgcatcaaccagaccgagggagacctgccgctcaattataccatcgtaaataataaatcacagtgtgagtcactcaacctgactggggaactatactggacaaaagtcaaggtgaatttcgacaatgtaggtgctggctatctcgcgctgttgcaagtgtacgaggaacaaccacaatgggagtacaatttatacatgtatatctactttgtgatctttattatatttggaagcttctttactctgaacttatttatcggtgtgataattgacaacttcaatcagcagaagaaaaagctaggagggcaggatatttttatgaccgaggaacaaaagaagtactacaatgccatgaagaagctgggtagtaagaagccccagaaacctattccacgccctctgaacaaataccaaggcttcatcttcgacattgttaccaagcaagcatttgatgtgactatcatgtttctaatttgtctaaatatggtcaccatgatggtggaaaccgacgaccagagcccagagaagatcaatattttagcgaaaattaaccttcttttcgtcgccatctttaccggagaatgtatcgtgaagctggccgcattgaggcattactatttcaccaactcctggaacatatttgactttgttgttgtcatactgtccattgtgggcaccgttctgtcagatatcatccagaaatatttctttagcccaaccttgttccgcgttattagactggcaaggattggcagaatcctgcggctgattagaggggctaaaggcattagaacactgctgtttgcgttgatgatgtctctccccgctctctttaacatcgggcttctgttgtttcttgtcatgttcatttacagtatctttggcatggccaacttcgcctatgtgaagtgggaggcagggatagacgacatgtttaacttccaaacgtttgccaactcaatgctatgccttttccaaattactacatctgccggttgggacggcctactatcacctattcttaacacagggcctccctactgcgatcctaccctgcccaactccaatggctccaggggagattgcggatcacccgcagtcggcattcttttcttcaccacatacattatcatttccttccttattgtcgtcaatatgtatatcgctatcatcttagaaaatttctccgtcgcaacagaagaatccaccgagcctctctccgaagatgattttgatatgttttacgagatttgggaaaagttcgatccagaggccactcaattcatagagtacagtgtgttgagcgatttcgcagacgctttgagcgagcccctgcgtatcgccaaaccaaaccagatcagtttgataaacatggatttgccgatggtatcgggcgaccggattcattgcatggatatcctcttcgcattcaccaaacgcgtgctaggcgaaagtggagaaatggatgctctaaagattcaaatggaggagaaattcatggctgcgaaccccagcaaaatttcctacgaaccgataactacaacccttaggagaaaacatgaggaggtaagcgctatggtaattcaacgcgcatttagacgccacttgctacagcggtccctcaagcacgctagctttttgttccgccagcaggctggctctggcctgtccgaggaggatgcaccggagcgggagggtctcatagcctacgtcatgtcagagaactttagcagacctctggggccaccatcatccagctcaatttcctcaaccagcttcccacctagttacgattctgtcacacgtgcaacgtctgataatcttcaggtgagaggaagtgactactcacactccgaggatctggccgatttccccccatcgccagacagggatagggagagcattgtcta

SEQ ID NO: 240910 - DNA, 6047 bp, synthetic construct
  misc_feature 1..6047: note = Description of Artificial Sequence: Synthetic coding sequence
  source 1..6047: mol_type = other DNA
atggccaacttcttgctccctaggggtactagttccttccggaggttcacaagagagtcacttgccgctattgagaaaagaatggcggagaagcaggccagaggctctaccactctgcaagagagccgggaaggattacccgaggaagaagccccaaggccccaactggacctgcaggcctccaagaagctgcctgacctatatgggaatcctcctcaggagctcattggagagcccctcgaagatctggacccattttactctacgcagaaaacttttatcgttttgaacaaggggaaaacaatttttcgattttcagctactaatgcactttacgtactcagccctttccaccccatccggagagccgcagtgaagattctggtacactcactatttaacatgctcatcatgtgcaccatcctgacaaattgcgtatttatggctcagcatgatccgcctccttggactaaatatgtcgaatatacgtttacagctatatatacctttgagagcttggtgaaaatactggccaggggcttttgcctccatgcgtttacatttctgagggacccatggaactggctggactttagcgtcattatcatggcctatacaacagaattcgtggatctagggaatgtcagcgcacttcggacattccgcgtgctacgtgcattgaagactattagtgtgattagtggcctgaaaacaatcgtcggcgctttgatccagtctgtcaaaaaactggctgacgtgatggtgctcaccgtgttttgtctgagcgtgttcgccctgattggtttgcagttattcatgggaaatctaagacacaaatgcgttcgcaactttacagccctcaatggaacaaacgggagcgtggaggccgatggtttggtctgggagtcccttgatctctatctgagtgaccctgagaactacctgctgaagaacggcacttcagatgttctgctgtgtggtaactccagcgacgccggaacatgcccagagggatataggtgtttaaaagctggggaaaacccagatcatgggtacacctcatttgacagtttcgcgtgggccttcctggcccttttcagacttatgacccaggattgttgggagaggctataccagcagaccttaaggtccgctggaaagatttatatgatattcttcatgctggtcatcttcctcggcagtttttatctagtcaacctcattctagccgttgttgctatggcctacgaagagcagaatcaggccaccattgcagagactgaggaaaaggagaaaagattccaggaagccatggagatgttgaagaaagagcacgaggcactcacaatcaggggagttgatacagtgtcccgctctagcctggaaatgtccccacttgcccctgtcaactcacacgagcgcaggtcaaaacgacggaaacgtatgtctagtggcaccgaggagtgcggggaggacaggctgcctaaatcggatagcgaggatggtcccagggctatgaatcacctgagcttgacaagaggcctctcacggacctcaatgaaacccaggtcttcgaggggatcaatattcacattccgaaggagggatctgggctctgaggccgattttgccgatgacgagaattcgacagctggagagtctgaatcacatcacacatccctcctggttccatggccattacgacgaactagcgcacagggccaaccatctccaggaacatcagctcccggacatgctttacatgggaaaaagaactcaacagtcgactgtaatggcgtggtttccctgttgggggctggcgatccagaggccacttcccccggatcgcacctcctaaggcctgtcatgctggagcatcctcctgacaccaccacaccctctgaggagcctgggggtccccagatgctgactagccaggcgccatgtgtggatggtttcgaggagccaggtgctcgccagagggcactgagtgccgtaagcgtcctgacctctgctctggaggagctggaagagtctaggcacaagtgcccaccatgttggaaccggttggcccagcgttacctgatatgggagtgttgtccgttgtggatgagcatcaaacagggagtgaagttggttgtgatggatccatttacagacctgaccatcaccatgtgtattgtgctaaacactctatttatggccctggaacactacaacatgacatccgagttcgaagaaatgttacaggtcggcaatcttgtgttcaccgggatttttacagctgaaatgacgtttaaaataatcgcgctcgacccttattattattttcagcaggggtggaatattttcgactctattatagttatactgagtctaatggaactcgggctcagtcggatgtctaatctgagcgtactgcgatcttttcggctgctgagagtatttaaactggctaagtcctggccgactctgaacacactgatcaaaatcattggaaattcggtgggtgccctaggaaacctgactttggtgctcgctattatcgtgttcatatttgccgtagtaggcatgcagctctttgggaagaactattccgaactccgcgatagcgacagcggcctactaccaaggtggcatatgatggattttttccatgccttcctgataatcttcaggattctgtgcggcgagtggattgaaacaatgtgggattgcatggaagtgagcggccagagcctctgtctccttgttttcctgttggtgatggtcataggcaacttggttgtgctaaacctgtttctcgcgctgctcctctcatcattttcggccgataatttgaccgcacctgatgaggatagggagatgaacaatcttcaactcgcgctggctcgtatacaacgcggactaaggttcgtgaagcgcactacttgggacttttgctgtggtcttctccggcagcgaccccagaagccagccgctcttgctgcacaggggcagcttccctcgtgcattgcaactccttacagcccccctccgccagagaccgagaaggttcccccaacccggaaggaaactaggttcgaggagggtgagcagcccggtcaagggacacccggagaccctgagcccgtctgcgtgcccatcgcggttgctgaatccgacacagacgatcaggaggaagacgaggaaaattccctcggcacggaagaggagtcctcaaaacaggaatcacagcctgtgtcaggcggtcctgaggctccccctgactctcgcacctggagccaggtgagtgccactgccagttccgaagccgaggcctctgcctcacaagccgattggaggcagcagtggaaggcagaaccccaggcgcctggctgcggagagaccccagaggatagttgcagtgaggggtcgaccgccgacatgaccaatacggctgagctgctcgaacagatcccagatctcggtcaggatgttaaggacccagaagattgttttaccgagggctgtgttcggaggtgtccatgttgtgctgtcgacactacacaggcgccaggtaaggtatggtggcgcctaagaaaaacatgttaccatatcgtggagcactcatggtttgagacgtttatcatttttatgatcctgctgagttccggagctttggctttcgaggacatctacttggaagaacgcaagacaatcaaagtgctgcttgagtatgccgacaagatgttcacctatgtatttgtactggagatgctgctgaagtgggtggcctacgggttcaaaaaatattttacaaacgcatggtgttggctcgatttcttgatagtggatgtgtcactggtgagtctggtggctaacaccctgggctttgccgagatgggtcctattaagagcctgaggaccctgagggccctcagacctcttcgtgcgcttagtaggttcgagggcatgcgggtggtggttaacgctttggttggggcaatacccagtattatgaacgtgcttctggtctgtctgattttttggctgattttcagcattatgggggtgaacctgtttgctggcaagtttggaagatgcatcaaccaaaccgagggagatctgcctctcaactatactattgtgaacaataagtcgcagtgtgaatctctgaaccttacgggagagctatattggacaaaggtcaaggtaaactttgacaatgtcggcgctgggtacttggccttgttgcaggtggccaccttcaagggatggatggacatcatgtacgccgcagtggacagccgtggttatgaggaacagccccagtgggagtacaatttgtacatgtacatttactttgtgatattcattatctttggatccttctttaccctgaacctgttcatcggtgtgattattgataatttcaatcagcaaaagaagaaactggggggacaggacattttcatgactgaggagcagaagaagtactataatgctatgaaaaagctgggatctaagaaaccccagaagcctattccacggcctctcaataagtaccaagggttcatcttcgatatagtcaccaagcaggcctttgacgttacgatcatgtttttaatctgtctcaatatggttacaatgatggttgagacagacgaccagtctcctgaaaagataaatatactcgccaagattaacctcctcttcgtggccattttcaccggagagtgcattgttaagctggcagcactccgccactactacttcactaatagttggaacatttttgacttcgtagtggtgattctgtctatcgtcggcacagtactatccgacattattcagaaatacttcttctctcccaccctgtttcgcgtcatcagattggcccgaatcggcagaatcttacgactgattaggggagccaagggaatccgaacattgttgtttgctttgatgatgtcactgccagctctttttaacatcgggttattactgtttcttgtgatgttcatatattccattttcggcatggctaattttgcatacgtgaaatgggaagctggtatcgatgacatgttcaacttccaaacatttgcaaattccatgctctgcctatttcaaataacaactagcgctgggtgggacggtctcttgtctcctattctgaacactggcccaccctactgcgaccctactctacccaactccaatggaagcagaggagactgtggctcccctgcagtgggcattctcttctttacgacatacatcattattagctttcttatcgtggtgaacatgtatatcgctataatcctggaaaacttctccgtggcgacggaggaatcaaccgagcctttatctgaggacgatttcgatatgttttatgagatctgggaaaagtttgatcccgaggctacgcaattcatcgagtattcagtgctctccgattttgctgacgccctctctgaacctttgcggatagctaaacccaaccaaatctcactgataaacatggacctaccaatggtttctggcgatcgaatccattgtatggatatcctctttgccttcactaaaagggtgcttggagaatctggtgaaatggatgctcttaagatacagatggaagagaaatttatggctgctaacccgtccaagatctcttatgagcctatcacaactacgttaaggaggaaacacgaagaggttagtgcgatggtcattcagcgggcattcagaaggcatttgctccagcgctccctaaagcacgcgagctttctctttaggcagcaggctggaagcggcctgtctgaagaagacgccccagaacgggagggccttatcgcatatgtgatgtcagagaactttagtcgccctctcggccctccttcctcatcctccatatcttctacaagcttccctcccagctacgacagcgtgaccagagcaactagcgacaatctccaggttagaggaagcgactacagtcattctgaagatctcgcggattttccgccttctcccgatcgagatagggaatcgatcgtata

SEQ ID NO: 240911 - DNA, 5888 bp, synthetic construct
  misc_feature 1..5888: note = Description of Artificial Sequence: Synthetic coding sequence
  source 1..5888: mol_type = other DNA
atggctaatttcctgctgccaagaggcacaagctccttccgtcgcttcaccagggaatcgctcgcagccatagagaagagaatggctgaaaaacaggccagaggttctaccactctgcaggaatctcgtgagggtcttcccgaagaagaagctcctcgcccacagcttgacctccaagcctccaagaagttaccagatttgtacgggaacccaccccaggagcttattggggagccattggaagacttagatccattctacagcactcagaagaccttcattgtcctgaacaaagggaaaactattttccgatttagcgccaccaatgccctgtacgtgctctcgccttttcatcctatcaggagggctgccgtcaagatcctggtccattcgctttttaacatgctaattatgtgcaccattcttacaaattgcgtctttatggcacagcacgatccccctccctggactaagtacgtggagtataccttcaccgctatttacacattcgaatccctggttaaaatcttggcccgaggcttctgcctccacgcctttacgttcctgagagatccttggaactggttagatttcagcgtgatcataatggcctataccaccgagttcgtggatcttgggaacgtgagcgcccttcgtacctttagggtgctcagagcattgaagactatcagcgttatcagcggacttaaaaccattgtgggtgcattgattcaaagtgtgaaaaaactggctgatgtaatggtgctgaccgttttctgtctcagcgtctttgctcttattggcctccagctctttatgggaaacctgcgccataagtgtgtaaggaatttcaccgcattgaacggaaccaatggttccgttgaggccgacggcctagtgtgggaatctctcgacctttatttgtcagacccagagaattacttgcttaagaacgggacaagcgacgtgttgctatgcgggaactcgtctgatgccggaacatgcccagagggctatcggtgccttaaggcaggcgaaaatcccgatcatggatacacaagctttgattcttttgcctgggcattcctggctttgtttaggctgatgacccaggactgctgggagagactgtaccagcagacgctgcgtagtgcaggaaagatttacatgatcttctttatgctggtgatttttctgggatctttttacctggtgaacctgatccttgcggtggtcgcaatggcttatgaggaacagaatcaggcaacaatcgcagaaacagaggagaaggagaagcggttccaagaggccatggaaatgctaaaaaaagagcacgaggcactgactatcaggggggtcgataccgtttctcggtccagcctggaaatgtccccactagcgccagtgaattcccatgaaagacggagtaagcgtaggaagaggatgtctagcggcaccgaagagtgcggcgaggacaggctcccaaagagtgatagcgaggacgggcctagggcgatgaaccatttaagtttgaccagaggactgtcacggacaagcatgaaacccaggtcttcgagagggagtatattcacctttcgcaggagggatctcggatcggaagctgactttgctgatgacgagaacagtaccgcaggagaaagcgaaagccaccatacgagtctcctcgttccctggccccttcgacggaccagcgctcagggccaacccagtccgggaacttctgcacctggacacgccctgcacgggaaaaaaaattctacggtcgattgtaacggcgtagtgtctctgctgggcgctggcgatcccgaagcaacttctccaggatcccatttgctgcgcccagtcatgctagagcacccgcctgacactaccaccccaagtgaggaacccggtggacctcagatgcttacaagtcaggcaccatgtgttgatggcttcgaggagccaggggcacgccagcgagccttgtcagcagtgagcgtgctcactagtgccctcgaagaactggaggagtcccgccacaaatgccctccttgttggaatcgcctggcccagagatatctcatatgggaatgttgccccctctggatgtcgatcaagcagggcgtaaagctggtggttatggacccgttcactgacctcactattacgatgtgcatcgtgctgaacaccctttttatggcattagaacactacaatatgacttctgaattcgaggaaatgttgcaggtcggtaatctggtgtttacggggatatttaccgccgagatgaccttcaagattatcgctctcgacccatattactacttccaacaggggtggaatatcttcgacagcatcattgttatactgtctctaatggagttgggacttagcaggatgagcaatctgagtgtgctgaggagttttcggttgctacgggtgtttaagctggccaagtcttggcccactctgaatacactgattaagattattggcaactccgtgggtgccctgggcaatctgaccctcgtactggccatcatcgtcttcatctttgccgtggtaggcatgcagctcttcggcaaaaactacagtgagctgagagattctgattctggtctgcttccacgttggcacatgatggatttttttcatgcattcctgattatctttaggatactgtgtggggaatggatcgagacaatgtgggattgtatggaggtgagcgggcagagcctttgtttgctcgtttttctgctcgtgatggttatagggaatctcgtggtcctgaatcttttcctggcattgctgctgtcaagcttctcagccgataacctgactgcacctgacgaagacagggaaatgaacaacctgcaattagctctggcaaggattcagagagggcttagattcgtcaaacgaaccacttgggacttctgttgtggactcttgaggcaaagacctcagaaacccgcagcgttggctgctcagggacaattaccttcctgcatcgccactccttatagccccccaccgcctgagactgaaaaggttcccccaacacgaaaagaaacgaggttcgaagagggcgagcagcccggacaaggaacgcctggagaccctgagcccgtttgtgtcccaattgcagttgcagagtcagacaccgacgaccaggaggaggacgaagaaaatagtctaggcaccgaagaagaatcaagtaagcaaacaccagaggattcgtgtagcgaaggatctaccgctgacatgacaaacacggctgagttattggagcagatccccgatctgggacaggacgttaaagatcctgaggattgtttcaccgaaggatgcgtgagacggtgtccctgttgcgctgttgataccacacaggcacctggtaaagtctggtggcgcctcaggaaaacgtgctaccacatcgtggagcactcgtggttcgagacctttatcatattcatgatcctattatcaagcggtgcccttgcgtttgaggacatttatctagaggaaaggaagacgatcaaagtactgttggaatacgccgataagatgtttacctacgtgttcgtgctcgagatgcttcttaagtgggttgcatatgggttcaagaagtatttcacaaatgcctggtgctggcttgatttcctgatcgtcgacgtgagtctggtttctctcgtcgctaacaccctggggtttgctgagatggggcctatcaaatccctccggaccctgcgggcattgaggcccctgagagcactgagcaggtttgagggcatgcgtgtagtggtcaacgccttagtaggggctatacctagcatcatgaacgttttgttagtttgtcttattttttggcttattttttctataatgggcgtgaatttgttcgcgggaaaatttggacgctgcatcaatcagacagagggcgatctgccgcttaattatactattgtcaataataagagccagtgcgagagcctcaaccttaccggggaactctactggaccaaagtgaaagttaatttcgacaacgttggagctggctatctcgctcttttgcaagtggccacattcaaaggctggatggatattatgtacgcggcagtggactcaagggggtacgaagaacagccacagtgggagtataatctgtatatgtatatctatttcgtgattttcataatatttggttcctttttcaccctaaacctgttcatcggcgtgataatcgataactttaatcagcagaaaaagaagctcggcggacaggatatatttatgaccgaggagcagaagaaatattacaacgcaatgaagaagctcggatcaaaaaaacctcagaagcccatcccaaggccacttaacaagtaccagggtttcatttttgacatcgttacgaagcaggccttcgacgtaacaattatgttcctgatatgcctaaatatggtgaccatgatggtcgagactgacgaccagagtcccgagaaaattaacatacttgccaagatcaacttgctcttcgtggctattttcacaggtgaatgcatcgtgaagctagccgctctccgacattattattttacaaattcttggaatattttcgacttcgttgtcgtgatcctctctattgtgggtaccgtgttatcagatataatccaaaaatatttcttttcccctaccctcttccgcgtgatcagactggctcgaataggtagaatactcagactgatacggggtgctaagggcattcgaacactactgttcgccctgatgatgtctctgcctgctctattcaatatcggactgctgctgtttctcgtcatgtttatttactcaatctttggcatggccaacttcgcttacgtcaaatgggaggccggtattgacgacatgttcaacttccagactttcgccaacagcatgctgtgtctgtttcagatcacaacgtcagccggttgggacggtctgctctcaccaattctaaatacagggcctccctactgtgatcctacgctcccaaactctaacggcagcaggggcgactgtggaagtcccgcagtggggatattgtttttcaccacatatatcatcatctcattccttattgtcgtgaatatgtacatagccatcatactggaaaactttagcgttgccaccgaggagagcaccgagcccctgagtgaagatgacttcgacatgttctacgaaatctgggaaaagttcgatcctgaagcaacacaattcattgaatatagtgtgctgtctgactttgcagatgcactcagtgagccattgagaatcgccaagccgaatcagatcagtcttattaacatggatctgccaatggtctctggggaccgaatccactgcatggatatccttttcgctttcacaaagcgggtactgggagagtctggagagatggatgctctcaagatccaaatggaggaaaagttcatggccgcaaatccaagtaagatctcctacgagcctattacaactaccctccgacgaaaacatgaggaggttagcgctatggtcattcagcgcgcattcagaaggcaccttctgcagcgatccttaaaacacgcctcattcctgtttcgccagcaggccggttctgggctgtcagaggaggacgcacctgaacgggaggggctgatagcatacgttatgagcgaaaacttctcccgcccactggggccaccgtctagctcctcaattagctcaacttcctttcccccatcgtacgactccgttacgagagccactagtgataacctccaggtgcgaggtagcgactactctcatagtgaagatctagcagacttccctcccagccccgatagggatagagaatccatcgtata

SEQ ID NO: 240912 - DNA, 5888 bp, synthetic construct
  misc_feature 1..5888: note = Description of Artificial Sequence: Synthetic coding sequence
  source 1..5888: mol_type = other DNA
atggccaacttcctcctcccacgaggtactagttcctttcggagattcacccgagagagtctggccgcaatcgagaagaggatggccgagaagcaggccagaggatccacgaccttgcaggagtcacgagaaggtctccccgaagaagaagcccctaggccacagttagatttacaggcttccaaaaagttgccagatttgtacggcaatccaccgcaggaactgattggcgagcctctcgaagacctggaccctttttactcaacccagaagacattcatagttttgaacaaaggtaaaaccattttcagattcagtgcaacgaatgccctgtatgttctttcgccattccatccaatcagacgagcagccgtcaagatattggtgcatagcttatttaacatgctaatcatgtgtaccatcctcacaaactgtgtgtttatggcacagcacgacccaccaccttggacgaaatacgtggagtacacatttactgctatatacacctttgagtctcttgtgaagatcttggcacggggtttttgtctacacgcattcacctttctgagggatccttggaattggctcgatttttcggtgattatcatggcatatgtctctgagaacattaaactgggcaacttaagcgctctgcgtacgttccgtgtgctgagggcccttaagaccattagtgtgatccctggtcttaaaaccatagtcggtgcattaatacagagcgttaaaaaattggcagacgttatggtcttgacagttttttgtctgtccgtgttcgctcttattgggctgcagctgttcatgggcaacctgaggcacaaatgtgtccgaaattttaccgccctgaacggcaccaacggatcggttgaagctgacggtctggtctgggaatcgcttgacctgtacctctctgatcccgagaactatctgttgaagaatggaacctctgatgtgctgctctgcgggaactcctcggacgccggtacttgtcctgaggggtacagatgcctcaaagctggagagaacccagaccacgggtacacatcatttgatagtttcgcttgggccttcctggcgctctttaggttaatgactcaagattgttgggaaaggctttatcagcagaccttaaggagcgccggaaaaatctatatgatcttttttatgttagttatttttctggggtcattttatctcgtgaacctgattctcgccgtcgtggctatggcctatgaggagcagaatcaggcaacaatcgctgagactgaggagaaggagaaacgctttcaggaagcaatggagatgctgaagaaggagcatgaagctttgacaataaggggggtggacacggtgtcccgctcatctctggagatgtcccctctggctcctgttaactcgcacgaacgacggtctaagcggaggaagcgcatgagcagtggaaccgaggagtgcggagaagatcgcctgccaaaaagcgactccgaagacggcccaagagcaatgaaccacctttccctcacacgcggactgtcgcggaccagcatgaagccccgttcatctcgagggtccatttttacctttcgtaggcgagacctcggctccgaggctgattttgccgacgatgagaatagtacagccggagagtcggaatctcatcacacatccctgctcgtcccatggcccttaagaagaacatcggctcagggtcagccaagccccggaacttcagcacccggacacgcgttgcatgggaagaaaaattcaactgttgattgtaacggagtggtctccctactcggagctggtgaccctgaagccacatctccgggttctcacctgctaagacccgtgatgctcgaacacccccctgacaccaccactccaagtgaggagcctggtggcccacagatgttgaccagtcaagccccatgcgtggatggattcgaggagccaggtgccaggcaaagagccctgtcagccgtcagtgttcttacttccgccctggaggaactggaagagtcaaggcacaaatgcccaccgtgctggaatagactggcccagcgatatctgatatgggaatgctgtcccctttggatgagcatcaagcaaggcgtgaagctggtggtgatggacccgttcaccgacttgacaattactatgtgcatagtattgaataccctctttatggccttggagcactataacatgacgagcgagtttgaagagatgctgcaggtcggcaatctggtcttcactgggatttttactgcagaaatgaccttcaagatcattgctttagatccctattattatttccaacaagggtggaacatcttcgactccattatcgtgatactttcactgatggaactcggactgtcccgaatgtcgaatctgagcgtgctccgctcatttaggctgctaagagtttttaagttggcgaaaagttggcccaccctgaacacactgatcaagataattgggaattccgtaggcgcactggggaacctcacactggttctggccattatcgtcttcatcttcgccgtcgtgggaatgcagttgttcggtaagaattactccgagctgcgcgatagtgacagcgggctcctgccgagatggcatatgatggactttttccatgcttttcttattatatttaggattctgtgtggcgaatggattgaaactatgtgggattgcatggaggtcagcggccaaagcttgtgtcttctggtgtttctgttggtcatggtcatcggcaacttggtggttctgaatctcttcctggccttgctgctgtccagtttctccgccgataacttgaccgctccggacgaggaccgagaaatgaacaacctccagctggcattagcacgaattcagcggggactgaggttcgtcaagagaactacctgggacttctgctgcggcctgctgcgacagcgaccccaaaagccggctgccctggccgctcagggtcaactgccttcttgtatagcaactccatacagtcctcctccacccgagacggaaaaggtgcctcctacacgcaaggaaaccaggttcgaagagggagaacagcccggtcaggggacccccggagatcccgaacccgtgtgcgtccctattgctgtggcagagagcgacacagatgaccaggaagaggacgaggagaacagcctggggactgaggaggaaagctcaaagcagactcccgaggactcttgcagcgaagggtccaccgctgacatgacaaacaccgcagaactcctagagcaaattccagatctggggcaagacgtgaaagatcccgaagattgctttacagagggatgcgtgcgtagatgtccatgttgtgctgtggataccacacaagcccctgggaaagtctggtggcgtctccgcaagacctgctaccacatagttgagcatagctggttcgagacctttattatcttcatgatcctgctctccagtggcgcactggcatttgaagatatctacctcgaggaacgtaaaactataaaggtcctgctggaatacgctgataaaatgttcacttacgttttcgtgcttgaaatgttgctcaaatgggtggcctatggattcaagaaatacttcaccaatgcttggtgttggcttgatttcctaatcgttgatgtctctcttgtgtctctcgtggcgaatactctgggttttgcagaaatgggtcccatcaaaagtctaagaactttgcgagctctccggccactcagagccctgagtcggttcgagggaatgagggtcgtggtcaatgcattggtaggagcaatcccctctatcatgaatgtgctactggtgtgccttatcttctggctaatattctccatcatgggtgtgaatctgttcgctgggaagtttgggagatgcataaatcagacggaaggtgatctcccactgaactacacaatcgtaaataataaaagtcaatgcgagtccctcaatctgacgggcgaactgtactggacgaaagttaaggtgaactttgacaacgttggcgcaggctatctcgctttgctgcaggtggccaccttcaagggatggatggacattatgtacgccgctgtcgacagtcggggttatgaggaacaaccgcaatgggagtataatttatatatgtacatatacttcgtaatttttattatcttcggatctttttttactctgaacctgttcattggggttatcattgacaacttcaaccagcagaaaaaaaaattaggaggacaggacatattcatgacagaggaacaaaagaaatattacaacgctatgaagaagctgggcagtaaaaagccccagaaaccgatccccaggcctctgaataagtatcagggcttcatttttgatatcgtgacaaaacaggcattcgacgtcaccattatgttcctaatctgtctgaacatggtgaccatgatggtggaaaccgacgaccaaagtcctgagaagatcaatattttagctaagatcaatctgctctttgtggctattttcacgggagagtgcatagtgaaattggcggcactgcggcactactatttcaccaacagctggaatattttcgatttcgtcgtggttatcctgagcatcgtcgggactgtgctatccgacattattcagaaatacttctttagtccaacactgttcagagtaataagactggcgagaattggccgaatcttaagattgattcggggagcaaaggggatccggactctcctgttcgccctgatgatgtccctgccagctctgttcaatatcggcctgctgctgttcttggtaatgtttatctactcaatttttggtatggctaattttgcttatgtgaaatgggaagctggtatcgatgacatgtttaactttcagacttttgctaacagcatgttgtgcctgttccaaattacaaccagcgccggttgggatgggcttctgtcgcctattctgaatacgggtcctccttattgtgaccctaccctacccaatagcaacggatcgagaggtgactgcggcagtcctgctgtaggcatcctcttcttcaccacatatatcattatctcatttttaattgtcgtgaacatgtatatcgcaatcatcctggaaaatttctccgttgccaccgaggagtcgactgaaccgctgtccgaagatgacttcgacatgttttacgaaatctgggaaaaattcgatcctgaggcaacacagttcattgaatattcggtactgagtgacttcgctgacgcactgtcggaaccgctgaggatcgctaagccgaaccagattagcctgattaacatggatcttcccatggtcagtggagaccgcattcattgcatggacatactgttcgccttcacgaaaagggtgctcggtgaatctggggagatggatgccctgaagatccagatggaagagaaatttatggctgccaatccaagcaaaatctcttacgagccaataactacgacactgagacgcaagcacgaggaggtcagcgcaatggttattcagagggccttccgcagacatctgttacagcgaagcttaaagcacgccagtttccttttccgtcagcaagctggttctgggctttctgaggaagacgctcctgagagagaggggctgatcgcctacgtaatgtcagagaattttagccgacccctgggcccaccctcaagcagctccatctcctcgacctccttccccccatcatatgactctgttacccgagctacaagcgacaatctgcaggttcggggtagcgactacagtcattcagaggacctggctgactttcccccttcccctgatagggatcgggagtctatcgtata

SEQ ID NO: 240913 - DNA, 5888 bp, synthetic construct
  misc_feature 1..5888: note = Description of Artificial Sequence: Synthetic coding sequence
  source 1..5888: mol_type = other DNA
atggccaacttcctactgccaaggggcacatcctcctttcgccgtttcacgcgtgagtctctggctgccatcgagaagcggatggccgagaagcaggctcgaggatccacgactctgcaagagagccgcgaaggtctgccagaagaggaggcaccacgcccacaactggacctgcaagcatccaagaagctgcctgatctctacggaaaccctccccaggagcttatcggggagccgttagaggacctcgaccctttctacagcactcagaagactttcatcgttttgaataagggcaaaaccatattccgcttcagtgcaaccaacgccctctacgtattgagtcccttccatccaattcggagggctgcagtgaagattttggtccattccctgtttaatatgctgatcatgtgcactatcctcacgaattgtgtcttcatggcacagcatgatccaccaccatggaccaagtacgtcgaatacacctttacagcaatctacaccttcgaaagcttggtcaagatcttggcccgagggttctgtctccacgcttttaccttcctgagggacccctggaactggttagactttagtgtgatcatcatggcttacgtgtcagaaaacattaagctgggtaacctcagcgctctccgaactttccgggtgctcagggctctgaagactattagcgttatccccggtctgaagactattgtgggggcactcatccagagcgtcaaaaagttggcagacgttatggtgctgacggtgttctgtctgagcgttttcgcgctcatcggactacagcttttcatgggcaacctgagacacaagtgcgtaaggaacttcacagcactgaacggcaccaatgggagcgtcgaagcagacggccttgtgtgggagagcctcgacttatatttaagcgacccggagaactacctgttgaaaaacgggaccagcgacgtgctattgtgtgggaattcaagcgatgcaggcacatgtcctgaaggatatcgttgcctgaaggctggagaaaaccccgatcacgggtataccagtttcgatagttttgcttgggcttttcttgcgttgttccgactcatgacccaggactgctgggaaaggctgtaccagcagaccctgagatctgccggtaagatttacatgattttctttatgctggttatctttttaggctctttctatctggtaaatctcatccttgcggtagtcgcaatggcctacgaagaacagaatcaagctactatagcagagactgaggagaaggagaagcggttccaggaagccatggagatgctgaaaaaggaacatgaagccctcacaattcggggtgtggatacggtaagcaggagtagcctcgaaatgtcccctttagccccagtgaacagccatgagcgccgtagcaaacggagaaaacgaatgagttctggcacggaggaatgtggggaagatcggcttccgaagtctgactctgaggacggacccagggccatgaaccacctctcacttacacggggactgagccgcacctcaatgaagcccagatcctctcgcggttcaattttcacgttcaggagaagggacttgggcagcgaagctgatttcgccgacgacgaaaacagcacagctggagagtccgaatcgcaccacacaagcctgttggtgccttggccgctgcggcgtacctcggcccagggacagccttcccccggaacctccgcccctggtcacgctctccacggcaagaagaattccactgttgactgcaacggtgtcgttagcttgctgggcgctggagaccccgaggccacttctcccggttcacacctgcttcgtcccgtcatgctagagcaccccccagacaccaccacaccttccgaagagcccggtgggccacagatgctgacatcacaggcaccgtgtgtagacggctttgaggagcctggtgcgcgtcagagggcactttccgccgtgtccgtgcttacatcggctctcgaggagctcgaagagtctaggcacaagtgtcccccttgctggaatcgcctcgcacagagatatctcatttgggaatgttgccctctgtggatgagcatcaagcagggtgtcaagctggtcgtgatggatccctttactgatctcacaatcactatgtgcattgtactcaatacactgttcatggccttggagcactataacatgacgtccgagtttgaagagatgctgcaggttggcaatctggtgttcactggtatctttactgccgagatgactttcaagatcatcgccttggacccctactattacttccaacaaggatggaacatttttgacagtatcatcgtgattctgtctctaatggagctcgggctctccagaatgagcaacctcagcgttctgcgatcctttagactgctccgagtgttcaaattggccaaaagctggccaaccttgaacactctgattaagattattggcaactccgtcggtgcgctcggtaacctgacgcttgtgctcgcaattatcgtctttatcttcgctgtggtcggcatgcagttatttggcaagaattatagcgagctcagagacagtgacagcggattactccctcgctggcatatgatggactttttccatgctttcctgatcattttcaggatattgtgtggagaatggattgagacgatgtgggattgcatggaagtgagcggacagtccctttgtctgctagtcttcctcctcgtgatggtgatcggaaacctagtggttctgaatcttttcctggctctcctgctttcttcgttcagcgccgacaatttgaccgccccagacgaggacagagagatgaataaccttcagttagctctggcccgaattcagcgaggactgcgctttgtgaaacgtactacatgggacttttgctgtgggctcttacggcagagacctcagaaacccgctgccctggctgctcaggggcagctgcccagttgcatcgctaccccatatagtcctccaccgcctgagacagagaaagtacctcccacccgtaaggagacacggttcgaagagggggaacagccagggcagggtaccccgggagatcccgaaccagtgtgtgtgccgatcgcggtggccgagagtgatacagacgaccaggaggaagatgaagagaattctctgggcactgaggaggagagttctaaacaaacgcctgaggactcttgtagtgaaggtagcaccgctgacatgaccaacaccgctgaactgctggagcagatcccagatctcggccaggatgtgaaggatcctgaggattgttttaccgagggttgtgtgagacggtgtccatgctgcgctgtggacaccacccaggcaccagggaaggtgtggtggaggctgaggaagacttgctaccatatcgttgaacatagttggttcgagacattcatcatcttcatgatcttgcttagcagcggcgctctggccttcgaggatatataccttgaggagcgaaagactatcaaagtgctactagaatatgcggataagatgttcacgtacgtgtttgtccttgaaatgcttcttaagtgggttgcatatggatttaaaaagtacttcacaaatgcgtggtgttggttggactttctcatcgtagatgtgtcactggtcagtctagtggctaatactctcggctttgcggaaatgggccctattaaaagtctgaggacgctccgtgcactgcgtcccctacgagccctctctcggttcgagggcatgagagtcgtggttaatgctctggtgggagctatacctagcattatgaacgtattgcttgtctgccttattttttggctgattttctctataatgggagtgaatctgttcgcaggtaaattcgggaggtgcattaaccagacagaaggagacctgcccctcaattatactattgtcaacaataaatctcagtgtgaatcattgaatttgacaggggagctatactggactaaagtgaaagttaacttcgacaatgtgggagctggttacctagctctgcttcaggtggccacattcaagggctggatggacatcatgtatgcagcagtggatagcaggggatacgaggagcagccccagtgggaatacaacctgtatatgtacatttatttcgtgatattcatcatttttggaagttttttcactttgaatcttttcatcggggtgatcattgacaacttcaatcagcaaaagaaaaaactgggcggacaggacatctttatgactgaggagcagaaaaaatactacaacgccatgaaaaagctgggaagcaaaaagccgcagaagcctataccacgcccactgaataaatatcaaggcttcatcttcgatattgtgacgaaacaggcgttcgacgtcacgataatgttcctcatatgtcttaacatggtgacaatgatggtggaaactgacgaccagtcacccgaaaaaatcaacattctcgcaaagattaacctgctctttgtagcaatctttactggggagtgcatcgtgaagctcgcagcactcaggcactactacttcactaactcatggaacatctttgatttcgttgttgtcatcctgtctatcgtgggtactgttttatctgatattatacaaaagtacttttttagtccaaccttgttccgtgtgattcgcctcgctaggattgggcgtattctgcggctcatcagaggagccaagggcattcggaccttgcttttcgcactcatgatgtctttaccagcgctctttaatatcgggttactgttgtttcttgtcatgtttatttacagtatcttcggtatggctaattttgcctatgtgaaatgggaagctgggatagatgacatgtttaactttcagactttcgcaaatagcatgctttgcctgttccaaattacaacgagcgcgggttgggatggccttctgtcccctatactcaacacaggaccaccctattgcgaccctaccctgccaaatagtaacggaagcaggggggactgcggatcccctgccgtgggtatcctctttttcactacctatatcattatctcttttctcatcgtggtgaacatgtatattgcgattatcctcgagaacttctccgtcgcgacagaagaatccacggaaccactgtccgaggatgatttcgacatgttctatgagatttgggagaagtttgaccccgaagccacccaatttattgagtattctgtgctgtctgattttgcggacgctctctctgagcccctgaggattgcaaagccaaaccagatttctttgatcaatatggatctgccaatggtgagcggggacagaatccactgtatggatatcctctttgcttttaccaaacgggtgctgggcgagtctggtgaaatggacgctctgaagattcagatggaggagaaattcatggctgctaatccatctaaaatatcatacgagccaattacaacgactctcaggagaaagcatgaagaggtgtccgccatggtcatccagcgggcatttcgaagacatttactccaaagatcgttgaaacatgcgtcattcctttttcgacagcaagccggaagtgggttgtcagaagaggacgccccagagcgggagggcctaatcgcatacgttatgagtgagaattttagccgacctctcggccctccttcgtccagctcaatttcgagtaccagcttccccccaagttacgattctgtcactagggctacatcggacaatttgcaagtgagggggtcagactacagccattcagaagacctggccgatttcccaccgtctcccgacagagaccgcgagtccatagtgta

SEQ ID NO: 240914 - DNA, 5951 bp, synthetic construct
  misc_feature 1..5951: note = Description of Artificial Sequence: Synthetic coding sequence
  source 1..5951: mol_type = other DNA
atggccaactttctgctccctcgagggacttcttctttcaggcggtttacccgggaatctttggcagccatcgagaaacggatggccgaaaagcaagcacgcggatcaacaacactacaggaatcaagagagggccttcctgaagaagaggcccctcggcctcagctggatcttcaggcttccaaaaaactccctgatctctacggcaacccccctcaggagctcatcggcgaacccttggaagatctcgatccattttatagcacccagaagacttttatcgttctgaacaaagggaaaactatcttccgcttctcagcaacaaatgctttgtacgtgctctccccttttcaccctatcagacgggctgctgtcaagatccttgtccatagtctgttcaatatgctcatcatgtgcactattctgactaattgtgtgttcatggctcagcacgacccgccaccctggactaagtacgtcgagtatactttcaccgctatatataccttcgaaagcctcgtgaagatcctggcccgaggcttctgtctgcacgcgtttacttttctcagggatccctggaactggttggatttctctgttatcataatggcttacgtgagcgaaaacataaagctgggcaatttgtctgccctgagaaccttcagagttctgcgggctctgaagaccatctctgtaatcccagggctgaaaaccatagtgggcgctttgatccagtcagtgaagaaattggctgacgtcatggtgctcacggtgttctgcctttctgtgttcgctcttatcggcctgcagctctttatgggcaatctgaggcacaaatgtgtgcggaattttaccgcgttgaatgggacaaatggctctgtagaggccgacggccttgtctgggagtccttggatctgtacctgagcgacccagagaactatctcctgaaaaatggcacttccgatgtgctgctgtgtgggaactcaagcgatgcaggtacctgtcccgagggatatagatgtttaaaagcaggcgaaaatcccgatcacggatacacatcctttgactctttcgcatgggccttcctagccttgttccgtttaatgacacaggattgctgggaacggctgtaccagcaaacgttgaggtccgcaggaaagatctacatgatctttttcatgctggtcatcttcctgggctctttctacctggtgaatttgatcctagctgtagttgctatggcatacgaggagcagaaccaggccaccattgctgagacagaagagaaggagaaacggtttcaagaagctatggagatgctgaaaaaggagcacgaagctttgactatccgcggagtagacactgtgtccaggtcctcactagaaatgtctccgctagctcctgtcaacagtcatgaacgcaggagcaaaaggaggaaacgcatgtccagcggcacggaggagtgtggcgaagataggctccctaaatccgatagtgaagacgggcctagggccatgaaccacttgtctctgacccgcggactgtcccgaacatctatgaagcctcgatcctctcgcggttctatttttacattcaggcgcagggacctaggcagcgaagcggactttgcggacgatgagaattctaccgccggagaatcagaatctcaccatacatcgctgctggtcccatggcccctgcgcaggaccagtgctcaaggccagccctctcccggaacaagcgctcccggacatgccctgcatggaaaaaagaacagcacagtggactgcaacggagtggtgtccctcttgggggctggggaccccgaggccacctctccaggttcacacctcctaaggccggtgatgcttgagcatccccctgacactaccacgccctcagaagaacctggaggtccacagatgctaactagtcaagcgccatgcgtggacggattcgaagaacctggtgccagacagcgggctctgtctgcggtgtcagttctaacaagcgctcttgaagaattagaagagtctcgccacaaatgtccaccatgttggaataggttagcacagcgctacctaatatgggaatgctgccccttgtggatgagcattaaacagggggtgaagctggtcgtgatggatccatttactgacttaacgataactatgtgcatagtgctcaacacccttttcatggccctggagcactacaatatgacaagtgaatttgaggagatgctgcaggtgggcaacttagtgtttactgggatcttcaccgccgagatgacatttaaaatcatcgcgctggacccttattactattttcagcaaggctggaacatcttcgattcaataattgtgatactttccctcatggagctcgggttatcacggatgtcaaatttgtccgtgctacggagcttcagactcctcagggtgttcaaattggccaagtcatggcccactctgaatactctcataaagatcattggaaattcagtgggggcactagggaacctcacccttgtgctggctatcattgtttttatcttcgctgtagtggggatgcagctcttcggtaaaaattattctgaactgcgtgactctgacagcgggctactgccacgctggcacatgatggatttcttccatgcattcctgataattttcagaatcttatgtggggagtggattgagactatgtgggattgtatggaggtttctggccagagcctatgcctgctggtgttccttctggtgatggtgattggcaatttagtagtgttgaacttgttcctcgcactactcctgtcctccttcagcgccgacaatctgacagctccagatgaggacagagagatgaataatcttcagcttgccttagccagaatccaacggggactgcggttcgtgaaacgcaccacctgggacttctgttgcggcctgctccggcaacgaccacaaaagcccgctgccttggccgctcaaggccagctccctagctgcattgcaaccccatattctccgcctccaccagagacagagaaggtgcccccaactcggaaagagactagattcgaggagggagaacaacccggtcagggcaccccaggagatccggaacctgtttgtgtgcctattgccgtggccgagtctgacaccgacgaccaggaagaggacgaggaaaattctctcggaactgaagaggaatcgagcaaacaagagagccagcctgtctccggtggaccagaagcaccccctgattcccgcacatggtcacaggtgtctgcgaccgccagctcagaggccgaagcatcggcaagccaagctgattggcgccagcagtggaaagcagagcctcaggccccaggctgcggtgaaactcccgaggatagctgctctgaagggagcactgccgacatgaccaataccgccgagctcttggaacaaataccagatttgggacaggatgttaaggacccagaggactgttttacagagggctgcgtgaggagatgcccttgctgtgctgtagatacaacccaggcaccaggcaaagtctggtggcgcttgcgcaagacttgctatcacatagtggagcacagctggttcgagacctttatcatttttatgatcttgctgagtagtggtgcccttgcgttcgaggacatatatctcgaagagagaaaaacaatcaaagtattactggaatatgctgacaaaatgttcacatatgtattcgtgctcgaaatgctgctaaagtgggtagcctacggctttaaaaaatacttcactaatgcctggtgttggctggacttccttatcgtggatgtgtcccttgtctcgttagtagctaacacactgggatttgccgagatgggaccaataaagagtctgagaacactgcgtgccctccgaccactgagggccctctcaaggttcgaaggcatgcgagtggtagtaaacgcgttagtcggcgctattccatccattatgaatgtgctcctagtctgccttatcttttggctgattttcagtataatgggtgtgaacctctttgcgggaaagttcgggagatgtatcaaccagaccgagggtgacctaccactcaactatacaatcgttaataataagtctcagtgtgaatctcttaatctgacaggcgagttatactggactaaggtcaaggtcaatttcgacaatgtgggagcaggatacctggccctcctccaagtggcgacttttaaggggtggatggacattatgtacgcagccgttgatagtagaggatatgaggagcagccacagtgggagtacaacctgtatatgtatatctacttcgttatattcataatctttggcagcttcttcaccttgaatctgtttattggagtcatcatagacaactttaatcagcagaaaaaaaagcttggaggccaggacatcttcatgaccgaggaacaaaagaagtattataatgcgatgaagaagctcgggtcaaagaagccacagaaacccatccctcgacccttgaacaaatatcagggctttattttcgacatcgtgacaaaacaggcattcgacgtgaccattatgttccttatttgcttgaatatggtaaccatgatggtggagactgatgaccagagcccagaaaaaatcaacatcctcgctaaaattaacctactcttcgtcgccattttcacaggtacagtgctctctgacataattcagaagtatttcttctctcctactctcttcagagtgattcggctcgccagaattgggagaatcctccggcttatacggggtgcaaaagggattcgtactctgctgtttgctttgatgatgtcactgcccgcactgttcaacattggactgctgttatttttggtgatgttcatatatagcatctttggcatggcaaacttcgcctatgtgaaatgggaggcaggcatcgatgatatgtttaatttccagacctttgccaattctatgctgtgcctgtttcagattactacatctgcgggttgggacgggctcttgtctcccatcctaaacacaggcccaccctattgcgaccccacattacccaacagtaatgggagccgaggcgactgtgggagtcctgcggtgggaattctgttcttcactacgtacataatcatttcttttctgattgtggtgaatatgtacatagcaatcattctcgagaacttctcagtagcaacagaggagagtaccgagccactgtcagaagatgattttgatatgttttatgagatctgggagaaatttgatccagaagctactcaatttatagagtatagtgttctgtccgactttgcagacgccctgtctgaaccactgcggatcgcaaagcctaaccaaatcagcctgattaatatggatctgcccatggtcagtggcgatcgcattcactgtatggatattctctttgcctttacgaagagagtgctgggtgagagcggcgagatggacgcactgaagattcaaatggaagaaaagtttatggcggcaaatccaagtaagatctcttacgagcccattactaccaccttgcggagaaaacatgaagaggtatccgctatggtaatccagagggctttccgacggcacttgctgcaacggagtctgaagcatgcatccttcctgtttaggcagcaggctgggtccgggctcagcgaagaagatgctccagaacgggaaggcctcattgcctacgtcatgtcagaaaatttctccaggcctcttggaccaccgagttctagcagtatatcaagcacatctttccccccttcctatgactcagtcacacgggcaaccagtgacaatctccaagtgcggggttccgattattcacatagtgaggacctggcagactttccccctagccccgacagagatcgagagagcatcgtgta

SEQ ID NO: 240915 - DNA, 5049 bp, synthetic construct
  misc_feature 1..5049: note = Description of Artificial Sequence: Synthetic coding sequence
  source 1..5049: mol_type = other DNA
atgctagcgtcaccggaacctaaaggtctcgtaccatttacaaaagagtcattcgagttaatcaagcaacacattgccaagacccacaatgaggaccatgaggaagaagatttaaagccaactcccgacttggaggtggggaagaaactgccttttatttatggcaacctgagtcaggggatggtgagtgagcctttggaagatgtggacccatactactataagaagaagaacacattcatagtcctaaacaagaataggaccatatttcgatttaacgccgcttctattttatgcactctgtccccctttaactgcattaggaggacaaccatcaaagtgttagttcaccctttttttcagcttttcatcctcatctccgtgctgatcgactgtgttttcatgagccttacaaaccttcctaagtggcggcctgtgttagaaaacacactgctgggaatttacaccttcgagatcctggtgaagttatttgctagaggggtctgggccggatccttcagctttctgggggatccctggaattggctcgacttttctgtgacggtgtttgaagtcatcattagatacagtccattagactttattccaacactgcagacggcccgtacactgcgcatcctgaagatcatcccactgaaccagggactgaagtctctcgtgggggtgcttattcactgcctcaagcagctgatcggagtgatcatactcaccctgttttttctctctatatttagcttaatcggcatgggattgttcatgggcaatctaaaacataaatgctttaggtggccacaggaaaatgagaacgaaaccttgcataaccggacaggaaacccatattatatacgagagaccgaaaacttctattacttggagggggagcgctatgccctgctgtgtggtaatcgcaccgatgctgggcagtgccctgaggggtacgtgtgcgtgaaagctgggattaatccagatcagggcttcacgaactttgattcctttggctgggcattgtttgcactgtttcgactaatggcgcaggattatccagaagtgctctaccatcagatcctgtatgcatccgggaaggtctatatgatattctttgtcgtcgtgtcattcctgtttagtttttatatggctagcttgtttctggggatactagccatggcctatgaggaggagaagcagagggtgggcgaaattagcaagaaaatcgaacccaagtttcagcagacagggaaagaacttcaggagggtaatgagacagatgaggccaaaaccattcagattgagatgaagaagaggtcacctatctcgaccgatacatcactagacgtcctggaggatgctacactaaggcataaggaggaactcgagaaatcaaagaaaatttgtcccctgtactggtacaaatttgctaagaccttcttgatctggaattgtagtccctgctggttgaaactcaaggaatttgtacaccgaattatcatggccccttttacagacctgttcttgattatctgtattattttgaacgtgtgctttctgactctggagcattatccaatgagcaaacagacaaacaccctgctcaacataggaaatttggtgtttatcggcatttttaccgcggaaatgatcttcaagatcattgccatgcatccctacgggtatttccaggtcgggtggaatatcttcgatagcatgattgtgtttcacggactgatagagctgtgcctggcaaacgtcgctggaatggctctgctccgcctatttagaatgctccgcattttcaagctgggtaaatattggccaacgtttcagatactaatgtggtccttgtccaattcttgggtcgcactaaaagatctggtgctgttgctattcacctttatcttttttagcgctgcctttggcatgaagctgttcgggaaaaactatgaggagtttgtatgtcacatcgataaggactgtcagcttcccagatggcacatgcatgattttttccactccttcttaaacgtcttccgcattttgtgcggagaatgggtagagaccctctgggattgtatggaggtcgcgggacagtcttggtgcatacccttctatctgatggtgatcctcatcggaaatctactggtattatacttatttctcgcactggtctccagctttagctcatgcaaggacgtgacagccgaggagaataatgaggccaagaatctgcagctggctgtggcccgaatcaaaaaggggattaattacgttctattgaaaatcctgtgtaagacacagaatgttcccaaggataccatggatcacgttaacgaagtttatgttaaagaggatatctccgaccatactctgtcggagcttagtaacacccaagatttcctgaaggacaaggagaaatcaagcgggacggagaaaaacgcaacagagaacgaaagccagtctctgatcccatccccaagcgtctctgaaacagttccaatcgcatccggagaaagcgatattgagaatctggacaataaggagattcagtccaagagcggagatggaggctctaaggaaaaaatcaagcagagcagcagcagtgaatgttcgactgtcgatattgccattagtgaagaagaggagatgttttatggtggggagcggagtaaacacttaaagaacggttgccgcaggggaagctcccttggacagatcagtggggctagtaaaaaaggcaaaatatggcaaaatatccgaaagacctgctgcaaaattgtggagaacaactggttcaagtgcttcatcgggctggtcactttgctgtctacaggaaccctggctttcgaggatatttacatggaccagcgtaagacaatcaaaatcttactcgaatatgccgacatgatcttcacatatatctttatattagaaatgttgctgaagtggatggcgtacggtttcaaggcgtattttagcaatgggtggtacagactggatttcgtggtggttatcgttttctgtctctcactcatcggtaagacccgggaggaattgaagccattaattagtatgaagttcctgagacccctccgcgtgctgtctcagtttgagcgcatgaaagtggttgtccgcgcattgatcaagacaacgcttccaactctgaacgtgttcctcgtgtgcttaatgatttggttgatttttagcatcatgggggtggacctgtttgcgggtcggttttatgaatgcatagatcctacctctggagagcggttcccatcgtcagaggtcatgaacaagtctaggtgcgaaagcttgctgtttaacgaaagcatgttgtgggaaaacgcaaagatgaattttgacaatgttgggaatgggttcctgagcctgctgcaggtcgccactttcaacgggtggatcacaattatgaattctgcaatcgactccgtggctgtgaatatccagccgcacttcgaggtgaacatttacatgtattgctatttcattaacttcataatattcggggtgttcctgcctttgtccatgcttatcactgtgattatcgataacttcaacaagcataagatcaaactcggcggttcaaacatctttataaccgtgaagcaacgcaagcaataccggagattgaaaaagctgatgtacgaggacagccagcgccctgtgccaaggcctcttaacaaattacagggatttatctttgacgtagtgactagccaggctttcaatgtcattgtcatggtgcttatttgttttcaggcaattgccatgatgatagataccgacgttcaatccctccagatgagtatcgcactgtattggatcaactcgatttttgtgatgttatacactatggaatgcatccttaagctgatcgctttccgctgcttctacttcaccattgcctggaatattttcgattttatggttgtgatcttctcaattactgggttgtgcttgcccatgacagtgggatcttacttggttcccccttctctggtgcaactgattcttctatctcgcattatccacatgctgcggctgggaaaagggccaaaggtctttcacaacctgatgctgcctcttatgctgagcttgcccgcattactgaatatcatcttgctaatttttctggtcatgtttatctatgccgtgttcgggatgtacaacttcgcttacgtgaaaaaagaggctggcatcaacgatgtgagcaacttcgaaacctttggcaatagcatgctctgtctgttccaggtggcaattttcgctggatgggatggaatgttggacgccatctttaacagcaagtggtctgattgtgatcctgataagattaatcccggaactcaagttcggggagactgcggaaatccctccgtgggcatcttctactttgtgagctatattctcatctcctggctcatcatcgtcaatatgtatattgtggtggtaatggagtttcttaatatcgcctccaagaaaaaaaacaagacacttagcgaagacgatttccgtaagttcttccaggtatggaaacggtttgatcctgatagaacccagtatatcgatagctctaagctgtcagattttgccgctgctctcgacccccctctgttcatggcaaaaccaaataaaggacagctcattgcgcttgacctccccatggccgtgggtgatcgtattcactgtctggacattctcctcgctttcacaaagagagtgatgggacaggacgtcagaatggagaaagtcgtttccgaaatcgagagcggatttcttctcgcaaatccatttaaaatcacatgcgagcccatcactaccacgctgaaacgcaaacaggaggctgtgtcggcaactatcatacagagggcctacaagaattatcggctgaggcgcaatgacaagaatacatctgacatccacatgatcgatggcgacagagacgtgcacgccacaaaagagggggcttacttcgataaagccaaagagaagagccctattcagtcccagatctac

SEQ ID NO: 240916 - DNA, 5048 bp, synthetic construct
  misc_feature 1..5048: note = Description of Artificial Sequence: Synthetic coding sequence
  source 1..5048: mol_type = other DNA
atgctcgcgtcaccagagccaaaaggccttgttccctttacgaaggagagcttcgagctgataaagcaacacattgccaagacacataacgaagatcacgaggaagaagatttaaaacctaccccagacctggaggtgggcaagaaattgccttttatttatgggaaccttagtcagggtatggtttcagaacccttagaggatgtggatccctactattacaaaaagaagaatacgttcattgtcctgaataagaatcgcactattttcagattcaatgcagcctccattctttgcacactatcacctttcaattgcattcggaggactacgatcaaggtgttggtacatccattcttccaactgttcatccttattagcgttctaatcgactgcgtgtttatgtccctgacaaaccttcctaagtggcgtcccgttctagagaacacactactcggcatctacacattcgagatactggttaagcttttcgcgagaggggtctgggccggaagctttagcttcctcggggacccctggaactggcttgactttagcgtcactgtgttcgaggtgatcatccgatatagcccactcgacttcataccaaccctgcagaccgccagaactctgcgaattttgaagatcattcccctcaaccaaggacttaagtcgctggttggggtcctaatccactgtctgaagcagttgatcggagtgatcattctgactctgttctttctgagcatattttccttaattggaatgggactcttcatggggaatttaaagcataaatgctttcgctggccacaagagaacgagaatgaaaccctgcacaacagaacgggaaacccatattacataagggagaccgagaacttctattacttagaaggagaacggtatgccttattatgtggtaaccggaccgatgctggtcaatgtcctgagggatatgtatgtgtcaaggccggaattaatcctgatcagggtttcacaaactttgattcctttggatgggccctgttcgctctgttcagactcatggcccaagattaccctgaggtgctgtaccaccaaatcctgtacgcttccgggaaggtatacatgatatttttcgtcgtcgtctcttttttgttttctttttacatggccagtcttttcctagggattctagcgatggcttacgaagaagagaagcagagagttggcgaaatctctaaaaagatcgaacccaaattccaacagaccggcaaagagttgcaggaaggcaacgagacggatgaggctaagacaatccagatcgaaatgaagaaaagaagcccgatcagcacggataccagtctggacgtgttggaggatgcaacacttaggcataaagaggagcttgaaaagagcaaaaaaatctgtccattatactggtacaaatttgctaagacatttctgatttggaactgctctccatgctggctcaaactgaaggagtttgtccatcgcattatcatggcaccatttacagacttatttctcattatctgtatcatcctcaacgtatgcttcttgacgttagagcactaccccatgagtaagcagactaataccttgctcaacatcgggaacctggtctttatcggcatctttacagccgagatgatcttcaagattatcgcaatgcacccatatgggtactttcaagtcggctggaacatctttgattctatgatagtattccacggcctcatagaactgtgcctggcaaatgtggccggaatggctctgctgcgactgttcaggatgctgcggatttttaagctgggaaagtactggccaacttttcaaattctcatgtggtccctgagcaattcctgggttgcattaaaagaccttgtgctgttgttgttcacatttattttcttctcagcggctttcggaatgaagctcttcggcaaaaattatgaagagtttgtgtgtcatatagacaaggattgccagttaccccgatggcacatgcatgacttttttcattcctttcttaacgttttccgaatcttgtgtggcgagtgggtggagacactgtgggactgtatggaggtcgcagggcaatcatggtgcattcctttttacctcatggtgatcctgatcggtaatctgctagtcctgtaccttttcctcgctttagtatccagcttctcctcctgtaaagacgtaacagcagaggagaacaatgaggccaaaaatctgcaactcgccgtggccagaattaagaagggcatcaactatgtgctcctgaagattctgtgcaagactcaaaacgtgcccaaagatacaatggatcatgtgaacgaggtttacgtaaaggaagacatttcagatcataccctgtcagagctttccaatacacaggacttcttaaaggacaaggaaaaatcatccggcacagaaaagaatgcgactgagaacgagagtcaatcgctcatccctagccctagcgtaagcgaaaccgtcccaatcgccagtggagaatccgacattgagaatctggataataaagagatccagtctaagtctggtgatggcggatccaaagagaaaattaagcagtcttcatcctctgagtgtagcaccgtggacatcgctatttccgaggaagaggagatgttctatgggggagaacgcagtaaacacctcaaaaatgggtgtcgtcgcggaagctccttagggcagatatctggtgcgtctaaaaaaggaaaaatctggcagaacatcagaaagacttgctgcaaaatagtagagaataactggttcaaatgctttatcggactggtcacactcctctccacaggcaccctggctttcgaggatatttacatggatcagcgtaaaacaataaagatcctgctggaatacgctgatatgatctttacttacatattcatcctggaaatgctgcttaagtggatggcttacgggttcaaggcttacttcagtaatggctggtatcggctagactttgtggtggtgattgttttttgcctttccctcatcgggaagacccgggaagagctgaaaccgctgataagcatgaaatttcttaggcctttgagggtgctgtcacagttcgaacggatgaaggtggttgtgcgcgcacttataaaaactacgctacctacactgaatgtgtttctcgtgtgtctgatgatctggcttatattcagtatcatgggggtggatctgttcgcgggtaggttttacgaatgtattgatcctacctcaggcgagaggttcccaagttctgaggttatgaataagagtagatgtgaatcattactctttaacgagtccatgctctgggagaacgcgaaaatgaacttcgacaacgtggggaatggcttcttaagtctgttgcaggtggctacatttaatggatggattaccatcatgaactctgccatcgactctgtcgccgtcaatattcaaccgcacttcgaagtgaacatttacatgtactgttactttattaattttatcatcttcggcgtgttcctgccactgtcaatgctgataacggttatcattgacaacttcaataagcacaaaatcaaattaggaggcagcaacattttcatcactgtgaagcagcggaagcagtaccgcaggttaaaaaaacttatgtatgaggactcccagcgtcccgtaccaagacccctgaacaaattgcaaggctttatattcgatgttgtgacatcccaagctttcaatgtcattgtaatggtactcatctgttttcaggccatcgcaatgatgattgatactgacgtgcaaagcctgcagatgagcattgccctatattggatcaattcgattttcgtgatgctttacacaatggaatgcatcctgaagctcatcgcctttaggtgcttctacttcaccatcgcctggaatatctttgactttatggtagtaatattctccattaccgggctatgcctgcccatgacagtaggatcttatctcgtaccaccttcactggttcaattgatccttctcagcaggatcatccatatgttgcgcttggggaaaggtcccaaagtgtttcacaaccttatgctgccgttaatgttatcactgcccgctcttttaaatataatccttttgatattcctagtgatgttcatctacgccgtgtttggcatgtataattttgcatatgtgaagaaagaagctggcataaatgatgtcagtaatttcgagacgttcgggaatagcatgctatgcctgtttcaggtggctatcttcgccggatgggatggcatgctcgacgcaatctttaattctaagtggtccgattgtgatcccgacaagataaaccccggtacgcaggtccgtggggactgtggcaatccttccgtggggattttttattttgtctcatatatactaattagttggctgattatcgtgaacatgtatattgtcgtcgtgatggagtttctaaatatcgcttcgaaaaaaaaaaacaagactctgtctgaagatgacttccgaaagttttttcaggtgtggaagcgttttgatcctgaccggactcaatatatcgactcctccaaactgagcgacttcgctgccgctctggacccccctcttttcatggcaaagcctaataaaggacagctaatcgccctcgatctgcctatggctgtgggtgaccggatacattgcctagatatactgttagcctttacaaagagggtgatgggacaggacgtgcgaatggaaaaggttgtgtcggagatcgaatcgggctttttgttagcaaaccccttcaagataacctgtgaacctattaccacgaccctgaaacgcaagcaggaggcagtgtctgccaccatcatccaacgggcttacaaaaattacagactgagaagaaacgataagaacacctccgatatccatatgattgacggcgaccgggatgtccacgctaccaaggaaggcgcatacttcgacaaagccaaagagaaatcccccatccagagccagatata

SEQ ID NO: 240917 - DNA, 2592 bp, synthetic construct
  misc_feature 1..2592: note = Description of Artificial Sequence: Synthetic coding sequence
  source 1..2592: mol_type = other DNA
atgctggcgagccccgagccaaagggactcgtgccctttactaaggaaagcttcgagcttatcaagcagcatatagccaagacacacaacgaagatcatgaggaggaggacttgaagccaacaccagatctggaggtcggcaaaaagctacctttcatctacggaaatttgtctcagggtatggtcagcgaaccactcgaggacgtggacccgtattactacaagaaaaaaaataccttcattgttctgaataaaaaccgaacgatttttaggttcaatgctgcaagcattctgtgtactctctcgcctttcaattgcatcaggcgcactactattaaggtgctcgtgcacccattctttcagctttttatcctgatttccgtgctcatcgactgtgtgtttatgagcctgaccaaccttccaaagtggcgacctgttttggaaaataccttgctaggaatctacacttttgaaattctggttaaactctttgcacgcggtgtgtgggccggttccttcagctttctgggggacccatggaattggttggattttagtgttaccgtgttcgaagtaattataaggtattccccactcgacttcatccccacccttcagactgcccgtaccctgaggatcctgaagataatacctctcaatcaaggtctaaaatcactggtgggagttctcatccattgcctcaagcagttaatcggagtcattatcctgacgttgttcttcctgagtattttctctctcatcggcatgggcctctttatggggaatttaaagcacaagtgctttcgctggcctcaagagaacgagaacgagaccctgcacaataggactggtaatccgtactacatccgcgaaaccgaaaatttctattacctagaaggtgagcggtatgcgctgttgtgcggaaaccgaaccgacgcaggacagtgtccagaggggtacgtatgcgtgaaagctggaataaaccctgaccaggggttcaccaactttgacagcttcggctgggccctgttcgctctgtttcgcttaatggcccaggattatccagaggtcctgtaccatcagattttatatgccagtggtaaggtatatatgatcttctttgtagtcgtcagttttctgttttcattttatatggccagcctgtttttagggatcctggccatggcctacgaagaggaaaagcaacgggttggggaaatcagtaaaaaaatcgagcctaagttccagcaaacaggtaaggagttacaagagggaaacgaaactgacgaagccaaaacaatccagatcgaaatgaaaaagaggtcacccatcagcacggatacctcgctagacgtcttggaagacgcaacactaaggcacaaagaggaactggagaagagcaagaaaatttgccctttgtattggtacaaatttgcaaaaaccttcttaatctggaattgctcgccctgctggctgaagctgaaagagttcgtgcacagaatcattatggccccttttaccgatctcttcctgattatctgcataattctgaatgtctgcttcttgactcttgagcactatcccatgagcaaacaaaccaacaccctcctcaatatcggcaatctggtgtttataggcatcttcactgccgagatgatttttaagatcatagcgatgcacccatacggatatttccaggtcgggtggaatattttcgattcaatgattgtcttccatgggctgatagagctgtgtcttgctaacgtagcgggtatggccctgctgaggctatttagaatgctgcggatcttcaagctcggcaagtattggcctactttccagattctcatgtggagcttgagcaactcctgggtggccctcaaagatctggtcctgttgttgttcacctttatctttttttcggctgcttttggaatgaagcttttcggaaagaactacgaagagttcgtttgccatatcgataaggattgtcagctgcccaggtggcacatgcatgacttcttccattcatttctgaatgtgttcagaatcctctgtggggagtgggtggagaccctgtgggattgtatggaagtggctggacaatcctggtgcattccgttctatttaatggtcatactgattggcaatctgctagtgttatacctgttccttgcactggtctcgtcgttctcttcctgcaaagatgtcacagccgaagaaaataacgaagccaaaaacctgcaactcgcagtagcacgcattaaaaagggaatcaattacgtactcctgaaaattctttgcaagacgcaaaacgtcccaaaggatacaatggaccacgtcaatgaagtatatgtcaaggaagacatcagcgatcatacattgagcgaacttagtaatactcaggacttcttgaaagacaaagaaaaaagttcaggcaccgaaaagaacgccactgagaacgagtcacagagtctcatcccttcgccatcagtatccgaaacagtgccaattgccagcggagagagcgatatcgaaaacttagacaacaaggaaatccaatcgaaatccggcgacgggggaagtaaatag

SEQ ID NO: 240918 - DNA, 1209 bp, synthetic construct
  misc_feature 1..1209: note = Description of Artificial Sequence: Synthetic coding sequence
  source 1..1209: mol_type = other DNA
atgttggcatctcctgaacctaaaggattagtgcctttcacaaaggagtccttcgaacttattaaacagcacattgctaaaactcacaacgaggatcacgaggaggaagatttgaaaccaactcccgatttagaggtaggtaaaaaactaccttttatttacggtaacctgtcccaggggatggtctctgagccactggaggatgtcgatccatactactacaagaagaaaaataccttcatagtcctgaataagaataggacgatattccgcttcaacgccgcatccattttgtgcacactctctccgtttaactgtatccgtcgtacaactatcaaggttctcgtacacccattttttcagctgtttatcctgatctccgtgttgatcgactgcgttttcatgtccctgacaaatctccccaagtggaggcctgtactggaaaatacgctgctaggaatttatacttttgaaatccttgtcaagctgttcgcacggggtgtttgggcaggtagtttcagcttcttaggggacccatggaattggctggacttttccgtgacagtctttgaggtcatcattcgttactctccactcgatttcataccaactcttcaaacagccagaacactcaggatcctgaagatcattcccctaaatcaaggtttgaaatcactcgttggtgtgcttatccactgcctgaagcagctcatcggggtgatcatccttaccctgttttttctttctatttttagcctgataggtatggggctgtttatggggaacctaaagcacaagtgctttagatggccacaggagaatgagaatgagaccttacataataggacaggaaatccatactacatacgtgaaacggaaaacttctattacctggaaggggagcgttatgcattgctgtgcgggaaccggacagacgctggacagtgtccagaaggatatgtgtgcgttaaagcaggcatcaatcctgatcaagggttcacaaactttgacagctttggctgggctcttttcgctctgttccggctcatggcccaggattatccagaagtgctataccatcagatactgtacgcatctggcaaggtgtacatgatcttctttgtcgtcgtgtcctttcttttcagcttctacatggcatcactgttcttggggatccttgcaatggcctatgaggaggagaagcaatag

SEQ ID NO: 240919 - DNA, 5870 bp, synthetic construct
  misc_feature 1..5870: note = Description of Artificial Sequence: Synthetic coding sequence
  source 1..5870: mol_type = other DNA
atggagtttccaatcggatctttagagaccaataactttcgacgcttcactcccgaatcccttgtggagatcgaaaagcagatagccgcaaagcaaggtacaaaaaaagcccgagaaaaacatagagagcagaaagatcaggaagaaaagcccaggccccagttggacctgaaagcatgtaaccagcttcctaagttctacggcgagctgcccgcagaactcattggcgagcctctcgaagacctagatcccttctactccacgcaccggactttcatggtgctcaataaggggcgaacgatctccagattcagcgccacgagggccctctggctgttctccccgtttaacctcattagaaggacagcgattaaggtgtctgtgcatagctggttttctctgtttattaccgttaccatccttgtgaattgtgtctgtatgactcgaaccgatcttcccgaaaaaatagagtacgttttcaccgtcatttacaccttcgaagcgctcatcaaaattctggcccgaggtttctgtttgaacgaattcacatacctcagagacccatggaattggttagacttctcagtcatcacgctggcgtatgtagggacagccatcgatctcagaggaatttccggcctcaggacttttcgcgtattacgagcgctcaagactgtgagcgtcatcccaggtctgaaggttatcgtgggagccttgattcattctgttaaaaagctggccgatgtgaccatactgacaatcttctgtttgagcgtattcgctctggttggcttgcagttgtttaagggaaacctgaaaaacaaatgtgtcaagaatgacatggctgtgaacgaaacaactaactactcctctcaccgcaaacccgacatctatatcaataaacggggaactagcgatccactgctatgtggtaatggtagcgattccggccattgcccagatggctatatctgtttgaagacttccgataacccagattttaactacaccagttttgactcatttgcttgggcatttctgagtctgtttcggctaatgacacaggactcctgggaacgcttgtatcagcagacactcagaacttcgggtaagatttacatgatcttctttgtgctcgtgattttcctgggcagcttctatctggtgaatttgatccttgcagtggttacaatggcctacgaagagcagaaccaggccacgaccgacgagattgaggccaaggagaagaagtttcaggaagccctagaaatgctgcgcaaggagcaggaagtattagcggctctcgggattgacacgaccagtttgcactctcacaacggctctcctttaacaagcaagaatgccagtgaaaggagacacagaatcaagccaagggtttccgaagggtcaaccgaggacaacaagtctccgagaagcgacccttataatcagcgccgaatgagctttctggggctggcttccggcaagcgacgcgctagccatggctctgtattccactttaggagtcctggtagggacatcagcttacctgagggcgtgactgacgatggcgtttttccaggagaccatgaatcccatcgcggtagcctgctgctgggcggtggggctggccagcagggccctctgccccgatcgcccttgccccagccaagtaatcccgattctcggcacggagaggatgagcaccagcctcccccaacttccgagcttgcacctggcgcagtggacgtcagcgcctttgatgcgggacagaagaagacctttctctccgcagaatacctggacgagccgttccgtgcccagcgagcgatgtcagtggtgagcattattacaagcgttttggaggagctagaagagtctgaacaaaagtgccccccatgcctcacctctctgagtcagaagtatctgatctgggattgctgtcctatgtgggtcaaattgaaaaccattctcttcggattggtcacagaccctttcgctgaactcacgattaccctttgcatagttgtaaataccatctttatggcaatggaacatcacgggatgtctcctaccttcgaggccatgctgcaaatcggtaatattgtctttaccatcttctttactgcagagatggtgttcaaaattattgccttcgacccttattactatttccagaagaaatggaatatttttgattgtattatcgtgacagtatctctgctcgaactcggcgtggctaaaaaaggcagtctgagcgtgctcaggtcattcaggctcttgcgggtgtttaagttagcaaaaagctggcccacactgaatactttgatcaaaatcattggaaacagcgtgggggcacttggtaacctcacaatcatactggctattattgtgtttgtgttcgcattggtgggcaaacagcttctgggcgagaattatcgcaataataggaaaaacattagtgctccccacgaagattggccacggtggcatatgcacgatttctttcacagttttctcattgtctttcgtatcttgtgtggcgagtggatcgaaaatatgtgggcttgcatggaagttggacagaaatctatatgtctgatccttttcctaaccgtaatggttctgggaaatctggtggtgctcaacctatttattgcactgttactaaattcctttagcgccgacaatctcacggcacctgaggacgacggcgaggtgaataacctgcaggtcgccctagcacgaatccaggtgttcggccatcgcaccaagcaggccctgtgtagttttttttcaagatcttgcccattcccccaaccaaaagctgaacctgagctggtggtgaaattgccgctcagttcctcaaaggcagagaatcatattgccgcaaataccgcacgcggaagcagtgggggtctccaggcgcctaggggtcccagggatgagcattccgacttcattgccaacccaacagtttgggtgtcggtccccatcgctgagggagaatccgacttggatgatctggaggacgacgggggagaagatgctcagtcattccagcaggaagttattcccaagggtcagcaagagcagttgcagcaggtcgaaaggtgtggcgaccatttaacccctaggtcccctgggactggaacttccagcgaagatttagctcctagccttggtgagacgtggaaagacgagagtgtgcctcaggtgcccgcagaaggcgtcgacgataccagctcatctgaggggtctacagtcgattgcctggaccctgaagagatcttgaggaaaatccctgaactggcagatgatctggaagaacccgacgattgtttcaccgaggggtgcattagacactgcccttgttgtaagttagacaccacaaagagcccatgggatgttgggtggcaggttaggaagacatgctaccgtattgttgagcatagctggtttgagtcctttattatctttatgattctcctgtcttccggctccctggcgttcgaggactattacttggaccaaaagccaaccgtaaaggccctgctggagtatactgatagggtattcacttttatttttgtgttcgagatgctgctaaaatgggtggcgtatggtttcaaaaagtactttaccaacgcctggtgctggctggatttcctgattgttaacatcagcctgatttcccttacagctaaaatcctggaatacagcgaggttgcccctatcaaagcgcttcgaacccttagggcgctccgccctctgcgggctctcagtcgcttcgagggaatgagagtggtggtcgacgcactggtgggagccatcccttcaatcatgaatgttctgcttgtctgcttgattttttggctcatattcagcataatgggagtgaatctgttcgcgggaaaattttggagatgtatcaactataccgacggcgagtttagtctggtccccctttcaattgtaaacaacaagtccgactgcaagattcagaactctacagggagtttcttctgggtaaatgtgaaagtaaactttgacaacgtagcaatggggtacctggcgctgcttcaggtggcgacatttaaaggatggatggacattatgtacgctgcagttgatagccgggaagtgaacatgcagcctaagtgggaggacaatgtttacatgtacctctattttgtgatattcataatattcggcggatttttcacactcaatctctttgttggggtcatcatcgataattttaaccagcagaaaaagaaactcggagggcaggacatttttatgaccgaggagcaaaaaaaatattataatgctatgaaaaagttgggcagtaagaagccccagaagccaatcccccgacccctgaacaagtttcaaggctttgtgtttgacatcgtcactaggcaggcatttgatattactataatggtgctgatttgtctgaacatgatcaccatgatggtcgagacagacgaccaatctgaagagaagacaaagattctgggaaagatcaaccagtttttcgttgctgtcttcacaggcgagtgcgtgatgaagatgtttgcactgcggcagtattactttaccaatgggtggaatgtgttcgatttcatagtagtggtgctaagcatcgccagcctgattttttctgctatcctgaaatcacttcagagctattttagtcctactttgttcagggtgatcagattagccagaattggtcggatcttaagattgatccgggcagccaaaggcatcagaacgcttttgttcgccttgatgatgtcacttcccgctctctttaatataggtctgcttctttttctggtcatgttcatctacagcatatttggcatgagtagttttcctcatgtacgatgggaggccggtattgacgatatgttcaattttcagacgtttgctaattccatgctgtgcttgttccaaataactacttcagctgggtgggacgggttgctttctccgatactcaatacaggcccaccttattgtgaccctaacctgccaaactccaacgggacccggggagactgtgggagcccagccgtaggcataattttctttaccacttacatcatcatatcttttcttattatggtaaacatgtatatagcagttattctcgaaaatttcaacgtggcaacagaagagagcacagagcctctgagtgaggatgatttcgatatgttttacgagacttgggagaagtttgaccccgaagccacacagttcatcacgttctccgccctgagtgactttgccgacacgctgtccggcccattaaggattcctaagccaaaccgaaatatcttaattcaaatggacctccctctggtacctggagataagatacactgcttggatatcctcttcgccttcacaaagaacgtgcttggcgaatctggagaactggacagtctgaaggccaatatggaggagaagttcatggcaacaaatctgtccaagtcctcgtatgagccaatcgccactactctacggtggaagcaggaagatatctccgccaccgttattcagaaagcttaccggtcctacgtgctgcataggagtatggccctgtccaataccccttgtgtccctcgtgccgaagaagaggcagcttccttgccagatgaaggcttcgtggcgtttaccgcaaatgaaaactgtgtgctgccagacaaatcagaaaccgcgagtgctacctcattccctccatcatacgagtctgtgactagaggcctctctgatagagtcaacatgaggaccagtagttcaatccagaacgaggacgaggccacgagcatggaactgatcgcacccggtccata

SEQ ID NO: 240920 - DNA, 5375 bp, synthetic construct
  misc_feature 1..5375: note = Description of Artificial Sequence: Synthetic coding sequence
  source 1..5375: mol_type = other DNA
atggatgacagatgttaccccgtgatcttccctgacgagcgaaacttcaggcccttcacttctgactctctggcagcgatcgaaaaacgcatcgctatccagaaggaaaagaagaaatccaaggatcagacgggcgaagtcccacagccacgccctcagctggatttaaaggcgtctaggaaactgcccaagctttacggtgacattcctcgggagctgattggcaaaccacttgaagacctcgatcctttttacaggaatcataagaccttcatggtcttgaaccggaaaagaactatctatagattttcagcaaaacatgctctctttattttcggacctttcaactcgatccgaagcctggcgattcgagtgtctgtgcactcactgttcagtatgtttataataggaacggtcatcataaattgtgtcttcatggcgacagggccagctaagaactcaaatagcaacaacaccgacattgctgagtgtgtgttcaccggcatttacatctttgaggctcttatcaaaatcctggcgcgaggattcattcttgatgaattcagttttctgcgtgacccatggaactggctcgacagcatcgtgattgggatagcaatcgtttcctatattcccggaatcactatcaagctattacctttgcgcaccttcagagttttcagagcactgaaagcgatcagcgttgtgtcccgcttgaaggtgatcgtcggcgctctgttgagatcggtgaagaaattagtgaatgtaatcattcttacatttttttgcctgagtatttttgccctggtaggccaacaattgtttatggggagtctgaacctaaagtgcatctcaagagactgcaagaatatatccaacccggaggcttacgatcactgcttcgaaaagaaagagaactctcctgaatttaagatgtgtggaatctggatgggtaattcagcctgcagtatacaatacgagtgcaaacatacgaagattaatcctgattataactacaccaactttgacaacttcgggtggtccttcctggcaatgtttagactgatgactcaggacagctgggagaagttgtaccagcaaaccctgcgcaccactgggctctacagtgtgttcttttttatcgtcgtgatattcctaggcagcttctacttgatcaacctcacgttggccgttgtgacgatggcgtacgaagaacagaataagaatgtggccgctgaaattgaggctaaggaaaagatgtttcaggaggcccaacagctgctgaaggaagagaaagaggcgcttgtcgcgatgggaattgacagaagcagcctgacttccctggagacctcatacttcactcctaaaaagcgtaagctctttggaaataaaaagcgtaagagttttttcttgagggagagtggaaaagaccagcctcccggttccgacagcgatgaggattgccagaagaagccccagctgctcgagcaaaccaaacgtctctcacagaacctctcacttgaccattttgatgagcatggggaccccctacaacgacagcgggctctaagtgccgtatcaatcttgacaatcaccatgaaggagcaagagaaatcccaggaaccttgcctgccctgtggcgagaacctagcctctaaatacctggtctggaattgctgtccacagtggctgtgtgttaaaaaggtgcttagaacagtaatgaccgaccctttcactgaactggcaatcacgatctgtattataattaataccgtgtttcttgcgatggagcatcataagatggaggcctcgttcgagaagatgctgaacatcggcaacttggtctttacatctatctttattgccgagatgtgccttaagatcatcgcactagacccataccactacttccgaaggggatggaacatcttcgactcaattgttgcgctgctatccttcgcagacgtgatgaattgtgttcttcagaaacgctcctggccattccttcgctctttccgagtcctgagagtttttaagctggcaaaaagctggccaaccctgaacacgctgatcaaaatcatcggaaactctgtcggggcactgggcagcttgacagtcgtgctagtgatcgtcatttttatctttagcgtggtgggtatgcagctattcggccgttcatttaacagccagaaatctccgaagctctgcaatcctaccggcccaactgtgagctgcctcaggcactggcacatgggcgatttctggcattcattcctagtcgtttttaggattctgtgcggcgagtggatcgaaaatatgtgggaatgcatgcaggaagcaaatgcctcctcatccttgtgcgtcatcgtctttatcctcattacagtgatcggcaagcttgtggtcctgaacctgtttatagccctcctgctgaatagcttcagcaacgaggagaggaacggaaatttagagggtgaggcaagaaaaacgaaagtccaactcgcactggatcggtttaggagagctttctgttttgtacggcatacactggagcacttctgccataagtggtgcaggaagcagaatctcccacagcaaaaggaggtcgcagggggttgcgccgctcaaagcaaggacatcattccactcgtgatggagatgaaacgaggctcagaaactcaggaggagctcggtatattaacctctgtacccaaaacactcggagtaagacacgactggacatggctggcacccctagcggaggaggaagatgatgtggagttcagtggcgaagataacgcacagaggattacacaacccgagcccgaacagcaggcttatgagctccaccaggagaataaaaagccgacttctcagcgtgtgcagtccgtcgaaattgacatgttctcagaagacgagcctcacctgaccatccaggaccctcggaagaagtccgacgtcacctcaattctctccgagtgctctactatcgatttgcaggatggctttggctggctgcccgagatggtgccgaaaaaacagccagaacgctgtctccctaaaggatttggatgctgttttccgtgctgtagtgtggataaaagaaaacctccttgggtcatttggtggaacctgcgtaagacatgttaccaaattgttaagcactcttggtttgagtcattcatcatctttgtcatcttgctttcatctggggctctcatttttgaggatgtgcacctggagaaccagccaaaaattcaggagctactgaattgcaccgatatcattttcacacacatattcatcctggaaatggttctcaaatgggtggcttttggctttggcaagtacttcacatctgcatggtgttgcttggacttcatcatagtaattgtctcagtgaccacgctgattaatttgatggagctaaaatcattccggaccctgcgtgcactgagaccactccgagccttgagtcagtttgaaggcatgaaagtcgtcgtaaatgctctcataggggcaattccagcaatccttaatgtcttactggtttgcctgattttttggttagtattttgcatcttaggggtctacttttttagtggcaaatttggcaaatgcattaatgggacagattccgtgatcaactacaccattattactaataagtcacaatgcgagtcagggaatttctcttggattaatcagaaagtgaatttcgataacgtcggcaacgcctacctggcccttctgcaggtggccacgtttaaaggctggatggacattatatatgcagccgtggacagcactgaaaaggaacaacagcctgaattcgagagtaatagccttggctacatttattttgtggtattcataatctttggctctttttttaccctgaatctgttcataggtgttatcattgacaacttcaatcagcagcagaaaaagctggggggtcaggacatcttcatgacggaggagcagaaaaagtattataatgcgatgaaaaagttgggttccaaaaagcctcagaagcccatacctaggccgctgaacaagtgtcagggcctggtcttcgacatcgtcacatcccaaatctttgatatcattatcatatcattgatcatccttaatatgatctccatgatggccgagagttacaaccagccgaaggccatgaagtccatactggaccacctgaattgggtgttcgtggtcatttttacccttgagtgcctaattaaaatcttcgcgctgaggcagtattattttacgaacgggtggaatctgttcgactgtgtcgtggtgctactgtccatcgtctcaactatgataagcaccttggagaatcaggaacacattcccttccctccaactctcttccgaattgtgcggctcgctcgcattggtagaatactgcgtttggttagagccgctagaggaattaggactctgctgtttgcactgatgatgtccttgccctctctgttcaacatcggcctactgttatttctgatcatgtttatatacgcaatcttgggaatgaactggttttctaaggtaaaccccgagtccggaattgatgacatctttaactttaagacgtttgcctcttcgatgctgtgcctctttcaaatttcaacctctgctggctgggactctctcctgtcgccaatgctgcggagtaaggagtcctgtaattcctcttctgaaaactgtcatctccccggtattgccacgagctactttgtaagttatatcattatctcattcttgattgtggtgaacatgtatattgctgtgattctggagaattttaataccgcaacggaagagtccgaggaccccctcggcgaggatgacttcgacatcttctatgaagtttgggagaagtttgacccagaggcaacacaatttattaaatacagcgccctaagcgactttgccgatgccctcccagaacccctgcgagtagccaaaccgaataagtatcagttcttggttatggatctgccaatggtgtccgaggaccgactgcactgcatggatatcttgtttgcattcaccgccagggtccttgggggatccgatggcctcgattccatgaaagcaatgatggaagagaaatttatggaggcaaacccgctgaagaaactgtacgagcccattgtcacgacgaccaaacggaaggaagaggagaggggcgcagccatcattcaaaaggcttttcgaaagtatatgatgaaagtgactaagggggaccaaggcgaccagaatgacttggagaacgggcctcactctcctctgcagacgctctgtaatggtgatctgagttcttttggcgttgcaaagggaaaagttcattgcgatta

SEQ ID NO: 240921 - DNA, 4335 bp, synthetic construct
  misc_feature 1..4335: note = Description of Artificial Sequence: Synthetic coding sequence
  source 1..4335: mol_type = other DNA
atggacgatagatgctatcctgtcattttcccagatgagcgaaattttcgaccttttacaagtgacagcttggcagccatcgagaagcggatcgctatacaaaaggagaaaaaaaaaagcaaggaccagactggtgaagttccccaaccacgcccacagctggacttgaaagcaagtcggaagctgccgaagctttatggagatataccgagagagctaataggcaaacctttagaggatttggatcctttctaccgtaatcataagacattcatggtgctgaacaggaaacgtacgatttaccgcttctctgcgaagcatgcgctattcatctttggacccttcaacagtattcgatcattggctattagagttagtgtccattccctattctctatgtttataatcggcaccgtgataatcaactgcgtatttatggcgaccggccctgctaaaaatagcaactcaaataacactgatatcgcagaatgtgtatttacggggatttatatcttcgaggccctaatcaagattctggccaggggctttatccttgacgagttcagctttctcagggacccctggaactggttagacagcattgtcattggtattgcgatcgtgtcttatattcccggtatcacgattaaactcttacctttgcgcacttttagggttttcagagccctgaaggccatatcagtcgtttctcggttgaaagtcatcgttggcgctcttcttcgtagcgtcaagaaactagtgaacgtcataatcctgacttttttctgcctttctatcttcgctctggtcgggcagcagctgtttatggggtctttgaacctgaagtgtatcagcagagactgcaaaaatatctctaatccggaagcttatgaccactgtttcgagaagaaggaaaactctccagaattcaagatgtgtgggatttggatgggcaatagtgcctgctccatccagtatgaatgcaaacacaccaagataaacccagactacaattataccaactttgacaattttggctggtccttcttagccatgtttcggttaatgactcaagatagttgggaaaaactttatcagcagactctgagaaccacaggcctttattccgtgtttttctttatagtcgtcatcttcttgggctctttctatctgattaacctgacgctagcagtggttaccatggcctacgaagaacaaaataagaatgtagctgccgagatcgaggctaaggagaagatgtttcaagaggcgcaacagctgttgaaggaagaaaaagaggccttagtcgccatgggcattgacagaagctcgctgactagcctggagacgtcctactttacacccaagaagcgcaagctttttggcaataagaagcgtaaatccttctttctaagggagtctgggaaagatcagccaccgggaagcgactctgacgaggattgccagaagaagccccagctgctggagcaaacaaagcggctctctcagaacctcagcctggatcacttcgatgagcatggcgacccattgcagcgacagcgagccctctcggccgtctccatattgaccatcactatgaaagagcaggaaaagtcacaggaaccgtgtttgccttgcggcgagaacctggccagtaaatatctcgtgtggaattgctgcccacaatggttatgcgttaagaaggtcctcagaacggtgatgacagaccctttcactgaacttgcaattaccatttgcataattattaacaccgtgttcttagccatggagcatcacaagatggaagcctcctttgagaaaatgctgaacatcggaaacctcgtgtttacgagtatctttattgccgagatgtgcttgaagattatcgctctggacccctatcattatttcagacgaggctggaacatttttgactccatcgtggcccttctgtctttcgccgacgtcatgaattgtgtccttcaaaaacgctcatggccatttctaagaagctttagggtgctgagagtgtttaagctcgcaaaaagctggcctaccctcaacacattaatcaagataattggcaacagtgtcggggctcttgggagcctaacagtcgtcctcgtaatcgtcatcttcattttctccgtggtgggcatgcaactgtttgggaggagcttcaacagccagaaaagcccaaaactgtgcaacccaaccggacctaccgtcagctgcctcagacactggcacatgggcgacttctggcactcattcttggtggtgttccgcattctctgcggtgagtggatcgaaaatatgtgggaatgtatgcaggaggctaacgccagcagctccctttgcgtaattgtttttatcctaatcaccgtcattggcaagctggtcgtgctgaatctgttcatcgccctgctcctcaattccttctctaatgaagagaggaacggtaatctcgaaggcgaggcgcgaaaaactaaagtgcagctcgctttagaccgtttccgacgggcattttgctttgtccgccacactttagagcacttctgccataaatggtgccgaaaacagaatctgccacagcagaaggaagtagccggaggttgcgcagctcaatccaaagacataattcctttggtgatggagatgaagcgaggctcagaaacccaggaagagttgggcatcctaacaagtgtgccgaagacactaggagtccgccacgactggacgtggctggcgccactggccgaagaagaagatgacgttgagtttagtggagaagataacgcacaaaggataacacagcccgagcccgagcagcaggcctatgagttacatcaggagaataaaaagccaacctctcagagagttcagtccgtcgagatcgacatgttctccgaagacgaaccacacctgactatccaagatcctagaaagaagtcggatgtgacctctatcctgtccgagtgctcaactatcgacttgcaggatgggtttggttggctaccagagatggtcccgaaaaaacagcctgaacgatgccttccaaagggctttggctgctgcttcccttgttgctccgtcgacaaacgcaaacccccttgggtcatttggtggaacctccgcaagacctgctaccagatcgtgaagcatagctggtttgagtcttttatcattttcgtcatcctcctcagtagtggagcccttatatttgaagacgttcacctggagaatcagcctaagattcaagagctactcaactgcactgacattatatttacacacatttttattctggaaatggtgctgaagtgggtggcttttggctttggaaaatactttaccagtgcctggtgctgtctcgactttattattgtgatagtgagcgtgacaaccctcatcaacctaatggagctgaaaagcttcaggaccctgagggccctccgtcccctgcgagccttaagccagtttgagggcatgaaagtcgtggtgaacgcactgattggtgccattccggctatcctgaatgtgctcttggtgtgcttgatcttctggctggtgttctgtattttaggggtctactttttcagtggaaagttcggaaagtgcatcaatggaaccgacagtgtgatcaactacacaattatcaccaataagagccagtgtgaatcaggaaacttcagttggatcaaccagaaggtcaactttgacaacgtgggaaacgcgtacctcgccttactgcaggtggccacctttaaaggctggatggatatcatctacgccgctgtagacagcacagagaaggaacagcagccagagtttgagtcaaattccctgggatacatttactttgtggtcttcataattttcgggagcttcttcacccttaatctcttcattggggtaatcatcgacaattttaaccaacagcagaagaaactcgggggacaggacatctttatgactgaagagcagaagaaatactataacgcgatgaaaaaattgggaagcaagaaacctcagaaaccaataccacggcctctgaataaatgtcagggccttgtctttgacattgtgaccagtcagatcttcgatatcattataatctccttgatcattctgaacatgattagtatgatggcagagagctacaatcagcctaaggcaatgaaatctatcctggatcacctgaattgggtatttgtggttattttcacgctagagtgtttaattaaaattttcgcactaaggcagtattacttcaccaatggttggaacttgtttgactgcgtcgttgtcctgcttagcattgtaagcaaatag

SEQ ID NO: 240922 - DNA, 5375 bp, synthetic construct
  misc_feature 1..5375: note = Description of Artificial Sequence: Synthetic coding sequence
  source 1..5375: mol_type = other DNA
atggatgaccggtgctacccagtgatcttccccgacgagcggaactttcggccttttactagcgacagcttggccgctatcgagaagaggatagccattcagaaagaaaaaaaaaagagtaaggaccagactggagaggtccctcagcccaggccacagctcgacttgaaagcgtcccgcaaactacctaaactttacggcgacatcccccgagaactgataggtaaacccttggaggatctggatccattctacaggaatcacaaaacattcatggtactgaatcgcaaacggacgatctatcggttctcagccaagcatgcgttgtttatttttggaccctttaactccattcgctctcttgcaatacgagtgtctgtgcacagccttttttctatgtttatcataggaaccgtaatcatcaactgcgtcttcatggctaccggcccagctaagaacagcaactccaacaatacagatattgcagagtgcgtctttactggtatttacatattcgaggccctcatcaagatccttgctaggggctttatcctcgatgaattctctttcctgagagacccgtggaactggctcgactccattgtcatcggtatcgctatagtcagctacatccctggcattaccatcaaactcttacccttgcgaacgttccgtgtgttcagagctttgaaggctatctcagtggtgtcccgactgaaagttattgtgggggctctcctcaggtctgtgaagaagttggttaacgttatcatcctcacgttcttctgcttgtccatatttgcactcgtgggtcagcagctattcatgggctctctgaacctgaagtgcatttctcgggattgtaagaatatctctaacccggaggcttatgatcactgcttcgaaaagaaagaaaacagccccgaatttaagatgtgtgggatctggatggggaatagcgcatgctccatccagtatgaatgtaagcatacaaaaataaacccagattacaactatacaaattttgacaatttcggatggagctttctggccatgttccggctgatgacgcaagattcttgggagaaactctaccaacagactcttcgcacaacgggactatatagtgtcttttttttcattgtggtgatctttctgggcagtttctacctcatcaatctaacactggccgtcgtgacaatggcctacgaggaacagaataaaaatgtggcagccgaaatcgaggcaaaggaaaaaatgtttcaggaggcgcagcagctgttgaaagaagagaaagaagccctggtcgccatgggaattgacagatcttcgctgacctcgttagagacctcctatttcaccccgaagaagcgcaaattgttcggcaataaaaagcggaagagcttttttttgagggagtctggcaaggatcagccccctggaagcgactccgatgaggactgtcagaaaaagcctcagctgctggaacagacgaaacgattgagccagaatctgtctctagaccactttgatgagcatggagaccccctgcaacggcagcgcgcacttagcgctgtcagcatcctcacaattaccatgaaggagcaggagaaatcacaggaaccttgtctgccatgcggagagaatctcgcttctaagtatctagtgtggaattgttgtcctcagtggttatgtgtgaagaaagttctgcgcacagtgatgaccgacccttttacggagctcgccataacaatttgtatcatcatcaataccgtgttcctggccatggagcatcataagatggaagcctcattcgaaaagatgctaaacattggcaacctggtcttcacctcaatctttatagctgagatgtgcctgaagatcatcgccctcgacccataccactacttccgaagagggtggaacatatttgattctattgttgctcttttgtcctttgcagacgtgatgaattgtgtgctccaaaaacgatcctggcccttccttagatcattccgtgtcctgcgggtgtttaaactggccaaatcttggccaacgctgaacaccctgatcaagatcatcggaaattcagttggagccctggggagcctgactgtagttctagttatagtaatcttcatattttcagtggttggcatgcagctgtttggtcggtcctttaacagccaaaagtctcctaagctctgcaatccgacgggacccaccgtttcttgtctgcgccattggcatatgggggatttttggcattcttttctggtcgtttttcgaatcctgtgtggagagtggatcgagaacatgtgggagtgtatgcaggaggccaatgcctcctcttctctgtgcgtcatagtgttcatcctgattactgtcatcggcaagctcgtggtgctgaatctctttatagcactactgttgaattcttttagtaacgaagaacggaacggaaacctggaaggcgaggccagaaagactaaagtgcaattagcactggaccggttccgtcgtgccttttgttttgtgagacacaccctggaacacttctgtcataagtggtgtagaaagcagaatcttccacaacagaaagaggtggcgggaggatgcgcggctcagtctaaggatatcattccactggttatggaaatgaaaaggggcagcgagacgcaagaggaactggggatattaacttcagtgcccaagactcttggcgtacgccacgactggacatggctcgcacctctggctgaagaggaggacgatgtcgaattctcaggagaggataatgcccaacgcatcacacagccagagcctgaacagcaggcatatgagctgcaccaggaaaataagaagccaacctcgcagcgcgtccagagcgtggagatcgacatgtttagtgaggacgagccccaccttacgattcaagacccaaggaaaaagtctgacgtgaccagcatcttgtcagagtgcagtaccatcgacctgcaggatggctttgggtggctgccggaaatggtccccaagaagcagccagagcggtgcttgccgaaaggctttggctgttgtttcccatgttgtagcgtcgataaacggaagcccccttgggtgatctggtggaacttaaggaaaacatgctatcagatcgttaaacattcttggtttgaatccttcatcatctttgtgattctgctcagtagcggagccctgatcttcgaagacgtccatttggaaaaccagcctaagatccaagaactccttaactgcactgatatcatctttacgcatattttcattctggaaatggttctgaagtgggttgccttcgggtttgggaagtactttacctcagcctggtgttgtctcgattttattatcgtaatcgtttcagtgactacactgatcaacctaatggagctgaagtcattcagaaccctgcgggctctccggcctttgcgcgctttgtctcagttcgaggggatgaaagtcgtggtgaatgccttgatcggagccatccccgctatactgaacgtgctgctggtctgtttgatattttggctggttttctgcatcctcggtgtgtattttttctctggtaaatttggcaagtgcatcaacggcacggacagcgtgatcaactacacaatcatcacaaacaaaagtcaatgcgagagtgggaacttctcctggatcaaccaaaaagtaaattttgacaacgtcggtaacgcctatctggcactgttacaggttgctacctttaaggggtggatggacataatctacgctgctgtcgacagcactgaaaaagagcagcagccagagtttgaatccaactctctcgggtacatttattttgtggtgtttattatctttggaagctttttcactctcaatttatttattggagtcattattgacaacttcaatcagcagcagaagaagctgggtggacaggacatctttatgacggaagagcagaagaagtactacaacgcgatgaagaagctcggatctaagaagccccagaagcccatccctagacccctcaacaagtgccaagggctagtgtttgatattgtaacatcccagatctttgatattatcatcatttccctgatcattctcaacatgatttccatgatggccgagtcctacaaccaacctaaagcaatgaaaagtattctggatcacctgaactgggttttcgtggtgattttcactcttgagtgcttgatcaaaattttcgccctccggcaatactactttaccaacggctggaatttgtttgattgcgttgttgttctgttaagcatcgtgagtactatgatatcgactttagaaaatcaggagcatatccctttcccccctacactgtttcggatcgtacggctggcacgcattggcaggatcctgcgtctcgtgcgagctgctaggggcatccgaacgcttttattcgccttaatgatgagtctcccttcactgttcaacatcggtctgctcctttttctaataatgtttatttacgctattctcggcatgaactggttttccaaagtgaaccccgagagtggcatagatgacatcttcaattttaagactttcgcaagctcaatgttgtgcttatttcagatcagcacttctgccggatgggatagcttactgagcccaatgctccgtagcaaagagtcttgcaattcaagctctgaaaactgtcacctccccggtattgccacctcctatttcgtatcgtacattatcatttcctttctgatcgtcgtgaatatgtacattgccgttatcctggagaactttaacactgctactgaggagagcgaggacccactgggggaagacgatttcgacatattttatgaggtctgggaaaagtttgatcctgaggctacacagtttattaaatacagtgcgctgagcgactttgccgacgccctccctgagccactccgagttgccaagccaaataagtaccaattcttagtgatggatctgcccatggtctcagaagatcgcctgcactgcatggatattctcttcgcctttactgcccgtgttctgggcggtagcgatgggttggatagtatgaaagccatgatggaagaaaaatttatggaggccaaccccttgaaaaaactctatgagccgatcgtgacaaccacaaagagaaaggaagaggagaggggggcagctataatccagaaagcttttagaaagtatatgatgaaagtgaccaagggcgatcagggagatcagaacgatttggagaacggaccacactcacctttgcagacactgtgcaatggggacctgtcatcttttggagtggcaaagggcaaagttcactgcgacta

SEQ ID NO: 240923 - DNA, 5217 bp, synthetic construct
  misc_feature 1..5217: note = Description of Artificial Sequence: Synthetic coding sequence
  source 1..5217: mol_type = other DNA
atgctcaaacgcaaacagtcaagccgcgtcgaggctcaacctgtgaccgactttggtccagacgaaagtctcagtgataacgctgacatactatggatcaataagccatgggtccatagcctgctgcgcatttgtgctatcatctccgtcatatctgtatgcatgaacacacccatgacattcgagcactacccaccacttcagtacgtcacgttcacattagatactctcctgatgttcctgtacactgccgaaatgatcgcaaaaatgcacattagagggattgtgaaaggcgatagctcttatgtcaaagataggtggtgtgtttttgacggcttcatggttttttgtttatgggtgtctttggtcctgcaagtgttcgaaattgcggacatagtggatcagatgagcccctggggaatgctccgtattccacgaccattgattatgatcagggccttcagaatatattttaggttcgagttgccaaggaccaggatcacaaatatcttgaaaaggagcggcgagcagatctggtccgtgtcaatctttctgttattttttctcctgctctatggaattctgggggtacaaatgtttggcacttttacctaccactgcgtggttaacgacactaaacctgggaacgtgacatggaactcactcgccatccccgatacgcactgttcgccagagctcgaagagggctaccaatgtcctcccggattcaagtgtatggatttggaggaccttggcctgtctcggcaggaattgggttacagcggcttcaacgagatcggcacatcaattttcacagtgtatgaggctgccagccaggagggttgggtcttcctcatgtaccgggcaattgactcattcccaaggtggagatcatacttctacttcatcaccttaatcttcttcctggcatggttggtgaaaaacgtgtttattgccgttataatcgagactttcgcagaaatccgcgtacaatttcagcagatgtgggggtctcgctcctcaacaacttccaccgcgaccacacaaatgttccacgaagatgccgctggaggctggcagcttgtggcagttgacgtcaataagccccagggaagagcacctgcatgtcttcagaaaatgatgcgaagttccgtgtttcacatgttcatcctcagtatggtaacagtggatgtcatcgtggccgctagtaattactataaaggggagaacttccgcagacagtacgacgaattttacttggctgaggtcgccttcacggtcctgttcgaccttgaagcactgctcaaaatctggtgcttgggcttcacgggctatatttcatcctctctgcacaagttcgaactgctgttagtgataggcacaaccctgcatgtgtacccagatctttaccactcacagttcacctattttcaggttttgagggtcgtgagactgattaagatcagtcccgcattagaagacttcgtatataagatatttggccctggcaaaaagcttggctccctggttgtctttacggcatccctactcattgtgatgtctgccatcagtctacagatgttctgttttgtcgaggagctagacaggtttacaacgttcccacgtgcatttatgtctatgtttcagatacttacgcaagagggctgggtcgacgtgatggatcagactctgaacgctgtaggacacatgtgggctcctgtggtggcgatttactttattttataccacttgtttgcaacactaatcctactgtctctgtttgtagccgttatcctggacaacttggagctggacgaggacctgaaaaagctgaaacagcttaagcaaagtgaggccaacgcggacacaaaagaaaaattgccacttcgcctcaggatcttcgaaaagttccccaatcggccacagatggtgaaaatctccaaactgcctagtgattttactgtcccaaagattcgggagagcttcatgaaacagtttattgaccggcagcagcaggacacctgctgtctgctccggtctctgcctacaacatccagcagttcctgtgatcactccaaaagatctgcgatagaggataacaagtacattgaccaaaagttaaggaaaagcgttttctccataagggcgcgaaaccttctcgagaaggagaccgccgtgaccaaaatcctgcgagcctgtactaggcagcggatgttaagcggatcttttgaggggcaacctgctaaagagcgttccatcctgtccgtccaacatcatatcaggcaagaacgacggagcctgcgccacggtagtaatagccagaggatctcgagagggaagtccctggagaccctaactcaagatcacagtaataccgtgcggtaccgcaatgctcagagagaggacagcgaaatcaaaatgattcaggaaaaaaaagagcaggccgagatgaagaggaaggtccaagaggaggagcttagagaaaatcacccgtacttcgacaagcccctgttcattgtggggagggagcaccgcttccggaatttctgtagggtggtcgtgcgcgctcggttcaacgcgtcaaagactgacccggtgactggagccgtaaaaaatacaaagtaccatcagttgtatgacctgttgggcctcgtaacatacttagattgggtaatgattatcgtcaccatctgcagctgtatttctatgatgtttgagagtccttttagacgtgtgatgcatgccccaactctgcaaattgccgagtatgtattcgttattttcatgagtattgaactcaacctgaagatcatggcagacgggctgtttttcacacccactgccgtcattcgggacttcggcggagtaatggatattttcatttacctggtctccctgatttttttgtgttggatgcctcagaacgtaccagccgaatctggagctcagttactgatggtgctgagatgtctgcggcctctgcggattttcaaactggtgccacaaatgaggaaggtcgttagggaactcttctccggcttcaaagagatctttctggtgtccatacttctgctcaccctcatgctggtatttgcctccttcggcgttcagttattcgctgggaaactggccaagtgtaacgatccgaatattattaggcgggaggactgtaacggcattttcaggattaacgtatcagtcagtaaaaaccttaacctgaagctgcgccctggtgaaaagaaacctggcttctgggtccctcgagtgtgggctaatcctaggaacttcaatttcgataatgtgggaaatgcaatgttagcactgttcgaagtactgagcctgaaaggttgggtcgaagtgcgcgacgtgattattcacagagttggacctattcacggtatttatattcacgttttcgtttttcttggatgcatgataggcctgaccctcttcgtcggcgtggtgatcgcaaactttaacgagaacaagggcactgctctgctgaccgtcgaccagcgacgctgggaagacctgaaatcacgtctgaagattgcacagccgttacatctgccgcctcgacccgacaacgacggttttcgggctaagatgtatgacattacacaacatcctttttttaagcggacaatcgcactgctcgtgctggcgcagagcgtccttctgtctgtgaagtgggatgtggaagaccccgtgaccgtgccactagcgactatgagtgttgtgttcacgtttattttcgtgttggaggtgacaatgaagatcattgctatgagtcccgctggattctggcagagtcggagaaataggtatgacctcttggtgacgtccctgggcgtggtctgggtggttctccactttgccttgctgaatgcttacacatacatgatgggggcttgcgtcatcgtctttcgctttttctccatttgcggaaaacacgtgactcttaaaatgctgctgcttaccgtcgtggtgagcatgtataagtccttctttatcatcgtaggaatgtttttgctcctcctctgctacgcattcgccggagtggttctgtttggaaccgtgaaatacggagaaaatataaatcgccacgcaaacttctccagtgccggtaaggcaatcactgtgctttttcggatcgtaaccggagaagactggaacaagattatgcacgattgtatggtccagccccctttctgtacccccgacgagtttacatactgggccaccgactgtggcaattacgccggagcgcttatgtacttctgctctttttatgtgatcattgcctacatcatgcttaatcttctggtggcgatcatcgtggagaacttctctctgttttatagcacggaggaggaccagcttctgagctacaatgacctacgccattttcagatcatttggaacatggtagacgacaagagggaaggcgttattcctacctttcgcgtaaagttcttgttgaggctactgcggggacggctcgaggtggatctggacaaggacaagctcctgttcaagcacatgtgctatgagatggagcggctacataatgggggagatgtgaccttccatgatgtgctttcaatgttatcatataggtctgtcgacatcaggaagagcctgcagctcgaagaattgctggccagagaacaacttgagtacacaattgaggaagaagtggccaaacagacaattaggatgtggctgaagaagtgcttaaaacggatcagggctaaacaacagcagagctgttcaatcatacactctcttcgcgagagccagcagcaagaactgagcagattcctgaaccctcctagcatagaaacaacccagccttctgaagacaccaacgccaactcacaggacaattccatgcagccagagacctcttcgcagcagcagctgttgtccccaacactctctgacagggggggatcgagacaggatgcggctgacgcaggaaagccccaaaggaagtttggacagtggagactgccttcagcaccaaagccaatttcccatagcgtcagctccgtgaatctgcgatttggtggaaggaccactatgaagtccgttgtgtgtaaaatgaatccaatgacagatgcagcctcatgcggaagtgaggtgaaaaaatggtggacccggcagctgactgtcgaatccgacgagagtggcgatgatctcctcgatatctac

SEQ ID NO: 240924 - DNA, 2007 bp, synthetic construct
  misc_feature 1..2007: note = Description of Artificial Sequence: Synthetic coding sequence
  source 1..2007: mol_type = other DNA
atgctgaaacggaagcagtcctccagagtggaggctcagcccgttaccgatttcgggccagacgagagcctgtctgataacgctgatatcctctggataaacaagccctgggtacatagccttctccggatctgcgctataatctccgttatctctgtatgtatgaatactcccatgacctttgagcattatccccctctgcagtatgtgaccttcactttggatactcttctgatgttcctgtataccgcggaaatgattgcgaaaatgcacattcgcggtatagtcaagggcgatagctcttacgtgaaagatcggtggtgtgtttttgacggctttatggtgttctgcctctgggtttccttagtgctccaggtgttcgagattgcagacatcgtggaccagatgagcccttgggggatgctcaggatccctcgcccactcattatgattagggcattcagaatatactttcgcttcgagctgccacgcacacgtattaccaatattctgaaaagaagcggggagcagatctggagcgtttccatcttcctgctcttctttttactgttgtacgggatcctgggggtgcagatgtttgggacattcacatatcattgtgttgtgaatgacaccaaacccggtaacgtgacttggaattcactggccatccccgatactcattgcagtcccgaactggaagaggggtaccagtgtcctcctggattcaaatgcatggatctggaagatctcggtctgagtcggcaggagctgggctattccggtttcaacgaaatcggcaccagcatctttacggtgtacgaggccgctagccaagagggctgggtgtttttaatgtacagagcaattgattcctttccacgttggagatcctatttctattttataacgctaatctttttcctcgcttggcttgtgaaaaatgtgttcatcgccgttatcattgagaccttcgcggaaatcagggtgcagttccaacagatgtggggaagtagatcctccactaccagtactgccactacacaaatgttccacgaagatgcagccggtgggtggcagttagtcgctgtggacgtcaacaaaccccaagggagggccccagcatgcttacagaagatgatgcgaagttcggtgtttcacatgtttatcctctctatggtcactgttgacgtgatagtggctgcctcaaactactacaagggggagaattttaggcgccagtacgatgaattctatctcgcagaagtggcattcactgtgcttttcgatctggaagctcttctcaagatttggtgtttaggcttcactgggtacatcagtagcagcctgcacaagttcgaactcctgctggttattggtaccactctgcatgtctacccagacctgtatcatagccagttcacatattttcaagtgctccgcgttgtgcggctgattaagatcagccccgctctggaagactttgtttataaaatatttggacctggaaaaaaactgggatccctagtggtttttacagctagcttgctgattgtgatgtcagccatctcattacagatgttctgcttcgtggaagagctagaccggttcacaacattccctcgggcatttatgtcaatgttccaaattctcacccaggaggggtgggttgatgtgatggatcagactttgaacgcagttgggcatatgtgggccccagtggtggcaatttattttatactgtatcacttgtttgcaaccctaccgccttccctgatcagggatctgtgcggtacacaggatgcatgcccaagttgcctccccttgcagcctcccaaccccctgcccggatcacagactctcgccaggcttacacatcaggcactcacaacacctccgggaatgaggtcttcccaacttttcagcaaaataagtctgctgttaggcatttgtgtggcttgggagtccatcctcggctcactgtccctctcccacaacctgcgctag

SEQ ID NO: 240925 - DNA, 657 bp, synthetic construct
  misc_feature 1..657: note = Description of Artificial Sequence: Synthetic coding sequence
  source 1..657: mol_type = other DNA
atgctcaagcgtaaacaatcttcccgcgtggaggcacagccggtaaccgacttcggcccagacgagtccttgtccgacaacgctgatatcctctggattaacaaaccgtgggtgcactccttactgcggatctgtgcaataattagcgtaatcagcgtgtgcatgaacacccccatgaccttcgaacactaccccccattgcagtacgtcacctttacacttgatacccttctgatgtttttgtataccgccgaaatgatcgccaaaatgcacatccgtggcatcgtgaagggcgacagcagctacgtcaaagatcggtggtgtgtgttcgatgggttcatggtcttctgcctatgggtgtctctcgtgctgcaggttttcgagatcgctgatatagtagaccaaatgtcgccatgggggatgctccggattccccgtccccttattatgattagagcttttcgcatatactttaggtttgaactgccaagaactaggattacaaatattcttaaaaggtctggtgagcagatctggagcgtctcaatttttctgctcttttttttgctgttatacggtattttgggggtgcagatgttcggtacgtttacttatcactgcgtggtcaacgatacgaaaccgggactcagcctgtag

SEQ ID NO: 240926 - DNA, 657 bp, synthetic construct
  misc_feature 1..657: note = Description of Artificial Sequence: Synthetic coding sequence
  source 1..657: mol_type = other DNA
atgcttaaacgcaaacagtcatcaagggtcgaggctcagcctgtgaccgacttcggaccagatgagagcctgtccgataatgccgacattctgtggattaacaagccctgggtccatagcctcctcaggatctgcgcgattatatcagttatttccgtgtgcatgaatacacctatgactttcgagcactaccctcctttacaatatgtgacattcacactcgatacgctcctgatgtttctgtataccgccgagatgatcgcaaagatgcatattcggggtattgtgaagggggactcctcttacgtgaaagaccggtggtgtgtgtttgatgggtttatggttttttgtttgtgggtatcacttgtgctccaggtattcgaaatcgcggacatagtcgatcaaatgtcaccttggggcatgctgcggatacccaggcccctaatcatgatccgggcttttcgcatctattttcggtttgagctgccaagaacccgcatcaccaatatattgaagcgatccggtgagcaaatatggtcagtttctatcttccttctgtttttcctactcctgtatggaattctcggagtccagatgtttggaaccttcacgtatcattgtgtcgttaatgatacaaaacccggacttagtatatag

SEQ ID NO: 240927 - DNA, 1725 bp, synthetic construct
  misc_feature 1..1725: note = Description of Artificial Sequence: Synthetic coding sequence
  source 1..1725: mol_type = other DNA
atggcctcaaccgagggcgctaacaacatgcccaagcaggtggaggtgcgtatgcacgactcccatcttggctcagaagagcccaagcatcgtcatttgggcctccgtctgtgtgacaagctgggtaagaatcttctactaacactaacagtgtttggagtgatactgggggctgtttgcgggggactgctccgcttggccagtccgattcatcctgacgtcgtgatgttgatcgctttccctggcgatatactgatgcgtatgctcaaaatgctgatccttcccctgatcatctcatctctgatcaccggcctatcaggactcgacgccaaagccagtggtagacttggcaccagggctatggtgtactatatgagtactaccattattgctgccgtcctcggagttatccttgtactggcaatacaccccggaaatcccaagctgaagaagcagctcggacccggtaaaaaaaatgatgaggtgagcagcctagatgctttccttgaccttatacgtaacctcttccctgagaatcttgtgcaggcctgcttccaacaaatccaaacagtcactaaaaaagttttagtggcaccgcctcctgatgaggaagctaatgccacatcagcggtcgtatcccttctgaatgagacagtgaccgaggtgcccgaagaaaccaaaatggttatcaagaaaggcctggaatttaaggacggaatgaacgtgttggggctcattgggttttttatcgcctttggcattgcaatggggaagatgggggaccaagccaaattgatggtcgattttttcaatattctcaatgagattgtgatgaagctcgttatcatgattatgtggtactcgcctctcggaattgcctgcctgatctgcggcaagatcatcgcgatcaaggaccttgaggtggtcgccagacagctggggatgtatatggtgacggtgattattggcttgattatacacggcggaatattcctgcctttgatctacttcgttgtcacacgtaagaaccctttttccttctttgctggaatattccaagcgtggataactgcccttggcactgcatccagtgccggaactcttcctgtgacatttcggtgcttggaggagaacctggggatcgataagcgagtgactaggttcgtcctgccagtcggggctaccatcaacatggatggcacggcattgtacgaggctgtggccgcaattttcatcgcgcagatgaatggcgtggtgctggatggcggacagatcgtgaccgttagtttgaccgctacgctggcatctgtgggagctgcctcgattcccagcgccggacttgtgactatgctgttgatcttaaccgctgtgggactgcccactgaagatatctccctcctcgtggccgtggattggctgctcgacagaatgcgaacctctgtgaatgtcgtaggcgactcttttggcgctggcatcgtctatcatctgtcaaagagcgaactggatactatcgattctcagcaccgcgtacacgaagatatcgagatgactaaaacccaaagcatctatgatgacatgaaaaatcaccgcgagtccaatagcaatcagtgcgtttatgctgcacacaattctgtgattgtcgatgagtgtaaggtcacactcgctgctaatgggaaaagcgctgattgctctgtcgaggaggagccctggaaacgtgagaagtag

SEQ ID NO: 240928 - DNA, 1698 bp, synthetic construct
  misc_feature 1..1698: note = Description of Artificial Sequence: Synthetic coding sequence
  source 1..1698: mol_type = other DNA
atgcccaaacaggtggaagtgaggatgcacgactcacatctgggatctgaggagcccaagcaccgccatttagggttacgactgtgtgataagttgggcaagaacctattattaactctgacagtgtttggtgtgatacttggggcagtttgtgggggactcctgcgccttgccagcccgatccacccagatgtggtcatgttgatcgcatttcctggggacattctgatgaggatgcttaagatgctgatccttccactcataatatctagccttataaccggtctctcagggctagatgccaaagcatctgggagattgggaacaagggcaatggtctattacatgagcaccacaataattgccgctgtgttgggtgtgatcctagtgttggcgattcatcctggtaaccccaagttgaaaaaacagctggggccaggaaaaaagaatgatgaagtgtcctctttggacgcgtttctagacctgatccggaacctgttcccagagaatctggtgcaagcatgctttcagcaaatccagacagtcacgaaaaaagtcctggtggcacctcctccagacgaggaagcaaatgcaacttccgctgtagtctccttgctgaacgaaacggtgacagaggtgcctgaagaaaccaaaatggttatcaaaaaaggcctggagtttaaggatggaatgaacgtgctgggcctcatcggcttctttatagccttcggaatagctatgggtaagatgggtgaccaggccaagctgatggtcgacttctttaacattctgaatgagatcgttatgaagctagtcatcatgataatgtggtactcgcccttgggtatcgcctgcctcatctgcgggaagatcatagcaataaaggacttggaggtcgtggccagacagctgggcatgtacatggtcacagtgatcattgggttgattattcatgggggaatattcctccctctgatttactttgtggtcactagaaagaatccattctcatttttcgccggaattttccaagcatggataactgccttgggcactgcctcgagcgctggaactcttccagtgaccttccggtgccttgaggagaatctgggtattgataagagggtcacccggtttgtcctcccggtgggcgcaacgatcaacatggatgggactgccctttatgaagccgtcgcagccattttcatagcgcaaatgaacggagtggttttggatgggggtcaaatcgtgaccgtgtctctgacagccactttggcctcggtaggggctgcctctataccctctgccggactagtgactatgctccttattttgaccgcagttgggctccctactgaggacatttccttgctagtggctgttgattggcttttagacaggatgaggacctctgtcaatgtggtgggtgactcgtttggcgctggaatcgtgtaccacttatcgaagtctgaactggacaccatcgactcccagcatagagttcacgaagacatcgagatgacaaaaacacaaagcatctacgacgatatgaaaaaccatagagagagcaatagtaatcagtgtgtgtacgccgcacacaattccgtcatcgtggacgagtgtaaagtcaccctggcagccaacggcaagtcggcggactgtagcgtggaggaagagccctggaaaagagaaaaatag

SEQ ID NO: 240929 - DNA, 1698 bp, synthetic construct
  misc_feature 1..1698: note = Description of Artificial Sequence: Synthetic coding sequence
  source 1..1698: mol_type = other DNA
atgcctaaacaggtggaagtgcgaatgcatgatagtcacctcggtagcgaggaacctaagcatcggcacttaggtctcaggctgtgcgacaaactgggaaagaatttactcctgacactcaccgtgtttggggtgattctcggggcagtgtgtggagggctccttaggctggcctctccaattcatcccgacgtcgtaatgttgattgccttcccaggcgatattctaatgcgcatgctgaaaatgttaatcctaccactcattatctcaagcctgataaccgggctctcgggtctcgatgctaaagccagcgggaggctgggaaccagagcaatggtgtactatatgtctaccacgatcatcgccgctgtcttaggtgtaattctcgtcttagctattcatcctggcaaccccaagcttaaaaagcaactcgggcctggaaagaaaaatgatgaagtgagttccctggacgctttcctcgacttgatacgcaacctgtttcccgagaacctcgtccaggcctgtttccagcagattcagactgtgactaaaaaggtgctggtggcccctccacccgacgaggaggccaatgccacatcagccgtggtgtctttgctgaatgaaaccgtgaccgaagtgccagaggagactaaaatggtgattaagaaagggttagagttcaaggacgggatgaacgtgctggggctgatcggcttctttatcgcatttggcattgctatgggaaagatgggcgatcaggccaagcttatggtggacttcttcaatattcttaatgagatcgtgatgaagctggtgatcatgattatgtggtactcacctttaggaattgcttgccttatttgtggtaaaatcatagctatcaaggatttggaggtggtagcaagacaactgggaatgtacatggtgacagtgataattggcctcatcatccatggcggtattttcctgcccctcatctatttcgtcgtaacccggaagaatcctttctcttttttcgccggaatcttccaggcctggattaccgccttgggaactgcaagctctgcaggcacactgccggtgacattccggtgcctggaggagaatctgggcatagataagcgcgtcactcgattcgtcctcccagtgggggcaacgatcaacatggacggcacagctctctacgaggcagtagccgctattttcatcgcccagatgaacggggtggtgctggacgggggacagattgtgactgtctccctgactgctacactggctagtgtcggggcagcaagcatccctagcgctgggctcgttaccatgcttttgattttgaccgctgtggggctcccaactgaagatatctctctattggttgcagttgactggctgctggacagaatgcggacgagcgtgaacgttgtgggggactctttcggagccggtattgtataccatctgagcaagtccgagctggacaccatcgactctcaacaccgcgtccacgaagacatcgaaatgaccaaaacacagtcgatttacgatgacatgaagaaccatagggagtccaatagtaatcaatgtgtatacgctgcacacaattccgtgattgtggacgaatgcaaggtgaccctggccgcaaacgggaaatctgccgactgctccgttgaagaggaaccctggaagcgtgagaagtag

SEQ ID NO: 240930 - DNA, 1629 bp, synthetic construct
  misc_feature 1..1629: note = Description of Artificial Sequence: Synthetic coding sequence
  source 1..1629: mol_type = other DNA
atgaccaagtccaatggggaagaacccaagatggggggtcgcatggagagattccaacagggcgtccggaagcgtaccttattggctaaaaaaaaggtgcaaaatattacaaaggaagacgtgaagtcatatctcttccgaaatgcctttgtgctcctaacagtcacagcagtgatagtgggcaccattctgggtttcaccctccgcccatatcgcatgtcatatcgcgaggttaaatatttcagctttcccggagagttgctgatgcgcatgctgcagatgctggtcctgcccctgataatctcatccctcgtgaccgggatggccgctctcgactccaaggctagcgggaaaatgggtatgcgagccgtggtctactacatgacgaccaccattattgctgtggtgatagggataatcatcgtgataattatccacccagggaagggcaccaaggaaaacatgcatagggaaggtaagatcgtgagagttactgcagcggacgctttcctagatttaatcagaaatatgtttcctcctaacctcgtagaggcctgcttcaagcaattcaagacaaattatgaaaaacgttcgtttaaggttccaatacaggccaatgagactcttgtaggcgctgtgatcaataacgtatctgaggcgatggagacactgacgagaatcaccgaagagctggttcctgtgccgggttctgtgaacggtgttaacgcgcttggcctagtggtcttcagcatgtgtttcgggttcgtgatcggcaatatgaaagagcagggccaagcattaagagagttttttgacagcctgaacgaagctatcatgagactggttgctgtcataatgtggtacgcccctgtggggatattgtttctaatcgctggaaagatcgtggagatggaggacatgggcgtgatcggaggccagctggctatgtacactgtcactgtgattgttggcctcctgatccacgctgtgattgtactcccacttctgtatttcctggtcacccggaagaatccctgggtgtttatcgggggactcctgcaggctctgatcactgcgctggggacttcaagctcttccgcaacattgcccataacatttaaatgtctggaggagaacaacggtgtggacaaaagggtgacccgcttcgttcttcctgtcggcgcaaccatcaacatggacgggactgccctgtacgaggctctggccgctatctttatcgcccaggtcaacaactttgaactcaatttcggtcagatcatcaccatatctattaccgcaacagccgctagcattggtgctgctggcattcctcaggctggtctggtgactatggttatagtgctgacatcagtgggtctgcccactgacgatatcacactcatcatcgcagtcgattggtttttagataggctgcgcactactacaaatgtgcttggcgactctctgggcgctggcatcgttgagcatctgtcgagacacgagttgaagaatagggatgtggagatgggtaactccgtgatcgaggagaatgaaatgaagaagccctaccagctcatcgctcaggacaatgagacagaaaagcccatcgacagcgaaaccaagatgtag

SEQ ID NO: 240931 - DNA, 1494 bp, synthetic construct
  misc_feature 1..1494: note = Description of Artificial Sequence: Synthetic coding sequence
  source 1..1494: mol_type = other DNA
atgaccaagtctaatggagaggagcccaagatgggaggtaggatggaacgattccaacagggcgtcagaaaacgtacactgctggctaaaaaaaaggtgcagaatataaccaaagaggacgtgaagagttacctgtttagaaatgccttcgttctcctgacagtgacagctgtgatcgtcgggacaatcctgggtttcaccctgagaccgtacaggatgtcctacagggaggtgaagtatttctcattccctggggagctactgatgaggatgctgcagatgctagtgctcccactaatcatctctagtcttgtgactggaatggccgctctggattccaaagctagcggaaagatgggaatgcgggctgtggtgtactatatgacgaccacaatcatcgccgtggtcatcggcattatcattgtgatcattattcatccgggaaaaggaacgaaggagaacatgcaccgagaaggcaagatagtgagggtgacagctgcggatgcttttctagacctgatacgtaatatgttcccacccaacttggtagaggcatgcttcaagcagttcaagactaactatgagaaacggagtttcaaagtgccgatacaggccaacgagacccttgtgggcgcagtaattaacaatgtaagtgaagccatggagacactcactagaataactgaggagttggtgcccgtccctggcagcgtgaatggagtaaatgctttggggctagtggtgttctctatgtgtttcgggttcgttattggtaatatgaaagagcaggggcaagcgctgcgcgaattctttgattctctcaacgaagctatcatgcgtctcgtcgcagtcatcatgtggtacgcccctgtgggcatactgttcttgatagcaggcaaaatcgtggaaatggaggatatgggggtaatcgggggtcagctcgcaatgtacactgtcactgtcattgttggactgttaatccatgccgtgatcgtgctgcccctgctgtacttcctcgtaactaggaagaatccctgggtgtttattggaggactgctgcaggcactgattacagcactcggtacctcctctagcagtgccactctgcccatcacattcaagtgtctggaagagaacaacggcgtggataaacgcgtaactcgcttcgtgctgcctgttggcgcaacgatcaacatggacgggacagcgctctacgaagcactggctgcaatttttattgcacaggtcaataattttgagttaaatttcggacagatcataaccatcagggaccgcctccgcaccaccactaacgtcttaggggatagtctgggggcaggtattgtcgagcacctgtctcgccatgaattgaaaaatcgggatgtggagatgggaaattcggttattgaggaaaacgaaatgaaaaagccgtatcagctgatcgcccaggataatgagactgagaagcccatcgacagcgagactaagatgtag

SEQ ID NO: 240932 - DNA, 348 bp, synthetic construct
  misc_feature 1..348: note = Description of Artificial Sequence: Synthetic coding sequence
  source 1..348: mol_type = other DNA
atgactaagagcaacggtgaagaaccgaagatgggaggacgcatggaaaggttccaacagggcgttagaaaacggaccttactggccaaaaagaaagtgcagaacattactaaggaagacgtgaagtcctatctgttccgcaacgctttcgtgcttctcacagtcacagcagttatagttgatgaaaagaccgaggcccagatcttgaccactcagctcatgaatacggagtgggactcaaatcctccttttagattacaggtactgattcaccatacagtcttgggtgcaattactccaatactcgcactacttcagcagttcgccgagggtctccccgaagtctag

SEQ ID NO: 240933 - DNA, 1473 bp, synthetic construct
  misc_feature 1..1473: note = Description of Artificial Sequence: Synthetic coding sequence
  source 1..1473: mol_type = other DNA
atgacaaaatctaatggagaagagccaaagatgggcggaaggatggaaaggtttcagcaaggggtgcggaagagaaccctactggcgaaaaagaaagttcagaacattaccaaggaagatgttaaatcataccttttcaggaatgcatttgtactcctcaccggcatggctgcattggattcaaaagctagtggcaaaatggggatgcgggcagttgtgtactatatgactaccacaattattgcagtcgtgatcgggatcatcatcgtgattatcatccacccaggaaaagggactaaggaaaacatgcatcgggaaggaaaaattgtcagggtgacagctgcagacgcgtttctggacctgatacggaacatgtttcctccgaacctggtggaggcctgcttcaaacagtttaaaaccaattacgaaaagcggtccttcaaggtgcccatccaggccaatgaaaccctcgtcggagctgtgatcaacaatgtcagcgaggctatggaaacgttgacgcgcatcacggaggagcttgtccccgtgcccggatccgttaacggtgtgaacgcactgggcctggtggtctttagcatgtgctttgggttcgtcattggcaacatgaaagaacagggccaagcgcttagagaattcttcgatagcctcaatgaagccattatgcgcttggtcgctgtaatcatgtggtacgcgcctgtgggcatcttatttttaattgcagggaagatcgtcgagatggaggacatgggcgtgattggaggacagctcgcaatgtatactgtcacggtcattgtaggactgcttatacacgctgttatagtgttgcctctcctctatttcctggttactcggaagaacccctgggtattcatcggtggcctactccaagcacttattacagcccttggtacctcgtcctcctcggctaccctgcctattactttcaaatgtttggaagagaacaacggcgtggacaagagggtgacacggttcgtgctgcccgtcggggcaacaattaacatggatggaaccgctttatacgaagcactggctgctatctttatcgcacaggtgaataatttcgaactcaacttcggtcagatcatcactatcagtattactgcaaccgcggcttcgatcggagccgctggcatccctcaggcgggtttggtgacaatggtgattgtgcttacctcagtgggtctacctactgatgacataaccctgatcatcgccgtcgactggttcctcgatagacttaggactaccacaaacgtgctaggcgatagcctgggtgcgggaatagtcgagcacctctcccgacatgagttgaaaaaccgggacgtggagatgggtaacagtgtaattgaggagaatgagatgaagaaaccctaccagctcattgcacaagataacgagacagagaagccgatcgatagcgaaacaaagatgtag

SEQ ID NO: 240934 - DNA, 324 bp, synthetic construct
  misc_feature 1..324: note = Description of Artificial Sequence: Synthetic coding sequence
  source 1..324: mol_type = other DNA
atgacaaagagcaacggggaagaacctaaaatggggggtcgaatggagcgctttcagcaaggagtgcgcaagaggaccctgcttgcaaagaagaaggtacagaacataacaaaggaagatgtgaagagctacttgttcagaaacgcctttgtgttactcaccgttacagccgtaatcgttggtactatcctgggattcaccctcagaccatacaggatgtcttaccgagaagtgaagtacttttcatttcccggtgagctgctaatgcgaatgctgcaaatgttagtattaccactaattatcagtagcttagtgaccggttag

SEQ ID NO: 240935 - DNA, 324 bp, synthetic construct
  misc_feature 1..324: note = Description of Artificial Sequence: Synthetic coding sequence
  source 1..324: mol_type = other DNA
atgacaaagtctaatggagaagaacctaaaatggggggtaggatggagcgttttcagcagggagtaagaaagcggaccttgctggccaaaaagaaggtccagaatatcacaaaagaagacgtcaaaagttacttgtttaggaacgctttcgtacttctgacggtgacggcggtcattgtggggaccattcttgggtttactctgcgcccttacaggatgtcctacagagaggtcaaatacttctcattccccggagaattgttaatgaggatgctccaaatgctcgtgctgccattgatcatctctagtcttgtgacgggatag

SEQ ID NO: 240936 - DNA, 306 bp, synthetic construct
  misc_feature 1..306: note = Description of Artificial Sequence: Synthetic coding sequence
  source 1..306: mol_type = other DNA
atgacgaagtccaacggagaagagccaaagatggggggaaggatggaaagattccagcaaggcgttaggaagcgcactctgctggctaagaaaaaagttcagaacatcactaaggaggatgtgaagtcgtatctgtttcgaaatgcttttgtactcctgacggtgaccgctgtgatagtcggcactattctgggattcacgctccgcccttatcgaatgagctatagggaggtaaaatacttttcttttcctggagagctgctgatgcgcatgctgcagatgcttgtgcttcctcttattatatag

SEQ ID NO: 240937 - DNA, 987 bp, synthetic construct
  misc_feature 1..987: note = Description of Artificial Sequence: Synthetic coding sequence
  source 1..987: mol_type = other DNA
atgacgggggtgttcgattctctcgtcgccgacatgcattccacacagatcgctgcatcttctacctaccatcagcatcagcaaccaccttcagggggaggcgctggcccaggcggtaactccagctcaagctcatctctgcataagccacaagaatctcctaccctgccggtcagtactgccacagatagttcttactatacaaatcaacagcaccccgctggcggtgggggtggcggaggcagtccatatgctcacatgggctcataccagtatcaggcctctggacttaataatgtgccctactccgcaaagagctcatacgatctcggttatacagctgcctatactagttatgccccttacgggacctcctcctccccagccaataacgagccagaaaaggaagatctggagccagagatccggatcgtgaacggaaaacccaagaaagtgagaaagcccagaactatttattccagttttcaacttgctgctctgcagaggagattccaaaagacgcagtatctcgctctgccagaacgggctgaactggcagcatccctaggcctgacacaaactcaagtaaagatttggtttcagaataggagatcaaagttcaaaaagatgtggaagtctggcgaaattccctccgagcaacaccctggagcatccgcatcaccgccatgcgctagtccccctgttagtgcgccagcatcatgggattttggcgtgccgcagagaatggccggtggtggaggaccaggctctggcggaagcggggctggctcgagcggtagcagcccgagcagcgcagccagtgcctttctcgggaactatccatggtaccaccagacatctggtagcgctagccacttacaggcaaccgcacccctcctgcacccaactcagactccccagccacaccatcaccatcatcaccatgggggtggaggtgcccctgtgagcgcaggaaccatcttttag

SEQ ID NO: 240938 - DNA, 1359 bp, synthetic construct
  misc_feature 1..1359: note = Description of Artificial Sequence: Synthetic coding sequence
  source 1..1359: mol_type = other DNA
atgctgctgagaatgctccgtatgattattctccctctggtcgtctgttctctggtgtcaggggcagcctccctcgatgcctcttgcctcggaagactgggagggattgctgtagcatacttcgggctcacaacgttgtccgcctctgcactcgccgtggcactcgcctttattataaaacccggatctggcgctcagactcttcagagttccgacctgggacttgaggatagcggcccacctccagtcccaaaggagactgttgactcattcctcgaccttgcaaggaacctttttccttcaaacctggttgttgctgcttttcgaacttacgccaccgactataaggttgtgacacagaactcatcctctggtaatgtgacccacgagaaaatccctatcggcactgagatcgagggtatgaatatactgggtctggtgctgtttgccctagtgctaggcgtggctctgaagaaactgggcagcgaaggagaagatctcattcgcttctttaactctctgaatgaggctacgatggtcctcgttagctggattatgtggtatgtcccagtgggtattatgttccttgtcggatctaaaatcgtggaaatgaaggacatcatagttcttgtcacatcactgggcaagtatattttcgcatcaatactaggccatgtcatccacggtggaatcgtcctgccattgatctattttgtctttacaaggaaaaaccccttcagatttctgctggggctgttagctcctttcgccacagccttcgccacgtgttcttcttctgctactttgccctccatgatgaaatgtatagaggaaaataacggcgtcgataagcggatctcccgtttcattttgccaattggggcaaccgtgaacatggatggcgcagccattttccaatgtgtcgccgcagtctttatcgcccagctgaataacgttgagttgaacgccggacagatcttcacgatccttgtgacagccactgcatcgtctgtcggcgctgcaggcgtgccagccggaggtgtgctgacaatcgcgatcatcctggaagccatcgggcttcccacacacgacttgcccctgatacttgctgtggattggatcgtcgatcgcaccaccactgttgtgaacgtggagggcgatgccctcggagcaggaatcttgcaccacctgaaccagaaggccaccaaaaagggtgagcaggaactggctgaagttaaggttgaggccatacccaattgtaaatctgaggaagagacctcgcccctggtgactcaccagaaccccgctggtccagttgctagtgcccctgagttagagagcaaggaaagtgtgctctag

SEQ ID NO: 240939 - DNA, 705 bp, synthetic construct
  misc_feature 1..705: note = Description of Artificial Sequence: Synthetic coding sequence
  source 1..705: mol_type = other DNA
atgaacatactagggctcgtgctgttcgctctggtgctgggtgtggctctgaagaagctaggatcagagggcgaagacttgatcagatttttcaattctcttaacgaagccaccatggtcctggttagttggattatgtgctccgccacgctgcccagcatgatgaaatgcatcgaggaaaacaatggtgtcgacaagcgcatttcccgctttatactgccaataggcgctacagtcaacatggatggggctgcaattttccaatgtgttgccgcagtgttcatcgctcagctcaataacgtggagttgaatgcgggtcagatttttactatcctggtgacggcaaccgcttctagcgttggggcagcaggcgtgcctgctggcggtgtgctgacaatcgctattatcctggaggctatcgggctgcccactcacgacctcccattaatccttgcggtagactggatcgttgacaggacaacaacagtcgtcaacgtagagggagacgcgctgggcgctggtatcttgcaccatctgaaccaaaaagccaccaagaagggggagcaagaacttgccgaagtgaaggtagaagctatacctaattgcaagtccgaggaagagacttcccctctggtgacacatcagaatcctgccggacctgtcgccagcgcccctgaactggaatctaaagagtctgttttgtag

SEQ ID NO: 240940 - DNA, 1575 bp, synthetic construct
  misc_feature 1..1575: note = Description of Artificial Sequence: Synthetic coding sequence
  source 1..1575: mol_type = other DNA
atggggaagcctgctcgaaagggatgcgagtggaagagatttctgaagaacaactgggtgctgctgtctaccgtggctgcggtcgttctcggcataactactggcgtgctagtccgcgaacacagtaatctatccactctcgagaaattctactttgcattccccggagagattctgatgagaatgcttaagctgatcatactccctctcataatctcttcgatgatcaccggggtcgccgctttggactctaacgtgtctgggaaaattggtctgcgcgcagtggtgtactacttctgcacaactctgattgccgtaatcctgggaatcgtccttgtggttagcattaagcccggagtgactcagaaagtcggtgagatcgccagaaccggtagcacccccgaggtttccaccgtggatgccatgctggatttaataagaaatatgtttcccgagaatttagtgcaagcttgctttcagcagtataaaaccaagcgtgaggaggtgaagccacctagtgatcccgagatgaacatgactgaagagagctttacagcggtcatgacgacagctatttccaagaacaagactaaagagtacaaaatcgttggcatgtactctgacggaatcaatgtcctaggcctcatcgtattctgcctcgtgttcggactggtgatcgggaagatgggcgaaaaggggcagatcctggttgacttcttcaacgcgctgtctgacgctacaatgaagatcgtccaaattatcatgtgctatatgccactaggaattctcttcctgatagcgggaaagattatcgaagtcgaggactgggagatcttccggaaattaggtctttatatggccaccgtgctgactggtctggccatccattcaatcgtaatcctgcctcttatctattttatcgtggtacgcaagaacccattccggttcgccatgggcatggctcaggccctgttgaccgccttgatgatcagtagctcttccgcaactctccccgtgacttttcgctgtgctgaagaaaacaatcaagtagataagcgcataactcgattcgtgttacctgtcggtgccaccattaatatggatggaaccgccctctatgaggccgtggcggctgtttttatcgcacaactgaatgatcttgacctgggaatcgggcagatcatcaccatatctattacggccacatcagctagcatcggggctgcaggtgtaccacaagcaggattggtcacaatggtgattgtcctttctgcagtgggtcttcctgccgaggacgttacgctgatcattgctgtcgattggttactcgacaggttccggacaatggtgaacgtactgggagacgcgtttggaacgggaatcgtggaaaagctgtctaaaaaagaactggaacagatggacgtcagctccgaggtgaacattgtgaatccgtttgccctagaatcaacaatcctggacaatgaggactcggatacaaagaaatcctacgtaaacgggggattcgccgttgataagtctgacacaattagcttcacacagaccagccagttttag

SEQ ID NO: 240941 - DNA, 729 bp, synthetic construct
  misc_feature 1..729: note = Description of Artificial Sequence: Synthetic coding sequence
  source 1..729: mol_type = other DNA
taattctttaacgctctgagcgacgcgacgatgaagatcgttcagatcattatgtgttatatgcctcttgggatcttgtttttgatagccggtaaaataattgaagtagaggattgggagatttttagaaaactcggtctttatatggccaccgttctcacaggattggccatccacagcatcgttattctcccccttatttatttcattgtggtccgcaaaaatccttttcgcttcgccatggggatggcccaagcgctcctaaccgctcttatgatctcctccagcagtgcaactctccctgtgacattccgctgcgctgaggagaataaccaggttgacaaacggattacacggttcgtcctgcccgtgggggctaccatcaacatggacggtacagcattgtatgaagccgtggccgcagtctttatcgcccagctgaacgacttggatctgggaatcggccaaataattacgattcgcgacagattcaggactatggtcaacgtgctcggggacgcctttggcactggaatcgtcgaaaagctcagcaaaaaagaactcgaacaaatggatgtaagttcagaggtcaacatcgtgaaccctttcgcgcttgagagcacgattctcgataatgaggactccgatacaaaaaaaagctatgttaacgggggttttgcagtggataagagcgacaccatctcctttactcagacctctcaattttag

SEQ ID NO: 240942 - DNA, 1647 bp, synthetic construct
  misc_feature 1..1647: note = Description of Artificial Sequence: Synthetic coding sequence
  source 1..1647: mol_type = other DNA
gaaactcccgtgctgcccataatggtggcggaccctccgcgagacagcaaggggttagctgcagctgagccgaccgccaatggcggacttgccttggccagtattgaagatcagggggctgccgcaggaggatattgtgggagccgtgaccaggttcggagatgccttcgtgcaaatctcctcgtcctgctaacggtagtagcagttgttgcaggggtcgccttgggactgggtgtgtcaggggcaggaggggctctcgccctaggccctgaacggttatccgcctttgtctttcctggtgagctgctcctccgactgctgcgcatgatcatcctaccgttggtggtatgtagtctgattgggggtgccgcatctttagatccgggagcccttggacgacttggcgcatgggccctgctattctttctggtcaccaccttactcgccagcgctttaggcgtagggcttgcactggctctgcagcccggagccgcttccgctgctataaatgcatccgtgggcgcagctgggagtgccgaaaacgcgcctagcaaagaagtcctggacagcttcttagacctggccagaaacatattcccaagtaacctggtgtccgcagcctttcgttcttactcaactacgtatgaggagcggaatattacaggcacgagggtgaaggtccccgtgggccaggaggtggaaggcatgaacatcttaggcctcgttgtgttcgccattgtcttcggagtggccctcaggaagctgggacccgaaggggagctcctaataaggttctttaattcattcaacgaggccaccatggtgttggtttcgtggatcatgtggtacgctccagtgggcattatgtttctggtggccggaaagatcgtggaaatggaggacgtggggttactgttcgcaaggctgggcaagtacattctttgctgtcttcttggacacgcaattcatgggctgctggtactgcctcttatatacttcctatttacccgtaagaatccctaccggttcctttggggaatcgtcacacctcttgctactgctttcggcacctcaagtagtagcgccaccctacccctgatgatgaagtgtgtggaggaaaacaatggcgtcgctaaacatatctctcgatttattctcccgattggcgctacggtgaacatggatggagcagctctctttcaatgtgtggctgctgtctttatcgcacaactctcacagcagagtttggacttcgtgaaaatcatcacaatcctcgttacagccactgcatcctctgtcggcgcagctggaattcctgccggaggtgtcctgactctggccattatccttgaggctgttaacctcccagtggatcacatttccctgatacttgctgtcgactggcttgttgatagatcctgtactgtgctcaacgtggaaggtgatgcactcggtgcgggtttgctgcaaaattatgttgatcggaccgagtcccgctccaccgagccggagctgatacaagtcaagtctgaactgcccctagatcctctcccggtgcccaccgaggagggcaacccattactgaaacactaccgtgggccagctggggacgccaccgtagcctcagaaaaggaaagcgtcatgtag

SEQ ID NO: 240943 - DNA, 942 bp, synthetic construct
  misc_feature 1..942: note = Description of Artificial Sequence: Synthetic coding sequence
  source 1..942: mol_type = other DNA
atgaacatcctgggactggtggtcttcgcaattgttttcggcgtggcacttaggaagctgggcccagagggtgaactgttaatacgattctttaattcctttaacgaagcaacaatggtgttggtaagctggattatgtggtacgctcccgttggtatcatgtttcttgtcgcgggtaagattgtcgaaatggaggacgtggggttgcttttcgctcgactgggtaagtacatcctgtgttgtctcctgggccatgcgattcacgggttgctggtgttgccactgatctacttccttttcacaaggaaaaatccttatcggttcctgtggggaatagtaaccccccttgcgaccgccttcgggaccagctcctcttctgccaccctgcctcttatgatgaagtgcgtcgaagagaacaacggtgtggcgaagcacatctcccggttcatcttgcctatcggagctacagtgaacatggatggcgctgcgctgttccagtgtgtagctgccgtgttcattgctcagctgagccagcagtcactggatttcgtgaaaatcattaccatcttggtcactgctaccgcctccagtgtgggagcggctggtattcccgctggcggtgtcttgaccctggcaatcattcttgaggccgtgaacttaccagtggatcatattagcctcattctcgcagtggactggctagttgacagaagttgtactgtcctgaacgtcgaaggggatgctctgggagctgggcttctgcagaattacgtggatagaacagagtcaaggtccaccgagccggagctcatccaggtgaaatccgagttgcccttagacccactgcctgttccaacagaagaagggaacccactgcttaagcattacaggggacccgctggtgatgccacagtggccagcgaaaaggagtcagtgatgtag

SEQ ID NO: 240944 - DNA, 1020 bp, synthetic construct
  misc_feature 1..1020: note = Description of Artificial Sequence: Synthetic coding sequence
  source 1..1020: mol_type = other DNA
atgtactcaactacgtacgaagagaggaatattaccggcactagggtgaaggtccccgtcggtcaggaggtcgagggcatgaacatcctggggctggttgtgttcgctatcgttttcggcgtagcactgcgcaaactcggacccgagggagagctgctgataaggttttttaatagttttaatgaagctaccatggtacttgtctcttggatcatgtggtacgccccagtcggcatcatgttcctcgtggccggaaagatcgtcgagatggaggacgtcggcctgctttttgctagattgggcaagtatattctgtgctgtctactaggacatgccattcacggactgctggtgttacctctcatatacttcctttttaccaggaagaatccctacaggtttttatggggcattgtgacacctcttgcaactgcttttggaacgtccagttccagcgctacgctgccattgatgatgaagtgcgtcgaagaaaataatggagtggcaaagcatatcagtcggttcattctgccaattggcgcaacagtgaacatggatggggctgctttattccagtgcgtcgccgctgtcttcattgcacaactcagccagcagtctttagactttgtcaagatcattaccatactggtgactgccactgccagtagcgtgggcgcagccggtatccctgccggtggagtcctcacgctcgctatcattctggaggccgtcaacttaccagtggatcacatcagtttgattctggccgtcgactggctcgttgatagatcctgtactgtgctgaacgtggagggtgatgccctcggcgctgggctcctacaaaattacgtggacagaacagagagccgtagcacagaacccgagctgattcaggttaagtccgaactgccactggaccctctgccggtccccactgaagaaggcaatcccctccttaaacactaccgagggccagccggagatgccaccgttgcctctgaaaaagagagtgtcatgtag

SEQ ID NO: 240945 - DNA, 1626 bp, synthetic construct
  misc_feature 1..1626: note = Description of Artificial Sequence: Synthetic coding sequence
  source 1..1626: mol_type = other DNA
atggtggccgatccaccaagagattccaaaggcctagccgctgccgaacctaccgccaacggcggactggccctagccagcatcgaagatcagggtgccgcagctggaggctactgcggttcaagggatcaggtaagaaggtgcctgagagcaaacttgctcgtgctgctgacagtggtggctgtagttgctggggtcgccctaggcttgggtgtgtccggagcaggcggagctttggcccttgggccagaaagactgagcgcgttcgtgtttccaggcgaattactgctgaggttgctacggatgattatcctgcccttggttgtatgtagtctgatcgggggagcagcaagtctggaccccggtgccctgggacggttaggtgcctgggcactcctgtttttcttggttaccacactgctagccagcgctctgggggtaggactcgccttggccctgcagcccggagctgcctctgcagcgatcaacgcaagcgttggagctgctggcagcgctgaaaacgctcccagcaaggaggtcttggactcattcctggacctggccaggaacatcttccctagtaatctagtctccgccgcattcagatcttattcaacaacatacgaggagagaaacattacagggacaagagttaaggtgcccgtgggccaggaggtcgagggaatgaacattctcggcctggttgtatttgccatagtgtttggagtggccctaagaaagctgggccctgaaggcgaactcctgattcgcttctttaacagttttaacgaggccacaatggttttggttagttggatcatgtggtacgccccagtgggcattatgttcctggttgctggcaaaatcgtggagatggaagatgtaggcttgttgtttgcccgactgggcaagtatattctttgctgcctccttgggcatgcaatccatggactactggtgttacccctgatctatttccttttcacccggaagaatccttatagattcctgtggggcattgtgacccccctggcaaccgcattcggcaccagctccagttcagctacccttcctttgatgatgaagtgtgtggaagagaataatggggtagccaaacatatctcgagattcattctcccgattggagccacagtcaacatggacggggctgccctctttcagtgtgtggccgctgtcttcattgcccaactgagtcagcagagcctggatttcgttaagatcatcacaatcctcgtcacggccactgcttcttcagtcggggctgccggtatccctgcgggaggggtcctgacgcttgccatcattctcgaggcggtcaacctgccagtggaccacatctcactgattctggctgtagactggctagtagatcgttcctgcaccgtgctgaatgtcgagggcgacgctctcggagctggcctgctacagaactacgtggacagaactgagtctcgatccaccgagccagaattgatccaggtgaagtccgaactcccgttggaccctctgcctgtgcctacagaggaaggcaatcccctgttgaagcactacagaggcccagcaggggatgccacagtagcaagcgagaaggaaagtgtcatgtag

SEQ ID NO: 240946 - DNA, 1308 bp, synthetic construct
  misc_feature 1..1308: note = Description of Artificial Sequence: Synthetic coding sequence
  source 1..1308: mol_type = other DNA
atggctgagtcaagcagcgagagcgatcacttcaggtgcagagatcgcctctcaccttgggcggctaggtcaacacaccgaggtaccagaagcctgccaacggtggaagtgacagagaaagtgaacacaattactagcactcttcaggacacaagcaggaatctcaggcaggttgaccagatgcttggccgttaccgagagtactctaatgggcaggccggtgcaattgaacacttgaaggagtccctagagcagtccatcgatcagctgcgttctcagcggctactgcggaactccggaggaaggtcaatctccgtgacatcactgtccgccagtgatttggacggcggtacaggcagcgaactgcaccacttcccccctactagccccctgaaggattacggggaccctcagggaataaagcgcatgaggtcgaggacaggagtcaggtttgtgcaggaaaccgatgacatgacccaactccacgggtttcaccagtcactccgggatctctcatccgaacagatcaggctaggggacgatttcaacagggagctgagccgacgctcaaggagtgatgccgaaactaaaagggccctcgaagaactcaccgagaaattgaacgaagctcaaaagcaagaagttgtgtctgaccgtgtggagaggcggctccaagagttggagcgggaaatgaggactgaacgagaactcgtggagcgacggcaagaccagttaggcctgatgtcacttcagctacaagaagctctgaagaagcaggaagccaaggcagacgaacacgagggcgcaattaagaacaagttgaggcagaccgagactgaaaagaaccaacttgagcaagagttagagctttctcgcaggctcctcaaccaaagcgaaggcagcagggagaccctgctgcaccaagtggaagagctccggacacaactcaccaaagctgaaggtgatcgcaaagggctgcagcaccaggtctctcagatatctaagcagcagagcaactatcaggatgagcagggagaggattggcggtttcggagaggtgtggagcgagagaaacaggatctcgagaagcagatgtctgaccttcgcgtgcagctgaatttctccgccatggcgtctgagttggaagaagtgaagcgatgtatggaaaggaaggacaaggaaaaggcgcaccttgcgagccaggtggaacatattaatcgcaagtgtctgttaaacctcgttcaggatctggattgcaaggacaatgaaatcctcacctacagcctgcagagtccactgcacgtgtag

SEQ ID NO: 240947 - DNA, 1047 bp, synthetic construct
  misc_feature 1..1047: note = Description of Artificial Sequence: Synthetic coding sequence
  source 1..1047: mol_type = other DNA
atgaatgatcccaattcctgtgtggataatgccacagtgtgttccggcgcaagttgtgtagtccccgagtcaaatttcaataatatcctgtccgtcgtcctgtctacagttctgactattctgcttgccctggtcatgtttagtatggggtgcaacgtggaaattaagaagttcctgggccacattaagagaccctggggaatttgcgtaggattcctgtgccagttcggcatcatgcctctgacggggttcattttgagcgtggcctttgacatcctgccattgcaggccgttgtggtcctgattatcggatgttgtcccggaggcactgcatcgaacattctggcctattgggttgacggggacatggacctgagtgtaagtatgaccacatgctcaacgctcctcgccttaggaatgatgcctctctgtctcctgatttacactaagatgtgggttgacagtggatctattgtcatcccgtatgacaacatcggtacctccctggtgagtcttgtggtcccggtgtctatagggatgttcgtgaaccacaaatggcctcagaaggcaaagatcattctgaagattggctcaattgccggagctattctaatcgtccttattgcagtggtagggggaatcttgtaccagtcagcatggataatcgccccaaaactctggatcattggtacaatcttccctgtggctgggtattcgttgggatttctcctggccagaatcgccggactgccctggtatcggtgcaggaccgtagccttcgaaacaggcatgcagaatacccaactttgctccactatcgtacagctcagctttactcctgaagagctgaatgttgtttttactttcccactcatctattccatcttccaactggcctttgccgctatatttctaggcttttacgtcgcatataaaaagtgccacggaaagaataaagcagagatacctgagagtaaagagaacggcacggaaccagagtcttctttctataaagctaatggtgggttccagccagacgagaaatag

SEQ ID NO: 240948 - DNA, 1434 bp, synthetic construct
  misc_feature 1..1434: note = Description of Artificial Sequence: Synthetic coding sequence
  source 1..1434: mol_type = other DNA
atggtgcttatgcaggataaggggtcgagccagcagtggcctggcttaggcggagagggaggcggaaccggacccctctctatgctgagggccgctctgctgctcatatccctcccttggggcgcacaggggactgcatctaccagcctgagcaccgctggcggtcatacggtcccccctaccggcggaagatacctttctatcggggacggcagcgtgatggagtttgagtttcctgaagacagtgagggaataattgtgatttccagccagtatccaggacaagccaatcgaactgctcccggacctatgctgcgggtaaccagtctcgacaccgaagtgctcaccattaaaaatgttagcgcgatcacctggggtgggggtggtggtttcgtggtaagcatccattccggactggctggcttggcccctttgcacatacagttggtggacgcccacgaagccccaccaactctgatcgaggagcgaagggatttctgtatcaaggtgagccctgccgaggatactcccgctactctaagtgccgacttggctcactttagcgagaatccgatcctctacctgctcctccctctgatctttgtcaataaatgctcctttggctgcaaggtggagcttgaagtgctcaaggggctgatgcagagtccccagcccatgctcctggggttgctgggccagtttctggtaatgccattgtacgcttttcttatggctaaagtgtttatgttgccaaaagccctggctttgggactgataattacctgcagtagtcccggtgggggagggtcttacctcttcagccttctgcttggcggagacgttaccttggcaatttctatgacattcctttcaacagtagcagctaccggctttctgcccctgtcctctgccatttactcacggcttctgagcatacacgagactctccacgttcctatttcaaaaattcttggtacccttctttttattgctattccgattgccgtcggcgtactcattaagtccaaactgccaaagtttagccagttgctgctccaggtcgtgaaaccgttttctttcgtactcttgctagggggtctgtttttagcttaccgcatgggtgtcttcattctggccggtatacggctgccaattgtgctggtcggcataacggtacccctggtgggcctcctggtgggctactgtctcgccacctgcttgaagctgccagtcgcacagagacgcacggtatctattgaagtgggggtccaaaattccctcttagccctggccatgctgcagctgtcgcttaggaggttgcaggccgactatgcctcccaagctccttttatcgtcgccctgagcggaacttcggagatgctggcactggttatcggccatttcatttactcctccctgttcccagtgccctag

SEQ ID NO: 240949 - DNA, 1347 bp, synthetic construct
  misc_feature 1..1347: note = Description of Artificial Sequence: Synthetic coding sequence
  source 1..1347: mol_type = other DNA
atggtattaatgcaggacaagggcagcagccaacagtggcctggactaggcggagaaggcggagggactggacctctgagtatgctacgggctgcactgctgctaattagtctcccatggggggcacaggggacagcctccacttctttgagcacagctggcggtcacacagtcccccctactgggggaagatacttatctatcggcgatggctctgtcatggaatttgagtttcccgaagacagcgagggcatcatcgtcatatcttcccagtaccctggccaagccaaccgaactgccccaggccctatgctacgagtgaccagtctcgacactgaagtcctgacaatcaagaatctcgtggacgcacacgaagccccacccactctcatcgaggagcggagggacttctgcattaaagtgtccccagctgaggacaccccagccaccctgagcgctgacctggcacactttagcgagaatccaatcctctatctcttactgccattgatatttgtgaataagtgctcattcggatgcaaagtggagcttgaagtcctaaagggcctgatgcagtctccccaacccatgctgctcggactgttgggacagtttctggtgatgcccttgtacgcgttcctcatggctaaggttttcatgcttcccaaagccctggcacttggcctgattatcacatgttcctccccgggagggggagggtcctatctcttttctctgctgttgggtggtgacgtgacgctagcaatttccatgacattcttgagcaccgtcgcggcaactgggttcctaccgctgtcttccgccatttactcacggctgctttctatccatgaaactctgcacgtaccaatcagcaagattctgggcaccctgctctttattgctattcccattgctgtcggagttcttatcaagtccaagctccctaaatttagccaactgctgctccaagtcgtgaaacccttctcgtttgttctgttactggggggtctgttccttgcatataggatgggggtcttcatcctggcaggcattcgcctgcccattgtgcttgtggggatcactgtgccgctagtaggccttctcgtgggctattgtctagcaacctgcctaaagctccctgtggcgcagcggagaactgtgtcgattgaggtaggtgtacagaatagcctattagccttggcaatgctacagctctccctgcggagacttcaggctgactatgccagtcaggccccttttatagtggccttgagcggtacctcagaaatgctggccctggtgattggccactttatttacagctccctgtttcccgtgccatag

SEQ ID NO: 240950 - DNA, 1599 bp, synthetic construct
  misc_feature 1..1599: note = Description of Artificial Sequence: Synthetic coding sequence
  source 1..1599: mol_type = other DNA
atggccggaccgcgacctcccggtgatagccctgccataaaagaggattctacgggtctggggccaacccacgagcccttcagtggacagcctaattcgaccagcggcgacgttttgctgagccgtcggggtcctggccacgcaattcggccaccaggacgagctatggtcctgatgcaggacaagggatctagccagcagtggcctggactcggaggtgaagggggaggcaccggcccactgtcaatgctgagggccgcactactgctgatatcactgccctggggagcccaggggactgcgtccactagtctgtcaaccgcaggcggacacactgtgcccccaaccggcggacgctaccttagcattggcgatggctcagtcatggagtttgagtttcccgaggactctgaggggatcattgttatcagtagccagtaccctggtcaggccaacagaactgcaccagggccaatgctgcgagttaccagtttggatacagaggtgctgacaattaagaatgtatctgccataacctggggaggcggtgggggttttgttgtctcaatccattccggcttggctggactggcgccactgcatatccaattagtggatgcccatgaggcccctcctactctgattgaagaacgccgtgatttctgtatcaaggtgagccccgctgaagatactccagctactctttcagcagatttggctcatttcagtgagaatcctattctatatttgttgctccctttaatttttgtcaataaatgttcattcgggtgcaaagtggagctcgaagtgttaaaggggctcatgcagagtccacagcccatgttgttgggacttctcggccaattcctcgtgatgccattgtatgcttttttgatggccaaagtctttatgctgcccaaggccctggccctggggctaattattacctgttctagtccaggtggaggcggttcctacctgttctccctgctgctgggaggtgacgtaacgctggccatcagtatgacctttctgagcacagtcgctgccacaggcttccttcccttatcatccgccatttacagcagactgctatccattcatgaaaccttgcacgtgccaatcagcaagattcttgggacactgctgttcatcgccatccctatagccgtgggggtgctcatcaaaagcaaacttcccaaattttcccagctgctgcttcaggtggtcaagcctttctcctttgtgctgttgcttggcggactgttcttggcttacagaatgggcgtcttcattctggctggtatcagactcccaatagtcctagtgggcataacggttcctctcgttggcctcctggtcggctattgcctagccacttgtctgaagctacccgtggcccaaagacgtacggtgtcaatagaggtcggtgttcagaactctcttctggctctagccatgcttcagctaagcctaaggaggctacaggccgactatgccagccaggcaccttttatcgtggcactgtccgggacctctgagatgctagctcttgtgatcggccatttcatttattcatctctttttcccgtgccctag

SEQ ID NO: 240951 - DNA, 1434 bp, synthetic construct
  misc_feature 1..1434: note = Description of Artificial Sequence: Synthetic coding sequence
  source 1..1434: mol_type = other DNA
atggtgctcatgcaagataagggaagttcccagcaatggcctggcctcggcggtgaggggggaggcactgggccactcagcatgctgcgtgctgccctcttgctcatcagtctgccctggggggctcagggcaccgcctctacgtctctgtccaccgcaggtggtcacactgtaccaccaaccggtggccgatatctgagcattggggacgggtccgtgatggaattcgagtttcccgaagatagcgagggcatcattgtgatatcctcccaataccccggacaggccaatcggactgctcccggacctatgctgagagtgacatcgcttgacactgaagtgctgaccataaagaacgtgagcgccatcacttgggggggaggcggtgggtttgttgtgagcatccactccggactcgcaggtcttgcgccattgcacatccaactcgtggatgcacatgaagcccctccaaccctgatcgaggagcgacgggatttttgtatcaaggtgtcccccgctgaagacacacccgctacactgtccgccgaccttgcgcacttttcggaaaacccaatcctgtatctgctactgccactaatttttgtgaataagtgctctttcgggtgcaaggtggagctggaagtgcttaaggggctcatgcagtctccccagcctatgttgctgggactattaggccagtttctcgttatgcccttgtatgcctttcttatggcgaaagtttttatgttaccgaaggccctggcactgggtttgattatcacatgtagtagccccggaggaggaggctcctatctcttttccctgctgctgggaggggatgtgacactggcaatctcaatgaccttcctgtccaccgtcgctgccacaggcttccttccactaagctccgccatttactccaggctgttatcaatccacgagaccctgcacgttcccataagtaagatcctggggacactgctgttcattgccatccccatcgccgtgggtgtactgattaaaagtaagctacctaagttctcccagctgctccttcaggttgtgaagccgttctccttcgtgctactcctgggcggactgtttctggcttatagaatgggagtgttcatactggcaggaatacgcctgcccattgtgctggtcgggatcacagttccattagttggactcctggtaggatactgcctggcgacgtgcctgaaactgcctgtggcccagaggaggacggtgagcattgaagtgggagtgcagaatagcctcttggcgctggcgatgctgcagctgtccctgaggcgcctgcaggcagattacgctagtcaggctcccttcatagtcgcattgtcggggaccagtgaaatgctcgccctggttatcgggcacttcatctattcctctctttttccagtcccctag

SEQ ID NO: 240952 - DNA, 657 bp, synthetic construct
  misc_feature 1..657: note = Description of Artificial Sequence: Synthetic coding sequence
  source 1..657: mol_type = other DNA
atggtgctgatgcaggataagggctcatcccaacagtggccagggttaggaggcgagggcggaggcactggccctctgagcatgctccgggctgccctcctgctgatctcactgccatggggcgctcaaggcactgcctcaacaagtctgtccactgcagggggacataccgttcctccaacaggcggacgatacctctcaatcggagatgggagtgttatggagtttgagttccccgaagactccgagggcatcattgtgatttcctcacaataccccggacaggcaaatagaactgcccctgggcctatgctgcgggtcacgagtctcgacaccgaggtcctaaccataaaaaacgtaagcgccattacctgggggggagggggtgggtttgtggtttctatccacagtggcttggctgggttggctcctctgcacatccagctggtggatgcacacgaagccccaccaactctcatcgaggagcggagggatttttgcatcaaagtatccccagctgaggataccccagccactcttagtgccgacctggcccacttttccgagaatccgatcctgtacctgctcctccccctgatcttcgtgaataagtgctccttcggatgcaaggtcgagctggaagtgctcaaggggtag

SEQ ID NO: 240953 - DNA, 1314 bp, synthetic construct
  misc_feature 1..1314: note = Description of Artificial Sequence: Synthetic coding sequence
  source 1..1314: mol_type = other DNA
atggatggtaatgataacgtcactctgctgtttgctcccctattgcgtgataactacacgctcgccccaaatgcttcttctctggggccaggtacagaccttgctcttgctcctgcaagtagtgctggacctggaccgggtctttcgttgggcccaggaccttcttttgggttctcccctggacctactccgacccccgaacccactaccagcggcctggctggaggtgccgcaagccacggaccctcccctttccctcgcccatgggcaccacacgctctgccattctgggacactccgttaaaccacggtctgaacgttttcgttggtgctgctctgtgcattacgatgcttggcctgggatgtaccgtcgacgtcaatcattttggagcacacgtgcgtaggcccgtcggcgcacttctcgccgcactgtgccagtttgggctcttgcctttgctcgcattcctgctcgcactggcctttaagcttgacgaggtggctgccgtggccgtccttctatgtggttgctgtcccggtgggaacctctcaaacctcatgtccctgctcgtggacggcgacatgaatctctctatcataatgaccatctcctccactctgctggcactcgtgttaatgccactgtgtttatggatatactcttgggcatggatcaacacacctattgtccagctcctcccactgggcaccgtcactttaacactgtgctccaccttgatacctatcgggcttggcgtctttattcggtataagtacagcagggtggcagattatatagtgaaagtgtcgttatggtccctgctggtaaccctggtagttttgttcatcatgaccggaacgatgctcggccctgaactacttgcgtccattccagccgcagtttacgtgatcgcaatctttatgcccctggcgggatacgcttctgggtatggcctggcaaccctcttccatctgccgccaaactgtaagaggacagtgtgcttggaaactggaagccagaatgtccaattgtgtacggctattctgaaacttgcctttcccccacaatttatcggcagcatgtatatgtttcccctcctgtacgccctgttccagtccgctgaggcagggatctttgtcctgatctacaaaatgtatggatccgagatgctacacaagcgggatccactggatgaagacgaggacaccgacatttcttataaaaagctgaaggaagaagaaatggctgacacctcttacgggacggtgaaggccgaaaacattattatgatggaaactgcccaaacgagcttatag

SEQ ID NO: 240954 - DNA, 1134 bp, synthetic construct
  misc_feature 1..1134: note = Description of Artificial Sequence: Synthetic coding sequence
  source 1..1134: mol_type = other DNA
atgcgcgctaattgctcctctagctctgcatgtccagcaaattcttccgaggaagagcttcccgtcggtctagaagtccatggaaatctagagctcgtgtttacggtcgtttccactgtaatgatgggccttctcatgttttccctgggctgctctgtcgaaatccgcaaattgtggtcccacatccgtcggccatggggtattgcggtggggctcctgtgtcagttcggattgatgcccttcacagcgtatctgctggccataagctttagtctgaagcccgttcaagccattgccgttctgatcatggggtgttgtcctgggggaacaatatccaatatctttactttctgggttgatggagacatggacttgtcaatttccatgaccacatgctccacagtggctgccctggggatgatgccactctgcatctacctgtacacgtggtcctggtctttgcagcagaacttgaccattccctaccaaaatattggcattacgcttgtgtgtttaacgatccctgtggcttttggagtttacgtgaactacagatggcccaagcagtctaaaattatactgaagattggcgctgttgtgggaggagttcttctgctcgtggtggctgttgcaggcgtggttctcgctaaggggagctggaacagcgatatcacattgctgaccatttcctttatctttcctcttattggacacgttaccggatttctactcgcgttgttcacacaccagtcctggcaacgctgcagaactatctcgctggagacaggagctcaaaatatccagatgtgtatcaccatgttacagctctctttcacagccgagcacctggtgcagatgctttcctttcccctggcttacgggctgtttcagctgatcgacggctttctgattgtagctgcttaccagacatataagaggcggctcaagaataagcacggcaagaaaaattccggatgcacagaagtatgtcacacccgcaagtccacatcatctagggagaccaacgcattcctagaggtgaacgaggaaggggcaatcactcccggaccaccgggacctatggactgccaccgggcattggaaccagtaggccacataacctcttgcgagtag

SEQ ID NO: 240955 - DNA, 2184 bp, synthetic construct
  misc_feature 1..2184: note = Description of Artificial Sequence: Synthetic coding sequence
  source 1..2184: mol_type = other DNA
atgctgaggatccctgtgaggaaagctctggtcggcctgagtaagagcccaaaggggtgtgtgcgcaccactgctacagccgcatctaatctgattgaagtgtttgtcgatggccagtccgttatggttgagccagggacaactgtgctccaagcttgtgagaaggtaggcatgcagatcccacggttttgctaccacgagcggctttccgtcgctgggaactgccggatgtgcctcgttgagatcgaaaaagcaccgaaagtcgtggcagcctgcgccatgcctgtcatgaaagggtggaacattctgacgaactcagagaaatccaaaaaagctagagagggcgtcatggagttcctgctggctaaccatcctttggattgtccaatctgtgaccagggcggtgagtgcgatttgcaagatcagtccatgatgtttggcaacgatcggtctcgttttctggagggtaaacgagccgttgaggacaagaacatcggtcccctggtaaaaacaattatgacacgctgcattcagtgtacccggtgtatacgatttgcaagtgaaattgctggagtggatgatctcggtaccacgggtcgagggaatgacatgcaggtgggtacatacatcgagaaaatgttcatgtcagagttgtccggaaatatcatcgatatttgcccggttggagccttaacgtctaagccttatgcatttacagcccgtccatgggagacacgtaagaccgagtccattgacgtgatggatgccgtgggttccaatatcgtggtgtctacacggacgggagaggtcatgagaattctcccaaggatgcatgaggacattaatgaggaatggatttctgataaaactcgcttcgcttatgacgggctgaaacgacagagactgaccgaacctatggtccgaaacgagaagggtttgttaacttatacctcatgggaggacgcactgagcagagtggcaggaatgctccagtcttttcaagggaaagacgtcgccgctatcgctggcggactcgtggatgccgaggctctggtcgcgctgaaagatctgctgaaccgggtcgatagcgataccttatgcactgaagaggtcttccctactgcaggtgccggaacggatctgcggagcaactaccttttgaataccaccatcgccggtgtcgaggaggccgacgtggtgctactggtgggtactaatccacgattcgaagcccctctgtttaacgctcgcatacgaaagtcatggcttcataacgatctcaaggtggccctgattgggtcaccagtcgatctcacgtacacatatgatcatctgggcgattcacccaaaatcctccaagatatagcttccgggtcacatccgttttctcaggtacttaaggaagctaagaagcctatggtcgtcctgggttccagcgcgcttcagcgtaacgatggagctgccatcctggccgctgtgtcttcaattgcccagaagatccggatgacgagtggggtcactggagactggaaagtcatgaatattctgcatcgcatcgcaagccaggtggcagcacttgaccttggttacaagcccggtgtagaggctatcaggaaaaacccgccaaaggttcttttcctcctcggcgcagacggcggatgcataactcggcaagacctgccaaaggactgcttcatcatctaccaaggtcatcacggcgacgtcggtgcaccgatcgccgacgtcatactgcctggagcggcttataccgaaaaatcggcaacttacgtcaatactgagggcagggcccagcagaccaaggtcgccgtcactccacccggactggcccgtgaagattggaagattattcgagcactttctgagattgcgggaatgactctgccttacgacacattggaccaagtgcgtaaccgacttgaggaagtatctcccaacctggtccgatatgacgacatcgagggcgcaaactactttcagcaggcaaacgaactttctaagctagttaaccaacagctgctcgccgatcctctcgtgcctccacagctgacaatcaaggacttctacatgacagactctatcagcagagcaagccaaaccatggccaaatgtgtgaaagccgtgacagagggcgcacaagccgtggaggagccctctatttgttag

SEQ ID NO: 240956 - DNA, 492 bp, synthetic construct
  misc_feature 1..492: note = Description of Artificial Sequence: Synthetic coding sequence
  source 1..492: mol_type = other DNA
atgactggcgacaaagggccacagcggttgagcggtagctcttacgggtcaataagttcccccacgtctcccacctcacctggaccccagcaggcgccaccgcgagaaacatatctctccgaaaagataccaatccccgacaccaaacccggtacgttctctctgcgcaagctgtgggcattcacaggcccaggctttctgatgtccatcgcctttttagaccccggaaatatcgagtcagatttgcaggctggcgctgttgctggctttaaactactctgggtgctgttgtgggccactgtgcttggcctgttgtgccaacgtctggcggcacggctcggggtggtgaccggtaaggatctgggcgaggtgtgtcatctttattaccccaagtcagagtctcgctctgttgcccagtcaggtgtgcagtggtgcgacgtgtcgagcctgcagccgctccccccacggtgcccggctccaagttccggatag

SEQ ID NO: 240957 - DNA, 1299 bp, synthetic construct
  misc_feature 1..1299: note = Description of Artificial Sequence: Synthetic coding sequence
  source 1..1299: mol_type = other DNA
atggttagatgccagcttactgcaactagtaccagccaagtgcccagaactgtgttgtggctaaccatagagctcgccatcgtgggaagcgatatgcaagaagtgatcggaaccgcgatagcatttaatttactttctgccggtcggatccctctgtggggaggtgtgcttatcactattgtcgatacattcttcttcttattcctggataactacggcctgcgcaaattggaggcattttttggactgttaattacgatcatggcattgacattcggatacgaatacgtggtagcacgacccgagcaaggagctctactgcggggattgtttctgcctagttgccctggatgcggacaccctgaacttttacaagccgtagggatagtgggagcaattataatgccacataacatttacctgcacagtgcactggttaaaagtagagagatagaccgcgctcggagagctgatatccgagaagccaatatgtactttctgatagaggctaccatagcccttagcgtatcctttattataaatttgtttgttatggccgtgtttgggcaggcattttaccagaaaaccaatcaagcagcgttcaacatatgcgcgaattcgtccctgcacgactacgccaagatcttcccgatgaataatgccaccgttgctgtcgatatctaccaaggtggtgtgatacttgggtgtctgtttggacccgcagccctttacatctgggcaatagggctactggccgcaggccagtcatccacgatgacaggtacctacgccggacaatttgtgatggaaggttttctacgcctgagatggagtaggtttgcaagggtgctgctgacaaggtcatgtgctattttaccaaccgttctggttgctgtgttcagggatctgagggatttgagtggccttaatgatctgctgaatgtgctgcagtccttgctactgcccttcgccgtattgccaatcctgacattcaccagtatgccgacattaatgcaagagttcgcaaatggactcttgaacaaagttgtgaccagctccatcatggttttggtttgcgcaattaacctgtactttgtagtgtcttaccttccctcactgccccatcctgcttactttgggttggcggctttactcgccgcagcatatctgggcctatccacatacctggtgtggacttgttgtttagcccatggcgctactttccttgcgcacagcagccaccatcactttctgtatggcctacttgaagaagatcagaagggggagacaagtgggtag

SEQ ID NO: 240958 - DNA, 3351 bp, synthetic construct
  misc_feature 1..3351: note = Description of Artificial Sequence: Synthetic coding sequence
  source 1..3351: mol_type = other DNA
atgctgaacaacctgaccgattgtgaggatggagacgggggagctaatcctggtgatgggaacccgaaggaaagcagcccctttatcaattctactgataccgagaagggcaaggagtacgacgggaaaaacatggctctgttcgaggaggagatggacactagccctatggtctcgagtctgctttccggccttgcaaattacacaaacttaccccagggcagtagagaacatgaggaggcagagaacaacgaaggaggaaaaaaaaaacctgtgcaggctccgcgtatgggaaccttcatgggcgtttatcttccttgccttcaaaacatctttggagtgatcttgttcctgaggcttacatgggtggttggtatcgccggtatcatggagtctttctgtatggtctttatttgttgcagctgtacaatgcttacagctatttctatgagcgccattgctaccaacggggtggtgccggctgggggatcttattacatgatctcaaggagcctgggacccgagtttgggggagcagtgggcctgtgcttttatctcggaactaccttcgcaggcgctatgtatatcctggggactattgagattctgttggcctacctatttcctgccatggctatctttaaagctgaggacgccagcggagaagccgctgccatgctgaataacatgcgcgtgtatggcacttgcgtgctcacatgcatggctactgtggtgttcgtcggtgtaaaatatgtgaataagtttgcactggtctttttagggtgcgtgatactttccatcctcgccatctacgctggcgtgatcaagagtgcctttgaccctccaaattttcctatttgcctgcttggtaatcgcaccctatcacgccatggttttgatgtgtgtgctaaacttgcctgggaaggaaacgaaactgtgacaacacgcctgtggggcctattctgctcatcgaggtttctcaatgctacttgcgacgagtacttcacccggaacaatgtcactgagatccaaggcataccaggtgcagccagcggtttgattaaagagaacctgtggagctcataccttacaaagggggttatcgttgaacggagcggaatgacttccgtgggacttgccgatgggactccgatcgacatggaccacccttatgtcttttctgatatgacttcttattttactttattggtcggcatatactttcccagcgtcaccggcataatggcgggaagtaaccgatccggcgatctgagggacgcacagaaaagcattcctaccgggactattctggccatcgccaccaccagcgccgtttatatttcaagtgtcgtgctgtttggggcatgtatcgaaggcgtggtgctccgggacaagttcggggaggcggtcaacggaaacctggtagtaggcaccctggcttggccctccccatgggtgattgtgattggcagcttcttctctacctgtggcgctggcctacagagtttaacaggcgcacctagacttctgcaggcgatcagcagagatggaattgtcccctttttgcaggtgttcgggcacggtaaggccaatggagagccaacttgggctctgctactgacagcatgcatatgtgagatcgggattctcattgcgtcactcgatgaagttgcccctattctatccatgttctttctgatgtgctacatgtttgtaaacctcgcctgcgcagtccagaccctgctgcggacccctaactggaggcccaggtttcgttactatcattggaccttgtcctttctggggatgtccctgtgcctggccctgatgtttatctgcagctggtactatgctttagtagccatgctgatagcgggtcttatctacaaatacatcgaatacaggggcgcagagaaggagtggggggatgggatacggggactcagcctcagtgcagcgaggtacgccctgctgcggctcgaggaaggacctccccacacgaaaaattggaggcctcagctcctcgtcctcgttcgggtagatcaggaccagaacgtagttcatccccagctcctgtccctgacttctcaactgaaagccggaaagggcctcacaatcgtgggatcagtcctcgagggcactttcctcgaaaaccacccacaggcccaaagagctgaagagtccataaggcggctcatggaggcggagaaggtgaaaggtttctgtcaggtggtcataagcagtaaccttagggacggcgtgagtcatcttatccaaagcgggggtctgggaggcctccagcacaacacggtgctcgtgggatggcccagaaactggagacagaaagaggaccaccaaacttggcgaaactttattgaactagtgcgggagactactgccggacacctagctttgctggtgactaaaaacgtcagtatgtttcctggaaatcctgagagattcagtgagggatctatcgacgtctggtggatagtgcatgatggaggtatgttgatgctcctcccattcttgctgagacatcacaaggtctggcgaaaatgcaagatgcgcatctttaccgttgcgcaaatggatgataattctattcagatgaagaaagacctcacgaccttcctctatcatttgcgcatcaccgccgaagtcgaagtcgtggagatgcatgaatcggatatctccgcctatacatacgaaaaaacactcgtgatggagcaacgctcgcagatcttgaagcagatgcacctcacgaaaaatgagcgagaacgggagattcagagtattactgacgagtctagaggctccatcaggaggaagaatccagctaacaccagactgcggctaaatgtccccgaagagactgctggcgacagcgaggagaaaccagaagaggaggttcagctgatccatgaccaatctgcccctagctgtccttcctctagcccctcccccggagaggagcccgaaggggagggggaaactgaccctgaaaaggtccacttgacttggacgaaagacaaatctgtggctgagaagaacaaaggaccatcgcccgtctccagcgaggggattaaagactttttttccatgaaacctgagtgggaaaatctgaatcagtcaaacgttcgcagaatgcataccgccgtgcgccttaatgaagtgatcgtcaagaagtccagagacgccaaactagtactgttaaacatgccgggacctccgagaaaccggaatggggacgagaattatatggagtttctggaagttctgaccgagcacctggatcgtgtgatgctcgtgcgtggtggaggccgtgaagtcattacaatctacagttag

SEQ ID NO: 240959 - DNA, 858 bp, synthetic construct
  misc_feature 1..858: note = Description of Artificial Sequence: Synthetic coding sequence
  source 1..858: mol_type = other DNA
atgttaaataacctgaccgattgcgaggatggggatggtggagcgaatcccggagatggcaatcctaaggaatcatcaccttttattaacagcaccgatacagaaaaaggaaaagagtacgacggaaaaaacatggctctatttgaagaagagatggacacatctcctatggtgtcttcactgctcagtggcttagccaactatacgaacctccctcaggggtcacgggaacatgaagaggcagagaacaatgaagggggtaagaaaaaaccagtgcaggcccctcggatggggacgttcatgggcgtgtacctgccatgcttacaaaatatatttggcgtgatactgtttctgcgcctcacctgggttgttggcatcgccggaatcatggaatctttttgcatggtcttcatctgttgctcttgcaccatgctgaccgccatatccatgagcgctatcgccactaatggcgtggtaccagctgggggaagctactatatgattagtagatctctcggcccagagtttgggggagccgtggggctatgcttctatctcggaaccaccttcgcgggtgccatgtacatcttggggaccatcgagattctgctcgcctatcttttccccgcaatggcaatattcaaagctgaggacgcctcaggggaagcggcagccatgctgaataacatgcgcgtgtacggtacttgtgtgctgacctgtatggctacggtggtcttcgtgggagtaaagtatgtcaacaaatttgccctggtgtttttgggatgtgtgattctcagtattttggctatctatgctggtgttatcaagagtgctttcgaccctccgaatttcccttag

SEQ ID NO: 240960 - DNA, 3420 bp, synthetic construct
  misc_feature 1..3420: note = Description of Artificial Sequence: Synthetic coding sequence
  source 1..3420: mol_type = other DNA
atgtccaggcgctttacggtgacctccctccccccagcaggacccgctcgaagccctgaccccgagtctaggaggcactctgttgctgatccccgtcacctgccaggcgaggacgtgaaaggggatgggaatcccaaggaaagttccccattcataaacagcaccgacactgagaagggtaaggaatatgatggcaagaacatggccctcttcgaagaggaaatggacactagccctatggtatcaagcctgctgagtgggctggctaattatacaaacctgcctcagggctcaagggaacacgaggaggcagagaacaacgaggggggaaagaagaaaccagtgcaggctcctcgtatgggtaccttcatgggggtgtacttaccatgtctccaaaatatattcggcgttatactgttccttcgactcacgtgggtggtcggaatcgccggaatcatggaaagcttctgcatggtgtttatttgttgctcgtgtactatgcttaccgcaattagtatgtcagctatcgccacaaatggagtggtgcccgctggaggctcttactacatgatatcacgctccctgggccctgagttcggtggggctgtcgggctctgtttctacttggggacaacctttgcaggggctatgtatatccttggtaccatcgaaattttgttggcatatttattccctgcgatggcaatttttaaagctgaggatgctagtggtgaggccgcagctatgttaaataacatgcgcgtctatggtacatgcgtcctgacgtgtatggcgaccgttgtcttcgtgggggtcaagtacgtgaataagttcgccctggttttcctcggatgtgttatcttatccatcttggcaatttacgcgggtgtcatcaagtcggcttttgacccacccaatttccctatctgcttgcttggcaaccgcaccttgagtagacatgggtttgacgtgtgcgccaagctagcctgggagggtaatgaaacagttaccactaggctgtgggggctgttctgctcatccaggtttctaaacgctacttgcgacgagtattttacgaggaataatgtgacggagatccagggcatcccaggcgctgcctctggactgattaaggaaaacctgtggtcgtcttaccttacaaagggcgtcatcgtggagcgctccggcatgacctccgtgggcctcgcagatggaactcccattgatatggaccatccctacgtcttttccgatatgacatcatatttcacactattggtcggtatatactttccttccgttaccggcatcatggccggatcaaaccgctctggcgatctccgcgacgcgcaaaagtcaatcccgactggtacgattttagctattgccacaacctctgctgtctatataagcagtgttgtgttgttcggtgcgtgtatcgagggtgtggtgttaagggataagttcggcgaggccgtgaacgggaatctggtggtaggtacccttgcgtggccaagtccatgggttatcgtgatcggctcgtttttttcgacctgtggtgccggtctgcagtctcttacaggggctccacgcttgcttcaggcaatctccagggatgggatagtccctttcctgcaagtttttgggcacggaaaggccaacggtgagcctacatgggcgcttcttctcactgcttgcatatgtgagattggcatcttgatcgcctcattggacgaggtggctccgattctaagtatgtttttcctcatgtgctacatgtttgtgaatctggcatgcgctgtccagaccctcctccgaactccgaactggcgccctcggtttcgttactatcactggaccctgagctttctcggcatgagcttgtgccttgccctcatgttcatctgctcttggtattacgccctggtggctatgttgattgcaggcttaatatacaaatacatcgaatataggggagccgaaaaagagtggggcgacgggatccgaggcctgagcctgagtgccgcacgatacgccctgctacgcttggaagagggaccccctcatacaaaaaattggcgccctcagctccttgtgttggtgagagtggatcaggaccagaacgtggtgcacccacagctgctgagtcttacgagccagctgaaggcaggtaagggattgaccatcgtcggaagtgtgttggaggggactttcttggagaaccatcctcaggctcagcgagcagaggaaagcatccgcagactcatggaagctgaaaaggtgaaggggttttgccaggtcgtcatatcctccaatctgcgagacggagtaagccacctgatacagagtggcggactgggagggctccagcacaacacggtgctggtgggctggccccgtaattggagacagaaggaggaccatcagacctggcgcaattttattgagctggtccgagagaccaccgcaggacacctggccctgttagtgactaagaatgtaagtatgttcccaggaaaccctgagcgattcagcgaagggagtattgatgtgtggtggattgtacatgatggcggtatgctcatgcttttgccgttccttctgaggcaccataaagtctggcgtaagtgcaagatgaggatcttcaccgtggcccagatggacgataattccatccaaatgaaaaaggacctaactactttcctgtatcacctgcgcatcacagcagaagtggaggtggtcgagatgcacgagagcgacataagcgcttatacctacgaaaagacccttgtgatggagcaaagatctcagatcttgaagcagatgcatctcacaaagaacgagagggagagggaaatccaaagcattaccgatgagtctaggggcagcattagaagaaaaaacccagctaatacaagattgcgcttgaatgtcccagaggagaccgcaggtgactctgaagaaaagcccgaggaagaagttcagctcattcacgatcagtcagcaccaagttgtccaagttcatcccccagtcctggagaggaaccggaaggggagggcgaaacagatcctgaaaaggtgcacctgacctggaccaaggataaatctgttgccgagaagaacaagggtccttcgccagtctcatctgagggaataaaagactttttctctatgaagcctgaatgggaaaacctgaaccaatcaaacgttagaaggatgcatacggcagtgagattgaacgaagtcatcgtaaagaaatcgcgtgacgccaaactcgtcctcttgaatatgccaggtccgccaaggaatagaaatggcgacgaaaactacatggaattccttgaggtactcactgaacatttagacagagtgatgctggtgaggggcggtggacgtgaggtcattacaatatactcctag

SEQ ID NO: 240961 - DNA, 561 bp, synthetic construct
  misc_feature 1..561: note = Description of Artificial Sequence: Synthetic coding sequence
  source 1..561: mol_type = other DNA
atgcttaataacctgactgactgcgaggacggagacggcggtgccaacccaggagatggcaacccgaaagagagctctcccttcatcaactctactgatactgaaaagggtaaagagtacgacggcaagaatatggccctgttcgaagaggaaatggatacatcccctatggtcagctcactgctctccggcttggcgaattacaccaacctgccacaaggctcccgcgaacacgaggaggcagagaataatgagggcggtaagaagaaacccgtgcaggcaccacggatggggaccttcatgggcgtgtacttgccatgtctgcaaaatatcttcggtgtgatcttatttcttcgcttaacatgggtggtcggcattgccggaatcatggagtccttttgtatggttttcatttgctgcagttgcaccatgcttaccgccatttctatgtctgcaatcgcgacgaacggggtggtgccagcagggggttcttactacatgatctcccgcagcctggctatggcacggccaatggaatcccggccagggccttgctcctag

SEQ ID NO: 240962 - DNA, 3258 bp, synthetic construct
  misc_feature 1..3258: note = Description of Artificial Sequence: Synthetic coding sequence
  source 1..3258: mol_type = other DNA
atgcctcatttcacagttgtgcctgttgatgggcctcggaggggagattacgacaatctggaagggctgtcatgggtggattatggtgaacgagccgaactggacgactcagatggccacggaaatcaccgagagtcctcaccctttctgtctccactggaggccagcagaggcattgactactacgaccggaaccttgcattgtttgaggaagagttggacatcagacccaaagtgtcatcccttctgggaaagttagtgtcctatacaaatctgactcagggtgccaaagagcatgaggaagcagaaagcggtgagggaactagacgcagagcagccgaagctccctccatgggaaccttaatgggggtctaccttccatgtttgcagaacatctttggcgtgatcctttttctgcgtctgacctggatggttgggactgctggcgtgctgcaggcactcctcatcgttcttatttgttgctgttgtaccctgctgaccgctatctcaatgtcggcaattgcgacgaacggcgtggtccctgccggtggatcatatttcatgatatcacgctccttaggaccagagtttggtggtgccgtggggttatgcttctacctggggacaacctttgcagcagccatgtacatcctgggagccatcgagatcctgcttacctatattgcaccacccgctgctatcttctacccctctggggctcatgacacatccaacgccacattgaataacatgcgagtctacggaacaatcttcctgacattcatgacccttgtcgtcttcgtgggcgtgaaatacgtcaacaaattcgcctctctgtttttagcgtgcgtcatcatcagtattctgagcatttatgcagggggaattaaatctatcttcgaccctccagtgttccccgtgtgcatgctgggcaaccgcaccctgagcagagatcagtttgacatctgcgcgaagacggctgtggttgacaatgaaacagtagcaacccagctatggagttttttctgtcacagccccaatcttactaccgactcctgcgatccttacttcatgctgaacaatgttaccgaaatccccggtatcccaggcgctgctgccggagttttgcaagagaatctgtggagtgcttatctggaaaagggagatattgtggaaaagcacggtttgccatcagctgacgcaccaagtctcaaggaatcactccccctgtacgtggtggcggacattgccacgtctttcacagttctcgtgggaatcttttttccatccgtgacaggtatcatggcaggcagcaataggtccggagacctccgagatgcacagaagtctatcccggtgggaacaatcctggctatcatcaccacatcgctggtttatttctcaagcgtagtcctatttggggcatgcattgagggcgtcgtgctccgagataaatacggggacggtgtatcccggaatctcgtggtggggaccctggcctggcctagtccctgggttatcgtcatcgggtctttcttttcaacgtgtggagctggcttgcagtccctgactggcgctcccaggctgcttcaagcaatcgctaaggataacattattccctttctcagggtctttggccacgggaaagtgaatggagaaccgacttgggcgcttctcctcacagctctcatagccgagctgggcatcctgatcgcttcattggacatggtagcgccaatcctttcaatgttttttttaatgtgttacctctttgtgaatttagcttgcgctgtccaaacactgctgaggacccctaattggagaccgcgatttaagtactatcactgggctctgagcttcctcggcatgtctctctgcctggctttaatgtttgtaagcagttggtattacgctctcgtcgcaatgcttatagcgggaatgatttataaatatatagagtaccaaggcgcagaaaaagaatggggcgatgggatcagaggtttaagcctgagtgcggcacggtacgcgctattgagactcgaagagggaccgccacatactaaaaactggaggccccagttgctcgtgcttcttaagcttgacgaggacctgcatgtcaaatatcccaggctgttaactttcgccagccaactgaaagcaggcaagggcctgaccatcgtcggatctgtcatacagggtagctttcttgagtcctatggcgaagctcaggctgctgagcagacaatcaagaatatgatggaaatcgagaaggtgaaaggcttctgtcaagtggttgtcgcgagcaaagtcagggagggcctagcccacctgattcagagttgtgggctcgggggaatgaggcacaattcagtggtcttagggtggccttatggctggcggcagtcagaagacccccgagcctggaagacctttattgacacagtccggtgcactaccgccgctcacctcgcccttctcgttccaaagaacatcgctttttacccttcaaaccatgagcgttacctggaggggcacattgatgtttggtggattgtgcatgatggtggcatgctgatgctgttacccttcctcctgcgacagcacaaggtgtggcgaaaatgcagaatgagaatcttcacggtagctcaaatggatgacaattcaatccagatgaagaaggacttagctgtctttttatatcatctcagactcgaagctgaggtggaggttgtggagatgcacaacagcgatatctctgcctatacctacgagcgcacactgatgatggagcagcgtagccaaatgctccgacagatgcggttgacaaagacagagagggaacgggaagcacaacttgtgaaggatcgtcattcagctcttagactggagtccctatacagcgatgaagaagacgaaagcgctgtgggcgctgataagattcagatgacatggactagggacaagtacatgaccgaaacatgggacccaagccacgctcccgacaactttagggaactggtacacattaagccggaccagtccaacgtccgacgcatgcacactgcagtgaagttaaatgaagtgatagtcaccaggtctcacgatgcacgccttgtcctgttaaacatgccaggcccacccaggaactctgaaggcgatgaaaattatatggaatttctagaggttttgaccgaaggcttagaacgggtgcttctggtaagaggtggcggtcgcgaggttatcactatctatagctag

SEQ ID NO: 240963 - DNA, 2343 bp, synthetic construct
  misc_feature 1..2343: note = Description of Artificial Sequence: Synthetic coding sequence
  source 1..2343: mol_type = other DNA
atgccacactttactgttgtccccgttgatggccctagacgcggtgactacgacaatctcgaagggttgagctgggtcgattacggagaacgggcagagctggatgattccgatggtcacggcaaccacagagaatcttcccccttccttagtcccttggaggccagcagggggatcgattattatgatagaaaccttgcactgtttgaagaagagctagatatccggccaaaggtgtcttcattgctcggcaagctggttagctacaccaatctgactcagggggcaaaagagcacgaggaggccgagtcaggcgagggcacacgacgccgagctgccgaagccccatcaatgggaactctgatgggcgtgtacttgccatgccttcagaatatctttggggtcattcttttcctgcgtctgacttggatggtcggtactgcaggtgtgctccaggccttgctgatagttctgatctgctgttgctgcaccctgcttaccgcaattagcatgtctgccatcgcaacgaacggtgtggtgcccgcaggagggagctactttatgatttcccggtctctcgggcctgagttcgggggtgccgtgggcctgtgtttttaccttggaactacattcgcagcagctatgtacattctgggggcaatcgagatcctccttacctatatcgcaccacctgctgcaatattctaccccagtggcgcacacgatactagcaacgccactttgaacaatatgcgagtctacggcaccatcttcctaaccttcatgacacttgtggtgttcgttggggtaaagtatgttaataaatttgcaagtctgtttctggcctgcgtgatcatcagcatcttatcaatttacgcaggagggatcaaatccatctttgatcctccagtgtttcctgtttgcatgctcggaaacagaaccctgtcgagagatcagttcgacatttgcgccaaaaccgcggtcgtcgacaatgagactgttgccacgcagctttggtcatttttttgtcacagtcccaatctgacaacagatagctgtgatccctacttcatgcttaacaatgtgacggaaatccctggcattccaggagcagctgccggagtattgcaggaaaatctgtggagtgcctacctggaaaagggtgatattgtcgaaaaacacggattaccttccgctgacgccccaagcctgaaagaaagtctgccactgtacgttgtcgccgacatagctacttccttcacggttttagtcggaattttctttccctcagttaccggaattatggctggctcaaatagatcaggggatctaagggatgcacagaagtccatacctgtggggactatactcgcgatcatcaccacctctctggtgtacttttcctctgtagttctgttcggcgcatgcatcgaaggagtagtcctcagggataagtacggtgacggagtctcacgaaacctggtggtaggcaccctcgcctggcctagcccttgggttattgtgataggttccttcttctcaacttgcggcgctggtctgcagtccttgacaggagccccacggctcctgcaggccattgccaaagataacatcattccctttctcagggtgttcgggcacgggaaggtgaatggcgagcctacctgggcgctgcttctgactgccctgatagctgaactgggcatcctcatcgccagtttggacatggtcgctcctattctgtccatgttcttcctgatgtgctacctgtttgtcaatctcgcctgtgccgttcaaactttgctgagaactcctaattggcggcctcgtttcaaatattaccactgggccctgtccttcctaggcatgtcactttgcctggcgctcatgttcgtgtcatcttggtactacgccttggtagctatgctcatagcaggtatgatttacaagtacattgagtaccaaggggctgagaaggagtggggggacgggattcggggactttcactgagcgccgctcgctatgcccttctaaggttggaagagggccctccacacactaaaaactggcgcccacagttactggttctgctgaagctggacgaggacttgcatgtgaagtaccccaggctgctcactttcgcgtctcagttaaaagctgggaagggactcaccatcgtaggatccgtcatccagggttccttcctggagtcttacggggaggcccaggctgccgaacaaacaccatgtgctgccttacggctcccaacctggccgtgctcttgtcctaggacatcaccgtctactccggcaacaacatccgccacctggagagcaacgtag

SEQ ID NO: 240964 - DNA, 3264 bp, synthetic construct
  misc_feature 1..3264: note = Description of Artificial Sequence: Synthetic coding sequence
  source 1..3264: mol_type = other DNA
atgcgtgcgggtggagcatgcaggcccggtgcagctggaactgccgctggcaccgctgcgggtggctgggatggcggttgcggcggagcagagcctgcacgctgcctcacttcaccctggtgccaatggactggaagaggcgctgctaccatgactacaagcaggggtagcgtggggtggaccacaggaagcgcaccttcttggatgacgcgtactgaagaacttgacattagaccgaaggtgtcgtcactccttggcaagctcgtgtcctacacaaatcttacccagggtgcaaaggagcatgaagaagcagaatccggggagggtactcgacggagggccgcagaggctccctctatgggcacattgatgggggtttacttgccctgcctgcaaaatatttttggcgtgattcttttcttgcggctgacttggatggtgggcaccgccggagtcttgcaagctctcctgattgtgctgatctgttgttgctgtacgctcctcacagccattagtatgtcggctatcgcaaccaacggggtggtgccagccggaggatcctactttatgatctcacggtctttgggaccagagtttggcggtgcggtagggctatgtttctacttgggcacaacctttgccgcagctatgtatattctgggggctattgagatcctgttgacttacatcgcgcctccggctgccatcttttacccatccggtgcgcacgacacaagtaacgccaccctgaataatatgcgtgtatatggtaccatttttttaacttttatgacactcgtggtgttcgtaggcgtgaagtacgtgaataaattcgcctcactctttcttgcctgtgtgattatttccatcctctctatctatgccggtggcattaagagcattttcgatcccccagtttttcccgtttgtatgttgggaaatcgcaccttgtcaagagaccagttcgacatctgcgctaagacagcagtagtggacaacgaaacagttgcaactcaactgtggtcgttcttctgtcattcccctaatctaacgacagacagctgcgacccatacttcatgctgaacaatgtgacagaaatcccaggcatccctggagccgctgccggagtcttgcaagagaatctgtggagcgcttacctggaaaaaggtgacatcgtagaaaaacatggccttccaagtgcggatgctccctccctcaaagaatccctgcctctgtacgtcgttgctgatattgccacatctttcaccgtgttagtgggtatttttttcccatccgttaccggaatcatggctggctccaatcgctctggcgatctgagggacgcacaaaagtctatccctgtgggtactattttggcaatcatcacaacctcgctagtgtatttctcttctgtagttcttttcggtgcatgcatcgaaggtgtggtgttaagggacaaatatggagacggggtcagcaggaaccttgtggtgggaacattggcctggccgtcaccctgggtgattgttatcggaagcttttttagcacctgcggagctggtcttcaaagcctgactggagctcctcgcctgctgcaggccattgccaaggataatatcatcccttttctgcgcgtgttcggtcacggaaaggtgaatggagagccgacctgggctcttctgctgactgctctgatcgctgagttgggtatacttatcgcttccttggacatggtcgcaccaatcctgagcatgtttttcctaatgtgctacctgttcgtgaatctggcctgcgccgtgcagacactcctccggacacctaattggagacccagattcaaatattatcactgggcactttcctttctggggatgtctctctgtctagccttgatgttcgtctccagttggtactacgcgctcgtagctatgctgatcgccggaatgatctacaagtacatcgagtaccagggcgctgagaaggaatggggagacggcattagaggcctaagtctatctgcggcacgatacgcgttgctcagattggaagagggcccaccccacacaaagaattggcgcccacagcttttagtgttattgaaattagacgaagaccttcatgttaagtaccctagactactgacctttgcttctcaactcaaagccggaaaagggctgaccatcgtggggagcgtgattcaaggctcatttctcgagtcttacggcgaagcccaggctgccgaacagactatcaagaatatgatggagatcgaaaaagtgaaagggttttgtcaggtcgtcgtggcttcaaaggtaagggaggggctggctcatttaatccagtcatgtggtctcggcggaatgagacataactcagttgttctaggttggccctatggatggcggcagagtgaggaccctcgagcctggaagacgtttatcgacactgtacggtgcaccactgcagcccatctggccctcctcgtacccaagaatattgcattctatccgtcaaaccacgagaggtacctggaagggcatattgacgtctggtggatcgtgcacgacggagggatgctgatgctcctgccctttttgcttaggcagcataaggtctggcgcaagtgtaggatgagaattttcacggttgcccagatggatgataactccatccaaatgaagaaagacctggccgtgttcctatatcacctgaggctggaagccgaagtggaggtggtggagatgcataactcagacatctccgcctacacgtacgaacgtacacttatgatggaacaaagatcacagatgctgaggcagatgagactgactaagactgagcgggagcgggaagcccagcttgtaaaggataggcatagcgcgctgaggctagaatctttgtacagcgatgaagaggatgaaagtgccgtgggagccgacaagattcaaatgacgtggactcgggataagtacatgaccgagacatgggatccatcacacgccccagataatttcagggagctggtccacataaaaccagaccagtctaacgtcaggcgcatgcacaccgccgtgaagctgaatgaagtgattgtaaccagaagccatgacgcgaggctggtcttgctgaacatgcccggacctcctaggaactcagagggtgatgagaattatatggagtttctcgaggtgctcaccgaaggacttgagagagtcctcctggtccgaggcggaggtagagaggttataactatctacagttag

SEQ ID NO: 240965 - DNA, 3240 bp, synthetic construct
  misc_feature 1..3240: note = Description of Artificial Sequence: Synthetic coding sequence
  source 1..3240: mol_type = other DNA
atggctgcagaaggcgctgtttgcgggtttgtgtacctggaaggaaccgcatgggctgtgcccgaggatacagagccgctggcaagctgtactcttggacacggcaaccaccgggagagcagtcccttcctctcgcctttggaggcttccaggggaattgactactacgatagaaatctggcccttttcgaggaagaacttgacatccgccctaaggtctcttctttacttggcaagttggtaagctacaccaacctcacgcaaggggctaaagaacacgaagaggcagagagtggagaggggacgcggagacgcgcagctgaggctccttctatgggcacgctcatgggagtttacctcccatgccttcagaatatattcggtgttatcctatttctccgacttacatggatggtgggcaccgctggggtcctacaggctctgctgatcgtgctgatctgttgttgttgcaccctgctgaccgccatctcgatgtctgctatcgctaccaacggggtggtccccgctggcggatcgtactttatgatctccagatcactggggcctgaatttggtggggcagtgggcctgtgtttctacctggggacaactttcgccgctgccatgtatatcctcggcgcaatcgaaatactattgacgtacatcgctcctccagcagctatcttctacccaagtggcgctcacgatacaagcaacgcaaccctgaataatatgcgcgtgtacgggaccatcttcctgacttttatgaccctggtcgtgttcgttggggtgaagtatgtcaacaaatttgcaagcttgttccttgcctgtgtaattatttctatccttagcatctacgctggcggaattaaatcgatctttgacccgccagtgttccctgtatgcatgctcgggaatagaactctgagtagggatcagtttgacatctgtgcaaagaccgcagtggtagataatgagacagtggcgacccagctatggtctttcttctgccattctcctaatttgaccacagattcttgcgacccatactttatgctcaataatgtcacagagattccagggatacctggagcagccgcaggtgtccttcaagaaaacctgtggagtgcgtacctagaaaagggcgatatcgttgaaaagcacgggctgccatctgccgacgctccttccctcaaggaatccctaccgctgtacgttgtcgctgatattgccaccagtttcacggtacttgtcggaatattcttcccctccgtgacagggattatggcaggttcaaaccgatccggcgatcttcgcgacgcccagaagtctattcccgtggggaccatcctcgcgatcattacaacgtctctggtgtatttctcctccgttgtgctgtttggtgcctgcatagaaggggtcgtcctccgcgacaagtatggtgatggggttagccggaacttggtagtcggaaccctggcctggccatctccctgggttattgtcataggaagtttcttttctacttgcggggctggattacagtctcttacgggagctccaagactgcttcaagcgatagccaaagataatatcattccatttttaagagttttcggccacggcaaagtgaatggtgagcccacctgggctctgctgttaactgccttgatcgccgagctcgggatcctgattgcctccctggatatggtggctcctatcttatcaatgttttttctaatgtgctacctctttgtgaatctggcttgtgccgtacagacgcttctgagaacccctaattggaggccacgattcaagtactaccactgggcgctgagctttctgggtatgtctttatgcctcgccctcatgtttgtgtcatcatggtattatgcactcgtcgccatgctgatcgccggaatgatctacaaatatatagaatatcagggtgccgagaaagagtggggagacggcattaggggcttgtccttatcggctgctagatatgccctgctgcggcttgaggaaggaccaccacatacaaagaactggagacctcagctgttggtgttactcaagttagatgaagatcttcacgttaagtatcctcggttgttgacattcgccagccaactaaaagctgggaagggcttaactatcgtgggatcagtcattcagggttcattcctggagtcctatggcgaagcgcaagcggcagagcagacaattaaaaacatgatggaaatcgaaaaggtcaagggtttctgtcaagtggtggtggcgagcaaggttcgtgaaggcttagctcacctgatccaatcttgtggcctcggcggtatgaggcacaattccgtggtgctaggttggccatatggctggcgccagtccgaagatcctagagcctggaaaacttttatcgacactgtgcggtgcaccaccgcggctcatctagctctgctggtgcccaaaaatattgcgttttatcccagcaaccatgagaggtacctggaggggcatattgacgtctggtggatcgtgcatgacgggggtatgcttatgttacttcccttcctgttgcgacaacacaaggtgtggagaaaatgccgtatgcgtattttcaccgtggcacagatggacgacaatagcattcagatgaaaaaagaccttgccgtctttctctaccacctccggttagaggcggaggtggaggtcgtcgaaatgcacaattctgacatcagtgcttatacttacgagcgaactctcatgatggagcagaggtcgcagatgttgcggcaaatgagattgacaaaaactgagagggagcgggaggctcaactggtaaaagatcggcatagcgcccttcgactagagtctctttacagtgatgaggaggatgaaagtgctgttggagcagacaaaatccaaatgacttggacaagggataaatacatgacggagacgtgggatccctcacacgctccagacaatttcagggaactggtccacattaagccggatcagagtaatgtgagaaggatgcatactgcggtgaaactgaatgaagtgatcgtcactcggtctcatgatgccaggctggtcctgctgaacatgcccggaccgccaagaaacagtgagggcgacgagaattacatggaattcctggaagtgctgaccgaggggctcgagcgtgtgctcttggttcgcggaggcggtcgggaggtaataacgatttactcttag

SEQ ID NO: 240966 - DNA, 3165 bp, synthetic construct
  misc_feature 1..3165: note = Description of Artificial Sequence: Synthetic coding sequence
  source 1..3165: mol_type = other DNA
atgggggacaccttgtccccgggacacggtaaccaccgagagtccagccccttcctcagtcccctggaagccagccgcggtattgattattacgatagaaacctcgcactcttcgaggaggagctcgacatccggcctaaagtcagcagcctgctaggcaaactcgtctcttataccaatcttacgcagggggctaaggagcacgaagaggctgagtcgggggaagggaccagacggcgagcagccgaagctccttcgatgggtacgctgatgggtgtttacctcccttgcctccaaaacatttttggagtcattctattcctccggctgacatggatggtggggactgctggtgtcctgcaggctctgctcatcgtgcttatttgctgttgttgtacattattaactgctatatccatgtctgccattgcaactaacggggtggtccccgcagggggttcctacttcatgattagcagaagtctgggcccagagtttggtggcgctgtgggtctatgtttttacttaggcaccacgttcgcagcagccatgtacattctgggagctatcgaaatccttttgacgtatattgccccacccgctgctatcttctatccttctggagcacatgatacctccaacgcgacccttaacaatatgagggtctatggaaccatatttctgacattcatgaccctggtggtctttgtcggcgttaagtacgtgaacaaatttgcctccctgttcctcgcctgtgtgattatttctatcctttcaatttatgcaggcggaatcaaatcaatcttcgacccacccgtgtttcctgtgtgcatgctcgggaacagaacactgagtcgggaccaattcgacatctgtgcaaagaccgcagtcgtagacaatgagaccgtggctacccagctttggtccttcttctgccactcacccaatttgaccactgactcttgtgacccatattttatgctgaataacgtcacggagataccagggatccccggagctgctgccggagtgctgcaggagaatttgtggagtgcctacctggaaaagggagacattgtggaaaagcatggcctgcccagcgccgatgctccatcactcaaagaatcactgccactgtatgtcgtcgccgacattgctacgagttttacagtgctcgtaggaattttttttccctccgtgactggaataatggccggaagtaacaggagcggggatttgcgagacgcgcagaaatcaattcccgtgggcacaatcctcgctatcattactacctctttagtatacttttccagcgtggtgctgtttggcgcatgcattgaaggcgtcgtgttaagggataaatacggagacggtgttagtcgcaacttggtggtaggcacactggcgtggcctagtccgtgggttatagttatcggttcgtttttctccacatgcggcgctggtctgcaaagccttacgggagctccacggttgttacaagccatcgccaaagacaatattatccctttcctgagagtgttcggccatggcaaggtaaacggcgaaccgacatgggcacttcttctgacagccctgatcgcagaactcggtattttaatcgcatctctggatatggtggctccaatcttgtctatgtttttcctcatgtgttatctattcgtgaatctcgcttgtgctgtccagacattgctcaggacacccaactggcgcccaagattcaaatattaccactgggcgctctccttcctgggcatgtctctttgccttgccctgatgttcgtctcttcctggtattacgcattagtcgcaatgctaatcgcagggatgatatataagtacattgagtatcagggggcagagaaggagtggggcgacggaattagagggttgtcgttgagtgccgcacggtacgcattgcttcggctggaagaaggaccgccacacacaaagaactggcgaccccagctgctggttctgttgaagctggacgaggatctgcacgtcaaataccctaggctgttgacattcgcctcccaactgaaagccggtaagggtctcacaattgttggatctgtcatccagggcagctttctggaaagctacggagaggctcaggctgcagagcagacaatcaaaaatatgatggaaatagaaaaggtcaaaggattctgccaggtggtcgtagcttccaaggttcgggaaggcctggcccatctgatccagagctgcgggctgggagggatgagacacaatagcgtggtgctggggtggccctatgggtggaggcagtctgaggaccctcgggcatggaagacttttatcgacactgtaaggtgtaccacagctgcacacctcgcactcttagttcccaaaaatatcgcattctacccctcaaaccacgagcgctacctggaggggcacattgatgtctggtggatcgtgcacgacggtggtatgttaatgttgttacctttccttctgcgtcagcacaaggtgtggaggaagtgcaggatgcgaattttcacggtcgcccaaatggatgacaatagcattcaaatgaagaaagacctcgccgtcttcctgtatcatctgagattggaggcagaggtagaggtcgtggaaatgcataacagtgacataagcgcctatacatacgagagaacactcatgatggagcagaggtcacagatgttgcgccagatgcgattgaccaaaacagagcgagagagggaagctcaattggttaaggacaggcacagcgcccttcgattggaaagcctgtacagtgacgaggaggacgaaagcgccgtaggcgctgataaaatacagatgacttggactcgcgataagtacatgactgaaacctgggacccgagccacgcaccagacaattttcgagagctcgtccatatcaagcctgaccagtccaacgtgagaaggatgcatacagcggtcaagcttaacgaagtgattgttacccgctcccacgacgccagactggtgctgctgaatatgccagggccacccagaaatagtgagggcgacgagaattatatggagttcctcgaagtgcttaccgagggtttagagcgtgtacttctggttcgtgggggtggtagagaggtcataaccatctactcgtag

SEQ ID NO: 240967 - DNA, 3300 bp, synthetic construct
  misc_feature 1..3300: note = Description of Artificial Sequence: Synthetic coding sequence
  source 1..3300: mol_type = other DNA
atgccacattttacggtgaccaaagtcgaagacccggaagagggcgcagccgcaagcattagtcaggagcccagcctggccgatatcaaggccagaatccaggatagcgacgagcccgatctttcccagaacagtattactggagaacactcacagttgcttgatgacggccacaagaaagctcgaaatgcttatctgaataactctaattatgaggagggagacgaatatttcgataaaaacttggctttgtttgaggaagagatggatacccgaccgaaagtctcttcactgctgaataggatggccaactacaccaatctgacgcagggcgctaaagagcatgaggaggccgagaacatcaccgagggaaagaaaaagcctaccaaaacaccccagatggggacatttatgggcgtgtacctgccttgcctccagaatatattcggcgtcattctattccttcggcttacatgggtggtcggcaccgcaggcgtgctgcaagcgtttgctatcgtgctgatctgttgctgctgcacgatgctgacggctatatctatgtctgctatcgccacgaacggtgtcgtgccagccggagggtcttatttcatgatttctcgcgctctcggaccagaattcggaggagcagtgggactctgtttctatctcggcacgacgttcgcagccgctatgtatatcctgggagcaattgaaattttcctggtttatatagtgccccgagccgcaatttttcacagtgatgatgcattgaaggagtcagcagccatgcttaataatatgcgcgtgtacggaacggctttcctagtgttaatggtgctagtggtgttcattggcgtgcggtatgtcaacaagtttgcatcactctttctcgcctgtgtgatcgtatctatactcgccatttatgcaggagcgataaagagtagttttgccccacctcatttcccagtgtgtatgttgggcaaccgcactctgagttcccgtcacatcgatgtgtgcagcaagaccaaagagattaacaatatgaccgtcccctctaagctttggggatttttctgtaatagttcccagttctttaacgccacatgtgatgaatacttcgtgcataacaacgtcactagtatccagggcatccctggcctggcaagtgggataatcaccgagaacttatggagcaattacttgcccaagggcgaaatcatagagaagccttcggcaaaaagctcggatgtgctcgggagtctaaaccatgaatatgtgttggtggacattaccacatccttcacactcctggtggggattttttttccctcggtcactgggattatggccggttctaatcgctcaggtgatctgaaagacgcccagaaatcaatcccgattggcaccatactggcaatcctaaccacatctttcgtgtacctttccaatgtggtattgtttggtgcctgtatagagggagttgtactgcgagacaagttcggagacgcagtaaaaggtaatctggtcgtcggtactctctcatggcctagtccctgggtgatcgtgatcggtagtttcttcagtacttgcggagctggcctccaaagcctcaccggcgcacctaggctgcttcaagctatcgctaaagacaacattatccctttcctgagggttttcgggcattctaaagccaacggagaaccgacctgggccttgcttttgaccgccgctattgctgaactcggtatacttatcgctagcctcgatctagtcgctccaatactcagtatgttctttctaatgtgctacttgtttgtgaacctcgcttgcgccctccagacactgctcagaactcccaattggcggcctcggttccgttactatcactgggctctttcattcatggggatgtcaatttgccttgcacttatgttcatttcatcatggtactacgctatcgtggcaatggtaatcgcaggtatgatctacaagtacattgagtatcagggggcagaaaaagagtggggtgacggaatcaggggtctcagcttgtcagcagctagatttgcattgctgcgcctggaggagggaccaccccatactaaaaactggcgcccacagctgctggttctgttgaaacttgacgaggacctgcacgtgaagcacccaaggcttcttaccttcgcaagtcagcttaaggcaggtaaggggctaacaatagtgggctctgtaatcgtcggaaatttcctggaaaactacggcgaggctcttgccgctgaacaaacaatcaagcacctgatggaggctgaaaaagtgaagggtttctgtcagttggtcgtcgcagccaaattgagagaaggtatttctcacctgatacagagctgcggtctgggtgggatgaagcataacaccgtggtcatggggtggcccaatggctggaggcagagcgaagacgcacgggcttggaaaaccttcatcggcaccgtgcgagtgactaccgccgctcatctggcactgctagtcgcgaaaaacatatctttttttcctagtaacgtagagcaattttccgaaggcaacatcgacgtgtggtggattgtccacgatggaggtatgctcatgttgctgccctttcttctcaagcagcataaggtgtggcgaaaatgcagcattcgaatctttactgtagcgcagctcgaagacaattctatccaaatgaaaaaagacttagcaacgttcctgtaccatttacgcatcgaggctgaagtggaggtggtcgagatgcacgatagtgacatatccgcctatacatacgagcgcaccctgatgatggagcagcgatcccaaatgcttagacacatgcggctatccaaaactgagagggacagagaagcacaactcgtgaaggacagaaattcaatgttgcgacttacatcgatcggaagcgatgaagatgaagaaaccgagacataccaggagaaggttcatatgacctggactaaagataaatacatggcaagccgcggacagaaggcaaaatctatggaaggctttcaggatctcctgaatatgcggccagatcagtccaacgtacgtcggatgcacaccgctgtcaaattgaatgaagtcattgttaataagtcacatgaggcgaaactcgttctcctgaatatgcctgggcctcccaggaaccccgaaggcgatgagaactacatggaatttttagaggtgctcaccgaaggcctggaacgcgtacttctcgtgcgcggaggaggaagtgaggtcattacaatctactcatag

SEQ ID NO: 240968 - DNA, 3453 bp, synthetic construct
  misc_feature 1..3453: note = Description of Artificial Sequence: Synthetic coding sequence
  source 1..3453: mol_type = other DNA
atgcacccgccagagacgacaacaaagatggcatcagttagatttatggtgactcctaccaaaattgatgacattccgggacttagcgacacatctccggacttgagcagtcgaagctcctctagggtccggtttagtagccgggaatctgtgccggaaacgtcaaggtccgagcccatgtctgagatgagcggcgctaccacctccctagctacagtggcactggaccctccatccgataggacttcacatcctcaggatgtcatcgaggatctctcacagaattccatcacaggcgaacactcccagcttcttgacgatggtcacaagaaggctcggaacgcttacttaaataattctaattacgaagaaggcgacgagtacttcgacaaaaacctcgccctcttcgaggaagaaatggatacccgaccaaaagtttcgtctctcctgaaccgaatggcaaactacacaaacctgactcaaggcgctaaggagcatgaggaagccgagaacatcacggaaggcaagaagaagccgactaaaactccacaaatggggactttcatgggagtatacctgccctgcctacagaatattttcggcgtgatcctgttccttcgtctgacttgggtcgttggtaccgctggtgtgttacaggcttttgccattgtactgatctgctgctgctgcacaatgctgaccgctatcagcatgagtgccatcgccactaatggcgtggtcccagccggagggtcatactttatgatttcccgggcactgggtcctgagttcggtggcgctgtgggcctctgcttctacctcggcactactttcgcagctgccatgtacattctgggagcaatcgaaatttttctggtgtatatcgtgccccgagctgcaatttttcacagcgatgatgccctgaaggagtccgctgccatgttgaataacatgcgtgtgtacggtaccgcatttctcgtcctcatggtcctggtggttttcataggtgtacggtacgtcaacaagtttgctagccttttcttagcctgtgtgattgtgtccattctggcgatttacgccggagctatcaagtcatcttttgcgcctccccacttccccgtgtgtatgcttggcaatagaactctgtcatccagacatatcgacgtgtgtagcaagaccaaagagataaataatatgacggtgccctctaagttatgggggtttttctgtaactcctctcagttctttaatgccacctgcgacgagtacttcgtccacaataacgtcactagcatccagggcatacctggcctagcctctggcattattacggaaaatctgtggtctaactatttaccaaaaggtgaaattatagagaagcctagcgcaaaatctagtgatgttctgggcagcctgaaccatgagtacgtgctggtggatataactacgtctttcacgctcctcgtgggaatctttttcccaagcgtaactggtattatggccggatccaatcggagcggcgacttgaaagacgcgcagaagtctattcctatcggaactatcctcgccatactgacaacctcctttgtatatttgtctaatgtggtattattcggagcttgtattgagggcgtggtgctccgcgataagtttggggacgcggtcaaaggaaatctagtggttggcaccctctcctggccaagtccgtgggtaatcgttatcggttccttcttttccacatgcggtgcgggactgcagagcctgaccggcgcaccgaggctgttgcaagccattgctaaagataacatcattccttttctgagagtgttcggacactccaaagccaatggggagccaacctgggcacttctgttaacggccgctattgccgagctgggcatcttaattgctagcctggatcttgttgcacctatacttagtatgttctttctaatgtgttatttgttcgtcaatctagcatgcgcactgcagaccctcctgcggacccccaactggcgaccgaggtttcgctattatcactgggccctgagttttatggggatgagcatctgtctcgcgttaatgtttatcagtagctggtattatgctatcgtggctatggtgatcgcgggaatgatctacaaatacatagagtaccaaggcgctgagaaggagtggggggacggaatccggggtctttccctttcagctgcacggttcgccctgctcaggctggaagagggcccaccacacacgaagaactggcgaccccagctgcttgtcttactaaagctggacgaagacctgcacgttaaacaccctcggctcctcacttttgcatcccagctgaaggccggaaagggcctgaccatcgttggatctgtgatcgtgggcaattttctcgagaattacggtgaggccctggctgcagaacagaccatcaagcatctcatggaggccgagaaagtcaaggggttctgtcagctcgttgtcgcggcaaaattacgggaaggcatctctcaccttatccaatcgtgtggattaggaggcatgaaacataatactgtcgtcatgggctggccaaatggctggcgtcaaagtgaggacgccagagcttggaaaacattcattgggactgtgagagtcacaactgcagctcatctggcgctgctagtggccaaaaatatctccttctttccttcgaacgtggagcagtttagtgaaggaaacatcgatgtgtggtggatagttcatgatgggggtatgctgatgctgctgccctttctactgaagcaacacaaggtctggcggaagtgttcaattagaatatttacagtcgcacagctggaggataatagcatacagatgaagaaggatctagcaactttcctatatcacctgagaattgaagcggaggttgaggttgtggagatgcatgactcagacatttccgcctacacatatgaaaggacattaatgatggaacaacggagtcagatgttgcggcacatgaggctcagtaagacagagcgtgaccgcgaagcccagttggttaaagaccgcaactccatgttgaggctaacctcaataggaagtgacgaggatgaggagaccgaaacttatcaagagaaggtccatatgacctggactaaggacaagtatatggcttcccggggtcagaaggccaaatccatggagggcttccaagacctattaaatatgaggcccgatcagtctaacgtgaggcggatgcacaccgcggtcaaattaaacgaagtaatcgtgaataaatctcacgaggcaaaactggttctcttaaacatgcctggcccacctaggaaccccgagggcgacgaaaattacatggagtttttggaagttctaacagagggtctcgagagggtcttgctcgtcaggggtgggggatcagaggttatcactatctacagttag

SEQ ID NO: 240969 - DNA, 3276 bp, synthetic construct
  misc_feature 1..3276: note = Description of Artificial Sequence: Synthetic coding sequence
  source 1..3276: mol_type = other DNA
atgtccgaaatgtccggtgctaccacatccctggctacagttgcacttgacccaccaagtgaccgaacttcgcatcctcaagatgtgatagaggacctcagccagaattccattactggcgaacattcccagctactcgatgatgggcacaagaaggcgaggaacgcatacctgaataatagcaactacgaggaaggtgatgaatactttgataagaatcttgctttgttcgaggaggagatggatacccggcctaaagtcagttccctcctcaaccgcatggccaactacactaatctcacgcagggagcaaaagaacatgaggaggccgaaaacatcacggaggggaagaaaaagcccacaaaaacaccccagatgggaacgtttatgggcgtctacctcccttgtctgcagaacatatttggggtaatcctcttcctccgcctcacctgggtcgtggggacagctggtgtgctacaggcctttgctattgtcctcatctgttgctgttgcactatgctcacagccatctccatgagtgcaatcgctactaacggcgtagtgccagcagggggatcttactttatgatttccagggcgcttggcccagagttcggtggagccgtaggactttgcttctacttgggaactacctttgccgctgccatgtatatcctcggggctatagagatctttttagtctatatagtgcctcgcgctgccatttttcactccgatgacgcattgaaagagagcgctgccatgttaaacaacatgcgcgtgtatggcactgccttcctcgttcttatggtgttggtggtgtttattggggtccgttatgtgaataaattcgccagcctattcctggcctgtgtaatagtaagcattttggccatttatgcgggagcaatcaagagctctttcgccccaccacattttcccgtctgcatgctgggcaatcgaacacttagcagccgccatatcgatgtctgttctaaaactaaagaaattaataacatgaccgtcccttccaaattgtgggggttcttttgcaactcttcccagttcttcaacgccacgtgcgatgagtacttcgtgcataacaacgttacgtctattcaaggaataccgggtcttgcctctgggatcatcaccgagaacctctggtccaattacctgccaaaaggtgaaattatcgagaaaccatctgctaagtcctcggatgtgcttgggagcctcaatcacgagtacgtgctggtggacattacaacatccttcaccttgctcgtcgggatattttttccctccgtgactggtatcatggcgggatcaaacaggtccggcgatctcaaagacgcccagaaaagcatacccattggaaccatcctcgcgatcttaacaacctccttcgtgtatctgagcaatgtggtgctgttcggtgcgtgcatagagggcgtggtccttcgggacaaatttggcgatgcagttaagggcaatctagtcgtggggacactctcatggccaagcccctgggtcatcgtaatcggatcgtttttcagtacgtgcggggctggtctccagagcttgacgggagcaccacgcctgctgcaggctatcgccaaagataatatcattccatttttacgcgtgttcgggcactcgaaagccaatggcgagccgacttgggctctgctgctgaccgccgcaattgccgaattgggtattcttatcgcatccttggacctggtggcaccaatattatcaatgttttttctcatgtgctatttgttcgtgaacctggcatgtgccttgcaaactctgttgcgcacaccaaactggcgacccagattcaggtattaccactgggcactgtcattcatgggcatgtccatttgtctggctcttatgtttatctctagctggtactacgccatagtggctatggtgatcgcagggatgatctataagtatattgagtaccagggggctgagaaggaatggggggatggaatccgcggtttaagcctgtccgccgctagatttgcccttctgcgtctagaggaggggcctccccacactaaaaactggcggcctcagctcttggtgttgctcaaactggacgaggatctccatgttaagcacccaagactcttgacatttgctagtcagttaaaagccggtaaggggctcacaattgtggggtccgtgatcgtcggcaacttcctggagaattatggagaagcactcgcggcagaacagacaattaaacacttgatggaagctgagaaggttaaggggttctgccaactggttgtggctgccaaattacgggaaggcatctcccatcttattcagtcttgcggtctcggaggcatgaagcacaacaccgtcgtaatggggtggcccaacggttggcgccagtccgaagacgcgagggcctggaaaactttcattggcacagtgcgagttactactgccgctcacctggccctactggtagccaagaacatatccttcttccctagtaacgttgagcagttcagcgaaggcaacatcgatgtctggtggatcgtacacgacggaggtatgctgatgcttctgccttttttgctgaaacagcacaaggtttggcgcaagtgctctattaggattttcaccgtggcgcaattagaagataacagtatacagatgaaaaaggatctagccaccttcctttatcacctaagaatcgaggcagaagtagaggtggtcgaaatgcacgacagcgacatatccgcctacacctatgagagaacgctgatgatggagcaaagaagccagatgttacggcatatgaggctctctaagacagagagggaccgtgaagctcaacttgtcaaggatcggaattccatgctgaggcttacttccataggcagtgatgaggacgaggaaacggagacctaccaggaaaaagttcatatgacttggacaaaagataaatacatggcgtctcgaggtcagaaggccaagagtatggaagggtttcaagacctgctgaacatgaggccagaccagtcgaacgtccgacggatgcatacagccgtcaaattaaacgaagttatcgtcaacaagtctcacgaagcaaaattggttcttctgaatatgccaggccctcctcggaatccagagggggatgagaactacatggagtttctggaggtattaaccgagggactggaaagagtcctattggttagagggggagggtcagaggtcatcaccatttattcatag

SEQ ID NO: 240970 - DNA, 3408 bp, synthetic construct
  misc_feature 1..3408: note = Description of Artificial Sequence: Synthetic coding sequence
  source 1..3408: mol_type = other DNA
atgcacccccctgagacaaccaccaagatggccagcgtacgctttatggtgacacctaccaaaatagacgatattccaggcctgtccgatacaagcccagacctcagttcaagaagcagctcgagagtgcgatttagctcacgtgagtctgtgcctgagaccagtcgaagcgaacctatgtcagaaatgtcaggcgcaaccacttcgttggcaaccgtggccctggaccccccttccgatagaacgtcccaccctcaggatgtgatcgaggacgacgggcataaaaaagccagaaacgcttatctcaacaacagtaactatgaggaaggagatgaatacttcgacaagaaccttgccctgttcgaggaagagatggacacaaggccaaaagtgagcagcctcttgaacagaatggctaactatacaaacctcactcagggagcaaaggagcacgaagaagctgagaacataaccgaggggaaaaaaaagcctacgaagacaccccagatgggcacatttatgggggtgtacctcccatgcctccagaacatcttcggcgtgatcctgtttctgagattgacatgggtggtgggaacggccggagtgttacaggcttttgccattgtcctgatctgttgctgttgcacaatgttaacggccatttcaatgagtgctattgccacgaacggggtagttccagctggcggaagctacttcatgatctctcgcgctttaggcccagagtttgggggagcggtgggcctctgcttttacctcggaacgacatttgcagcagccatgtatattctgggagcgatcgagatatttcttgtgtacatagtgcccagagccgcaatctttcactctgacgatgccctgaaggaatccgccgcaatgctgaataatatgcgcgtctatgggacagccttcctggtgctcatggtcctcgtggtattcattggtgtgagatatgtaaataagttcgctagccttttccttgcgtgtgtaatagtgagtattttagctatctacgccggagccattaagagctctttcgctcctccgcacttcccagtgtgtatgcttggcaacaggactctgagctctcgccatatcgatgtgtgctccaagactaaagagatcaacaacatgacggttccgagcaagctgtggggctttttctgtaactcaagccagttcttcaacgccacctgcgatgagtattttgtgcacaataatgtgacttccattcaagggatccctggacttgcgagcggcatcattacagaaaatttatggagcaattacctgcctaaaggtgagataatcgagaagccatcagctaaaagctctgatgtgctgggctccctgaatcacgagtatgtgctggtggacattacaacatcttttacgctgctggtgggaatattttttccaagcgtgactggcataatggcaggaagtaaccggtccggcgacctgaaggacgcccagaaatctattcctattggtaccatcctggccatcctgactacatctttcgtgtatctgagcaatgtggtgctgttcggggcttgcatagagggtgtcgtgctcagggataagttcggcgatgccgtaaaaggaaatctggtggtaggcactttgagctggccatctccctgggtgattgtcataggctctttcttctccacatgcggagctggacttcagtccctcacgggggctcctcggcttcttcaggccatcgccaaggataatataattccttttttgagggtttttgggcactctaaggctaatggcgaacctacttgggctttgctgttgactgccgcaatcgccgagttagggattctcatagccagcctggatctcgttgcccctatactttctatgttctttctaatgtgctacttgttcgtaaatctcgcctgtgctctccagactctgttacgcactcccaactggcgccctagattcagatattaccactgggccctcagctttatgggcatgtcaatctgtcttgctctcatgtttatctcctcctggtattacgcgatcgttgccatggttatagctgggatgatatacaagtatattgagtatcaaggcgctgagaaggaatggggtgatggaataagaggactctccttatcagctgcacgcttcgctctcctcaggcttgaggaggggcctccgcacactaagaattggaggcctcagttgctggtgctgctcaaactggacgaagacctccatgtgaaacatccgaggctgcttaccttcgcttcccagcttaaggcagggaaggggcttacaattgttggatcagtgatcgtagggaactttctggaaaattatggcgaggccctcgcggcagagcagacaattaaacacctgatggaagccgagaaagtgaaaggattctgccagctggtggtggccgctaagctgagggagggcatatctcatctaatccagagctgtggcctgggcggtatgaagcataacactgtggtaatgggctggcccaacggctggaggcagagcgaagacgccagggcgtggaaaacctttattggcacggtcagagtcacaaccgcagctcatttagccctgctagtcgcaaagaatatctccttttttcccagcaatgttgagcagttctctgaaggcaatattgacgtctggtggattgtgcatgatgggggaatgttgatgcttttaccttttttgctgaaacagcataaggtgtggcgaaaatgcagtataagaatatttactgtcgcacaactagaagacaacagcatccaaatgaagaaagacctggcgacgtttctctaccacctgcgtatcgaggccgaagtcgaggtagtcgaaatgcacgacagtgatatcagcgcatatacctatgagagaactcttatgatggagcaaagaagccagatgttgcgccatatgaggttgtccaaaaccgagcgggatagagaagcccagcttgtaaaggacagaaattccatgctgcgcctgaccagcatcgggagtgacgaggacgaagaaacggagacttatcaggaaaaagtgcacatgacatggaccaaagataagtacatggctagcagaggacagaaggctaagtcgatggaaggcttccaggatctgctcaacatgcggccagaccaatctaatgtcaggcgaatgcacacagccgttaaactcaatgaagtaatcgtgaacaagtcccatgaggccaagctggtgctgctcaatatgcctggtcccccaagaaatcccgaaggtgacgagaactacatggaattcctcgaagtgctcacggaggggctggaaagagttttgctcgtgcgcggtggagggagcgaagtgataactatctactcctag

SEQ ID NO: 240971 - DNA, 2889 bp, synthetic construct
  misc_feature 1..2889: note = Description of Artificial Sequence: Synthetic coding sequence
  source 1..2889: mol_type = other DNA
atggacacacggccaaaagtgagttcgcttctgaacaggatggcgaattacaccaacctcacccagggcgcaaaagaacacgaagaagcagaaaacattacagagggtaagaagaagcctactaagacaatgttgacggctataagcatgagcgctatcgccaccaatggggtggtgcctgcaggaggcagttacttcatgatttcaagagccctgggaccggaattcggcggtgcagttggattgtgcttttacctaggaaccacatttgcagctgccatgtacattttgggggctatagaaatctttctggtctacatcgtgccaagggcagcaatattccactccgacgacgcccttaaggaaagcgccgcaatgttgaataatatgcgagtttacggcacagcgttcctggtcctcatggtgttggtggtgttcatcggtgttcgatatgttaataagtttgcatccctgtttctcgcatgtgtcattgtatctattctggcaatctatgcgggtgccatcaaatctagctttgcgccaccacacttcccggtctgcatgctggggaatagaactcttagttccaggcacattgacgtctgctctaaaacaaaagagattaataacatgacagtgccatcaaagctctggggattcttctgtaattcatcacagttcttcaatgctacttgtgatgagtattttgtgcataacaacgtaaccagtattcaagggataccaggactggctagcggcatcatcacagagaacctgtggtccaattacctgccaaagggagagatcatcgagaagcctagcgctaagtcatccgacgtccttggaagcctgaatcacgaatatgttcttgtggatattacaacgagtttcacccttcttgtggggattttctttcccagtgtgacaggtattatggccggttcaaacagatccggagacctcaaggacgcacaaaaatcgatacccatcggcactatattggccattttgacgacaagcttcgtttacctcagcaatgtagtgttgtttggcgcttgcatcgaaggagttgtgctccgcgataagtttggcgatgcggtgaaaggtaatttggttgtggggacccttagctggccatctccctgggtgatcgtgatcggtagcttcttttccacgtgcggggcaggtctgcagtccctcacaggagcccctagactgctgcaggccattgcgaaagataatattattccttttctcagggtgttcgggcacagcaaggccaacggggaaccaacatgggcgctgctgctgaccgccgcaatcgccgaactgggcattcttattgcaagcctggatctggttgccccaatactgtcgatgttctttctcatgtgctatctctttgttaatctagcatgcgccttacagacactactaagaactcctaactggcgtcctcggttcagatactaccattgggctctgtccttcatgggcatgtcaatctgcctagccctcatgttcatctcctcctggtactacgcaatcgttgctatggtaatcgccggtatgatctataaatacattgagtatcaaggtgcagagaaagagtggggcgatgggatcagggggctgtcccttagcgcagctagatttgccctgctgcgcttggaagagggccctccacatacaaaaaactggcgaccacagctcttggtcctcctgaagctggacgaagacttgcacgtgaagcatcctcgcctactcaccttcgcatctcaactcaaagcgggtaaaggtctcacgattgtggggagcgttatagtcgggaatttcctcgagaactacggggaagccctcgcagccgagcaaacaatcaagcatttaatggaagcagagaaggtcaaaggcttctgccaactggtggtggctgccaagttgagggaggggatatcccatctgattcagagctgcgggctcggtggaatgaagcataatacagtggtgatgggctggccaaacggatggcgccagagtgaggacgccagggcctggaaaacttttatcgggacggtacgcgtgactacagccgctcacctggctttgcttgtggccaagaacattagtttctttcccagcaatgtagagcagtttagcgagggtaacatcgacgtgtggtggattgtccacgacggcggaatgctgatgctcctcccctttctccttaaacagcacaaggtgtggaggaaatgctccatcaggatctttactgtggctcagttggaggataacagcattcagatgaaaaaagacctggcgacttttttgtatcatctccgaatcgaggcggaagtcgaagtagtggagatgcacgactccgacatctcggcctacacgtatgagagaacactgatgatggagcagcgctcccagatgttgagacacatgcgcctgtcgaagaccgagagggaccgagaggcgcagttagttaaagaccgtaactcaatgctgcggttgacaagtatcggctctgatgaggatgaggaaaccgagacataccaggagaaagtgcatatgacttggaccaaagacaaatacatggccagccgaggacagaaagcgaaaagcatggagggatttcaggacctgctcaacatgaggccagatcaatccaatgtgaggcgcatgcacactgcggttaagctcaacgaggtgatcgttaacaagtctcacgaggcaaagttagtcctgctcaatatgcctggaccgccacggaaccccgaaggggatgagaactacatggagttcctggaagttctaactgaggggctcgagcgagtactgctggtccggggtggcggatctgaggttattaccatctactcctag

SEQ ID NO: 240972 - DNA, 3276 bp, synthetic construct
  misc_feature 1..3276: note = Description of Artificial Sequence: Synthetic coding sequence
  source 1..3276: mol_type = other DNA
atgagcgaaatgtccggggcaaccacttctctcgcaaccgtcgccttagatcccccaagtgacaggacctctcaccctcaggacgtaatcgaagatctgtcacagaactcaatcacaggggaacatagtcagctgcttgacgacggccacaagaaagcaaggaatgcatatctgaacaactccaattacgaggagggggatgagtactttgataagaaccttgcactgtttgaagaggagatggatacccgcccaaaggtgagttcactcttgaacagaatggccaattatacgaatcttacccagggggctaaggaacatgaggaggcagagaatatcacggaggggaagaagaagcccaccaaaacgccccagatggggaccttcatgggggtctacctgccttgcctccaaaatatattcggagtcatcctatttctgaggcttacatgggtggtggggacagctggggtgcttcaagccttcgcaatcgtgcttatctgttgttgctgcacaatgctgaccgccatatctatgagcgcaatagccactaatggcgtagtaccggcaggaggtagctacttcatgataagcagggcactgggtcccgagttcgggggagctgtaggcctttgcttttatcttggaaccacctttgccgcagccatgtacatccttggagccattgaaatcttcttggtctacatagtcccacgggctgccattttccattctgacgacgcgctgaaggaatctgctgccatgctgaacaatatgcgcgtatacggaactgccttcctggtgcttatggtgttggtggtctttatcggcgtccgctatgtgaataaatttgcctccttattcctggcatgtgtcatagtatcgatccttgccatatacgctggagccataaagtcttccttcgcaccaccacatttccccgtgtgtatgctcggaaaccggacactaagcagtcggcacatcgatgtctgctcaaagacgaaggaaatcaataatatgacagtgccaagtaagctgtggggattcttctgtaacagttcgcagttttttaacgcgacatgcgatgagtattttgtgcataataatgtgacatctattcaggggatacctgggctggcatctgggatcataacagagaatctgtggtccaactatctgccaaagggcgaaattatagagaagccatctgccaagtcaagcgatgtgctgggatcactgaatcatgaatacgtgctcgtggacatcacgactagttttacattactagtcgggattttctttccatcagtcaccgggattatggcaggctccaaccgcagtggagatctaaaggatgcacaaaagagcattccaatcggaaccatattggcaatcctgaccacctcattcgtctacctgtcaaatgtggttcttttcggtgcatgcattgagggtgtggtgctgagagacaaattcggggacgctgttaaagggaatctggttgtcggaacactgagctggccatcaccctgggtgatcgtgattgggtccttcttctctacatgtggggcaggactgcaaagcctgacaggagctccacgcctgctccaagcaatcgcgaaggataatataatacctttcctcagagttttcggacatagcaaggccaacggcgagcccacatgggctctgctcctgactgcggctattgccgagttgggcatactcattgctagcttagaccttgtcgcaccaatcctttcgatgtttttccttatgtgttacctctttgtgaaccttgcgtgtgctctgcagacactgttgcgaacgcctaactggagaccaagatttagatattaccattgggccctgtcgtttatgggcatgtctatctgtctggcgctcatgttcatctcttcatggtactatgccattgttgctatggtgatcgcgggaatgatttacaagtacatcgagtaccagggggctgagaaggagtggggagatggcatacggggactatctctgtccgccgctcgcttcgcgctcttacgccttgaggagggcccaccccacactaaaaattggagacctcagcttctcgtgctgctgaagctagatgaggacttgcacgtgaaacatccgcgactcctaaccttcgcctcacaactgaaagccggaaaggggctgaccatcgtgggttccgttattgtcggaaactttctagagaattacggcgaggctttggcagccgagcaaactataaagcaccttatggaggccgaaaaagtaaaggggttctgtcagctcgtggtggccgctaaacttagggaaggcatcagtcacctcatccagtcgtgtggtctaggcggaatgaagcataacactgtggtcatgggttggccgaatggctggcgacagtcagaggatgcacgggcttggaaaacgtttatcgggaccgtgagggtcacaaccgcagcccacctggccctgctcgtggccaagaacataagtttcttccctagtaacgtggaacagttttctgagggaaatatagacgtgtggtggatcgtgcatgacgggggaatgctgatgctgcttccgttcctattgaaacagcacaaggtgtggagaaagtgcagtatccgaatcttcacagttgcgcagctggaagataattcaattcaaatgaagaaggacttagcgacgttcctgtaccacctgcggattgaggctgaggtcgaggtcgttgaaatgcacgacagcgatatcagcgcatacacatacgaacgtacccttatgatggaacagaggagccaaatgctgagacacatgcgcttatcaaaaaccgaacgggaccgggaggctcagctggttaaggaccggaattctatgcttagattaacttccataggcagcgacgaggacgaggaaactgaaacataccaggaaaaggtgcatatgacatggaccaaggataaatacatggctagtcggggacagaaggctaaatccatggaaggattccaggatcttttaaacatgcgcccagatcagtctaatgtccgtagaatgcatacagcagtaaaattaaacgaagtcattgtgaataaatcacatgaggctaaacttgttttattgaatatgcctgggccaccacgcaaccccgagggggacgagaattatatggagtttctggaggtgctcactgaggggctggagcgggtacttctggtcaggggtggcggatccgaggttatcactatttactcttag

SEQ ID NO: 240973 - DNA, 3426 bp, synthetic construct
  misc_feature 1..3426: note = Description of Artificial Sequence: Synthetic coding sequence
  source 1..3426: mol_type = other DNA
atggcctccgttaggtttatggtgacccccacgaagatagacgatataccaggcctgagcgacacttcccccgatctttcaagtagaagttcatccagagtgcgtttttcctcacgggaatccgtgcctgaaacgtctaggagcgaaccaatgtctgagatgagtggagccactacgagtctggcaactgtggccctcgatccccctagtgaccgaaccagccatccacaagatgtcatcgaggacctcagccagaacagcatcaccggcgagcattctcagctgctggatgatggacataagaaggccaggaatgcttatctgaataacagtaattacgaggaaggcgatgagtatttcgacaagaacttagctctctttgaggaagaaatggacacacggccaaaggtgtcatctctcctgaacagaatggccaactatacgaatcttacacagggcgcaaaggagcatgaggaggcggagaatattacggagggtaagaaaaaaccgaccaagactcctcagatgggcacgttcatgggcgtctaccttccatgcctgcagaacattttcggagttattctctttttgcgactgacctgggttgtgggtacggcaggcgtcctccaggcgttcgcaattgtgttgatctgctgctgctgcaccatgctaacagccattagcatgtctgccattgccaccaatggggtagttcccgctggtgggagctattttatgatcagccgggctttggggccagagttcgggggagccgtgggtttgtgcttctaccttgggaccacttttgccgctgctatgtacattttgggtgcgatcgagatcttcctggtttacattgtgccgagggcagcaattttccactccgatgacgcattaaaggagtctgccgctatgctgaacaacatgagagtgtatggcacagcttttttagtgttgatggtgctagtcgtgttcatcggcgtcagatatgtgaacaagtttgctagcctgttcctagcgtgcgtgatcgtgagcattttggcaatctacgccggtgctataaagagtagctttgcccctccgcattttcctgtgtgcatgctgggcaacaggacgctgtcttcgagacacatcgatgtgtgctccaagacaaaggagattaataatatgacggttccctcaaaactgtggggctttttctgtaattccagccagtttttcaatgccacgtgcgacgagtacttcgtgcacaacaacgttacaagtattcagggtatacctggattggcatcaggtatcatcacagaaaatttatggagcaactatctcccgaaaggagaaattattgagaaaccttcagcaaagtcatccgacgtgctgggatcacttaatcatgagtacgttctggtggatattacaacatctttcaccctgcttgtcggtatatttttcccgtctgtgacagggatcatggcgggatccaacaggtctggtgatttgaaggacgctcagaagagtataccaatcggcacaatcctggcgatcctgaccacgtcatttgtgtatctgtctaatgtggttctgttcggggcttgtattgaaggtgtggtgctgagagacaaatttggcgacgcagtcaaaggcaatctggtagtcggaaccctctcatggccatctccctgggtgattgtaatcggatcattcttctccacatgtggtgcaggcctgcagagcttgacaggagcacctaggttgctccaggccattgcaaaagacaatatcatcccatttctgcgcgtgtttggacattcaaaagctaatggggagcccacttgggctctgttattaaccgccgcaatcgctgagctgggaatcctgatcgcgtcgctggacctggtggccccaatcctgtccatgttttttcttatgtgttacctctttgttaatcttgcgtgcgcgttgcagacattgcttcggacccctaactggcgcccaaggttcaggtattatcattgggctctttccttcatgggcatgagcatctgcttagcgcttatgttcatttccagctggtattacgcaatcgtggccatggtgatcgccggaatgatatacaagtacattgaataccagggagcagaaaaagaatggggcgatggcattcgaggcctgtctctgtctgcagccaggttcgcactgctgcgactggaggaaggacctccacacaccaagaattggcggcctcagctgctggtgctgctaaaactggacgaggacctgcatgtgaagcacccacgtctgttgacatttgcctcccagctgaaggcgggtaagggcctgaccatcgttggctccgtgattgtgggcaactttctggaaaactacggtgaggccctggctgccgagcagaccatcaagcatcttatggaagcagagaaagttaaagggttctgccagctggtggtggcggctaaactgagagagggcatttcccatcttatccagagctgcggtttaggaggtatgaaacacaataccgtcgtcatggggtggccaaatgggtggaggcagtccgaggacgcaagggcttggaagacatttatcgggacggtgcgagtgacaacagctgcacacttagctttactcgtggctaagaacatctctttctttccatcaaatgtagaacaattctccgagggaaacatcgacgtgtggtggattgtccacgacgggggaatgctgatgttattgccctttctccttaaacaacataaagtgtggagaaaatgtagtattcgcatttttaccgtggctcaactcgaagacaattccatccagatgaagaaagacctggccacgttcctataccacttaagaatagaggctgaggttgaggtggtggagatgcacgactcagacattagtgcatatacatatgagcggaccttgatgatggaacagcgctcacaaatgctgcgccatatgcggcttagcaagaccgagagagatcgagaggcacagttggtgaaagatcggaacagtatgttacgcctcacatcaatcggctcagatgaagatgaggaaaccgagacatatcaagagaaggttcatatgacctggacaaaggacaagtatatggcctctcgcggacagaaagcgaagagcatggagggcttccaggacctcctcaacatgcgaccagaccagtcgaatgtgcgcagaatgcacacagcagtcaaactcaatgaggtgatagtaaataaaagtcatgaagccaagcttgtgctgttaaatatgcccggacctccaaggaaccctgaaggcgatgagaattacatggagttcctggaggttctgaccgaaggccttgagagggtcttgctcgtgagggggggtggttccgaggtgataactatatattcctag

SEQ ID NO: 240974 - DNA, 3453 bp, synthetic construct
  misc_feature 1..3453: note = Description of Artificial Sequence: Synthetic coding sequence
  source 1..3453: mol_type = other DNA
atgcaccctcccgaaacgacaacaaagatggcgagcgtccggttcatggttacgcccaccaagatcgacgacattcctggcctgtccgatacctcacccgatctgagctcacggagctctagtcgcgtccgattcagtagtcgagagtctgttccagagacaagccgctctgagccaatgtcagagatgtcaggggctaccacaagcctggccaccgtcgctctcgaccccccttctgaccggacttctcaccctcaagatgttatcgaggacctcagtcagaatagtataacaggagagcactctcagttattggacgacgggcataagaaagcaagaaacgcttacctgaacaactctaattatgaggagggggatgagtatttcgacaagaacttggccctatttgaggaggagatggacacccgacccaaagtgtcgtccctactcaataggatggcaaactacaccaacctgactcagggggctaaggagcatgaggaagcagaaaatatcaccgaaggcaagaagaaacctactaagactccgcagatgggaacgttcatgggagtgtacctcccctgcctccagaatatattcggggtgatcttgttcctgagactgacatgggtggtgggcacagctggcgtcctgcaggcctttgctatcgtcctgatctgctgctgttgtacgatgcttaccgcgataagcatgtccgccattgctaccaatggggtcgtgccagctgggggaagctactttatgatttccagagcacttggccctgagtttggaggcgctgtaggtttgtgcttttacctgggaacaaccttcgcggctgccatgtacatcctgggtgccatcgagattttcttagtgtatatcgtgcccagagccgctatttttcacagcgacgacgcattgaaagagagtgcagctatgcttaataatatgagagtgtacggcactgccttccttgttttgatggtgctggtggtctttattggcgtgaggtatgtgaacaagtttgctagtctcttcctcgcctgtgtaattgtgtccatcctcgccatttacgctggtgcaatcaagtcttcctttgcaccaccccacttcccagtatgtatgctgggtaatagaacgttgtcctcccgacacatcgatgtttgctccaagaccaaggagatcaacaacatgacagtccctagcaagttgtggggattcttttgcaattccagccaatttttcaatgctacctgcgacgagtacttcgttcacaacaatgttacctcgatccaggggatcccaggactggcgagtggaataatcaccgaaaatctctggtctaattacctgcctaaaggcgagatcatcgagaaaccatctgcaaaatccagcgacgtcctgggttcccttaaccatgaatatgttttagtggatatcaccacttctttcactctcctcgttggaattttctttccctcagtgaccggcattatggccggatccaaccgatcaggggatttgaaggatgctcaaaagtccattccgatcgggaccatcctggctatccttactacctcttttgtttacttatccaacgtcgttttgttcggggcatgcattgagggagtggtgctgcgagataaattcggcgatgccgtgaaaggtaatcttgtcgtggggactcttagttggcctagcccatgggtgattgtgattgggagcttcttctccacgtgcggtgccggactccagtcactcactggcgctcctagactgctccaagcgatagcaaaggacaatatcatcccatttctgcgcgttttcggccattccaaagccaatggagaaccaacatgggcacttctactgacagccgctattgcagaactcggtatcttgattgccagcctcgaccttgtggctcctatactgtccatgttcttcctgatgtgctacctctttgtcaatctggcatgcgcactacagacactgctgagaacccctaactggcgacccagatttaggtactatcattgggcactcagtttcatggggatgtcgatttgcctggccctgatgttcatctccagctggtattacgccattgttgctatggtgatcgcagggatgatttacaagtacattgagtaccaaggcgctgagaaggaatggggcgatggcatccgcggactttctctaagtgccgcaaggtttgcgctccttcggctggaggaaggaccgccacacacaaaaaattggcgtccgcagttgctcgtgctcctgaagctagacgaggacctgcatgttaaacaccccagattgctcacatttgccagccagctgaaagccggaaagggcctcacaatcgtgggatccgtgatcgtcgggaatttcttagaaaactacggagaggctctggcagccgagcagaccattaagcacttaatggaggctgaaaaggtcaagggattttgtcagctagtggtcgctgctaagctcagggaaggaatatcacatctcattcagtcttgtggcttgggaggtatgaagcacaacaccgtagtgatgggttggccaaatgggtggagacagagcgaggatgcaagggcttggaagacttttatcggcactgttagagttaccactgctgcgcatctggccttgctggttgccaaaaatatcagcttcttcccgtccaacgtggaacaatttagcgaagggaatatagacgtatggtggatagtgcatgacggaggcatgttaatgcttttaccattcctgctgaagcaacacaaagtttggaggaaatgtagcattcgcattttcacggtggctcaactggaggataactctatccagatgaaaaaagacttggccaccttcctgtaccatctccggattgaggccgaggtggaggtggtcgaaatgcacgacagtgacatatctgcatatacctacgagaggactttaatgatggagcaacggagtcagatgttgaggcacatgcggctatccaaaacagagagagacagggaggctcagctggttaaagataggaacagcatgctccggctgacctccattgggtccgacgaagatgaggaaaccgagacctaccaggagaaggtgcatatgacgtggacaaaggataagtacatggcatctagaggccagaaggctaagtctatggaggggttccaagatctattaaacatgcgccctgatcagagcaacgtccggaggatgcacacagccgtcaaattgaatgaagttatcgtcaacaagagccatgaggctaaactggtacttctgaacatgcccggaccaccacgcaaccccgagggggatgaaaattatatggaatttctagaggtcctgaccgaagggctggaacgcgtgctgctggtccgcggaggtggatctgaagtgatcacaatctactcctag

SEQ ID NO: 240975 - DNA, 186 bp, synthetic construct
  misc_feature 1..186: note = Description of Artificial Sequence: Synthetic coding sequence
  source 1..186: mol_type = other DNA
atgagtgagatgtccggggctacgacaagcttagcgacagtggccttggatccacctagcgatagaacctcccatcctcaggatgtcattgaagacctatcgcaaaatagcataaccggagaacactcccagttgctcgatgatgggcacaagaaagcaagaaatgcttacctgaataactcctag

SEQ ID NO: 240976 - DNA, 2889 bp, synthetic construct
  misc_feature 1..2889: note = Description of Artificial Sequence: Synthetic coding sequence
  source 1..2889: mol_type = other DNA
atggatactcgacctaaggtatcctccctactgaacaggatggctaattataccaatctgacccaaggcgcaaaggagcacgaagaggccgaaaacattacagagggaaaaaagaagccgaccaaaaccatgttgactgcaatctcaatgagtgctatcgctacaaatggcgtcgtcccagcaggagggtcttactttatgatcagtcgcgctctgggaccagagtttggtggcgcagtcgggctgtgtttctacctgggcaccacgttcgcggcagctatgtatattttgggagccatagaaatatttctcgtctacatcgtcccaagagctgctattttccactccgatgacgccctgaaagaaagtgccgcaatgctgaacaacatgcgcgtgtatggaactgcatttctggtgcttatggtcttagtagtctttatcggagtgcgatatgttaacaagttcgctagcctgtttctggcttgtgtaatagtgtcaattctggctatctacgctggcgctattaagagcagtttcgctccaccccattttccagtttgcatgctggggaatcgcactctcagcagtcgccacatcgacgtctgcagcaaaaccaaagagattaataacatgacagtgccctctaagctctggggatttttctgcaattcttctcagttcttcaatgccacttgcgatgaatatttcgtacacaacaatgttacgtctattcaggggattcctggcctggccagtggcatcattactgaaaacttatggtctaattacttacccaagggagagataatagagaaaccctccgccaagtcctcagacgtccttggttcgctcaaccacgagtacgtattagttgatatcaccacatccttcaccctcctggtaggaattttcttcccaagtgtgacgggtatcatggcagggagcaaccggagcggtgacttgaaggatgctcagaagtcgatccccataggaactatcttagccatcctgactacgagctttgtgtatctttcgaatgtcgtcctcttcggagcgtgtatcgaaggtgtggtcctacgggacaaattcggcgacgcggtcaagggaaacctggtggtgggcacactcagttggccttcaccttgggttattgtcataggttcctttttcagcacctgcggcgctggactccagtccttgacaggagctcctcgactattgcaggctattgcgaaagacaatatcattccgtttcttcgggtgtttggtcatagtaaggccaatggtgagcctacttgggcactcctcctcacagctgccatagctgagctgggcatattaatcgccagcttagatttggttgctccaatcctcagtatgttctttcttatgtgctacctgttcgtcaacttagcctgcgcgcttcagaccctgctgaggactccaaactggcggcctagatttcgctattatcactgggctttgagcttcatgggcatgagcatttgcttggccctgatgtttatctcgagctggtattacgccattgtggctatggttatagcaggtatgatttataagtacatcgagtatcaaggtgctgagaaggagtggggagacggtatcagaggcctctccctgtcggcggctcggttcgcactgctgcgcttggaggagggccctccccataccaaaaactggagaccacagcttctggtcctgcttaagcttgacgaagatctacacgtgaagcatcccaggctgttgacgtttgcttcccagctcaaagccggaaagggtttgaccatagtgggctcagtaattgtagggaacttcctagagaactacggcgaggcgctagctgccgagcagactatcaagcacttgatggaggcggaaaaagtaaaaggcttctgccagctcgtcgttgccgctaagctcagggaagggattagccatctaatacaatcctgtggccttggaggaatgaagcacaacacggttgtgatgggttggcctaacggatggagacagagcgaagatgcaagagcctggaaaacctttatagggacagtgagagttactacagcggctcacctagctctgctagtggccaagaacatctcattctttcctagtaatgtagagcagttttcagaaggaaatatcgacgtttggtggatagtgcacgatggcggaatgctaatgctcctgccattcctgctcaaacagcataaggtgtggagaaagtgtagcatcaggatttttacagtggcacagcttgaagataattcaatccagatgaagaaggatctggcaacatttctgtatcatttacggatcgaggctgaggtcgaagtggtggagatgcacgattcagacatctccgcatacacttacgaaagaacgttgatgatggagcagagatctcagatgttgagacatatgcgacttagcaaaaccgaacgggacagagaggcccagttggtcaaagacaggaacagcatgctccggctcactagcatcggcagtgatgaggatgaagagaccgagacctaccaggaaaaggtgcatatgacctggactaaggacaagtacatggctagtcgtggacagaaagctaaatccatggaaggatttcaggacctgcttaatatgaggcccgaccagtccaatgttagaagaatgcacactgcggtgaagctgaacgaagtcattgtgaacaagtcacacgaagccaagctggtgctgctcaacatgcctggtccgcctagaaatcctgagggggacgagaattacatggaattcctcgaagtgttaacagagggtctggaacgggtgttgcttgtgaggggcggaggcagcgaggttattacgatctattcctag

SEQ ID NO: 240977 - DNA, 3453 bp, synthetic construct
  misc_feature 1..3453: note = Description of Artificial Sequence: Synthetic coding sequence
  source 1..3453: mol_type = other DNA
atgcacccacctgagacgacaacaaaaatggcctctgtgcgctttatggtcacacctaccaaaatagacgacattcccggtctatcagacacatcccctgatttaagtagccggtcatcatctcgagttcgcttctcctcgcgagaatcggtgcccgaaacctctcgctctgagcctatgtccgagatgtccggcgctaccacaagccttgccacagttgccttggatccccctagcgaccgcacatcccatccacaggatgtaattgaggatttatctcaaaattccataacaggcgagcattcgcagcttctggacgacggccataagaaagcccgaaacgcatacctgaataattccaattacgaagaaggagatgaatactttgataaaaacctggctctgtttgaagaggaaatggataccagacccaaggtcagcagccttctgaaccgaatggccaattacacaaatcttactcagggtgcgaaagaacatgaggaggcagagaatattaccgaagggaagaagaagcccacgaagactccacagatggggactttcatgggcgtatatcttccttgcctgcagaatatcttcggcgtgattctcttcctaagactcacatgggtggttggcaccgccggagtgctacaggcttttgctatcgtgctgatttgttgctgttgcaccatgctcacagcaatctccatgtccgcaatagcaactaacggtgtggtgccggcagggggaagctatttcatgattagcagggcattgggtcctgagtttggtggcgctgtaggcctgtgcttttatttgggcactaccttcgcagccgctatgtacatactgggcgctatagaaatctttctcgtgtacatcgtgcctcgcgctgccatatttcattcagacgacgcactaaaagaatccgccgctatgctgaataacatgcgcgtgtacgggacagcgttcttggtgctgatggttcttgtagtgttcatcggagttcgatatgttaacaaatttgcctctctgtttcttgcatgtgttatcgtgtcgatcctggctatatatgccggtgccatcaagtcttcattcgcgcctccacattttcctgtgtgtatgctagggaatagaaccctgagcagccgccacattgatgtctgtagcaagactaaagaaatcaacaacatgactgtcccctccaaactgtggggctttttttgcaacagctctcagttcttcaacgccacgtgtgatgagtacttcgttcacaataacgtaacaagcattcagggcataccagggctggccagtgggataatcacggagaatttgtggagtaattacctgccaaaaggagagatcattgaaaaaccctccgcaaaatctagcgacgtattgggttccctgaatcatgagtacgtgctcgtggacatcacgacttcgttcaccttgctcgtagggatcttctttccatcagttacgggaatcatggctggtagcaaccgatctggtgacctcaaagacgcacagaaatccattcctattggtaccattctcgctatcctcactaccagcttcgtatatctttcaaatgtagtgttgtttggcgcatgcattgagggtgtggttttacgcgacaaattcggagatgctgtcaagggcaacttagtggttgggacactgtcctggccatctccttgggtgatcgtgatcggcagctttttctccacttgtggcgctgggctgcagagcctcacaggcgctccacggttgctgcaagctattgccaaggacaacattatccctttcttgagggtgtttggacactctaaagccaacggcgagcctacttgggccctgttgctcacggccgctattgccgaactgggcattcttatcgcgtccctagaccttgtggcgccaattctttccatgttctttctgatgtgttacttattcgttaacttggcttgcgcacttcagacactcttgcggaccccaaactggagacccagattccggtattaccactgggctttgagctttatgggcatgtctatctgcctggctctcatgttcatctcatcctggtactatgcgatagttgcgatggtaatagccggtatgatttacaaatacattgagtatcagggtgcagagaaggagtggggcgatggaatcaggggcttgagcttgtctgcggctcgtttcgcccttctgcggctggaggagggcccaccccacaccaaaaattggagaccacagcttttggtgctgctcaaattggacgaggatctccatgtgaaacatcctagactgctgacatttgcgtcccaactcaaagcaggcaaaggtctgacgattgttgggtccgtgatcgtcgggaacttcctcgagaattacggcgaggcattagctgccgagcagacaataaagcatctcatggaagctgagaaagtgaagggcttctgtcagttagtggtcgcagcaaagctgagagagggcatcagccacctgattcagtcatgcggcctaggcggaatgaagcataatactgtagtaatgggctggcccaacggatggagacaatccgaagacgccagggcatggaagactttcatcggcacagtccgtgtcacaacggcagcgcatttagcacttctcgtggccaagaacatctcgtttttccccagcaacgtagaacagttctctgagggtaatatcgatgtctggtggatcgttcatgacggtggcatgctgatgcttttgccgttcctcctgaaacaacacaaagtgtggcgtaagtgcagcattaggatctttaccgtcgcccaactggaagacaatagcatccagatgaagaaagatctggccacctttctgtaccacctccgcatcgaggcagaggtagaagtcgtagaaatgcacgatagtgacatttcagcgtacacctacgagcggacgctaatgatggagcagaggagccagatgttgcgccatatgcgactgtccaagacggagagagacagggaggctcagttagtgaaagatcggaattccatgcttcgactgacaagcatcggaagcgacgaagacgaagagactgagacctaccaggagaaagtgcacatgacctggactaaggacaaatatatggcctctcgcggacagaaagcaaaaagcatggaaggctttcaggatctgttgaacatgcgccctgatcagagcaatgtccgcagaatgcatactgcggtcaagcttaacgaagttatagtaaacaagagccatgaagccaagttagtactgttgaacatgcctgggcctccccgtaatcccgagggtgacgagaactacatggagttcctggaggtgctgactgagggcctggaaagagtcctgctggtgcgtggaggcggttccgaagttatcacgatatattcctag

SEQ ID NO: 240978 - DNA, 459 bp, synthetic construct
  misc_feature 1..459: note = Description of Artificial Sequence: Synthetic coding sequence
  source 1..459: mol_type = other DNA
atggcgtcagtgcggtttatggttactccaaccaagatcgacgacattccgggactgagcgacaccagtccagatctgtcctcaaggagctcgtctcgggtgcgtttttcatctcgcgaaagcgtcccagagacatctagaagcgaacccatgagcgaaatgtccggcgctacaacaagtcttgctaccgtcgcactcgaccctccctctgaccgaacatcccatccccaagacgttattgaagatttaagccagaatagcatcaccggcgagcacagccagctcctggatgacggacataaaaaggccaggaatgcttatttaaacaattccaactacgaagagggcgacgaatacttcgacaagaacctcgcactgttcgaagaggagatggacacccgccctaaggtcagctcactgctcaatagaatggctaattatacaaatttgactcagtag

SEQ ID NO: 240979 - DNA, 3252 bp, synthetic construct
  misc_feature 1..3252: note = Description of Artificial Sequence: Synthetic coding sequence
  source 1..3252: mol_type = other DNA
atgccaaccaatttcaccgtggtaccggtggaggctcacgcagatggtggtggtgatgagactgcggagcgaaccgaggcccctgggacaccagaaggccctgagccggaaagaccaagccctggagacgggaacccaagagaaaattcccccttccttaacaatgtagaggtggaacaggaatccttttttgaaggaaagaatatggcactgtttgaagaggaaatggattctaaccccatggtatctagtttgcttaacaagcttgcgaactacacaaatttgagccaaggcgtggtggagcatgaagaggatgaggagtcacgcaggagggaggcgaaagcccctaggatgggcacctttattggtgtgtacttgccctgcttgcagaatatcctgggagttatcttgtttctacgcttgacttggattgtcggagtggccggagtgttggagagtttcttgatcgtagctatgtgctgtacatgcaccatgctgacagcaattagcatgtccgcaatcgctaccaatggagtagtacccgctggcggatcttattacatgatcagcaggtcactgggtccagaatttgggggagccgttgggctgtgtttttacctggggacaaccttcgcgggagcaatgtatatcttgggtaccatagagatatttttaacctatatctctccaggtgctgcaatcttccaagctgaggccgctggaggagaggccgcagccatgctccacaatatgcgcgtttatggcacatgtacactggtgctaatggccctggttgtattcgtgggcgtgaaatatgtgaacaagctcgcccttgtgtttcttgcttgtgtggtcctaagcattctggctatctacgctggcgttatcaaaagtgcattcgacccccctgacattcccgtatgtctcttgggcaacagaaccctgtcacggcgatccttcgacgcctgtgtgaaggcctacggtattcacaataatagcgctacttccgccctttggggacttttctgcaacggatctcagcctagtgccgcatgcgacgagtacttcatccagaataatgtgacggaaatccaaggcattcccggagccgcatcaggggtctttttggaaaacctgtggagcacttacgcacacgccggagcatttgtggagaagaagggcgtcccatcagtgcccgtcgcggaagaaagtcgggctagcgccctgccatatgtgctgactgacatagctgcgagcttcaccttacttgttgggatctacttccctagtgtcacaggcattatggccggtagcaaccgctctggcgacctgaaggacgctcaaaagagcatacccaccggtacaatcctcgcaatagttactacatcatttatttacctgagctgtattgtccttttcggcgcttgcatcgaaggcgtggtcctgcgggacaagttcggggaggccttacaaggcaatttggtaattggcatgctggcttggccatctccttgggtgatcgtgatcgggagttttttctctacctgtggcgctggccttcagtctctgacaggtgcccctcgcctgttacaggccattgccagggacggcatcgttccctttctccaggtttttggccacggaaaagccaacggagaacccacatgggcacttctgcttacagtactgatatgtgagaccggaatcctcatcgcttccttggactctgtcgctccaatactatccatgtttttcctcatgtgctacctcttcgtgaatctggcctgcgctgttcagaccctgctgaggactccgaattggcggcctagatttaaattttaccattggactttatcattcctgggaatgagtctatgccttgcactcatgttcatttgctcttggtactatgcattgtccgccatgctgatcgcaggttgcatctacaaatacatcgaatatcgcggagctgaaaaagagtggggagacggcatccgtggcctatctcttaatgcggctcgatatgctttgctgcgggtagaacacggtcccccacacactaaaaattggagacctcaggttcttgtaatgttgaacctggacgctgaacaggctgttaagcatccccgtctgctgtctttcacctctcaattaaaggctggcaaaggactgacaatcgtgggatccgtgctggaaggcacctatttagataagcatatggaggctcagcgcgcagaggaaaacatcaggtctcttatgtcaacagaaaagacgaagggattttgccagctggtggtgtcctcttccctaagagacggtatgtcgcatcttatccaatccgcaggactgggcggattgaagcataatactgtactcatggcatggcctgcctcttggaaacaggaagacaatccgttttcgtggaagaattttgtggacaccgtacgagacactactgcagctcaccaggcgttattagttgcaaagaatgtggattcttttccccagaaccaagagagatttgggggaggccacatcgatgtgtggtggattgtgcacgatggaggcatgctcatgctgttgccgtttctgctccggcagcataaggtttggcgcaagtgcagaatgcggatcttcactgtggcccaggtcgatgacaattcaatccagatgaaaaaggatctccagatgtttctttaccacctgcggattagtgcggaggtagaagttgtggagatggtcgagaatgatatatctgcatttacatacgagcgaactctgatgatggaacaaagatcacagatgctgaaacaaatgcagctgtccaaaaacgagcaggagagagaggctcagttaatacatgacagaaataccgccagccatacagccgcagccgctagaacccaggccccacccactcctgataaggtgcagatgacgtggacaagagagaaacttatcgcagaaaagtaccgtagccgcgacaccagcctgtctggctttaaggacttgtttagtatgaagcctgaccagtccaatgttcgtcgaatgcacaccgccgtgaagctgaatggcgtcgtcctgaataagtcccaagatgcacaactggtcctgctgaatatgcccggtccccctaaaaacaggcagggtgacgagaactacatggaattcctggaggttttaactgaaggactgaacagggtcttgcttgtcaggggtggcggaagggaggtcataactatctacagttag

SEQ ID NO: 240980 - DNA, 801 bp, synthetic construct
  misc_feature 1..801: note = Description of Artificial Sequence: Synthetic coding sequence
  source 1..801: mol_type = other DNA
atgcccaccaatttcactgtggttccagttgaggctcacgccgacggtgggggagatgagaccgctgagcggaccgaggcaccaggtaccccagaaggaccggagcctgaacgacctagccccggagacggcaatccgcgtgagaactctcctttcctcaataatgttgaagtcgaacaggagtcctttttcgaggggaagaatatggcactgttcgaggaagaaatggacagtaatccaatggtaagcagcttattaaacaaactggcgaactacactaatctcagccagggcgtcgtggaacatgaagaggatgaagaatcacgtagaagagaggcaaaagcaccccgaatgggcacttttatcggtgtttatctcccgtgtctccaaaatattctgggggtgatattatttttacgacttacatggatcgtaggagtcgccggtgttcttgaatcctttctgatcgtcgccatgtgttgcacctgcacgatgcttactgccatcagtatgagcgccatcgctacgaatggcgtggtccctgcaggcggatcatactacatgattagcagaagcctcggaccagagttcggcggtgccgtgggactgtgtttttatttagggaccacttttgctggagccatgtacattctcggaactattgagatcttcttaaccggcaccgaagacggagttggtagcctgggcctagggctggcgcagggcaataggcggcagacacatctttctcccagtgacgcggcacaggccgctcacggtgccagctatggttccttctag

SEQ ID NO: 240981 - DNA, 3066 bp, synthetic construct
  misc_feature 1..3066: note = Description of Artificial Sequence: Synthetic coding sequence
  source 1..3066: mol_type = other DNA
atggcagaactccccaccactgagacacctggcgacgccaccctttgtagcggaaggtttacaatcagtaccctgttaagctccgatgaacccagcccccctgccgcatatgacagctcgcatccttcccacctgacccactccagcacattctgcatgcgcacatttgggtacaacacgatcgacgtcgtgcccacatatgagcactatgctaactccacacagccaggcgagcctcgtaaagtgaggcccactctggccgatctacatagcttcctgaagcaagagggtaggcacctgcacgccttggcatttgactcccggccttcccacgagatgacggatgggctggtggagggtgaggccggaacatcatcggagaagaaccctgaggagcccgttcggttcggatgggttaaaggcgtgatgatccgttgcatgttgaacatttggggtgtgatcctctacctgcggctgccctggatcaccgctcaagctggaatagtcctgacgtggatcattatccttcttagtgtcactgtgaccagcataaccggtctcagtatttcagctatttctactaatggaaaagtcaagtccggcggaacgtactttctcatctcacgcagcctgggaccagagctcggaggatctatcggactgatctttgccttcgctaacgctgtgggggtggctatgcatacagtaggatttgccgagaccgtgcgagaccttcttcaagagtacggtgctcccatcgtggatcctataaacgacatccgcatcatcgccgttgtgtctgtgaccgtgcttctcgcaatcagtctggccggtatggaatgggaaagcaaagcccaggtccttttctttctcgtgataatggtgtcatttgctaattatctagtgggcacactgatcccaccatccgaagacaaagcatcaaagggatttttttcctacagggccgatattttcgtgcaaaatctggtgcctgactggaggggacctgacggcactttcttcgggatgttttccatttttttcccttctgccacgggtatcctagctggcgctaacatctccggtgacctgaaagatcccgctatcgctatacctaagggaactctcatggctattttttggacaacaataagttatttagccatttcagccactatcggctcctgtgtggtgcgcgatgcctcaggtgttctcaacgacacagttaccccgggttggggagcatgtgaggggctggcgtgttcctacggctggaattttaccgaatgcacacaacagcattcctgtcattacgggctcatcaactattaccaaacaatgtcaatggtgtctgggtttgcacctctgatcactgcaggaattttcggcgctactctgagttccgccttagcctgcctcgtgagcgccgcaaaagttttccagtgcttatgtgaggatcagctgtatccattgataggtttctttggcaaggggtacggcaagaataaggagcccgtgagaggctacctcctcgcgtacgctatcgccgttgccttcatcataatcgcggagctcaacacaatcgctccgatcatttcaaacttttttctttgttcttatgcactgatcaacttctcttgttttcacgcctcaatcaccaactcgcccggttggcggccatctttccagtactataacaagtgggccgcactattcggggctattatctctgttgtgatcatgtttctgctcacctggtgggcagcgctgatcgcaatcggcgtagtgcttttcctgctgctctacgtcatctataagaagcccgaggtaaattggggaagtagtgtccaagccggtagctacaatctggcactgagctatagtgtggggcttaatgaggtcgaagaccacattaaaaattatcgtccccagtgtctcgttcttacaggaccccctaactttcgaccggcactggtggatttcgtcgggacattcacacggaatctatccctcatgatctgcggccatgtgctcattgggccacataaacaacgcatgcccgagctacagctgatagccaacgggcacacaaaatggctgaataaacggaagataaaagctttctatagcgatgtcattgccgaggatctcaggaggggggtacagatccttatgcaagccgctggtctgggaaggatgaagcctaacatcctggttgtgggatttaaaaaaaattggcagtcggcgcatccagccaccgtggaggactatattggcatcctgcacgacgcttttgattttaactacggcgtgtgtgtcatgcgtatgagagaggggctgaatgtgtctaaaatgatgcaggctcacatcaaccctgtcttcgaccccgcagaggacggtaaggaggcctcggcccgtgtcgatcctaaggcactcgtgaaggaggagcaggcgacaactatttttcagtccgagcaagggaagaaaacaattgacatttactggctgttcgatgatgggggactaaccctgttgatcccatatcttctggggcgaaagcgcagatggagcaagtgcaagatacgagtgtttgttggcggacagatcaacaggatggaccaagaacgaaaagctatcatctccctgctgtccaagttcaggctgggatttcacgaggtacatattcttcccgatatcaaccagaatccgagggctgagcacactaagagattcgaagatatgattgcgcctttcagactgaacgacggattcaaagacgaagcaacagtgaatgagatgcgacgcgattgtccttggaaaattagcgacgaggaaataaccaaaaacagagttaagtctcttcggcaagtaaggctcaacgagattgttctggattactctcgggatgctgccttgatcgtcatcactctgccaatcgggcgaaaaggcaagtgcccaagcagcctgtacatggcttggctcgagaccttaagccaggatttgagaccgcctgtcatcctgattcgcggtaatcaagagaatgtgctgacattctattgtcagtag

SEQ ID NO: 240982 - DNA, 3090 bp, synthetic construct
  misc_feature 1..3090: note = Description of Artificial Sequence: Synthetic coding sequence
  source 1..3090: mol_type = other DNA
atggccgaactgcctactacggagacaccaggtgatgccaccctttgctcgggaagatttacgataagtaccctcttgtcttcagatgaaccatctcctcctgcggcatacgattccagtcacccgtcacacctgacccactccagtacgttttgcatgcgaaccttcggctataatactattgatgtggtccccacatacgagcactacgccaatagcacccagccaggcgagcccagaaaggtgcgcccaaccctcgctgacttgcattcttttctgaaagagggcagacatctgcacgctctcgccttcgattcccgtccttcacatgaaatgactgacggcctagtagaaggcgaagcgggaacgtcatctgagaagaatccggaagagccagtccgattcggctgggtcaagggggtcatgattcggtgtatgctcaacatctggggcgtgatcctctatctgagattaccctggattacggcccaggccggaatcgtgctgacatggatcataatcctcttaagtgtgactgtgacatccataactggactaagcatttccgctatatctacaaacgggaaggtgaaatcaggcggaacctactttttgatcagcaggtccctcggacccgaactggggggttctattggactgatttttgcgttcgctaatgctgtaggagtggctatgcacacagtggggtttgctgagaccgtacgcgacctcttgcaggagtatggcgctcctatcgtcgatcccattaatgacatcaggataatcgccgtggtaagtgtgacagtgctgctggctatctcgctggctggcatggagtgggaaagcaaggcccaggtcctcttctttttggtgatcatggtgtctttcgcaaattacctggtcggtacattaattccgccttccgaggataaggcctctaaaggcttcttctcataccgagccgatatctttgtgcagaatttggtgcccgactggagagggccagacggtacattttttggaatgtttagcatatttttcccttctgccacagggattctggccggagctaatatcagtggcgacctcaaggatcccgctattgccattcccaaaggaacactgatggcaattttttggacaacaatctcgtaccttgctatttcagccaccattggctcatgcgtcgttcgggacgcctccggagtgttaaacgacacagttacccccggttggggggcttgtgaagggcttgcctgttcttatgggtggaattttaccgaatgcacgcagcagcacagttgtcactatgggctgatcaattattaccaaacgatgagcatggtctccggtttcgcacccctcattactgctggcatctttggagctactctgtcatcggcattggcctgcctggtatctgccgctaaggtgttccagtgtctgtgcgaagatcagctgtatcccctgatcggattctttggcaaaggttatggaaagaacaaagagccagtgaggggttacctgttggcttatgcaatcgcagtagctttcatcattatagctgagcttaacacgattgcccctattatcagcaatttctttctgtgctcatacgcgctcataaatttctcatgttttcacgcctcaataaccaatagcccagggtggagacccagttttcagtactacaataaatgggccgctctttttggagccatcatttccgtagtcataatgttccttctcacctggtgggcagccctgatcgccattggagtagtgctctttttgctcctgtacgtcatatataagaaaccggaggtcaactggggtagtagcgtacaggctgggtcgtacaacttagcgctcagctactccgttggactgaatgaggtggaggatcacatcaagaattataggccccagtgcctggtacttaccggacctcccaacttccgcccagctctcgtggacttcgtgggaacgttcacacgaaacctgagtctgatgatctgtggtcacgtgttgattgggcctcataagcaacgcatgcccgaacttcagctgatagcaaatgggcataccaaatggctcaacaagcgtaaaattaaggctttttatagcgatgtcatcgctgaggacttgagaaggggcgtgcagatcctgatgcaggctgctgggcttggcaggatgaagccaaacattttggtggtgggttttaaaaagaactggcagtcagcccaccccgcaacagtggaggactacatcggaattcttcatgatgctttcgacttcaattacggcgtgtgcgtcatgaggatgcgggagggcctgaatgtatcaaagatgatgcaggcccacatcaatcccgtctttgatcccgcagaggatggaaaggaggctagtgctcgcggagctaggccctccgtgtcgggggcattggacccaaaggcactcgtgaaagaagagcaagctaccaccattttccagtcagagcaagggaagaagaccatagacatatactggctgtttgacgatggaggacttaccttgctaattccctacctattagggcgtaaacggaggtggtcaaaatgtaagatacgggtgtttgtggggggtcagatcaataggatggatcaggagcggaaggcgattatatcgctgctctccaagttccgtctgggatttcatgaggttcatattcttcctgatattaaccagaacccaagagccgaacacacaaagcgtttcgaggatatgattgcgccattcaggctgaacgatggttttaaggatgaggcaacagtgaatgagatgaggagagactgcccatggaagatttctgacgaggaaataacaaagaaccgcgtgaaatctctgcggcaggtacgcttaaatgagatagtgcttgattactctcgggacgccgcattaatcgtgatcaccctacccatcggacggaaagggaagtgtccctcctccctgtatatggcatggttggagaccctcagtcaggaccttagaccaccggtaatattgatccgcggtaaccaggagaatgtgctgaccttctattgtcagtag

SEQ ID NO: 240983 - DNA, 3093 bp, synthetic construct
  misc_feature 1..3093: note = Description of Artificial Sequence: Synthetic coding sequence
  source 1..3093: mol_type = other DNA
atggccgaactcccaaccaccgaaacgccaggggatgcaacactctgttcagggagatttacaatctcaacactgctttctagcgacgagccatcacctccagccgcttacgactcctcccacccgtctcacctcactcattcctctacattctgcatgagaacgttcgggtataacaccatcgatgtagttcctacatatgaacattacgcaaattctactcagcctggagagcctcgcaaggtccgcccaaccttagccgaccttcactcatttctgaagcaggaaggcagacacctgcacgctcttgctttcgatagtaggcctagccacgaaatgaccgacggactagtggagggagaggctggcacgagctcagaaaagaatcctgaagagcccgtacgcttcggatgggtgaagggcgtcatgattcgctgcatgttgaatatctggggcgtaatcctgtacctgcggctgccatggattactgcccaggcaggaatcgtcctgacatggatcataatcctgctgtcagtcaccgtaacttccataacaggtcttagcatcagcgcgatatccacaaacggtaaggtgaagagtggtggcacctattttctaatcagtaggtcgctaggcccagagttggggggttctattggactgattttcgccttcgctaacgccgtgggcgtcgcgatgcacaccgtaggatttgcggaaaccgtccgagatcttctgcaagagtacggagctccaattgtggacccaatcaacgatatccgaattattgcagtcgtcagcgtgacagtcttactcgcgatatctttggcgggtatggagtgggagagcaaggcccaagtgctcttctttctggtgattatggtctcttttgccaactacctcgtcggaacactcatccccccaagcgaagacaaggcctccaaagggtttttttcatacagggcggacattttcgtgcagaatcttgtaccagactggcgcggaccggacgggacattctttggcatgttttctatcttctttccaagcgctacgggcattcttgctggtgccaacatctctggcgatctgaaggatcctgccatagctattccaaaaggcactcttatggctattttctggacgacaatttcgtacctcgccattagtgctaccatcgggtcttgtgtcgtccgtgatgcatctggggtgctcaatgacacggtcacgcctggctggggagcatgcgaagggctggcatgctcttatgggtggaattttacagaatgcacccagcagcattcttgccactatgggctgattaattactaccagacaatgtctatggtgagcgggttcgcgcctttgatcacggccggaatcttcggtgccaccctcagttctgccttggcttgcctggtctccgcagccaaggttttccagtgtctgtgtgaggatcagttgtatcccctcattggcttctttgggaaaggctatggtaaaaacaaggagcccgtcagggggtatctgctcgcttacgctatcgctgtcgccttcataatcatcgccgagttaaataccatcgcgccaatcattagcaatttctttctgtgttcttacgcactgataaatttcagttgctttcatgcctctattactaattcccccggatggcggccatcctttcagtactataataagtgggcagcactttttggggctatcatatcggttgtcatcatgttccttctcacttggtgggcagcactcatcgctatcggagtcgtgctgtttttattgttgtacgttatctacaagaagcctgaggtgaattggggctcttcagtgcaggccggaagttacaacctcgcgctcagctacagcgtggggttaaacgaggtagaggaccatataaagaattacagaccccagtgcctggtgctgactgggccacctaacttcagaccagccttggtggactttgtcgggacatttaccaggaacctctcactgatgatctgtgggcatgtgcttatcggaccccataaacaaagaatgccagagctgcagcttattgccaatggacataccaagtggctgaataaacgtaaaatcaaggccttctattctgatgtcatagcagaggatttgcgtaggggagtccagatcctgatgcaagccgctgggctaggcaggatgaagccaaacattcttgtggtgggcttcaagaagaactggcagtcagcgcatccagcaacagttgaagattatattggcattttgcacgatgcgttcgacttcaattatggagtctgcgtgatgagaatgcgggaaggcctgaatgtgtccaagatgatgcaggcacatattaaccccgtctttgatccggcagaggatgggaaagaagccagcgcccgaggcgctagaccttccgtctctggggctctcgaccccaaagctctggtaaaagaggagcaggctaccactattttccaatccgaacaggggaaaaaaaccatcgatatctactggctgttcgatgacggaggcttaactctcctgataccgtacttattaggcaggaagcggaggtggagcaaatgtaaaatccgggttttcgtcggtggacaaataaatagaatggaccaggagcgaaaagccatcatctctctcttatcgaagtttcggcttggatttcacgaggtgcacattctgcctgatatcaaccagaacccacgggctgaacacaccaaacgattcgaggatatgattgctccctttcggctgaacgacgggttcaaggatgaggccaccgtcaacgaaatgagacgtgattgcccgtggaagatttccgacgaggaaatcacaaagaaccgggtaaagagtcttcgccaggtgagactcaacgagatcgtgctggactatagccgggacgccgcactaattgtgatcactctccctatcggcaggaaaggtaaatgccccagttctctgtacatggcatggctcgagacattgagtcaggatttaaggccaccagtcatactcattaggggtaaccaggaaaatgttttgactttttactgccagtag

SEQ ID NO: 240984 - DNA, 3090 bp, synthetic construct
  misc_feature 1..3090: note = Description of Artificial Sequence: Synthetic coding sequence
  source 1..3090: mol_type = other DNA
atggccgagttgccaactacagagactcccggtgacgccaccctttgtagtggtaggtttaccatctccacccttttaagtagcgacgagccttctcctccagccgcatatgatagtagccacccgtctcatttaacacactcgtccactttttgcatgcgaacttttggttacaatactatagatgttgtccctacatatgagcactatgctaactctacccagccaggagagccccgaaaggtgcgccctacattggcagacctgcacagctttctgaaggagggtcgccacttgcacgcattagcctttgactccagaccatctcatgaaatgactgacggtctggtcgagggagaagctggcacatcttccgaaaagaatccagaggagcccgtgaggttcggatgggtgaagggagttatgatccggtgcatgctgaatatatggggggtcatcctttacttgagactcccctggatcactgcacaggccggtatcgttctcacgtggatcatcatcctgttgagcgtcactgtcaccagtatcactgggctcagtatttctgccatatcgactaatggcaaagtgaagagcggcggaacgtattttctgatcagtcgatcccttggtccagaacttgggggatctatcggcttgatcttcgcattcgctaatgccgtgggtgttgccatgcatacggttggttttgccgaaacggtaagagatctactgcaggaatacggcgcacccattgtggaccctatcaacgatattcggattatcgccgtcgtctcggtcacagttctgcttgcgatttctctggcagggatggagtgggagtcaaaggcccaggtcctcttcttccttgtaattatggtgtccttcgccaactatctggtgggtaccctcattccaccctctgaggacaaagctagcaaaggctttttctcttaccgcgcagacattttcgtccagaatctcgtcccagattggcgtggtcctgatgggaccttttttgggatgttttccatcttctttcctagcgcaactggcattctcgctggcgctaatatttctggcgacctgaaagatccggctatcgccatccccaaaggtacactgatggcaatattctggacaacaatctcttatctcgctatttctgccaccataggttcgtgcgtagtgagagatgctagtggcgtgttgaatgacacagttacacctggctggggggcatgcgaaggactggcctgctcctacgggtggaacttcaccgaatgcactcagcaacatagttgtcattacggcctgattaattactaccagaccatgagcatggtttccggcttcgccccactgatcaccgcaggaatttttggagccaccttaagctctgccttagcttgtttggtatcagctgcaaaagttttccaatgcttgtgtgaagatcagctatatccccttatcggcttcttcgggaagggatacgggaaaaacaaggaaccggtgcgagggtacctgctcgcctatgctattgcggtggcgttcatcatcatagcagagctgaatacaatcgcaccaatcatttctaacttctttttatgtagctatgccttgatcaacttctcatgtttccatgcctccattaccaatagccctggatggcgcccttcttttcagtattacaataagtgggccgctctgttcggcgctataatctctgtagttatcatgttccttttgacgtggtgggccgctctgatagctattggcgtcgtcttattcctcctcttgtatgtgatctacaaaaagcctgaggtgaattggggatctagcgttcaggctgggtcttataatcttgcactttcttactcagtagggctaaacgaagtggaagaccatatcaagaactacagaccgcaatgtctcgtcctcacaggaccaccaaattttcgcccagctttggtggatttcgtgggcacctttacgagaaacctcagtttgatgatttgcgggcacgtgctgattggtcctcataagcagagaatgcctgaattacagctgatcgctaacgggcatacaaagtggctgaacaaacgcaaaattaaagcgttttactctgacgtgatcgcagaagatttgcggagaggtgttcagattttgatgcaggccgctggccttggccgaatgaaacctaacatcctggttgtgggtttcaagaagaactggcagagcgctcaccctgctactgtcgaggactatatcggaattctccacgacgcgttcgactttaactatggcgtatgcgtaatgagaatgcgcgaagggctcaacgtctccaaaatgatgcaagcgcatataaatcccgtgttcgacccagctgaggacgggaaggaagctagcgcaaggggggctcggccaagtgtgagcggggctctggaccctaaagctcttgttaaggaagagcaggccaccacaatcttccagagtgaacagggtaaaaagactatcgacatctattggctgtttgatgacggcggtcttactctgctgatcccatatctcctgggtcgcaagcgcagatggtccaagtgtaaaattagagtgttcgtcggcggtcagatcaacaggatggatcaggaacggaaggcgataataagtctcctgtctaagttccgcctcggtttccacgaggtgcatatcctgcccgatatcaatcagaacccacgagctgaacacaccaaacggttcgaggatatgatcgccccttttcgtctgaacgacgggttcaaagatgaggccactgtgaatgaaatgagacgggactgtccttggaaaatcagcgacgaggagatcactaaaaatagggtaaaaagcctgagacaggtcagactgaacgaaatcgtcttggactacagccgggacgctgccctgattgtgatcacactcccaatcggtagaaaggggaagtgtccttcttccctgtatatggcttggcttgagacactgtcacaagatctgcgtccgcctgttattctaataagggggaatcaggagaatgtccttaccttttattgtcaatag

SEQ ID NO: 240985 - DNA, 1293 bp, synthetic construct
  misc_feature 1..1293: note = Description of Artificial Sequence: Synthetic coding sequence
  source 1..1293: mol_type = other DNA
atgagtctgaataactccagcaatgtgttcctggacagcgtaccgagcaacaccaatcggttccaagtctccgtgatcaatgagaaccatgaatcctccgccgcagcagacgacaacacggacccaccacactatgaggagactagttttggggacgaggctcagaaacggcttcgcatttccttccgcccaggaaaccaggaatgctacgacaattttctgcagtctggggaaacagctaagactgatgctagctttcatgcatatgacagccatacgaacacctactatctgcagacttttggccacaatacaatggatgctgtcccaaagattgagtattaccgaaacaccggcagtatctctggacctaaggttaataggccgtcactcctagagatccacgaacagctggctaaaaacgtggcggtgaccccctcctccgccgatcgcgttgccaacggagatggtataccaggtgacgaacaggctgaaaataaggaagatgatcaagctggtgtcgtcaaattcggttgggtcaaaggcgtcctggtaaggtgcatgttaaatatctggggggtcatgctttttatcaggcttagttggattgtcggcgaggctgggatcggcctaggtgttctcatcatattactttccacgatggtgacaagcattacgggcctgagcacctctgctatcgccacaaacggctttgtcaggggcggaggcgcttattacctgattagcagatctttgggacccgaattcggaggtagcattggtctgattttcgccttcgctaatgctgtagccgtggctatgtacgtggtcgggttcgcggaaaccgttgtagatctgctaaaggagagtgactcaatgatggtcgaccctactaacgatatcagaattattgggtctattacggtggtgattctcttaggaatctcagtggccggaatggaatgggaggctaaggcgcaggtcattctcctcgttatcctgctcattgccatcgccaatttcttcattggaactgttatacccagcaacaatgaaaagaagagccgcggattcttcaactatcaggcatcaattttcgctgaaaactttggcccacgattcacaaaaggtgaaggctttttctccgttttcgcaattttcttccctgctgccacggggatccttgccggagcgaacatctcaggagaccttgaggctctgagaaagcagggcgcttccccgttgccccagggcgctcagtcacgcaggcgcaggcagacaagtctgatttag

SEQ ID NO: 240986 - DNA, 3300 bp, synthetic construct
  misc_feature 1..3300: note = Description of Artificial Sequence: Synthetic coding sequence
  source 1..3300: mol_type = other DNA
atgtccttgaataacagctccaatgtttttctagactcagtcccttccaatactaatcgattccaggtgagtgtgattaatgaaaaccacgagtcttccgccgcagctgacgacaataccgatccccctcattacgaggaaactagtttcggggatgaggctcagaaaagacttaggattagctttcgcccaggaaatcaggagtgctacgacaacttcctccagagcggcgaaacagctaaaactgatgcttccttccatgcctatgacagccataccaacacctactacctccagacattcggacacaataccatggatgcggtgcccaagatcgagtactataggaataccggatctatcagtggacctaaagttaacagaccctcacttctcgagattcatgaacagctggccaaaaatgtagctgtgactccatcatcagctgaccgtgtggcaaacggcgatggaattcctggggacgaacaggccgagaacaaagaagatgatcaggctggcgttgtgaagttcggatgggtgaaaggtgttctagtgcggtgcatgctgaacatttggggcgtgatgttgttcattaggctgagctggattgtgggcgaggctggtataggactgggcgtgctgatcattttactgtctaccatggtgactagcatcacgggattaagcacctcggctatagcaactaatggttttgttcgcggaggcggagcttactatctgattagcagaagtcttggccctgaattcggcggttctattggccttattttcgctttcgccaacgccgtggcagtcgccatgtatgtcgttggcttcgccgaaacagtggtcgacttgcttaaagaaagcgatagtatgatggtggaccccaccaatgacatcaggataatcggaagcattaccgtggtcatcctgcttggtattagtgtcgctggcatggaatgggaagccaaggctcaggtgatactgctggtgatcctgctcatcgctatcgcgaactttttcatcggtactgtgataccgtctaataacgagaagaaatccagagggttctttaattaccaagcatccatcttcgccgagaattttggccctcgcttcactaaaggggaagggtttttctcggtgttcgcaatcttcttccctgctgcaacaggcatccttgctggcgcaaacatttccggcgatctggaagatccgcaggatgccatccccagggggacaatgctagcaatcttcatcactaccgttgcctatttaggggtggctatatgcgtgggtgcatgtgtcgttcgagatgccacgggtaacatgaacgacactataatctccggtatgaattgtaacggttcagccgcatgcggacttggatacgatttcagtcggtgcagacacgaaccttgtcaatacgggttaatgaataactttcaagtgatgtctatggtgtctggcttcggccctctcatcacagccggaatcttctctgcaaccttgagtagtgcattggcctcgctggtctccgccccaaaagtgttccaagcgctgtgcaaggataacatttacaaagcactgcagttttttgccaagggttacggtaaaaataatgagcctctgaggggatatattctgaccttcctaatcgctatggctttcatcctgattgcagagctgaacaccatcgccccaatcatctctaacttcttcctggcttcttacgccctaatcaatttcagttgctttcacgcgtcgtacgccaaatcacctgggtggaggccagcgtatggaatctataatatgtgggtgtccctgttcggtgccgtcctgtgttgcgccgtgatgttcgtcataaattggtgggcagccgtaatcacctacgtgattgaattcttcctctatgtgtacgttacctgtaaaaagccagacgtgaactggggctcatcgacccaggctcttagttatgtgagcgcgctggataatgcactagagctgaccactgtcgaggatcatgttaaaaacttcaggccgcagtgcatcgtgctcactggaggacccatgacccggcctgccttgcttgacattacgcacgcattcacgaagaactctggcctgtgtatttgttgtgaggtctttgtaggaccaagaaagctctgtgtgaaggaaatgaattctggcatggccaagaaacaggcctggttaatcaagaataagatcaaagccttttatgctgccgtagctgcagactgctttagggacggtgtgcggtcactactgcaggcctctggcctggggaggatgaagccaaataccctcgtgatagggtacaagaaaaactggagaaaggcaccactgacggagatcgaaaattacgttggtatcattcacgatgcctttgactttgaaatcggggtggtgattgtgaggatttcacagggatttgacatatcacaggtcctgcaggtccaagaggagctcgagagactggaacaggagcgactggccctagaagcaacgattaaggataacgagtgcgaggaggaatcaggaggcatacggggactgttcaagaaagccggaaaattgaatatcactaaaactacacccaagaaagacggctccattaatacctcacaaagcatgcacgttggcgaattcaatcaaaaactggtggaagccagcacccagtttaaaaaaaagcaggaaaagggcaccatcgacgtctggtggctctttgacgatggtggcttaactttgctgatcccttacattctgacacttcgaaaaaaatggaaggattgcaaactgcggatctacgtgggtggcaagatcaaccgcatcgaggaagaaaaaatcgtgatggcgagccttctttctaagttccgcataaaattcgctgatattcatattattggggatattaacatccggccaaacaaggaatcttggaaagtttttgaagagatgattgagccctatagattacatgaatcttgcaaggacttgaccaccgcagagaagctcaaacgtgaaacgccctggaaaatcaccgacgcagagttggaagccgtgaaagaaaaatcttaccgtcaggtgcggctcaatgaacttctacaggagcattcacgtgcggcaaatctgatcgtgctaagcctgccagtggccagaaaaggctctatatccgaccttctatatatggcttggttagagatcctgacaaagaacttgccccctgtgttattagtaaggggaaatcacaagaacgtgcttaccttctactcttag

SEQ ID NO: 240987 - DNA, 3300 bp, synthetic construct
  misc_feature 1..3300: note = Description of Artificial Sequence: Synthetic coding sequence
  source 1..3300: mol_type = other DNA
atgagtcttaacaactcatcaaatgttttcctcgactctgtgccaagcaacacaaacaggtttcaggtctctgtgattaacgaaaaccacgaaagcagtgccgcagctgacgacaacaccgacccaccacactacgaagagaccagttttggtgacgaagcacagaagcgcctgcggatttcattccggcctggcaaccaggagtgttatgacaattttctgcaatcaggggaaacagccaaaaccgacgcctcattccatgcttatgatagtcacactaacacctattacctccagacctttggtcacaacacaatggatgccgtgcccaagatcgagtattacaggaatacaggcagcatctccggcccaaaggtgaacaggccgtctcttctggagatccacgaacagctggctaagaacgtggccgttacaccttccagcgccgatcgcgtcgcaaacggcgacggtatccccggtgacgaacaggccgagaataaggaggatgaccaggctggagttgtgaaattcggctgggtgaaaggcgtgctagtacggtgcatgcttaatatctggggggtgatgttatttatcagattatcatggatagtgggcgaggctggaattgggttgggtgtgatcatcatagggctctccgtcgtggtcactaccctgactggcatctccatgtcagctatttgtacaaacggggtcgtgaggggcggtggcgcttactacctgatctcaaggtctctcggtcctgagttcggcggttcgatcggcctaatctttgccttcgcaaatgcagtggccgtggctatgtacgtggttgggttcgctgaaaccgtggttgacctcctgaaagaaagcgacagtatgatggtagacccaacaaacgatattagaattatcggcagtataacggtggtaattctcctgggaatctccgtggcagggatggagtgggaagcaaaagcacaggtgatcttgctggtcattctgcttattgccatcgcgaatttttttattggcaccgttatcccatctaacaacgagaagaagtctagaggcttctttaactatcaagcttctatattcgccgagaactttggacccagatttaccaaaggcgaaggctttttcagtgtgtttgccattttctttcctgccgctaccgggatcttagctggggctaacatctcaggcgatcttgaggacccacaagacgccattcctcggggaactatgcttgccatcttcataacaacagtggcatacttgggggtggcgatctgtgtgggggcttgcgtggtacgcgacgcaacaggcaacatgaacgacaccattatctccggaatgaactgtaatggctccgctgcgtgcgggctcggctatgatttttccaggtgccgccacgagccctgtcagtacggcctcatgaacaactttcaagtcatgtcgatggtgtctgggttcgggcctctgatcactgctggaatatttagcgccactctctcaagcgcccttgcaagcctagtgagcgcaccgaaggtgttccaagccctctgtaaagacaacatctataaggcattgcaattcttcgcaaaaggctacgggaagaataacgagcccctgagagggtacatcctgacattccttattgctatggcatttattctgatcgccgaacttaatactatcgcccctataatttcaaatttctttttagcatcttacgctctcatcaacttttcctgttttcacgctagctatgcaaaatcacccggatggcgcccagcctacggaatctataacatgtgggtttccctgttcggcgctgtgctttgttgtgcagtgatgttcgtcataaattggtgggctgccgttattacatatgtcatcgaattctttttatacgtgtacgtgacatgcaagaaaccagacgttaactggggctccagcacccaggctctttcctacgtctccgcattagacaatgctctcgaattgaccacggtcgaagatcacgtgaagaatttccgccctcagtgcatcgtccttacgggtgggccaatgaccagaccggcactgctcgacattactcatgcctttactaagaactctggattgtgtatctgctgcgaggtgttcgttggtcctcggaaattgtgtgttaaagagatgaactctggtatggcaaagaagcaggcctggctgatcaaaaataaaattaaagcattctatgccgctgtggcagccgactgcttccgggacggcgtgaggtcacttttgcaggcgtctggcctcggcagaatgaagcccaatacgctcgtaatcggctataagaaaaattggcgtaaagccccactcaccgaaatcgaaaactatgtgggcattatccacgatgcatttgacttcgagataggtgtcgtgattgtgcgcatatcccaggggtttgatatctcacaggtgctgcaggtgcaggaggagctggagcgactcgagcaggaaaggcttgcattggaagcaacaattaaagacaacgagtgtgaggaggagagtggagggatacgaggcctattcaagaaggctggcaagctgaatattaccaaaacaaccccaaaaaaggatggatccattaacacctctcaaagcatgcacgtcggcgaatttaaccaaaagcttgttgaagccagcacccagtttaagaaaaaacaggagaagggcaccattgatgtgtggtggttatttgatgatggtggcctgaccctgctgattccatacatcctgactctgcggaaaaagtggaaagactgcaagctaagaatttatgtcggaggaaaaatcaacagaatagaagaggaaaagatcgtgatggcctcactcctctctaagtttaggattaagtttgcggatatccacataatcggagacatcaatattcgccctaataaggagagctggaaggtgtttgaagagatgatcgaaccctataggctgcacgaaagttgcaaagatcttaccacggcggagaaactgaagagggaaaccccatggaagatcaccgatgccgagctggaggccgtgaaagagaagtcgtacaggcaggtccgtctgaacgaactgctgcaggagcacagtcgggcagcgaacctgatcgtgctgtctctccccgtggcacgaaagggcagcatatccgacctcttgtatatggcctggctggagatcttaacaaagaatctacctccagttctgctagtgaggggtaatcataaaaacgtgctgaccttctattcgtag

SEQ ID NO: 240988 - DNA, 1782 bp, synthetic construct
  misc_feature 1..1782: note = Description of Artificial Sequence: Synthetic coding sequence
  source 1..1782: mol_type = other DNA
atgctaaatatctggggagtgatgctatttattcgcctctcttggattgtgggagaagcaggaatcggactgggtgtactgattatcctcctgtccacgatggtaaccagtattaccggacttagcacgtcagccattgccaccaacgggttcgtaagaggcggaggagcctattacttaatatctagatcgctgggtccggaattcggcggttccatcgggctcatctttgcctttgctaatgcagtggctgtcgctatgtacgtggtgggctttgcagaaaccgtggtggacttacttaaggaaagcgatagtatgatggtggaccctaccaacgatatcagaattataggctcaattaccgtggttatcttactgggtattagtgtggccggaatggaatgggaggcgaaggctcaggtaattcttctcgtcattctgttaatcgccatcgccaactttttcattgggacagttattccttccaataacgaaaaaaagtcccgtggatttttcaactatcaggcctcaatctttgccgaaaatttcggcccaaggttcacgaaaggagagggtttcttctccgttttcgccatcttctttcccgcagctaccggtatcttggccggagccaatatctcgggcgacctagaagaccctcaggacgcaatcccgagggggacaatgcttgctatctttattacaaccgttgcttaccttggtgtggctatttgcgtcggcgcatgcgtagtgagagacgcaacagggaacatgaacgacaccattatcagcgggatgaattgtaacggcagcgcggcatgtggcttgggctatgacttttcgcgatgtcgccacgagccttgtcagtacggactaatgaataacttccaggtgatgtcaatggtgagcgggtttggtcccctgatcaccgcgggtattttctcagcaacccttagcagcgcactggcatcattggtgtccgcaccaaaagtgtttcaggcactgtgtaaagataacatttataaggcacttcaattcttcgctaagggttatggaaagaacaatgaacctctgagggggtacatcctgaccttcctgatagcgatggcttttatacttatcgctgaactgaacaccatcgcgcctatcatcagcaatttttttcttgccagctacgcgctaataaacttctcctgcttccacgcgtcctacgctaagtctcccggttggcgaccagcgtacggaatttataacatgtgggtgagtttattcggcgcagtgctgtgctgcgccgtcatgttcgtgatcaattggtgggccgcagtcattacatatgtgattgagttttttctgtacgtgtacgtaacctgcaaaaaacctgatgtgaattggggttcatccacacaggccctgtcttacgtgtcagcccttgacaacgccctggaactgacaacagtggaagaccacgttaagaattttaggccacagtgcatcgtgttaaccgggggaccgatgacaagacccgctcttttggacattacacatgccttcactaagaactcggggctgtgtatatgctgtgaagtgttcgtgggccctaggaagctgtgtgttaaagagatgaattctggcatggctaaaacaggacttgcctacaaggaacagaatcagggtttcttgtgctgtagcggcggtcgcctcttccaggggtggtgcccaaagagcagttccggcttacggctacgcaagaatgagacgaagcacagcggagactggatctag

SEQ ID NO: 240989 - DNA, 540 bp, synthetic construct
  misc_feature 1..540: note = Description of Artificial Sequence: Synthetic coding sequence
  source 1..540: mol_type = other DNA
atgaggacaatgcgagctgttcagctgcagatgactatcctgacacaccacatcatgaagaaacccctgttgggaatgaagctgaggaaagacagtgaatccgccctggggcttgggatccggtctgcgatgacaatcagcagcaaacaggctctaagttatgtgtctgcgctggacaacgccttggagctgactactgtggaagaccatgtaaagaacttccgtccccagtgtatcgtattaacaggaggccctatgacccgcccagcactgctagatatcacccatgcttttaccaagaactcaggtctgtgcatatgttgcgaagtgtttgtgggcccaagaaaattgtgcgtcaaagaaatgaatagcggcatggccaagaagcaggcctggcttatcaaaaataagattaaagcgttctacgcagccgtagcggcagattgtttcagagatggcgtccggtcacttttacaagcttctggcctggggagaatgaagccaaacaccttggttataggctacaaaaagaattggtag

SEQ ID NO: 240990 - DNA, 3300 bp, synthetic construct
  misc_feature 1..3300: note = Description of Artificial Sequence: Synthetic coding sequence
  source 1..3300: mol_type = other DNA
atgagcttgaataacagttccaacgtctttttagatagcgtgccaagtaatacaaaccgtttccaggttagcgtaatcaacgaaaatcacgagtcaagcgccgcagccgacgataataccgacccaccccattatgaagaaacctcatttggcgacgaggcccaaaaaaggcttcgcatttccttccggccaggaaaccaggagtgttatgacaacttcctgcaaagtggtgagaccgcaaagaccgatgcatcttttcatgcttatgacagtcatactaacacctactatttgcaaacctttgggcacaacacaatggacgccgtcccaaagatcgaatactaccgaaacaccgggtctatatccggcccaaaggttaataggccatccctgctggagatacacgagcaattggcaaaaaatgtcgctgtcacccccagctccgccgatcgcgtggccaatggcgatggcattcccggagatgagcaagctgaaaataaagaggacgatcaggctggagttgttaaatttgggtgggttaaaggagtgttggtgagatgtatgctgaacatctggggagtcatgcttttcatccggctctcctggatcgtgggggaagctggaattggattgggggtgctcatcattctgctctctacaatggtcacctctattacagggttgagtacaagcgctattgctactaatgggttcgttcgcggagggggagcctactacttgatctctcgctctctgggaccagaattcggcggatcgattggtctgatttttgcattcgccaatgccgttgcggtggccatgtatgttgttggatttgctgagaccgtcgtcgacctcttaaaggagtccgattccatgatggtagatcccactaatgatatccgtatcatcggatctataaccgtcgtgattctgctggggattagtgtggcaggcatggagtgggaggcaaaggcacaggtaatcctgttagtcattctcttaattgcgatcgcaaattttttcatcgggaccgtgataccaagtaataacgagaagaagagccggggattttttaattaccaggccagcatctttgcagaaaatttcggacccaggttcactaagggcgagggatttttcagtgtgtttgccattttcttcccagcagctactggaatactcgccggtgccaatatctctggcgaccttgaggacccccaggatgctattcccagaggcaccatgcttgcaatctttattaccacagtcgcctatttgggggtggcgatatgtgtgggagcctgtgtggtgcgcgacgccactggcaatatgaacgacactatcatctcaggcatgaattgtaatggatcagccgcttgcgggcttggctatgattttagccgctgcaggcatgagccatgccaatatggcctgatgaacaattttcaggtgatgtcaatggtctcggggtttgggccactgataaccgccggaattttttctgcgactctctcttctgctctggccagcctcgtgagtgcccctaaagtttttcaagcattatgtaaggataacatttacaaagccctgcagtttttcgcaaaaggctacggaaagaataacgagccattgcgagggtacatcttaacctttctcatagcgatggcctttattctcattgcagagctcaacacaatagctcctattatttctaatttttttctggcaagctatgctttaatcaacttctcttgcttccacgcttcctatgcaaagtccccgggttggcggcctgcatacggtatttataacatgtgggtgtccttatttggcgcagttctctgctgcgcggtgatgtttgtcatcaattggtgggccgctgtcatcacttacgttattgagttctttttgtatgtttatgtcacatgtaaaaagcccgatgtcaactggggaagttcaacacaggccttgtcgtatgttagcgccctggacaatgcccttgaactgaccacggtggaggaccacgtgaaaaatttccggccacagtgtatagtccttactggcggtcccatgacacgcccagcattgcttgacatcactcacgcgttcacaaagaattccggcctttgcatttgctgcgaagtgtttgtgggtcccagaaaactttgcgtcaaggagatgaatagcggcatggccaagaagcaagcctggcttatcaaaaataaaattaaggctttttacgctgcagttgcagccgattgctttcgcgatggtgtgagatcactcctccaggcttcaggcttagggagaatgaagcctaacacactggtgattggctataagaagaattggagaaaagccccactgacggagatcgagaactacgtgggcattattcatgacgccttcgatttcgaaattggagtggtaatcgtacggattagtcaaggcttcgacataagtcaggtgcttcaggtgcaggaagagctggagcggctcgagcaggaacgacttgccttggaggccacgataaaagataatgagtgcgaagaggagtccggcggtattagaggattatttaaaaaggctggcaaacttaatatcacaaagacaactcccaagaaggatggctccataaacacatcacagtctatgcacgtcggagagtttaatcagaaattggtcgaagcatctacacaatttaagaagaaacaggaaaagggaactattgatgtgtggtggctttttgatgacggaggccttaccctcctgataccctatattcttaccctgagaaaaaagtggaaggactgtaagttaagaatctacgtgggtggaaagattaaccgtatcgaggaggaaaaaatagtgatggccagtctccttagcaaattccgaattaagtttgccgatatccacatcattggtgacataaacattagacctaataaagaatcatggaaagtctttgaagaaatgatagagccatacaggttacatgagagctgtaaagatcttactacagctgagaaattgaaaagggagacaccctggaagatcactgatgctgagctcgaggccgtgaaagagaaaagctaccggcaagtaaggcttaacgaactacttcaggagcattcaagggccgctaatttaattgtacttagccttcccgtggctcggaaagggagcatctcggacctgctctacatggcctggctcgagattctgacaaaaaatttgcctccagtgctgttggtcagaggcaaccacaaaaacgtgctgacgttctacagctag

SEQ ID NO: 240991 - DNA, 1947 bp, synthetic construct
  misc_feature 1..1947: note = Description of Artificial Sequence: Synthetic coding sequence
  source 1..1947: mol_type = other DNA
atgctcaatatttggggcgtcatgctgttcattagactgagctggatcgtgggggaggccggaatcgggcttggcgttctcatcattctattatctaccatggttacctctattacagggctgtctactagtgcaattgctaccaatggcttcgtgcgcggaggaggcgcttattacctgattagcaggtctcttgggccagagtttggaggatccatagggctcatcttcgctttcgctaatgctgtggcagttgccatgtatgtggtgggcttcgcggaaaccgtcgtggatctcctgaaagagagcgattcgatgatggtggacccaactaatgacattcggataatcggtagcataacagtcgtgatccttctgggcatctctgtcgcaggcatggaatgggaagcgaaggcccaagtgatcctgctggtcattctgctcatagccatagctaactttttcattgggacagtgatcccctctaataatgagaaaaagagccgcggattctttaactaccaggcatccattttcgcggagaatttcggtcctcgctttactaagggggagggcttttttagtgtatttgccatcttcttcccggcagcaacaggcatccttgctggagcaaacatcagcggggacctcgaggatccacaagacgccattcccaggggtacaatgcttgcgatctttattaccaccgttgcttatttgggagtggctatttgcgtcggggcatgcgttgtacgcgatgccacgggaaatatgaatgacacaattatctctggcatgaactgtaacggttctgccgcatgcggtctggggtacgacttttctcgatgccgtcacgagccatgtcagtacggcctaatgaacaatttccaggtgatgtcaatggtgtcaggctttggcccactcattactgccggaatcttcagtgctaccctaagcagcgccctggccagcctcgtgtccgctccgaaggtgttccaggctctttgcaaggacaatatctacaaggctctccagttctttgccaaagggtacggaaagaataacgaaccgctgagagggtacattctgacatttctcatcgccatggccttcatcctgatcgctgaactcaacacaattgcccctattatcagcaacttcttcctagcaagctatgcgctgataaacttctcttgtttccacgcgtcatatgccaagtctccagggtggaggcctgcctacggcatttacaacatgtgggtgagcctgttcggtgccgtgctgtgctgtgctgtgatgtttgtgattaactggtgggcagctgtgattacttacgtcatcgagtttttcctgtacgtttacgtgacctgcaagaaacctgatgttaactggggctcctccactcaggcattgagctacgtgtctgctctcgacaacgctttagaactgaccactgttgaggatcacgttaaaaattttcgtcctcaatgcatcgtgctgaccggcggtccgatgactaggcccgcattgcttgatattacccatgcttttacaaagaattctggcctgtgtatctgttgcgaagtttttgtcggccctagaaaattatgtgtgaaagagatgaattctggtatggcaaaaaagcaggcttggctgatcaagaataaaattaaagccttctacgccgctgtggcggcagattgcttccgagacggcgtccggtcactgctgcaggcgagcggcttggggagaatgaaaccaaatacactggtgattggttacaaaaaaaattggcgaaaggcccctctgacagagatcgagaactacgtgggcatcattcacgatgccttcgacttcgaaattggggttgtgatcgttcgaatttcgcaagggtttgacatttcccaggtgctccaggtgcaggaggagcttgagcgactggagtag

SEQ ID NO: 240992 - DNA, 3639 bp, synthetic construct
  misc_feature 1..3639: note = Description of Artificial Sequence: Synthetic coding sequence
  source 1..3639: mol_type = other DNA
atggagccaagacccaccgcaccgtcgagcggggcacctggtctggcgggagtgggcgaaacaccaagtgctgcggctctggccgcagcacgtgtagaactgccaggcaccgcagtcccctctgtaccagaagacgcagctccagcctctcgcgacggaggtggtgttcgcgatgagggcccagctgcagcaggtgacgggctggggagacccctcggccctactccttctcagagtcgattccaggtcgacctcgtgtcagagaacgctggaagagctgcagcagccgcagcagctgcggcagctgctgccgctgctgcgggtgcgggtgcaggagccaagcagactccagccgatggagaggcaagcggtgaaagtgagcccgctaaggggtccgaagaggcgaaggggaggttcagggtgaacttcgtcgaccccgctgccagctcatcggcagaggacagcctgagcgatgcggcaggtgttggtgttgacggcccaaacgtctcgtttcagaacggcggtgataccgtgttgtccgagggaagctccctgcatagcggcggagggggaggctccgggcaccatcaacactactactacgacacccacactaatacatattacctgagaactttcggtcataacaccatggacgcagtccccaggatcgaccattaccggcacaccgcggctcagctgggggagaagctgcttcgtcctagcctagccgagttacacgatgagctggaaaaggagcccttcgaggatggttttgccaacggtgaagagtccactcccacccgggacgcggtcgtgacttatacggccgagtcaaaaggtgtcgtgaaattcgggtggatcaagggtgtcctcgttagatgtatgctgaacatctggggagtgatgctgttcataagactgagttggattgtcggacaagccggtatcggcctgtccgtgttggtgataatgatggccacagtggttaccaccatcaccgggttaagtaccagtgcgattgcgacaaatggattcgttcggggaggcggagcgtactatctgatcagtcggtctctgggacctgagttcggtggggcaattggtcttatttttgcgtttgccaatgcagtcgcagtagctatgtatgtggtggggtttgctgaaactgtcgtggagttgttaaaggaacattcaatcctgatgattgacgaaataaacgatattcgcataatcggagcaatcacagtagttatcttgctaggaatttctgtagcaggaatggagtgggaggctaaagcacagattgtcttgctggtgattctccttctggccatcggagacttcgtgataggcacgtttatccctctcgagtccaaaaagcctaaggggttctttgggtacaagagcgaaatcttcaacgaaaatttcgggcctgacttccgggaggaggaaaccttttttagcgtcttcgccattttctttccagcggctaccgggatactggccggtgcgaatatttcaggagacctcgccgatccccagtccgcaatcccgaagggcacgctgcttgctattcttataacgacattggtttatgttggcatcgcagtcagtgttggttcctgcgtggtacgagatgctacaggaaatgtcaacgacacgatcgtgactgagttgacaaactgcacttctgctgcttgcaaactcaatttcgatttcagctcatgtgagtcgagcccctgtagttatgggttaatgaacaacttccaggttatgtccatggttagtggtttcactccactgatcagtgccggtatcttttcagctactctgagctcagcgctggcttctctagtaagcgccccaaaaattttccaggctttgtgtaaggacaatatatatccagcattccagatgtttgctaagggctacggaaaaaataacgaacccttgcgcggatacatattgaccttcctgattgctctaggtttcatcctcatcgcagaactgaacgtcattgctcccatcatttcgaacttctttctggcatcttatgcgctgatcaatttctctgtgtttcacgcctcacttgccaagagcccagggtggagacccgcatttaagtactacaatatgtggattagcctcctcggtgccattctttgttgcattgtcatgttcgtgatcaattggtgggctgccctgctgacctacgtgatcgtgctcggtttatacatctatgtgacttataaaaagccagatgtgaactggggctcgtctactcaagcattaacctacctcaacgccctgcagcacagtatcaggctgtccggagtggaagaccacgtgaagaatttcaggccacagtgtctggtaatgactggggctcctaattctagaccagctctgctgcatctcgtgcacgacttcacaaagaacgtggggctgatgatttgtggccacgtacatatgggccctcgcagacaggccatgaaagaaatgagcatcgatcaggctaaataccagagatggctgatcaagaataaaatgaaagctttttacgctccggtgcacgccgacgacttaagagagggcgcacagtatcttatgcaggccgcaggcctgggtcggatgaaacccaacacccttgtacttggcttcaagaaggactggctacaggctgacatgagagacgtggacatgtacatcaatctgttccatgatgccttcgatatccagtatggtgtggtagtaatccgactcaaggagggtctggatataagtcatctgcagggccaggaagagctgctgtctagtcaggagaagagcccaggaacgaaagatgtagtagttagcgttgagtattcaaaaaagtctgacctagacacatcaaaaccattatctgaaaaacccattacccacaaggtagaagaagaagacggaaaaaccgccactcagcccctactcaagaaagaaagtaaagggcctatcgttcctctcaatgtggccgaccagaagctgcttgaggcgagtactcagtttcagaaaaaacaggggaagaacacaattgatgtgtggtggctctttgacgatggcggtttaacgcttctcattccttacctgctcacaactaaaaagaagtggaaagactgcaagattagagttttcatcggaggcaaaatcaataggatcgaccacgaccgcagagcgatggctacactcctgtccaagttccgtatagacttcagtgacatcatggtcttaggcgatatcaacacgaaaccgaagaaggagaatattatagcttttgaggaaattatcgaaccctaccggctacacgaggacgataaggaacaggatatcgccgataagatgaaggaagacgagccgtggcggattacagacaacgaacttgaactgtacaaaactaagacataccgccagattaggcttaatgagctacttaaagagcactcatcgacagccaacatcatcgtgatgagcctccccgttgcacggaaaggagctgtgtcttctgcactgtacatggcctggttagaagccttatcaaaggatctgccgcctattctgcttgtccgcggtaatcaccaatccgtgctgactttctatagctag

SEQ ID NO: 240993 - DNA, 3591 bp, synthetic construct
  misc_feature 1..3591: note = Description of Artificial Sequence: Synthetic coding sequence
  source 1..3591: mol_type = other DNA
atggaacctagacccacagcgccatccagcggtgcccctggcttagcgggtgtcggggagactccaagtgctgcggcactggctgcagctagggtggagttgcctggaactgctgtgcctagcgtgccagaggacgcagctcccgcatccagagatggtggcggtgttagagatgaagggcctgccgcagccggtgacgggttggggcgtcctctgggcccaacaccaagccagagcagatttcaagtcgatctggtgtccgaaaatgccggacgcgctgccgctgctgccgctgctgcagccgctgctgcagcggcagcaggtgcgggagcaggtgccaagcaaacgcccgcagacggggaagcgtccggtgagtccgagccagcgaagggctctgaggaagcaaaaggcagattcagggttaatttcgttgaccctgctgcgagttcctctgctgaggactccttgtctgacgcagctggagtcggggtcgatggtcccaatgttagcttccagaacggaggtgataccgtcctgagcgaggggtcctcactccacagtgggggagggggtggaagtggacatcaccaacactactactatgacactcacacaaatacatactacctgcggactttcggacacaataccatggacgctgtccctaggatcgatcattatagacatacggctgcccaattgggtgagaagctacttcggccatctctggctgaactacacgatgaactggaaaaagagccattcgaagacggcttcgcaaatggagaggaatctacgccaacccgcgacgccgtggtgacgtataccgccgaaagcaagggtgttgtgaagtttggatggattaaaggggtattggtcaggtgtatgttgaacatttggggggtaatgcttttcatccgcctttcatggatagtggggcaggcaggaataggcttatccgtgctcgtgataatgatggccactgtggtaactaccattaccggattatctacctccgcaatcgctaccaatggctttgttcggggtggaggggcatattaccttatctctcgctcgctaggccctgagtttggcggagccatcggcctaatcttcgctttcgctaacgccgtcgccgtagcaatgtacgtcgtcgggtttgctgagacggtggtagagctgctaaaggagcacagtatcttaatgattgacgaaattaacgatatacgcataatcggtgcaatcaccgtcgtcattttgttgggcatctccgtggctggaatggagtgggaggcaaaagcgcagatcgtgcttctcgtgatacttctgctggcgattggcgactttgtcattggaacgttcatccccctggaaagtaagaaacctaagggatttttcggctacaagtcagagatatttaatgaaaacttcggcccagatttcagagaggaagaaacatttttcagcgtgtttgctatattctttcctgccgctaccgggattctggccggtgccaacatcagcggcgatctggcggatccgcagtcagcaatccctaaaggcactcttctcgctattctgattactaccctggtgtatgtggggattgcagtgtctgtgggttcatgtgtagtgcgtgatgcaaccggaaacgtcaacgacacaatcgtgaccgaacttaccaactgcacctccgccgcatgtaagctgaactttgatttctcctcctgtgagtcctcaccctgctcctatggcctgatgaataactttcaggtgatgagcatggtcagcgggttcaccccgctcatcagcgcaggtatcttctctgccacgctgagctctgccctggcctctttagtgagcgcgcctaagatattccaagctctttgcaaggataatatttatcccgctttccaaatgttcgctaaggggtatgggaaaaataatgagcccctccgaggctacatcctgaccttcctgatagccttaggattcatcttgatcgcggagttaaatgtcatcgccccaataatcagcaactttttcctcgcgtcttacgccctgatcaacttttccgtgtttcatgcctccctcgccaaatctcctggatggcggcctgcctttaaatactacaatatgtggatttccttgttgggtgccatcctttgttgtattgtcatgtttgttattaattggtgggcagctcttctgacctacgtgattgttttagggctgtatatctatgtgacttacaagaagcctgatgtgaactgggggagtagcacccaggccctcacatacctgaatgctctccagcattccattcgactgtcgggagtcgaggatcatgttaaaaactttaggcctcagtgtttggtgatgactggcgcacccaattcaagacctgcgctgctgcatctcgtgcatgacttcacaaaaaacgtggggctcatgatatgcggacatgtccatatggggccaagaagacaagctatgaaggagatgtccatcgatcaggccaagtaccaacgctggcttatcaaaaataaaatgaaggctttctacgctcctgtccacgccgacgatctgagagaaggtgcacaatatctgatgcaagcggcaggattgggccgaatgaagccgaatacactcgtgcttggttttaaaaaggattggctgcaggccgacatgagggacgttgatatgtacatcaatctgttccatgatgcattcgacatccagtacggcgttgtggtaatcaggcttaaagagggcctggatatttctcatctgcaaggccaggaagagctactgtcctctcaggaaaagtctcctgggacgaaggatgtcgtggtaagcgtagagtatagcaagaagtccgatttggatacatctaaacctttatctgaaaagcctatcacccacaaggagagtaaaggacccatcgtgcctctgaacgtcgcagatcagaaattgctcgaagcctccacacaatttcagaagaaacaaggcaaaaacacaatcgatgtgtggtggctgttcgatgacggaggtctcacactcctgattccatatctcctcacgaccaaaaaaaaatggaaagactgcaaaatacgggtcttcatcggaggcaaaatcaacaggattgaccacgaccgtagagcgatggcaaccttgctctccaaattccgcatagacttttctgatataatggtgttgggtgacataaacactaaaccgaaaaaagagaacatcatcgctttcgaggagataattgaaccatatcggctgcatgaggatgataaggagcaagatattgcagacaagatgaaggaagacgaaccatggagaatcaccgacaacgaactggagctgtacaaaacaaagacctaccggcagatccggctgaacgagctgctgaaagaacattcctctaccgcaaacatcatcgtaatgtctttgccagtggctcgcaagggggctgtgtcctctgcgctgtatatggcctggctggaggccctgtctaaagatctgccacccatccttctcgttcgtggcaatcatcaatctgtgctaacattctattcatag

SEQ ID NO: 240994 - DNA, 1788 bp, synthetic construct
  misc_feature 1..1788: note = Description of Artificial Sequence: Synthetic coding sequence
  source 1..1788: mol_type = other DNA
atgaagttctttagctatattcttgtatatcgtaggttcttgtttgtggtattcacagttctcgtactactgcccctcccaatagtgctgcatacaaaggaggctgaatgtgcctacaccctattcgtcgtggctactttttggcttacagaggcattgcccctcagcgtcacggcgttgcttccatcgctaatgctgcctatgtttggaattatgccgagtaaaaaggtggcatcagcctatttcaaggactttcatctgttgctgataggcgtgatctgcttagctacttctattgaaaaatggaacctgcacaagaggattgcactgaaaatggtgatgatggtgggtgtcaatcccgcatggctaaccctcgggttcatgtctagtacagcattcctgagtatgtggctgtctaataccagcaccgcggctatggttatgccaatcgccgaagcagtcgtgcaacaaatcattaatgctgaagcagaggtggaagcaacacagatgacctactttaatgggtccaccaaccacgggctggagattgacgagagcgtcaacggacacgaaatcaacgagcgcaaggagaaaaccaagcccgtgccaggctataacaatgatacggggaaaatcagcagcaaggtggagctggaaaaaaatagcggtatgaggaccaagtatcggacaaagaaagggcatgtgacccggaaactcacgtgtctctgtattgcctactcatctacaatcggcggtcttacaacaattaccggcacaagcacgaatctcatttttgccgaatatttcaatacacgttaccccgactgccggtgtctgaattttgggtcatggttcactttcagtttcccagctgctctcattattcttcttctgtcatggatatggctacagtggttgtttctgggttttaacttcaaggagatgtttaaatgtgggaagactaagaccgtgcagcagaaggcatgcgccgaggtgatcaaacaggagtatcagaaacttggccctataagataccaggagatcgtgaccctcgttctctttatcatcatggctttactttggttctccagagaccccggattcgtaccagggtggtccgcacttttttccgagtaccccggatttgccacggactctaccgtcgccctcctgatcggattactcttcttcctgatcccagccaagactctgactaagaccaccccaacaggagaaatagtggcctttgactatagcccattgatcacttggaaggaattccagtcattcatgccttgggacattgccattctggtagggggagggttcgcgttagctgacggatgcgaggaaagcggcctgagtaaatggatcggcaataagctctctcccttaggctcacttcctgcctggcttattatcctgatctcctccttaatggtgacatcgctaacagaagtggcatcaaacccagccactatcactcttttcctccctatcctgtctccgcttgccgaagctattcatgtgaatcccctctacattctgatccccagcaccttgtgcacaagtttcgcctttttactccccgtcgctaaccctccaaatgctatcgtgttctcgtacggtcacctcaaggtgattgatatggtgaaggcaggactgggggttaacattgttggggtggcggtcgtgatgctggggatctgcacctggatcgtcccgatgtttgacctctatacatacccttcttgggccccagctatgagtaacgagacgatgccttag

SEQ ID NO: 240995 - DNA, 486 bp, synthetic construct
  misc_feature 1..486: note = Description of Artificial Sequence: Synthetic coding sequence
  source 1..486: mol_type = other DNA
atgctgcccatgtttggcatcatgccgtccaagaaggttgcgtctgcgtatttcaaggacttccatttgctgttgatcggagtgatctgcctggccaccagtatcgagaagtggaatctgcacaagaggattgccctgaaaatggtgatgatggtcggcgttaatcctgcttggctcaccctagggttcatgagttctacggcgtttttaagtatgtggctatccaacactagtaccgccgctatggttatgcccatcgccgaggccgtagtccagcagatcataaacgcagaggctgaggtcgaagcaacccagatgacttatttcaatgggagtacaaaccacggtctcgagattgatgagagcgtgaatggacatgagattaacgaacggaaggaaaagacgaaacccgtccctggatataataacgatactggaaagatcagcagtaaagtcgagctggaaaaatatcttcaggtgcgctag

SEQ ID NO: 240996 - DNA, 1881 bp, synthetic construct
  misc_feature 1..1881: note = Description of Artificial Sequence: Synthetic coding sequence
  source 1..1881: mol_type = other DNA
atgggcctgctacagggcctgcttagggtgcgcaagcttcttcttgtggtgtgcgtgcccctcttgctcctccctctgcctgtgttgcacccttccagcgaagcgagttgtgcatacgtgctcattgtgaccgctgtctactgggtgtcagaagccgttccgctgggggcagccgctctcgtgccagcctttctgtatccatttttcggggtgctccgctcgaacgaagtcgcggctgaatacttcaagaacaccaccctactgctggttggggtcatttgtgtggctgctgctgtagagaaatggaacctacataaacgaatcgcgctgcgcatggtcctgatggctggggctaaaccgggtatgctccttttgtgctttatgtgctgtaccactctcctgagcatgtggctttctaacacttcgacgaccgccatggtgatgccaattgtggaagccgttttacaggagttagtgtccgctgaggatgagcagctggtcgctggaaacagcaatacagaggaagccgaaccaatctcccttgatgtcaagaacagtcagccatccctggaactgatcttcgtaaatgaggagtctaacgctgatcttactaccctgatgcataatgagaatctcaatggcgtaccgtcaatcacaaatcccatcaaaactgccaatcagcaccaggggaaaaagcagcaccctagccaggagaaaccacaagtgttaacaccttctcctaggaaacagaagttgaatcgaaaatacagaagccatcacgaccagatgatttgcaaatgcctttccctgagtatcagctacagtgctacgataggcggactgactactattataggcacaagcacaagtctcatttttttggagcacttcaataatcaatatcctgccgctgaagtcgtcaatttcgggacctggttcctcttttcatttcctatttccctcatcatgcttgtggtcagctggttttggatgcattggttgttcctgggatgtaatttcaaagaaacttgtagtttgagtaagaaaaagaagacaaaaagagagcagcttagcgagaaaaggattcaggaggaatacgagaaactaggagacatctcctaccccgaaatggtgacaggctttttctttattttgatgacagtgctatggtttacaagagaacctggatttgtgcccggttgggactcgttcttcgagaagaaaggttaccgaacagatgctacagtgagcgtttttttaggattccttctgtttctcatcccagcgaagaagccctgcttcggtaagaagaacgacggcgagaatcaggagcacagtttggggactgaacccattattacatggaaggatttccagaagactatgccatgggaaatcgtcatcttggtgggtggcggatacgcattggcaagcggttccaagtcatccggcctgagtacgtggatagggaaccagatgctctccctctctagtctcccaccgtgggcagttaccttactcgcgtgcatcttggtatccatcgttacagagtttgtatcaaatcctgcaaccatcacgatctttcttcccatcctgtgctccctttccgaaaccctgcacattaatcccctgtatacactgatacccgtgacaatgtgtatcagcttcgcagtgatgctcccggttggcaatccacctaacgctattgtgttcagttatgggcactgtcaaataaaagacatggtcaaggctggactgggcgtgaacgtcattgggttggtcattgtcatggtggccattaacacctggggagttagcctgtttcacttagatacatatcctgcatgggctcgagtttctaacataaccgaccaggcctag

SEQ ID NO: 240997 - DNA, 1569 bp, synthetic construct
  misc_feature 1..1569: note = Description of Artificial Sequence: Synthetic coding sequence
  source 1..1569: mol_type = other DNA
atggcctccgcactgagttacgtgtctaagtttaaaagctttgtgattctcttcgttacacctctcctcctgttgccactggtcatcttgatgcctgccaaattcgtgcgctgcgcgtatgtgattattttaatggctatttactggtgcactgaggtgattccacttgcagttaccagcctcatgccggtcttacttttccccttattccagattctcgattctcgacaagtttgcgtgcaatatatgaaagacactaatatgctgtttttagggggactgatcgtggctgtggccgtagagagatggaatctgcacaagcgtatcgccctgcgcaccctgttgtgggtgggtgctaagccagcccgtcttatgctgggatttatgggtgtcacagcccttctgtctatgtggatatcaaacactgccacgactgccatgatggttccaatcgtggaggctatcctgcagcagatggaggctaccagcgcagcaactgaagccggactggagcttgtcgataaaggtaaagccaaggagctccccggttcccaggtcatcttcgaaggaccaacgctgggccagcaggaagaccaggaacggaaaaggctgtgtaaggcgatgacactgtgcatttgctacgctgcatccattggcggaacagccaccctgacaggcacgggtcccaatgtggtgttgctggggcaaatgaacgaactgttccctgacagcaaagacttggtcaatttcgccagctggttcgcatttgcatttcccaacatgctggtaatgctcctgtttgcctggctgtggctgcagtttgtttacatgcggtttaacttcaaaaagtcctggggctgtggcctggaaagcaagaaaaacgaaaaggctgcgttaaaagtgctgcaagaggaataccgcaaattggggccactgtcctttgctgagattaacgttctgatctgtttttttttgctcgtgattctctggttttcaagagaccccggattcatgccgggttggctcacggtggcctgggtcgaaggagaaaccaaatacgtgagtgatgccacagtcgccatttttgtcgccactttgttatttattgtccctagccagaaacctaagtttaatttcagatcccaaacggaggaggagagaaagacacctttctaccccccaccactgctggattggaaagtgacacaggagaaagttccatggggcatcgtccttctgctgggcggaggctttgcactggccaagggctcagaagcgtctggactttcagtctggatggggaaacagatggaacctctgcacgctgtgccgcctgcggcaatcactcttattctatcactgctagtcgctgtgttcacagaatgtactagcaacgtcgcaacaacaacacttttcttgcccattttcgccagcatggtgaaaactggagttatcatgaacatcatcggcgtattttgcgtgtttttggctgtgaatacctggggccgtgccatcttcgatctggatcacttccctgactgggctaacgtcacacatatcgagacctag

SEQ ID NO: 240998 - DNA, 1707 bp, synthetic construct
  misc_feature 1..1707: note = Description of Artificial Sequence: Synthetic coding sequence
  source 1..1707: mol_type = other DNA
atggcaagtgccctttcttacgtgtctaagttcaaaagttttgtgatcctgtttgtcacgccactccttctactcccgctggttatccttatgcccgcaaaattcgtgcgatgtgcatacgtcatcattttgatggcaatctattggtgcacggaagtcattccgctggccgtgaccagtttgatgcctgttctgctgtttcccttattccaaattctggatagccgccaggtgtgtgtgcagtacatgaaagatacgaacatgctcttcctcgggggactaatcgtggcagttgccgttgagaggtggaacctccataagcgcatcgccctcaggacgctactgtgggtgggggctaagccagccaggttaatgttgggattcatgggggtgaccgccctcctatctatgtggatttcgaatactgctacaaccgcaatgatggtgccgatagtggaagctatccttcagcagatggaggctacctctgctgccacggaggctggattggagttagtggataagggtaaagccaaggaacttcctggaagtcaagtgatctttgagggcccaacactgggccagcaagaagatcaagaacgcaagcgtttatgtaaggctatgaccttatgcatatgttatgctgcaagcatcggcggtacagctaccctgacaggtacaggtccaaacgtggtgctgctgggccaaatgaatgagctattcccagactctaaagatttggtgaacttcgcttcttggttcgccttcgcttttcctaatatgctcgtgatgctccttttcgcttggctgtggctccagttcgtgtacatgagattcaacttcaagaaaagctggggttgtggtttagagagcaaaaagaatgaaaaggctgcattgaaggtgttgcaggaagaatataggaaattaggccctctgtcttttgccgaaatcaacgtgctcatttgtttcttcttattggtcatcctttggttcagcagagacccgggtttcatgccaggctggctcacagttgcctgggtagaaggcgagaccaaatatgtttctgacgctaccgtcgctatcttcgtagctacactgctgttcatcgttcccagtcagaagccaaaattcaacttcaggagccagacagaagaagagaggaagacccccttttatccgccaccattgctggactggaaggtgacacaagaaaaggtcccctggggaattgtgctgctgttgggcggaggtttcgccctggcaaaaggatctgaagcctctggtctgtccgtttggatggggaagcagatggagcccctgcatgccgtgccacccgcagctatcacactgatcttgtccctactcgtcgctgtcttcacagaatgtacctctaacgtggctactactactcttttcctccctatcttcgcttccatgtcacgtagtattggtctcaatcctttgtacataatgttgccgtgcaccctcagcgctagtttcgcctttatgctcccagtggccactccaccaaatgcaattgtcttcacgtacgggcacctaaaagtggcggacatggttaagacaggggtgattatgaacatcataggtgttttctgtgtgttcttggctgtgaatacatggggacgcgctatatttgacctggaccactttccagattgggcgaacgtgacccacattgaaacgtag

SEQ ID NO: 240999 - DNA, 1578 bp, synthetic construct
  misc_feature 1..1578: note = Description of Artificial Sequence: Synthetic coding sequence
  source 1..1578: mol_type = other DNA
atggcctctgccctctcgtacgtgtcgaagttcaagagcttcgtcattctgttcgtgacacctctgttgttgctgcccctggtcatattgatgccggctaaagtgtgcgttcaatacatgaaggacaccaatatgctctttctgggcggactcatcgtggcagtggctgtagaacgctggaacctgcacaaacggattgcactaagaacactgctttgggtgggtgccaaacctgcacggctgatgttgggtttcatgggcgttactgcactgctgtccatgtggatctccaatacagccaccactgccatgatggtaccaattgtcgaagctatactgcagcagatggaagccacatcagccgctaccgaagccggactcgagttagtcgataagggtaaagccaaagaattgcccggaagccaggtgatcttcgaggggcctacactggggcaacaggaggatcaagaacgcaagagactgtgcaaggccatgactttgtgcatctgctatgctgctagtattgggggaactgctacacttaccggcactggccctaatgtcgtcctgctgggccagatgaatgagctttttcccgattcaaaggacttggtgaattttgcatcttggtttgcgtttgcgttccccaacatgctggtgatgttgctttttgcttggctgtggctgcagttcgtgtacatgaggtttaactttaagaagagttggggatgtggccttgagtctaagaagaacgagaaggcggcactgaaggtgctgcaggaggagtacagaaagctgggtccactcagtttcgccgagatcaacgtgctgatctgttttttcctactggtgattctctggttttccagggatccaggatttatgcccggatggctcacagtggcttgggtggagggagagaccaaatacgtgtccgacgccaccgtggccatctttgtcgctacactgctctttatcgtcccttcccagaagcctaaattcaacttccggtctcagacagaggaggagcgaaagacaccattctatccacctccactgctggattggaaggtaacacaggagaaagtcccatggggtattgtactcctgctggggggaggattcgcattggccaagggtagtgaggcctcaggcctcagcgtgtggatgggcaagcagatggagcccctccatgcagtcccccctgcagctatcacacttattctatcccttttagtggcggtattcaccgaatgtacttcgaacgtcgccacgacaactctcttcttaccgattttcgcaagcatgagcaggtccataggtcttaatcccctctatatcatgctcccttgtaccttgagcgcctcattcgcatttatgctgccagtagccacacccccaaacgccattgtgttcacctacggtcatctgaaagtcgcagacatggttaaaacaggcgtcatcatgaacattattggggtgttttgtgtcttcctggccgttaacacctggggtagagcgatattcgaccttgatcactttcctgactgggctaacgtgacacacatagagacatag

SEQ ID NO: 241000 - DNA, 1569 bp, synthetic construct
  misc_feature 1..1569: note = Description of Artificial Sequence: Synthetic coding sequence
  source 1..1569: mol_type = other DNA
atggcctccgcattgtcctatgtcagcaagttcaagtccttcgtcatcttattcgtcactcccctgctgttgctacccctggtcattttgatgcccgctaagttcgtccgttgtgcatacgtgatcattctgatggcaatctactggtgtacagaagtgattcccttagctgttacgtccctgatgcccgtccttctcttcccattatttcagatcctggatagccgccaggtctgtgttcagtacatgaaggacaccaacatgttgttccttggagggctgatcgtagccgtagctgtggagagatggaacctgcacaaaaggatcgccctgagaacactgctttgggtgggggctaaaccagcgagattgatgctcgggtttatgggggttacagcactgctgtcaatgtggatctcaaataccgcgaccactgcaatgatggtccccatcgttgaggctatcctccagcagatggaggcaacatcggccgcaaccgaagcagggctggagctggtggataaaggaaaagcaaaagagctgcccggatcgcaagtgatattcgagggacctactttaggtcaacaggaagaccaggagcgtaaacggctgtgcaaagctatgactttgtgtatctgttacgcagccagtattggcggtaccgcgaccctgaccgggaccggccctaatgtggttctgctgggccaaatgaacgaactattcccagattctaaggatcttgtgaactttgcttcgtggtttgccttcgccttcccaaatatgctcgtgatgcttttattcgcttggctatggttacagtttgtgtacatgcggtttaattttaagaaatcctggggctgcggtctggagtccaagaagaacgagaaggcagcacttaaggttctgcaggaagaatatagaaaactgggaccactgtccttcgccgagatcaacgtactgatctgttttttcctcctagttatcctgtggttctccagggacccaggattcatgcctggctggttaactgtcgcctgggtcgaaggcgaaacgaaatatgtctcagatgccaccgtagcaatctttgtggccaccctcctattcatagtaccatctcagaaaccgaaatttaatttcaggagccagacagaggaggagcggaagacacctttttatcctccccctctgctggactggaaagtcacgcaggagaaggtgccttgggggattgtgctgctccttggaggagggttcgctctcgcaaagggctctgaagcctccggcttgagtgtgtggatgggcaagcagatggaaccccttcatgccgtccctccagcagctatcacgcttatcctgagcctcctggtagctgtgttcacagagtgcaccagtaatgtggccactacaactttgtttctgcctattttcgcctcgatggttaaaactggggtcattatgaacatcatcggtgtgttttgtgtgtttctggcagtgaatacatggggccgagctatcttcgatttagaccacttcccagactgggctaacgtcactcacattgagacctag

SEQ ID NO: 241001 - DNA, 1779 bp, synthetic construct
  misc_feature 1..1779: note = Description of Artificial Sequence: Synthetic coding sequence
  source 1..1779: mol_type = other DNA
atggccacatgctggcaggccttgtgggcgtacaggtcttacttaattgtgttcttcgtgcccatcttgttactgcccttgcctattctcgtgccctccaaagaggcctattgcgcctatgcgattatactgatggccctcttttggtgtaccgaagcactgcctctcgctgtgactgccttgttccctctgatcttatttcccatgatgggtatcgttgatgcctccgaagtggccgtggagtacctgaaggattcgaatctgctgtttttcggcggtcttctcgtcgctatcgccgtcgaacattggaatctgcacaaaagaatcgcccttcgcgtgctcttgatcgtcggcgttagacctgctcccttgatacttgggttcatgctggttaccgcctttctttccatgtggatttctaacaccgcaacgagcgctatgatggtccctattgcccatgccgtgttagatcaacttcacagcagccaagcatcttcgaacgtcgaagagggttcaaataaccccacattcgaactgcaggaaccttctccacagaaagaggtgacaaaactcgataacggccaagcattacctgtcacatccgcctcttctgagggccgtgcgcatttgagtcagaagcaccttcaccttacccagtgcatgtcattgtgtgtctgttactcggcatccatcggcggaatagccaccttgacaggcactgcacccaacctggtgttgcaggggcagattaactccctgtttcctcagaatggcaatgttgtgaatttcgcttcatggttttcctttgcattcccaaccatggtgatcttactgctgttagcctggctgtggctgcaaatcctctttctcggcttcaacttccgaaaaaactttgggattggggagaaaatgcaggaacagcagcaggccgcatattgcgttatccagacagagcatagactgctggggcctatgacctttgccgaaaaagctatctccatcctttttgtcatactggtcctattgtggttcactcgcgagccgggatttttcttgggctgggggaatctggcattccccaacgctaaaggcgagtccatggtatcggacgggacagtggccatcttcatcgggatcattatgttcattattcccagcaaattcccaggcctgacccaggatcccgagaatccaggaaagctcaaagcaccactaggacttctggactggaagacggtaaaccagaagatgccgtggaacattgtgctcctcctggggggagggtatgctctggcaaagggctcagagcgctctgggctatccgagtggttgggaaacaaactgacacctctccagagtgtgccggctccagctattgccatcattctcagcctcctcgtggccacttttaccgagtgcacaagcaacgttgcgaccaccacgattttccttccaattctggcaagcatggcccaagcaatatgtctgcacccactgtacgtgatgcttccatgtacattggctacttctctggccttcatgctgcccgtggcaacgccccctaatgctatcgtcttctcgttcggtgatctgaaagtgctagatatggctcgggctggatttctcctcaacatcataggtgtcctgataatcgcactcgcgatcaacagctggggtatccccctgttctctttacattccttcccatcatgggcccagtctaacacgactgcacagtgcctccccagtctggccaacaccactactccctctccttag

SEQ ID NO: 241002 - DNA, 1926 bp, synthetic construct
  misc_feature 1..1926: note = Description of Artificial Sequence: Synthetic coding sequence
  source 1..1926: mol_type = other DNA
atggccacctgctggcaggctctgtgggcatacagaagctatctaatagtgttttttgtccccatcctgctcctccccctccctattttagtccctagcaaggaggcctattgcgcctatgccattatactcatggcgctgttctggtgcaccgaggctcttccactggccgtgaccgccctgtttccgctgattctattccccatgatggggatcgtggacgctagcgaaatcatccagcggccatttccttctagcttcgagtcccccggagagtgccagagcgtgggtatgagcgttaccgccagtcataatttaggtggcactgtaggcgactcgcgcgtttttcccccattaagccacgtctcaacttgtcaggtcgctgttgaatatctgaaggacagcaatcttctatttttcggcggacttctcgtggcgatcgccgtagagcactggaacctacataaacggatcgctttgcgcgtcctgctgatcgtgggagtgagaccagcacccttaattcttgggtttatgctggttacagcgttcctctctatgtggatcagcaataccgccacatctgctatgatggtgccgattgcccacgcagtgttggaccagctgcacagctctcaggcttctagtaacgtggaagaggggagcaacaatccaaccttcgaactgcaggaaccttcccctcaaaaggaggtgacaaaattggacaacggtcaggcactgcccgtgaccagcgcatcatctgagggcagagctcatctgtcacagaagcaccttcacttaacccagtgtatgagcctgtgcgtatgttactcagcctctatcggcggtattgccaccctcactggaaccgcccctaacctggtcctgcaaggccaaattaactcccttttccctcaaaatggcaacgtcgtcaacttcgcctcatggttcagcttcgcctttccaactatggtgatactcctgctcctggcttggctctggctacagatcctgtttttgggttttaatttcaggaagaactttggtatcggcgaaaagatgcaggagcagcagcaggccgcatactgcgtcatccaaactgagcacagactgctgggtcccatgacatttgccgagaaagcaatatccatcctgttcgttatcttagtcctgctttggttcacgcgagagcccggatttttcttgggctggggaaacctcgcatttcccaatgctaagggcgaatctatggtgagcgatggcaccgtagccatctttattggaattatcatgtttataatcccatctaaatttccagggctaacccaggacccagagaatcctggcaagctaaaagcacccttagggttgttggattggaaaacagttaaccaaaagatgccgtggaatatagtactgctgctgggaggaggttacgccctggctaaaggtagcgagaggagcggcctgagcgagtggcttgggaacaagctcacaccattacaatccgtacctgcccctgctattgctattattttgtcgctcctggtagccaccttcacagagtgtacatcaaatgtggctacaacaactatcttcctgcctatccttgcttccatggcccaggccatttgcctccacccactgtacgtaatgttgccatgcacgttagccactagcttagctttcatgctacccgtggccaccccccctaacgctattgtattctcctttggagatctaaaagtgctggacatggccagagcaggcttcctgctcaatattataggtgtactgatcatcgccctggcgataaactcctggggtatcccactgttcagcctgcacagcttccccagctgggctcagtcaaatacgaccgcccagtgcctccctagtttagccaatacaactactccttcaccctag

SEQ ID NO: 241003 - DNA, 1566 bp, synthetic construct
  misc_feature 1..1566: note = Description of Artificial Sequence: Synthetic coding sequence
  source 1..1566: mol_type = other DNA
atgcccgtgtgtggcaacgttgcagttgagtacctgaaggacagcaacctgctctttttcggtggcttgctcgtggctatagccgtggaacactggaacctgcataaacgcatcgcactgcgggtattactgatcgttggcgttcgtcccgcacctctgattctcggtttcatgttagtgacagcattcttgtctatgtggattagcaataccgcaacctctgctatgatggtgcctatcgcccacgcagtgcttgaccaactccactcatcccaggcttcctccaatgtagaggagggctctaataaccccacttttgaactgcaggaacccagcccgcaaaaggaagtaacaaagctcgacaatggccaggccttgccggtcaccagcgcatcatctgaaggtagagcacatctgtctcaaaagcacctccatctcacgcagtgtatgagtctttgtgtttgctactcagcgtctattggaggtatcgcaacactgactggcacagctcctaacttggtactgcagggtcagattaactctttgttccctcagaacggaaacgtggttaattttgctagctggttttcattcgctttccctactatggttatactcctgttactagcttggctgtggctgcaaatcctcttcctggggtttaacttcaggaagaatttcggcataggagagaaaatgcaggaacaacagcaagccgcatactgcgtgatccagactgagcacagattgctgggtcctatgacattcgcagagaaagcaatttctatcctgtttgtgattctcgttctcctgtggttcactcgcgaaccgggtttcttcctcggctggggtaacttggcattccccaatgccaaaggagaatccatggtgtcagacggcacggtagccatcttcatcgggatcattatgtttatcatccccagcaagtttccaggtctgacacaagatccagagaaccccggaaagctgaaggccccactagggctcctcgattggaagaccgttaaccaaaagatgccttggaacatcgtgcttttactgggcggaggttatgctctcgcaaagggtagcgagcgatccggcctttctgaatggttgggaaacaagctgacaccactccagtccgtgcctgcacccgctatagcaatcatcctttcgctacttgtggcaaccttcactgaatgtacatccaacgttgcaactaccacaatattcctgcccatactcgcctctatggctcaggcaatttgcttgcacccgctgtatgtgatgctgccctgcacactggctaccagtctggcattcatgttgcctgtggccacacctccaaatgctattgtcttttcttttggggaccttaaagtgctcgatatggccagagccggttttctgctgaacatcatcggggtgctaatcatcgcgttggcaatcaactcatggggcattcctctcttttctttgcattcctttccttcctgggcacagtccaacacaacagcccagtgccttccctccttggccaacaccacaactcccagcccctag

SEQ ID NO: 241004 - DNA, 1035 bp, synthetic construct
  misc_feature 1..1035: note = Description of Artificial Sequence: Synthetic coding sequence
  source 1..1035: mol_type = other DNA
atggcactcttttggtgtacagaagctctccctctggcagtgactgccttgttccctctgatcctgtttcctatgatgggcatcgtagacgccagcgaggtcgctgtcgagtatctcaaggatagcaaccttctgtttttcggtgggcttttggtcgccatagcagtggaacattggaacctgcacaagcgtatcgccctacgagtgctgctgatcgtgggggtcaggcccgctccattgatcctgggattcatgctggtcacagcgtttctgtctatgtggattagcaataccgccacaagcgctatgatggtcccaatagcccacgcagtgctggaccagctgcattcatctcaagcatcttcaaacgtggaagaaggctctaataatccgacatttgaactgcaagagccctcccctcagaaggaggttacgaaactcgataacggacaggccctccctgtaacctcagccagcagcgaaggcagggcccacctttctcagaagcacctgcatctgacacagtgtatgagcctgtgcgtgtgctattccgcgtccattggtgggatagctacgttaactggcacggcacctaacctcgtgcttcaagggcagatcaattctctattcccccaaaatggtaatgtggttaactttgcatcctggttttcatttgcttttccaacaatggtgattctcctcctactggcctggctgtggctacagattctctttcttggatttaattttaggaaaaacttcggtatcggcgaaaaaatgcaggagcaacagcaggccgcttactgcgtgattcagaccgagcacaggctgctgggccctatgacatttgctgaaaaagccattagcatccttttcgtgattttagtgcttctatggttcacccgtgagcccggtttcttctggctcggccaatttggattctctcagtgccaaggaggggaagttcgagtggcaggcgtcggaagacgcacccatctcggcctgacttgcagcgggcgtagagaggggtactag

SEQ ID NO: 241005 - DNA, 1650 bp, synthetic construct
  misc_feature 1..1650: note = Description of Artificial Sequence: Synthetic coding sequence
  source 1..1650: mol_type = other DNA
atggcaacctgttggcaggccctgtgggcctatcgatcctacctgatcgtgttttttgtgcctatcctgttactcccactgcccattctcgtcccatccaaggtggcagtggaatatttgaaggattcaaacctgcttttctttgggggtctgctggttgcgatcgcggttgagcactggaatctacacaaaaggatagcacttcgcgtgctgctgattgtcggtgttaggcctgcaccactaattttaggtttcatgctggtgactgcattcctgtcaatgtggatatcaaatacggccacatcagctatgatggtcccaattgcgcatgccgtgctggatcaattgcacagcagccaggcgtcttctaacgtggaagagggcagtaacaatccgactttcgagctgcaggaacccagcccgcagaaagaagtgactaagctagataacggccaggctctccctgtgacttccgcgtcttccgagggaagggcccacctaagtcagaagcacctccacctgacccagtgtatgtccctgtgtgtgtgttactccgccagcattggcggaatcgcgacacttaccggaaccgcccctaacttagttctccaggggcagattaactctctgtttccccagaatggtaatgtggtgaattttgcctcctggttttcgtttgcctttcccacgatggtcattcttttactgttagcgtggctctggctccagatcctgtttctgggttttaatttcagaaaaaacttcgggatcggcgagaagatgcaggaacagcagcaggccgcttattgtgtgatccaaaccgaacaccggctgctcggccctatgacttttgccgagaaagcaatctccatactgtttgtgattttagtactcctatggttcacccgtgagcccggattcttcttgggctggggaaacctggctttccctaatgcaaaaggtgagtctatggtatctgacggcacagtggcaatttttatcgggataatcatgttcatcatccccagcaaattcccaggtctgacccaggaccctgagaatccgggtaagctaaaggctcccttaggactgcttgactggaaaaccgtgaaccaaaagatgccctggaacattgtgcttctgttaggcggaggctacgctctggccaagggttctgaacgctcaggcctatctgaatggttgggaaacaaactgaccccgctccagagcgtgcccgctcctgccatcgctatcatcctgagtttgctggtggctacttttaccgagtgcacctcaaacgttgccaccacaactatctttcttcctatactggcttccatggcccaggctatttgtctccatcctctgtatgtgatgctgccatgtaccctcgctacgagtctggcttttatgctccccgtggcgacacccccaaatgccatagtattctcttttggcgacctgaaggtactggacatggcaagagcaggattcctgttaaacatcatcggcgtgcttattatagccctggctatcaacagctggggcataccccttttcagtttgcattcatttcccagctgggcccaatccaatacaacagcccagtgcttgccctctctcgcaaacacaacaaccccaagcccctag

SEQ ID NO: 241006 - DNA, 1809 bp, synthetic construct
  misc_feature 1..1809: note = Description of Artificial Sequence: Synthetic coding sequence
  source 1..1809: mol_type = other DNA
atggctgccttagctgccgctgcgaaaaaagtctggagcgccagaagattacttgtgttgctgttcacacccctagccctcctgcccgtcgtgttcgccctcccccctaaggagggaaggtgtctgttcgtcatactgttgatggcagtatattggtgtacggaggccttgccattgtcggttaccgcactgttgcccattgttctgttcccatttatgggcatcctcccatcaaacaaagtttgtcctcagtactttctagataccaattttctcttcctttccggccttatcatggcctccgccatagaagaatggaaccttcaccggcgtattgccctcaagatacttatgctggtgggggttcaaccggcaaggctgatcctggggatgatggtgactacaagtttcctttccatgtggttgtccaatacagcctcaacagccatgatgttaccgatagctaacgccattctaaaatccctctttggccagaaggaagtgcggaaagacccttcccaggagtcggaggagaacacagccgcagtgcggcgaaacggtcttcacactgttccaactgagatgcaattcctcgcttcaaccgaggcaaaagatcatcccggtgaaaccgaggtgcccttagacctccctgccgatagccgtaaggaggacgagtaccgccgtaatatctggaagggctttctgatctcaatcccctatagtgcgagtatcggtggcaccgctaccctgacgggtaccgcgcctaatctgatacttctcggccagcttaagtcattcttcccccagtgcgacgtggttaatttcggaagctggttcatattcgccttccccctcatgttgttgttccttctggctggctggttatggatctcattcctctacgggggactgtctttcagaggatggcggaagaataagagtgagatcagaactaacgcagaggatagagccagagcggtaatccgagaggaatatcaaaatttaggacccatcaaattcgccgagcaagctgtgtttatccttttttgcatgttcgctatactcttgttcactagggaccctaagtttatcccaggatgggcatccttattcaaccccggattcctgtccgacgccgtaaccggtgtcgccatcgtaaccatcctatttttttttccctcccagaggccaagtctgaaatggtggttcgatttcaaagcacccaacactgagaccgaaccacttctaacttggaaaaaagctcaggaaaccgtaccttggaatatcatcctgctgttaggcggaggatttgccatggcaaaagggtgcgaggagtccggcctgtccgtttggatcggcggacagctgcaccctctggagaacgttccacctgccctggcagtgctcctcattacagtcgtcatagccttctttacagagttcgcgtcaaatactgcaacaatcattatcttcctgccagtgctcgctgagctcgcaatacgtctgcgcgtgcacccactgtacctgatgattcctgggaccgtcggctgctcctttgctttcatgcttccagttagcactccgcctaacagtatagcgttcgccagtggacatcttctcgtgaaggacatggtccgtaccgggttgctcatgaacttgatgggggtgctcctcctttcattagctatgaatacatgggctcaaacgatattccagctgggaactttccctgactgggccgatatgtattccgtgaacgtgaccgcattgccgcctacactggcaaatgacacttttcgaaccctttag

SEQ ID NO: 241007 - DNA, 1668 bp, synthetic construct
  misc_feature 1..1668: note = Description of Artificial Sequence: Synthetic coding sequence
  source 1..1668: mol_type = other DNA
atggctgtttattggtgcactgaggcccttcctctttctgtgactgcactgctgcctattgtccttttcccctttatggggattctgcctagtaacaaggtttgcccccaatacttcctggacaccaacttcttattcctctccggtctgatcatggcatctgctatcgaagagtggaacctgcataggcggattgcattgaaaatcttgatgttggtcggagtgcagccagcccgtctcattctgggcatgatggtaactacaagtttcctgtccatgtggttatccaacactgcttccacggcaatgatgctgcctatcgccaacgccatcctgaaatccctcttcggtcagaaagaggttcgcaaggaccctagtcaagaatccgaggagaataccgctgcagtccgcaggaacgggctgcatactgtcccgaccgagatgcaatttctggcttcaacagaggccaaggaccatccgggtgaaacagaggtcccactggacctgccagcagattcccgcaaagaagacgaatatcgcaggaacatttggaagggttttctcatatctattccatacagtgccagcattggcggtacagccactttgacgggaaccgctcccaacttgatcctcctaggccagctgaaatcgttcttcccccaatgcgacgtcgtgaactttggctcctggtttatcttcgcttttcctttgatgttgctctttctgctcgcaggatggctgtggatctcattcctgtatggcggactttcctttcgcggttggcgcaagaacaaatctgagataagaactaacgccgaggatcgcgctcgagcagtcattcgcgaagagtatcaaaacctgggacctattaagttcgcagagcaagccgtcttcattctcttctgcatgtttgctatcctgctgttcactagagaccctaaattcattcctggctgggcctctctcttcaatcccggtttcttgagtgacgcagtgaccggagtggctatcgtcactatactgttcttttttccctctcagcgcccttccctgaaatggtggttcgacttcaaggcaccaaatacagaaaccgagcccctgctgacatggaagaaagctcaggagaccgtcccctggaacatcatcctgctgctgggtggcggttttgcaatggccaaaggctgtgaggaatcaggcctttcggtttggatcggtggtcagcttcatcccttggagaatgtaccgcctgccctggccgtgctcctcatcacagtggtgattgcattttttactgaatttgcctcaaacactgccacaataatcatcttcctccctgtacttgccgagctcgccattcggctgcgagtgcatccactttacttaatgatacccggaaccgtgggctgcagctttgctttcatgttgcccgtgagtactccacccaatagcatcgcttttgcctccgggcaccttctcgttaaagacatggtcagaaccggcctgctgatgaatttaatgggcgtactccttctgagtctcgcaatgaatacttgggcgcagacgatctttcagttgggaacgtttcctgattgggctgacatgtattctgtcaacgtgacagcgctccctcctacccttgccaatgatacctttaggacactatag

SEQ ID NO: 241008 - DNA, 699 bp, synthetic construct
  misc_feature 1..699: note = Description of Artificial Sequence: Synthetic coding sequence
  source 1..699: mol_type = other DNA
atggccgctctggccgctgctgccaaaaaagtatggtccgcaaggcggctgcttgtcttgcttttcactcccctcgcactgttgcctgtggtgtttgctttaccgccaaaagaaggacggtgcctgtttgttattctcctgatggccgtctattggtgcactgaggccttacctctgtccgtgactgctctactgcccatcgttctgtttcccttcatgggaatcttgccttcaaacaaggtgtgcccccagtactttctggacaccaactttctgtttcttagcggcctcattatggcgtcggcaatcgaggaatggaatttacaccggaggatcgccttaaaaattctgatgcttgtgggggtgcagcctgcccgactcatcctggggatgatggtgactacaagtttcctgagcatgtggctgtctaacacagcatctactgcaatgatgctgccaatagctaacgctatattgaagtcactgttcggccagaaagaggtgcggaaggatccttctcaggagtcagaagaaaacaccggtatcgagcccaacacatttctatcggaggagcggctgaagctccaggctcctctggtgattcgcttgggacagatcacagaaagcggccagtggaacatgagcgggaacgacgtgtgtaactttagggtactgtctttccttcctggagggatgtag

SEQ ID NO: 241009 - DNA, 1017 bp, synthetic construct
  misc_feature 1..1017: note = Description of Artificial Sequence: Synthetic coding sequence
  source 1..1017: mol_type = other DNA
atggccgcattagctgctgctgcaaagaaggtttggtcggcaaggcggcttttggtgctactgttcacaccacttgctctcttgcccgtggtgttcgctttaccccctaaagaaggcaggtgtctctttgtcatcctgctaatggccgtgtattggtgcactgaggccctgcccttgtccgtaacagctctattgcctatcgtactcttcccattcatggggattctgccctctaacaaagtttgcccacagtactttctagacaccaattttctgtttctgtctggactcatcatggccagcgcgatcgaggagtggaaccttcaccgtcgcatcgcattgaagatcctcatgttggtgggggtccaacctgctcgcctgattctgggtatgatggtaaccacttcctttctgagcatgtggctgagcaacaccgcctccaccgcaatgatgttgcccatcgccaatgcgattctgaagtccctcttcggccagaaggaggtccgcaaagacccaagtcaggaatctgaggagaataccgccaaaacaaccctgggcaggcagagatttcactggatctgcaggctcacccccggaaggaggatgaacattgttggcaccagtgggagggcctcatctagcccctcaccaacccagcccgtcttaggggctcagccccattcaagagcacagcctctgaccagtagctgtttggcatcaagtaggggctggctatggattagctttctgtatggtgggctctccttccgcggatggagaaagaataagtctgaaattcgcaccaatgccgaggatagagccagggccgtgatacgggaggaataccagaacctgggacctatcaaatttgccgaacaggcagtgtttatactcttttgcatgttcgcgatcttgctcttcactagagacccaaagttcatcccgggttgggcctcgctgtttaaccccggatgtaaaatgggaatcatcagcatctccactatccaaaagatgtag

SEQ ID NO: 241010 - DNA, 1563 bp, synthetic construct
  misc_feature 1..1563: note = Description of Artificial Sequence: Synthetic coding sequence
  source 1..1563: mol_type = other DNA
atggctgtttattggtgtacagaggcattgcctctgagtgtgaccgctctgttgccaatcgtgctgtttcccttcatgggcatcttgccctcaaataaagtctgcccacagtacttcctggatacaaacttcctcttcttgtccgggctgattatggcatcggccatcgaagaatggaacctgcacaggcgcatcgctcttaagatccttatgctggttggcgtgcagcccgcaaggttgattttgggaatgatggtaactacttccttcctgagcatgtggctgtcgaacaccgctagcaccgcaatgatgctgccaatcgcgaacgcaattctgaaaagtctctttggacagaaggaggtgaggaaggatccttcccaggagagcgaggagaacaccgccgcagtccgcaggaacggtctccataccgtcccaacagagatgcagttcctggcgtctaccgaggcgaaagatcatcctggagaaacagaagtccccctggacctaccggcagacagtcggaaggaagacgagtatcgccgaaacatttggaaggggtttctgatatcaattccttactctgcgtctattggcggtacagcaaccctgaccggcaccgcccctaacctgatcctcctgggccagctcaagtctttctttccacagtgtgacgttgtgaattttggctcctggttcatcttcgcatttccgttaatgctgctattcctgttggcgggttggctctggatttcgtttctgtacggcggtctgagcttccggggatggaggaagaataaaagtgaaatacggacgaacgctgaggacagagccagggctgtaatcagggaggagtatcagaatcttgggcctatcaaattcctctccgacgctgttacaggagtggcgatcgtcaccatcctgttcttctttcccagtcaacgaccctctttgaaatggtggttcgatttcaaggctccaaacactgagaccgagccccttctgacatggaagaaggcccaggagactgtgccctggaacatcatcctactcctaggtggaggatttgccatggcgaagggatgcgaggagagcggattgtctgtttggattgggggtcaacttcacccacttgagaacgtgcccccagccctggccgttcttctgatcactgtggtgatcgccttctttactgaatttgccagtaacactgctacaatcattatcttcttgcccgttttggcggaactagcaatccgcctcagggttcatccactttacctgatgatccctggaacagttggctgctcctttgcgtttatgctcccagtcagcactccgccaaattctattgcatttgccagtggccacctgctcgtgaaggacatggtgagaacaggcctcctgatgaatctaatgggcgtacttctgctgagcctagcaatgaacacatgggcgcagactatctttcaattgggaacctttccagactgggcagacatgtattcagttaacgtcacagccttaccccctacattagcgaacgataccttcagaacactatag

SEQ ID NO: 241011 - DNA, 1659 bp, synthetic construct
  misc_feature 1..1659: note = Description of Artificial Sequence: Synthetic coding sequence
  source 1..1659: mol_type = other DNA
atggccgctcttgcagcagcagcgaaaaaagtttggtccgcccgacgcctgctcgttctcctgtttacccccctagccctgcttcccgtcgtctttgccctgcctccaaaggaaggtcgttgtctgtttgtgattctactcatggccgtctattggtgcaccgaagctttgccattatcagttacggcactgctccctattgtgctgtttccatttatgggcatccttccctcaaataaggtctgtcctcagtatttcctcgatacaaacttcctttttttaagcggcttgattatggcctcagccatagaggagtggaacctgcaccggagaattgctcttaaaatccttatgttagtgggtgtccaacccgctaggctaatcctaggcatgatggttactacatcttttttaagcatgtggctgtcaaatacggcttccacagcaatgatgttgcctatcgcgaatgccattctcaagagtctgtttggccaaaaggaagtgcggaaggatccgtcccaggaatccgaggaaaatactgcaaaaaccacgttgggtcggcagaggtttcactggatctgccgactcaccccaggtaggagaatgaacattgttggtacctctgggcgagcctcatcctccccgagccccacccagcctgttctgggggctcaaccacactctcgggctcaaccactgacctcttcctgcttggcctcatcaaggggatggctgtggatctcattcctgtacggaggattatccttccgcggttggagaaaaaataagtccgaaatcagaacaaatgccgaagatagggcccgtgcggtgatacgtgaagagtaccagaatctgggacccataaagtttgccgaacaagccgtttttatcctgttctgtatgttcgccattctcctgtttacaagagatccaaagttcatccctgggtgggccagcctgttcaacccgggatttttgtccgacgctgttaccggcgtggcaatagtaactatactatttttttttccgtcacagcggccatctcttaagtggtggtttgattttaaagcgccaaatacggaaactgagcccctccttacatggaagaaggcacaggagaccgtgccatggaacattattctgctgctgggcggaggttttgctatggcgaagggctgtgaagagagtggactgagcgtatggatagggggtcaacttcatcctttggagaatgtgccaccagccctggcagttctgctcatcacagttgtgatagccttctttactgagttcgccagtaatacagcaacaatcatcatcttcctgcccgtgctcgccgaacttgctatccgactgcgcgtccaccctttgtaccttatgattcctggcaccgtcggttgcagctttgccttcatgttacccgtaagcacaccccctaactctattgcctttgccagtggccacctgttagtaaaggatatggtcaggacaggtcttttgatgaacttaatgggcgtgttactgctctcccttgcgatgaacacatgggcccagacaatcttccagctcgggactttcccagactgggctgacatgtactccgtcaatgtaaccgcactacccccaacactggccaacgatacatttaggactctgtag

SEQ ID NO: 241012 - DNA, 558 bp, synthetic construct
  misc_feature 1..558: note = Description of Artificial Sequence: Synthetic coding sequence
  source 1..558: mol_type = other DNA
atggccgtgtattggtgtactgaggctctgcccctcagcgtaaccgccttgttgcccatcgtgctgtttccgtttatgggaatactgccatccaataaggtgtgtccacagtacttcttggacaccaactttcttttcctgtccggcttgataatggcctctgccatcgaggagtggaatctgcatcggagaattgcgctcaagatattgatgttggtcggcgtccaaccagcgcgactgattttggggatgatggtgacgacaagttttctttccatgtggctgtctaacaccgcatcaaccgcaatgatgctgcctattgctaacgcgatcctgaagagcctgttcgggcagaaggaagttcgtaaggacccatcccaagaaagcgaggaaaacaccggcattgagcctaatacattcctttccgaagagcggctcaaactgcaggctcctctggtgatccgtctagggcagatcaccgaatccgggcaatggaatatgtccggaaacgatgtatgcaatttccgtgttctctcttttcttcctggtggcatgtag

SEQ ID NO: 241013 - DNA, 564 bp, synthetic construct
  misc_feature 1..564: note = Description of Artificial Sequence: Synthetic coding sequence
  source 1..564: mol_type = other DNA
atgctaagccccgcatggctgttgagtccctcttgctcttcatcacgacccaagggcccactgtcctctggaggacttacatccaaagagagcggcctatcagtatggatcggcggacaactgcatcccctcgagaatgtaccgccagctctcgcagtgctgctgattacagtagttattgcatttttcactgagttcgcttccaacactgcaacaatcatcatcttcctgccagtgctggcagaactggctatccgtctgagagtgcacccactgtatcttatgatacctggcacggtgggctgctcctttgcctttatgctgccagtcagcacacctccaaattctatcgctttcgcatcggggcacctgctcgtgaaagacatggtccgaacggggctgttaatgaatttaatgggggtattgctgctctccttagctatgaacacatgggcacaaactattttccagctgggtaccttccccgactgggctgacatgtattctgtcaatgtcacagcattgccgcctacactagctaacgacactttcagaactttgtag

SEQ ID NO: 241014 - DNA, 1230 bp, synthetic construct
  misc_feature 1..1230: note = Description of Artificial Sequence: Synthetic coding sequence
  source 1..1230: mol_type = other DNA
atggccgtgtactggtgtactgaagcattgccccttagcgtgaccgcgctgctacccatagttctgtttccatttatgggtatattgccaagtaataaggtgtgccctcagtactttctcgacactaactttctcttcctgtccggcctaattatggcatccgcaatcgaggagtggaacctgcacagacgtatcgccctgaagatcctcatgctggtgggagtgcagccggcacggttgatcctcggcatgatggtcacaacaagtttcttgagcatgtggctctctaataccgccagcacggccatgatgctcccgatagctaacgccattctcaaatccttattcgggcagaaagaggttaggaaagatccgtcccaagaatccgaagaaaataccgcagccgtacggagaaacggcctccatacagtgccaacagagatgcagttcctagccagtaccgaagccaaagaccatcctggcgagactgaggtgccgctcgacctccccgcagatagtagaaaggaagacgaatatagacgtaatatatggaaaggatttttgatttcaatcccctactccgctagcataggtgggacagcaactttaacaggaacagcccctaatctcatattacttgggcagctcaaaagtttcttcccgcagtgtgacgtggtgaactttggttcttggttcatctttgccttcccgctcatgcttctgtttcttcttgcgggttggctatggatatctttcttgtacggaggattaagtttcagaggctggaggaagaacaaatcggagatccgcactaacgccgaggatcgcgcacgtgcggtcattcgggaggaataccagaacttgggtcctatcaagtttgccgagcaggcggtctttattctgttctgtatgttcgctatcctgctgtttactagggacccaaagttcattccaggctgggcctccctcttcaatccagggtttttatcggatgcagtcacaggcgtcgccattgtcactatcttgttcttttttccgagccagaggccgtccctgaaatggtggtttgattttaaagcaccaaatacagagactgaaccactcctgacttggaagaaagcacaggagacagtgccatggaacatcatcctactgctgggcggagggttcgcaatggcaaagggttgcgaggagtctggactgtctgtctggattggagggcagctgtag

SEQ ID NO: 241015 - DNA, 1668 bp, synthetic construct
  misc_feature 1..1668: note = Description of Artificial Sequence: Synthetic coding sequence
  source 1..1668: mol_type = other DNA
atggctgtatactggtgcactgaggcactcccattgagtgttaccgccctgctgcctatagtgctgttcccgttcatgggtatcttgcctagcaataaggtgtgccctcaatactttctcgatactaactttctgttcctgagcggtctgatcatggcaagtgccattgaggaatggaatttgcatagaagaattgctttaaagatcctcatgttggtgggcgtgcaaccagccaggctgatcctgggaatgatggtgaccacgagtttcctgagcatgtggttgagtaacaccgcgagtactgccatgatgttgccgatcgccaacgcaatcctgaaaagtctgtttggacagaaagaagtccgcaaagacccttcccaggaaagtgaggaaaataccgccgcagtgaggcgcaacggactgcataccgtgcccaccgaaatgcaattcttagccagtaccgaagcaaaggatcatccaggggagaccgaagtccctttggatttacctgccgatagtcgtaaggaggacgaatatcgaaggaacatttggaagggatttctgatcagcatcccttattccgccagtatcggtggtacggccacgctgacagggaccgctcctaacctcatcctactagggcaactgaaaagtttctttccccaatgcgatgtcgtaaatttcgggtcttggttcattttcgccttcccgctgatgttgctgtttttactagccggatggctgtggatcagcttcttgtacggaggactgtccttccgaggatggcggaaaaataagagcgagattaggacgaacgctgaggatcgcgcacgagccgttatcagggaggagtatcagaatctgggcccaattaagtttgccgaacaggctgtgttcatcctcttttgcatgttcgctatcctgctgtttactagagaccctaagttcatccccggttgggcctcactgttcaatcccggatttttatccgatgcagtgaccggtgtggccatcgtgaccatcctgttttttttccctagccagaggccatctttaaagtggtggttcgactttaaagcccctaatacggaaacggagcccctcttgacttggaaaaaagctcaggaaacagtgccatggaatataattctgcttctgggcggtggctttgccatggccaaagggtgtgaggagtcaggtctcagcgtctggattgggggacagctccatccacttgaaaatgtgccgcctgcactggccgtcctgctcataacagttgtgattgctttttttacagaattcgccagcaacactgccactatcattatattccttccagtattggcagaacttgcgataaggctgcgggttcaccctctatacctcatgataccaggcaccgtgggctgcagctttgctttcatgctgcccgttagtacacctccaaactctattgcattcgcatccggacaccttctggtaaaggacatggtgcgcacaggtctcttaatgaatttaatgggggtccttctgctaagcctcgcgatgaacacatgggcccagactatctttcagttgggcacttttcccgattgggccgatatgtacagcgtgaatgtgacagcactccctcctacactggccaacgacacctttcgaaccctgtag

SEQ ID NO: 241016 - DNA, 2763 bp, synthetic construct
  misc_feature 1..2763: note = Description of Artificial Sequence: Synthetic coding sequence
  source 1..2763: mol_type = other DNA
atgagcgacccacactcttcgccactattacctgagcccttaagctctagatataagctttacgaagctgagttcacaagtccgtcttggccgagtacttctcccgatacccaccccgctcttcccttgttagaaatgcccgaagaaaaagacttacgaagctccaacgaagacagtcacatcgtaaagatagaaaaattgaatgaaagatcaaagcgcaaggacgatggcgtcgctcatcgagattctgctggccagaggtgcatatgtctgtctaaagccgttggttatctcaccggggacatgaaagagtatagaatctggttgaaggataaacacctggctctgcagttcattgactgggtcctgagaggaaccgctcaggtcatgttcatcaacaatcccctgtccggcttaatcatctttatagggctgctcattcagaacccttggtggaccataacagggggactcggtacggtggtcagcactcttactgcattggcactgggacaagaccggtcagctatcgcctcaggtcttcatggctataacggcatgctggtgggattgctcatggccgtcttcagtgaaaagctcgactactattggtggctccttttcccggtgacgttcacagcaatgtcttgtcctgtgttgagcagcgccctgaatagtatcttttctaaatgggacctccccgtgttcaccctcccctttaatattgcggtgacattgtacctggccgcaacagggcactataatctattctttccaacgacacttgtagaaccggtgtcttctgtgcccaatattacctggacggagatggagatgcccctacttttgcaggcaatacctgttggggtgggacaggtgtacggctgcgataacccttggactgggggagtgttcctagtcgcactttttatatcttctccacttatatgtttgcacgccgctataggatctattgtggggttgctggcggcactctctgtggccaccccattcgaaacaatttatacagggttatggagttacaattgtgtgctgtcttgcattgcaattggcggaatgttctatgctctgacctggcagacgcatcttctcgctttgatttgtgcactattctgtgcatacatggaggccgcaatctctaacatcatgagtgtggtgggagtcccccctggaacttgggctttctgtttagctaccatcattttcctgctcctcacaactaataatcccgctattttccgactgcccctttctaaggtgacctacccagaggcaaacagaatttactacctaactgtgaagagtggcgaggaggaaaaagccccatctggaggcggtggtgagcatcctcccacagccggaccaaaagttgaggagggttccgaagcagtgctgtcgaagcatagatcagtttttcacatcgagtggtcctcaatccgcagaagatctaaagtatttgggaaaggggaacatcaggaaaggcagaataaggacccattcccatataggtacagaaagcctacagttgagctgctggatctggataccatggaggagagttccgaaattaaggttgagacgaatattagcaagaccagttggattagaagctccatggctgctagtggcaaaagggtaagcaaggctttgtcttatatcacgggggagatgaaggagtgtggggagggcctgaaggataagtcgcctgtgttccagttttttgattgggttctgcggggaacaagtcaggtgatgttcgtgaataatcccttgtccggcatcctcatcattctcggcctcttcatacagaacccgtggtgggcaattagcggatgtttagggaccataatgagtacactcactgctctcatactgagtcaggataaatccgccatcgcagctggattccacgggtataacggcgtgttggttggtctgctcatggctgttttcagtgacaaaggagactactattggtggctgctcttacccgtgattattatgtccatgagctgtcctattctctccagtgctctcggaaccatcttctccaagtgggacttgcctgttttcaccctgccgttcaacattaccgttaccttgtaccttgcagccaccgggcactataatctcttcttccctaccacactattgcagcctgcgagtgcaatgcccaacatcacgtggtctgaggtccaggttcctttacttttacgggcaattcctgtgggaatcgggcaagtgtacggttgcgacaacccctggaccggtgggatcttcctgatcgctcttttcatatcttctccattgatctgcctccatgctgccatcggatcgactatggggatgttggcagcactcacaatagccacccctttcgattcaatctactttggactgtgcggatttaatagcactctggcatgcatcgcaatcgggggtatgttctacgtgatcacatggcagactcaccttctcgcaatcgcatgcgccctgttcgccgcataccttggcgctgcgctcgcaaacatgctttccgtatttggcctcccaccttgtacatggcccttctgcttaagcgctctcacattcctgctgctcacaacaaacaatccggctatttacaagctgcccctgtccaaagttacgtaccctgaggcaaaccgcatttattatttgtctcaggagcggaataggagagcttcaattataaccaaatatcaagcctacgatgttagttag

SEQ ID NO: 241017 - DNA, 1170 bp, synthetic construct
  misc_feature 1..1170: note = Description of Artificial Sequence: Synthetic coding sequence
  source 1..1170: mol_type = other DNA
atggaagactctccaacaatggtgagagtcgattctcccacaatggtgcgcggagagaaccaggtgagcccgtgtcagggaagaaggtgctttcctaaagccctcgggtacgtgaccggtgacatgaaagaactggccaaccagctgaaggacaaaccagttgtgctccagttcattgactggatcctgcggggaatttcacaggtggtattcgtgaacaacccagtcagcggtatcctgatcctcgtgggtctgttggtgcaaaatccgtggtgggcgctgactggatggttggggacagttgtatccacactgatggccctgctcctgagtcaagataggagcttaatagcctccggcctgtatggctacaacgctaccttggttggagtgcttatggccgtatttagcgataaaggggactacttctggtggctgttgcttcccgtttgcgctatgagcatgacttgccccattttctcgagtgcactgaactcaatgctgagcaaatgggatttacccgttttcaccctgcccttcaacatggctctgtcaatgtacctgagtgccaccggacactacaaccccttcttcccagccaaactagtaattccaatcaccacagcccctaatatctcttggtctgatctaagcgctctggaactcctgaagtctatcccagttggggtgggacagatttacggctgcgataatccatggacaggaggaatcttcctgggtgccattctcctgtcatcccccttgatgtgcctgcacgccgctatcggctccttgctgggcattgctgcaggcttgagtctcagcgccccttttgaggacatctatttcggactgtgggggttcaactcaagcctcgcatgcattgccatgggcggaatgttcatggccctgacttggcagacccacttgctagccctcggatgtgcactttttaccgcttacctgggtgtgggaatggcaaatttcatggctgaggttgggcttcccgcttgcacctggcctttctgtctggccaccctcctgtttctgatcatgacaaccaaaaacagcaacatctacaagatgcccctgagtaaggtgacttacccagaggagaatagaatcttctatctgcaggcaaagaaaaggatggtggagtccccgctgtag

SEQ ID NO: 241018 - DNA, 855 bp, synthetic construct
  misc_feature 1..855: note = Description of Artificial Sequence: Synthetic coding sequence
  source 1..855: mol_type = other DNA
atggctctgctgctgagccaagacaggagtctcattgcgtcaggcttatacggttacaacgctaccctcgtaggggtcctgatggccgtattttcagacaagggagattatttttggtggctgctcctgcctgtctgcgccatgtccatgacctgcccaatcttcagttccgcgctcaattccatgctgtctaagtgggaccttcccgtcttcaccctgcccttcaatatggccctttctatgtatttaagcgccactggtcattacaatcctttttttccggcaaaacttgtaatcccaatcacgacagcccctaatatctcttggtccgatctgtcagccttggaattgctgaagtcgatccctgtgggggtcggccagatctatggttgcgacaacccatggactggaggtattttcctgggagctatcctgttgagtagtccattgatgtgcctgcatgctgccattgggagcctgctcggaatcgcagcaggtttgtccttgtccgcaccttttgaggacatctacttcggactctgggggtttaattcatcattagcttgtatagctatggggggtatgtttatggctctgacatggcagacacatctactcgctttgggttgcgcactgttcaccgcatacctgggggtgggcatggcgaactttatggccgaggtaggtcttcccgcttgcacgtggcccttttgtctggctaccttgctgttcctaatcatgacaacaaaaaacagtaatatttataagatgcctctgagtaaagtgacttaccctgaggaaaatagaattttttatcttcaggccaaaaagcgcatggtggagagccccctttag

SEQ ID NO: 241019 - DNA, 1338 bp, synthetic construct
  misc_feature 1..1338: note = Description of Artificial Sequence: Synthetic coding sequence
  source 1..1338: mol_type = other DNA
atgaatggcaggtcactcattggtggggcaggagacgctaggcatggacctgtttggaaggacccttttgggaccaaggccggtgacgcagctcgaaggggaatcgcgcgtcttagcctggcgctggctgacggaagccaggagcaagaaccagaagaagaaattgcaatggaggattcaccaaccatggtacgggtggattctcctacaatggtgcggggagagaaccaggtgtccccatgtcagggacgacgatgcttccctaaagcactgggctacgtgactggggacatgaaagagctcgctaaccaactgaaagacaagcccgtggttttacagttcatcgactggatattacggggtatctcccaggtcgtcttcgttaacaatcccgtgagcgggattctgattcttgtgggcctgctagtacagaacccttggtgggcattgaccgggtggctggggaccgtggtgtccaccttgatggccctcctactgtcacaggacaggtcactgattgccagcggtctgtatggctataatgccactctggtaggggtcctaatggccgtgttcagcgataagggagattacttttggtggctgctcctcccagtgtgcgctatgtctatgacctgcccaatcttttcctccgcactgaatagcatgctatcaaagtgggatttacctgttttcacgctgccattcaatatggccttgtccatgtacctttctgccacaggacattataaccccttcttccccgctaaactggtgatccctatcactaccgctccaaatatcagctggagtgatttaagtgccttagagctgttaaaatctattccagtcggggtaggtcagatctatgggtgtgataacccatggacaggaggcatatttctcggtgcaattctactgtcaagtcctctgatgtgtctgcacgccgcaattggttctttactgggtatagcagctggactgtccctaagcgccccttttgaagacatatattttggactgtggggctttaattcaagcctcgcgtgtatcgcaatgggaggcatgttcatggcactgacgtggcaaacccacttactagcactcggttgtgcactatttactgcttatctcggtgtagggatggcgaactttatggctgaggtaggcttgccggcatgcacttggcctttctgcctggccaccctcctgtttctgataatgaccaccaaaaattccaacatttacaagatgcccctgtcaaaggtaacttacccggaggagaacagaatcttctacttgcaggccaaaaagaggatggtagagtcccctctctag

SEQ ID NO: 241020 - DNA, 1338 bp, synthetic construct
  misc_feature 1..1338: note = Description of Artificial Sequence: Synthetic coding sequence
  source 1..1338: mol_type = other DNA
atgaacggccgaagcctgatcggaggcgctggagatgcgcgtcacgggcctgtctggaaggatccattcgggactaaagctggggacgctgccaggagaggcattgccaggcttagtctggcattggccgacggcagccaagaacaggaacccgaggaggagatagcaatggaggattcccccaccatggtgagggtggacagccccacgatggtgcgtggggagaaccaggttagtccttgccaaggccgaagatgcttccctaaagcccttggctacgttactggggacatgaaagagctggcaaatcaactgaaggacaaaccagtggttctccagtttatcgattggatccttcgaggtatatcccaagtagtgttcgtgaacaaccctgtcagcgggatcctgatattagttggacttctggtgcagaatccttggtgggctctcacagggtggctgggcaccgttgtctcaactttaatggcattgctattgagccaggaccggtccctgatcgcttcgggactctacggctataatgctacactggtgggcgtgctcatggccgtgtttagcgataagggagactacttctggtggttactgttgcctgtgtgtgccatgtctatgacctgcccaattttctcctccgctttgaacagcatgctgagcaagtgggacctgcccgtcttcacattgccatttaacatggccctgagtatgtatctcagcgctacgggacactacaacccctttttccccgcaaagcttgtgattccaattaccacagcacccaacatcagctggtcggacctgtcagctttagagctgctcaagtccatccccgtgggggtgggccagatctacggatgtgataacccgtggacgggcggtatcttcctgggagctattctgcttagctcccctctgatgtgcctgcatgcagccataggctccctgctcggaattgccgcaggtctctctctgtcagcccctttcgaggatatatatttcggactgtgggggtttaactccagtctagcttgcatcgcaatgggaggaatgttcatggcgctcacgtggcaaacacatttactcgcactcggatgcgccttgtttacggcctacctaggagtgggcatggcaaattttatggctgaggtgggcctgcccgcatgcacttggcctttctgccttgcaacccttcttttcttgatcatgaccacaaaaaatagcaacatctataagatgccgctctcaaaggttacgtaccccgaggaaaataggattttctacctgcaggctaaaaagaggatggtagagtcccccctgtag

SEQ ID NO: 241021 - DNA, 645 bp, synthetic construct
  misc_feature 1..645: note = Description of Artificial Sequence: Synthetic coding sequence
  source 1..645: mol_type = other DNA
atgaatggacgcagtctgatcggtggagcaggtgatgcccgacacgggcctgtctggaaggatcctttcgggaccaaagctggagatgcggctcggaggggaatcgctagactgagtctggccttagccgacggatcacaggaacaggagcctgaggaggaaattgccatggaagactccccaacaatggttcgggtagactctcccaccatggtccgaggagaaaaccaggtatcaccatgccagggacggaggtgttttcccaaagcacttggctatgtgaccggagacatgaaagagctcgcgaatcagctcaaggacaagcctgtagtcctgcagtttatcgactggattcttagggggatttcacaggtggtttttgtgaataatcccgttagcgggattttgatactagtcggcttgttggtgcagaatccctggtgggccctaaccggttggctcggcaccgtggtttcaactctgatggccctgctactgagccaagatcgctcactgattgcctcaggtctgtacggatataatgccactctggtcggcgtgctgatggccgtgttctcagacaagggggattatttctggtggttgctgcttcctgtctgcgcaatgtctatgacttgttgctag

SEQ ID NO: 241022 - DNA, 846 bp, synthetic construct
  misc_feature 1..846: note = Description of Artificial Sequence: Synthetic coding sequence
  source 1..846: mol_type = other DNA
atgggtcgacggaatcgttcgctaatagcttcagggttatacgggtataacgcgacactcgtgggtgtgctcatggccgttttctctgataagggggactatttctggtggttgctgctaccggtgtgtgctatgtccatgacttgtcccatatttagcagcgctctcaactcgatgctgagcaaatgggatcttcctgtgttcactcttcccttcaacatggctttgagtatgtacttgagcgcaacgggacactataaccccttctttcccgcaaaactggtgatacccattacaaccgcacccaacatcagctggtctgatctgagcgcgttggagctcctgaaatccatcccagttggggtcggccagatctatggctgtgacaacccgtggacaggcggtatttttctgggcgctatcctgttgtcctcccctctcatgtgtctacacgctgcgattggctctctgctgggtattgcagctggattatctctatctgccccttttgaagacatatattttggactctggggatttaattccagcctggcctgtattgccatgggaggcatgttcatggcgctgacctggcagacccatctgctcgccctgggttgcgccctgttcactgcatatcttggggtgggaatggcgaatttcatggccgaggtgggcttgcccgcatgtacatggcctttttgcttggctacgctgttgtttcttatcatgaccactaagaatagtaacatttacaagatgccacttagcaaggtgacctatccagaagagaataggattttctatctccaggctaaaaagcgcatggtcgaatcccccctctag

SEQ ID NO: 241023 - DNA, 774 bp, synthetic construct
  misc_feature 1..774: note = Description of Artificial Sequence: Synthetic coding sequence
  source 1..774: mol_type = other DNA
atggccgtcttcagcgataaaggtgattacttctggtggctgcttctgcccgtttgcgcaatgagtatgacttgccctatctttagctcagcgctcaattctatgctcagcaagtgggacttgccagtgttcacacttccctttaacatggctttaagtatgtacttgtctgctacaggacattacaacccattttttcctgcaaagttggtaatccctattacgacagcaccaaacatctcttggtccgacctctctgcactcgaactgctcaaatcaatcccagtgggggtgggccagatatacggttgtgacaacccctggaccggaggcatatttctgggtgccatcctccttagttctccactcatgtgcttgcacgccgctatcggcagcctgctgggcattgccgcaggacttagcttaagcgctccatttgaggatatatacttcggcctatggggtttcaatagttcccttgcgtgcattgcaatggggggtatgttcatggcgctgacctggcagacacatcttctggctttaggctgcgccctctttaccgcgtatctcggcgtggggatggccaatttcatggctgaggtgggtctgccggcttgcacttggccattctgccttgccacccttttgttcctcattatgaccacaaaaaacagcaacatctacaaaatgccgctgtcaaaagttacctaccccgaggaaaacagaattttctatctccaggccaagaagcgaatggtcgagtcaccactgtag

SEQ ID NO: 241024 - DNA, 2763 bp, synthetic construct
  misc_feature 1..2763: note = Description of Artificial Sequence: Synthetic coding sequence
  source 1..2763: mol_type = other DNA
atgtctgacccacactcatcaccactgttaccagagcctctcagtagtagatacaagctgtatgaggccgagtttactagcccatcttggccgagtacgtctcctgatactcacccagctctaccactgctggagatgcctgaggaaaaggacttacgcagttctaacgaggactctcacattgtcaagattgagaaactgaacgaaaggtcaaagaggaaagacgacggcgttgcccatagggactcggcgggacagcgctgcatttgtttgagtaaagcagtagggtacttgacaggtgatatgaaggagtacagaatatggctgaaggacaagcacctggcactgcagttcattgactgggtcctcaggggtacagctcaggtgatgttcattaacaatcccctgagcggactaataatctttataggccttctgatccagaacccttggtggacgataaccgggggactggggacagtggtgtccactcttacagcccttgctctcggtcaagaccgatccgcgatcgcttcaggccttcatgggtataatggcatgctcgtagggttattaatggcagtgtttagtgaaaagctggactattactggtggctgctgtttcctgtcacttttacagccatgagctgcccagtcctttcatccgctctgaacagtatcttttctaagtgggacttgcctgtctttacactgccctttaacattgcagtgaccctgtacctggctgccaccgggcactacaatctgtttttcccgacaacactcgtggagccagtcagctccgttcctaacatcacatggacagagatggagatgccactactgctacaggcaatcccagtgggtgtgggacaagtctacggctgtgataatccatggacagggggagtgttcctggtggctcttttcatcagtagcccgctcatctgtttgcacgcggctatcggttcgatcgtcgggttgctcgccgcattaagtgtggctaccccctttgaaacaatatacacaggtctgtggtcatataattgcgttctgtcgtgtatagccattggcggtatgttttatgcattgacatggcaaacgcatttgcttgcactgatttgtgccttgttttgcgcctacatggaggcggctatttccaacatcatgtcagtcgtgggcgtccccccaggcacctgggccttttgcctcgctacgatcatcttcttgctgctgactacgaacaatccagcgatatttcggctgccactcagtaaagtgacctatcctgaggcgaatcgaatatactaccttaccgtaaagtcaggagaagaggagaaggcgccaagcggcggtggaggcgaacacccaccaaccgctggcccaaaagtggaggagggttctgaggccgtcctgtcaaaacatcggtcagtcttccatatcgaatggtcctccatcagacgacggagtaaagtgttcggaaaaggagaacatcaagagaggcaaaataaggacccctttccttacagatacaggaagcctactgttgaattgttagacctggatacaatggaagagtcaagcgaaattaaggtggagacaaatatctctaagacgtcttggattaggagctccatggccgctagcggtaagcgggtgtccaaggccctctcatatatcaccggggagatgaaagagtgtggagagggacttaaagacaaatccccggtttttcagtttttcgattgggtattacgcggaacatctcaggtgatgttcgtcaacaatcccctgagcggcatcctgatcatcctgggcctcttcatacagaatccttggtgggccatctctggctgtttgggaaccatcatgagtacactgacagctctcatcctgtcccaggacaaatctgctatcgctgcaggcttccatgggtataacggcgtgcttgttggcctgctgatggccgtcttttcagacaaaggtgactactattggtggctgctgctgcccgtcattattatgagcatgtcatgcccaattctcagcagcgccctgggtaccattttctctaaatgggatctgcccgtcttcactctcccattcaacattactgtcactctgtacctcgcagcgacaggacactataatcttttttttccaaccaccttgctgcagccagccagtgccatgccaaatatcacctggagtgaggttcaagtccctttgttgctccgcgcaatacccgttggcatcggccaggtttatgggtgtgacaacccttggaccggtggaatttttctcatagcattgtttatctcctcacctctgatctgcctgcatgcagccattggatctacgatgggcatgctggcagccctcaccatcgcgactccctttgacagtatttactttggcctgtgcgggtttaacagcaccctggcctgtatcgccattggtggcatgttctatgtgatcacctggcagacccatctcttagcgatcgcttgcgccctgttcgccgcttacctcggcgcagcgctcgcgaacatgctgagtgtcttcgggctgcctccatgcacctggccattttgtctgtcagccctgacctttttgctacttaccaccaataaccccgctatatataaactgccgttgtcaaaggtgacatacccggaggccaatcggatctattacctgtctcaggagagaaatcggagagcttccatcattacaaagtatcaggcgtacgatgtcagctag

SEQ ID NO: 241025 - DNA, 708 bp, synthetic construct
  misc_feature 1..708: note = Description of Artificial Sequence: Synthetic coding sequence
  source 1..708: mol_type = other DNA
atgtccgacccccattcatctcctcttctccccgagccgttatccagtcgttataagctctatgaagctgaatttacatccccctcatggccctcaaccagccctgacacacaccctgccctacctctgctggaaatgcctgaagagaaggacctgcggtcgtcaaatgaggactcccacatagtcaaaatcgaaaaattgaacgagagaagtaagaggaaggatgacggcgtcgcccatcgtgattctgcaggacaaaggtgtatatgtctgtctaaggcagtgggttacctgacaggcgatatgaaggagtacaggatctggctgaaggataagcacttggccctgcaattcatagactgggtgctacgcggaacagctcaagtcatgttcattaacaaccctttatcagggctgattatttttatcggcctgttaattcagaatccatggtggacaatcacaggtgggcttgggaccgtggtgagcacattgactgccctggctcttgggcaagaccggtcagccatcgcctctgggctccacggttacaacggaatgttagtaggcttgttaatggccgtcttctccgagaaattagattactactggtggctgctcttcccggtcaccttcaccgctatgagttggatggagacagacttcaattggtcaaagtcaggatgttggaagcatctcctgcagtag

SEQ ID NO: 241026 - DNA, 627 bp, synthetic construct
  misc_feature 1..627: note = Description of Artificial Sequence: Synthetic coding sequence
  source 1..627: mol_type = other DNA
atggatcagtggggagtgtattttaatcctgtcttggtaagtttttgccaatccttctttggttaccctctgtcaatcttctttattgtggtgaacgagttttgcgagcgattctcttattacggcatgcgcgctatcctgatcttatacttcacaaattttatcagctgggatgacaacttgtctacagccatttatcatacttttgtggccctgtgttacttgacaccaatactgggagctctgatcgccgactcttggctggggaagtttaagactatcgtgtccctttccatagtttacaccattggacaagctgtgacgagtgtgagctcaattaatgacctcactgaccacaatcacgatggaacccctgatagcctccccgtacacgttgttctctccctgattgggctagcactcattgcactgggcacaggaggcatcaaaccctgtgtctcagctttcgggggagatcagttcgaggagggtcaggagaagcagaggaatcgctttttctcaatcttctacttagccattaacgctggatctctcctaagtactattattacccccatgctgagaggaaagcgatacttaaagggaaccagcgtcggcttattctag

SEQ ID NO: 241027 - DNA, 849 bp, synthetic construct
  misc_feature 1..849: note = Description of Artificial Sequence: Synthetic coding sequence
  source 1..849: mol_type = other DNA
atgagagccatcctcatactgtatttcactaactttatttcctgggatgataatctctcaaccgccatataccacacctttgtagcgctgtgttaccttacccccatactgggagccctgattgccgatagctggttgggtaaatttaagaccattgttagcttaagcatcgtctacactattggtcaagctgtcacttccgtcagctctatcaatgatctcaccgaccacaatcatgatggtactcccgactcccttcccgtgcacgtggtgctgtctttaatcgggctggccctgatcgccctgggaacaggaggtatcaaaccgtgcgtaagtgcctttgggggagaccagtttgaggaggggcaggaaaaacagcggaaccgcttcttctccattttctatttggccattaatgccggttccctgctgagcactattataacacccatgctgagagggaagcgctatctgaagggcacaagcgtgggactattccttgtgcgccctagcccatgtctcctaagattcgtactgttttttccctcggctctgtttagctcatgccaactgcacgctggcatgcacgtgggaatttggtcaaagtgtttcctgccttgtgagtttcacttgctgtttgtcctgttcaagtccctgatccccgtcacaactggcgagagtaaaccctcacttgcttgggctagcatcttcctcaattgctactcttgcaaagtcatgctggttgtccggggtaagaggcaagaacgctgtctgggaagccaggcagggggtagatcctgtcacttcagcctgcaggcactgctgccttcagacatatctgtcacgtag

SEQ ID NO: 241028 - DNA, 2127 bp, synthetic construct
  misc_feature 1..2127: note = Description of Artificial Sequence: Synthetic coding sequence
  source 1..2127: mol_type = other DNA
atgggcatgagcaagtctcactctttttttggctacccgctttcaatttttttcatagtagtgaacgaattctgcgaaaggttctcatattacggcatgcgcgctatcctcatcctatactttacaaatttcatctcgtgggacgataatctatctaccgcaatttatcacacatttgtcgccctgtgctatttgacaccaatactgggggctcttattgcagactcctggcttggaaaattcaaaacgattgtgtcactcagcattgtctacactatcggtcaggccgtcacctccgtgagctccattaacgacttaacggatcacaatcacgatggcacaccagactccctgccggttcatgttgtcttatccctaattggccttgcactgattgcgctgggaactgggggaatcaagccatgtgtctccgcctttggaggagaccagttcgaagagggtcaggagaagcagcgtaataggtttttctccattttctacctcgctataaacgccggttcgctgctgtcaactattattactcccatgttacgcgttcagcagtgcgggattcactctaagcaggcttgctatccactcgcctttggtgttcccgctgctctgatggcagttgccctgatcgtttttgtgctaggtagtggcatgtacaagaaattcaagccccagggtaacataatgggcaaggtggccaagtgcatcggtttcgctatcaaaaatcggtttaggcatcgtagcaaggcttttcccaagagagaacattggctggattgggcaaaagagaaatacgatgaaaggctgatctctcaaattaagatggttacccgagtaatgttcttatatatccccctgcctatgttctgggcactgtttgaccagcaaggcagtcgatggactctgcaggctactaccatgagcggtaagatcggtgcgctggaaatccaaccagatcagatgcagacagttaacgcaattcttattgtaattatggtccccatcttcgatgcggtgctgtatcccctgatcgctaaatgtggctttaactttacttcccttaagaagatggctgtaggtatggtcctggcttcgatggcctttgtcgtggctgctatcgtgcaggtggagatcgacaagacattgcccgtatttcccaaaggcaacgaagtacagatcaaagtgttgaatatcggcaataacaccatgaacataagccttcctggggagatggtgaccctgggccctatgtcacagactaacgcctttatgaccttcgacgtaaataaactgacacggatcaatatctctagtcccggttcaccagtgacagccgtgactgatgacttcaaacagggccagaggcatacacttttggtatgggctccaaaccattaccaagtcgtcaaggacgggttaaatcagaagccagagaaaggagagaatggtatacggttcgtgaatacgttcaacgaactcataaccataaccatgagcggcaaagtatacgccaatatttcttcctacaacgcgtccacgtaccagtttttcccctccggaatcaaaggatttactatcagcagcaccgaaatccccccacaatgccagcccaacttcaacacattttatctggaatttgggagcgcttacacgtacatcgtgcagagaaaaaacgatagctgtcctgaggttaaagtgttcgaagacattagcgcaaatacagttaacatggccctgcagattccacaatacttcctcttgacatgcggtgaggtggtcttctcagtaaccgggctggaattcagctactctcaggcgccatcaaacatgaagagcgtgctccaggcaggctggctgcttaccgtggcggtaggcaacatcattgtgctgattgtcgctggtgccggacaattttccaagcagtgggccgagtacattctcttcgcagctctgttactggtggtgtgtgtgatctttgccattatggccagattctacacctacataaatcccgcagaaatcgaagcccagttcgacgaggacgagaaaaaaaatcggttggagaaatccaatccttattttatgtctggcgcaaactcacagaaacaaatgtag

SEQ ID NO: 241029 - DNA, 1503 bp, synthetic construct
  misc_feature 1..1503: note = Description of Artificial Sequence: Synthetic coding sequence
  source 1..1503: mol_type = other DNA
atgcccccagcggttggcggtccggtcggatacactcccccagacggcggttggggctgggctgtggtgataggcgcatttatttcaataggcttcagttacgctttcccaaagagtatcacagtgttcttcaaagaaatagaggggatctttcacgccaccacttcagaggtgtcctggatctcaagcattatgcttgcggtgatgtatggaggcggaccgatctcgtccatcctggtgaacaagtacgggagccgcattgtcatgattgttggagggtgcctgtcaggctgcgggctgatagcagcctctttctgtaacacagtgcaacagttatacgtttgtatcggtgtgatagggggtctcggcttggctttcaatctgaaccctgcgctgactatgatcggaaaatatttctacaaaaggaggccgttagcaaatggactcgcgatggcaggcagtcccgtattcctttgcacactggcacctctgaatcaggtttttttcggcatatttgggtggcgagggagcttcctaatactgggcggactcttgctgaattgttgcgtggcgggtgcgctgatgcggccaataggtccaaaaccgacaaaagccggtaaggataagagcaaggcctcattggagaaggctggtaaatctggcgtaaagaaagatttgcacgacgcaaacacagatttgattggtcggcatcctaagcaggagaaacgtagtgttttccagactatcaaccaattcctggacctcactctgttcacccatcgtggctttctcctttatctgtcgggaaatgtgattatgttttttggtctgtttgcacccttggtctttttatcatcctacggtaaatctcagcactactccagcgaaaagagcgcattcctgctatccatcctagcttttgttgacatggtcgcacgccctagcatgggcctggtggccaataccaagccaatccgaccgcgaatacagtactttttcgctgcttccgtggtcgccaatggagtatgtcacatgctagcgcctctctccaccacctatgttggattttgtgtctacgccggattctttggcttcgcttttggatggctgagttcggtcctgtttgagacgcttatggacctagtggggcctcagcgtttcagcagcgccgtggggctcgttactatcgttgagtgctgcccagttctactgggtccacccctgctcggacgcctgaacgatatgtacggcgattacaagtatacatattgggcctgcggagtcgtgcttattatctctgggatttatctgttcattgggatgggcattaattaccggttattagctaaagagcaaaaagcgaacgagcagaaaaaggaatccaaggaggaggaaacgtcaatcgatgttgcgggaaagcctaatgaggtaacaaaggccgctgagtcccctgatcagaaggacaccgacggcggtccaaaggaggaggagtcccccgtatag

SEQ ID NO: 241030 - DNA, 648 bp, synthetic construct
  misc_feature 1..648: note = Description of Artificial Sequence: Synthetic coding sequence
  source 1..648: mol_type = other DNA
atgcctcccgcagtgggtggaccagtgggctatacgccccctgacgggggatggggttgggcagttgtaatcggggcattcatcagcatcggcttttcctacgctttccccaagtctataaccgtcttttttaaagaaatcgaggggatcttccatgctaccacctctgaagtctcttggatcagttccatcatgctggccgtgatgtatggcggagggccaatctcgtccatcttggtaaacaagtatggtagcaggatcgtcatgatcgtcggcggttgcctgagcggttgtggcctgatcgctgcatctttttgcaacacagtgcaacagctctacgtctgtattggtgtaattggcggactcggtttggctttcaatttaaaccccgctctgacaatgatcggtaagtacttctacaagcgcagaccattggccaatggcctggcaatggccggtagtcctgtattcctttgcaccctggcaccgctcaaccaggttttttttggcatattcggctggcggggtagcttcctcatcctggggggacttctgctgaactgttgtgtggcgggagccttgatgcgtcctatcgggccaaaaccaacaaaggccggaaaggataagagcaaggcctctctagagtag

SEQ ID NO: 241031 - DNA, 1293 bp, synthetic construct
  misc_feature 1..1293: note = Description of Artificial Sequence: Synthetic coding sequence
  source 1..1293: mol_type = other DNA
atgccccctgccgttggcggtccagtcggttatacccctccagacggcggatggggttgggccgtcgttattggagcctttatttctattggtttcagctatgctttccccaaatccatcactgtattctttaaggaaatcgaggggatctttcacgccacaactagtgaggtcagctggatatcttctattatgctcgccgttatgtatggtggcggacccattagttctatactcgttaataaatatggttcacggattgtgatgatcgtaggcggttgcctatccggctgcggtctgatcgccgcatccttctgtaacacggtgcagcagctgtacgtctgtatcggtgttattggcggtctgggtttagctttcaacctgaacccagccctaacaatgatcggcaaatacttctataaacgacggcctctggctaatgggctcgcaatggccggttcccctgtgttcttgtgcactcttgcccctctcaatcaagttttttttgggatttttggatggcgcggtagttttctcatcttagggggactgctactgaactgctgcgtggccggtgctctcatgcgacctatagggccaaaaccaaccaaggcaggaaaggataagtctaaagcttccctggagaaagctggcaagtcaggggtcaaaaaagacttgcacgatgccaacaccgacctcattggacgccacccaaaacaggagaaaaggagcgtattccagacaatcaatcagtttctggacctaactttgttcacgcatagaggattcctgttatatctgagcgggaatgtcatcatgtttttcggtctgtttgccccactggtgtttctatcaagctatggcaagtcccagcactacagttcagagaagagcgctttcttactgtccatcctggcattcgtcgacatggttgccaggccgtctatgggtctggttgctaacaccaagccgatcaggccgcgaatccaatacttctttgccgcatccgtggttgctaatggcgtgtgccatatgcttgcaccactgtctacaacttacgtgggattctgcgtgtacgctggctttttcggcttcgccttcggctggctctctagcgttctgtttgaaaccttgatggacctcgtgggcccacagcgtttctccagcgccgtgggcttagtcacaattgttgagtgttgcccagttctacttggccctccactcctgggcatcgtgtacctgcctacaaatgtgggtcttcttcagaataaacacgtaaggtgggagtgttag

SEQ ID NO: 241032 - DNA, 891 bp, synthetic construct
  misc_feature 1..891: note = Description of Artificial Sequence: Synthetic coding sequence
  source 1..891: mol_type = other DNA
atgcctcccgcagttgggggacctgtcggatatacaccaccagacggcggatggggctgggccgtggttatcggcgcatttatctccatcggtttttcatatgctttccctaagtctattacagtgttctttaaggagattgaggggattttccatgcgactacaagcgaggtatcttggatctcatctatcatgctcgccgtgatgtatggcggtgggccaattagctctattctcgttaacaaatacggctcccgaattgtaatgatcgtgggcggttgtctgtctgggtgcgggctcatagcagcatctttctgcaacaccgtccagcagctgtatgtatgtataggtgtgattgggggactgggtctcgcattcaatctgaaccctgccctcaccatgatcggaaaatacttttacaaaagacgcccacttgctaatggactggcgatggccggaagccccgtatttctatgcaccctcgctccactaaaccaggtcttctttggcattttcgggtggaggggatcatttctgatccttggtggcctgttgctcaattgctgtgtggccggagctctgatgcggcctattgggcctaaacctactaaggccggaaaagacaaatccaaagccagcttagaaaaagctgggaagagcggcgtgaaaaaggatttgcatgatgccaacactgacctgatcggaagacaccccaaacaggagaagcgtagtgtgttccaaaccatcaaccaattcttagacctaaccctgtttactcatcgcggattcctgctgtacttgagcggcaatgttatcatgtttttcggactctttgcgcctctcgtatttctgtctagctacggaaagtctcaacactatagcagcgagtag

SEQ ID NO: 241033 - DNA, 1371 bp, synthetic construct
  misc_feature 1..1371: note = Description of Artificial Sequence: Synthetic coding sequence
  source 1..1371: mol_type = other DNA
atgccaccggctgtggggggtccggtcgggtatacccctcccgatgggggttggggttgggcggtcgtaataggcgcttttatatcgataggtttctcatatgccttcccaaagtcaattaccgttttctttaaagaaattgagggtatctttcatgctaccacttcagaagtgtcatggattagctcaatcatgttggcagtcatgtatgggggagggccaatctcctccatccttgtgaataagtacggcagcagaattgtgatgatcgtggggggatgtttgtcgggttgtggtctcattgccgcttctttttgcaacactgttcagcagctctacgtttgtattggtgtcatcggaggtctcggactggccttcaacctaaatcccgcactgacaatgataggtaagtatttctacaagagaagacccttagctaacgggttggcaatggccggaagccctgtgttcctgtgcactcttgcccctcttaaccaggtcttctttgggatcttcgggtggcgcggatcctttttgatactaggcggtctcctgttgaactgttgcgtcgcgggagccctgatgcgtcctatcgggcctaaaccgacgaaagcgggtaaggacaagagcaaagcatctttggagaaagccggaaagtccggagttaagaaggatctgcacgatgcaaatacagacctgataggtagacatccaaagcaggaaaaaaggtccgtctttcagaccattaaccaatttctggacctcaccctcttcactcatcgtggttttcttttgtacctcagcggcaatgtcattatgttttttggactgttcgcaccactggtcttcctcagttcctatgggaaaagccagcactactctagtgagaaatccgcatttctgttatccattctcgccttcgtggacatggttgctcggccatccatgggactggtggccaatacaaagcccattaggccccgtatccagtacttctttgctgctagcgttgttgccaacggcgtatgtcatatgctcgctcccctgtcgaccacctatgtcggattctgtgtctatgcaggatttttcggattcgcattcggctggctgagcagtgtgttgtttgagactctgatggatttagtgggcccacagaggtttagtagtgccgtcggtctcgtcacaattgtcgaatgttgtccggtgctgctgggcccacccttgctcggccgacttaacgacatgtacggcgactataagtacacctactgggcctgcggtgtcgtgttgataatttcagggatctacctgttcattggcatgggaattaactacagactgttggcgaaggaacaaaaggctaacgagtag

SEQ ID NO: 241034 - DNA, 1503 bp, synthetic construct
  misc_feature 1..1503: note = Description of Artificial Sequence: Synthetic coding sequence
  source 1..1503: mol_type = other DNA
atgcccccagctgtgggcggacccgttgggtatacaccccctgacggagggtgggggtgggccgtggttattggggctttcatctccattggctttagttatgcatttcctaaatccatcactgttttttttaaagaaattgaaggcatcttccatgcaactacttccgaagttagttggatcagctcaatcatgctggccgtcatgtatgggggaggaccaatcagttcaatcctggtgaataagtatggaagtcgcattgtgatgatagtaggcggttgcctcagcggctgcggcctcattgcggctagtttttgtaatacagtgcagcaactttacgtctgcattggggttatcggaggactgggcctcgccttcaacctcaaccctgccctcacaatgatcggtaaatatttctataaacgaagacctctcgctaatggactggccatggccggttctcctgtgttcctttgcaccctggcacctcttaaccaggtcttttttgggatctttggttggcgcggaagctttctcatactcgggggtctgttacttaattgctgtgttgctggcgcattgatgagaccaattggaccaaaacctaccaaggcgggtaaggataagtccaaggccagtctggaaaaggctgggaagtcaggtgtcaagaaagaccttcacgacgcaaatacagatctcatcgggaggcacccgaagcaagagaagaggagcgtcttccaaacaatcaaccagtttttggatcttaccctgtttacccatcgcggattcttgctgtatttgagcggcaatgtgattatgttttttgggctcttcgcacccctggtgttcctgtcatcatacgggaaaagccagcattacagttcagagaaatctgcatttctgctgagtatcttggcattcgtggatatggtggctcgcccatctatggggctggttgccaataccaagcctatccggccaagaatccagtattttttcgctgcatcggttgtggcgaatggagtgtgccatatgctggctccgctgagtactacatacgttggtttctgtgtgtacgcagggttctttggatttgcttttgggtggctgtccagcgtcctgtttgagaccctcatggatctggtgggacctcagcggttcagctccgccgttggccttgtgactatcgttgaatgttgcccagtgctgctcggacctcctctgctgggcagactgaacgacatgtatggagactacaagtacacctactgggcttgcggggttgtcctgattatatccggtatctacttattcataggtatgggcatcaattatagactgctggccaaggaacaaaaggcaaatgaacaaaagaaagaatcaaaggaggaagagacttcaattgatgtggccggtaaacctaatgaagtcaccaaggccgcagaatcacccgaccaaaaagatacagacggcggtcccaaggaagaggagagccccgtctag

SEQ ID NO: 241035 - DNA, 606 bp, synthetic construct
  misc_feature 1..606: note = Description of Artificial Sequence: Synthetic coding sequence
  source 1..606: mol_type = other DNA
atgaagcatgtgaacgagcgcttccaagacgaaaagaacaaagaagtcgtgctgatgtgcataggggtgacttccggcgttggacgacttttattcgggaggatagccgattacgtccccggagtcaagaaagtgtacctccaggtgctgtctttttttttcattggcctgatgagtatgatgataccactgtgcagtatattcggagcactgatagcagtctgtctgattatgggactcttcgacggttgttttatatccatcatggccccaatagcttttgaattggttggggctcaggatgtgtcacaagccattggatttctgctaggcttcatgagcataccgatgacagtggggccacctattgccggacttctgcgcgataagcttggatcctacgacgtggccttctatctggctggcgttcctcccctaatagggggagctgtgctttgcttcatcccctggatccactctaaaaagcagcgcgagatcagcaagaccacgggcaaagagaagatggagaagatgctcgagaatcaaaacagcctcctgtcgtctagctccggcatgttcaagaaggaatccgactcgattatctag

SEQ ID NO: 241036 - DNA, 1548 bp, synthetic construct
  misc_feature 1..1548: note = Description of Artificial Sequence: Synthetic coding sequence
  source 1..1548: mol_type = other DNA
atggttctgtcccaggaggaacccgacagtgcccgtggtacctccgaggctcaaccattgggaccggcaccaaccggggctgcgcctcctcccggtcctggtccttccgatagccccgaggccgcagtggagaaagtggaggtggaattggccggaccagccacagccgagcctcacgaaccgccagagccgcctgagggaggctggggttggcttgttatgttagctgcgatgtggtgcaacggttccgtgttcggaatccagaacgcctgtggcgtattattcgtatctatgcttgaaactttcggtagcaaggatgatgacaaaatggtgtttaaaaccgcctgggtaggttcactgagtatgggcatgatcttcttctgttgcccgattgtgagtgtgttcacagatcttttcggttgcagaaagacagctgtcgtaggagcagcagtaggattcgtcggacttatgtctagtagtttcgtgtccagcatcgagcctctgtacctgacctacgggattattttcgcctgcgggtgttctttcgcctaccagccaagcctcgtgattttagggcattactttaagaagagacttggcctggtgaatgggattgtgacagcaggctcgtcagtgttcaccatcctcctccccctgttactccgggtcttaatcgacagcgtgggattgttttacacattgagggtgctctgcatctttatgtttgtcctgtttctggccggtttcacatataggccactcgccacaagtacaaaggacaaggagtctgggggatcaggaagtagcctgttcagtcgtaaaaaattcagcccacccaaaaagattttcaacttcgctatttttaaggttacagcatacgccgtgtgggccgtgggcatcccactcgcattatttggatatttcgttccatatgtgcatctgatgaagcacgtcaacgaacggtttcaggatgaaaaaaacaaggaagtggttctgatgtgtatcggtgtcacatcgggcgtcggccgacttctgtttggcaggattgccgactacgtgccgggagttaagaaggtgtacttgcaagtcctgtcgttctttttcattggtctgatgagcatgatgattcccctctgttctatctttggagccttgatcgccgtctgtttgataatgggcctgttcgatggttgttttattagcattatggccccaatcgcctttgagctggtgggagctcaggacgtgtcacaggccatcgggtttctccttgggtttatgagcataccgatgactgttggcccaccaattgccggattactgagggacaagctcgggtcctacgacgtcgctttctatctggcaggagtccctccacttatcggcggagccgtcctctgcttcatcccctggattcacagtaaaaagcagcgggagatctctaagaccaccggcaaggaaaagatggaaaaaatgcttgagaaccagaacagcctgctgtcatcatctagcggaatgttcaagaaagagagcgatagcataatctag

SEQ ID NO: 241037 - DNA, 651 bp, synthetic construct
  misc_feature 1..651: note = Description of Artificial Sequence: Synthetic coding sequence
  source 1..651: mol_type = other DNA
atggtgttcaagactgcctgggtcggctccctgtctatggggatgatttttttttgttgtccaatagtctccgtctttactgatctatttgggtgccgcaaaacagccgtggttggcgctgcggtgggcttcgttggcctgatgagcagttcctttgtgagcagcatcgagccactgtacttgacttacggcattatcttcgcatgtggctgtagctttgcataccagcccagcctggttattcttgggcactacttcaagaagcgccttggcctggtgaatggtattgtgaccgctggaagctcagtgttcaccatcctgcttccgcttctgctgagggtgctcatagactccgtggggctcttctatacactgagagtattatgcatctttatgtttgtcctttttctggctggctttacctatcggccactggccactagcacgaaggacaaggagtcaggagggtccggctcgtccctcttttcccgcaagaaattttctccacccaaaaagatctttaatttcgccatcttcaaagttacagcatatgccgtttgggccgtgggaattccgctcgccttatttggatactttgtgccatacgttcatctggccaaattctcattcgttatcctgaaatatgagtag

SEQ ID NO: 241038 - DNA, 636 bp, synthetic construct
  misc_feature 1..636: note = Description of Artificial Sequence: Synthetic coding sequence
  source 1..636: mol_type = other DNA
tgatgggtaggcagcctgagtatggggatgatttttttctgctgcccaatcgtgtcagtgttcaccgacttgttcggatgccgaaagactgcagtggtgggcgcagctgtgggcttcgtgggtcttatgagttcttcattcgtgtcgtcaatcgagcctttgtacctgacatatggaatcatcttcgcatgcgggtgctcttttgcctaccagcccagtcttgtcatactagggcactacttcaaaaagcgcctcggcctcgtcaacggcattgtaacagctggcagcagcgtcttcacaattctcttaccccttctgctccgagtgctcatcgactcagtgggattattttacacacttcgtgtgctgtgcatcttcatgttcgtcctgtttctggccggtttcacttacagacctctggcaactagtaccaaggataaagaaagtggtggctctggaagctccctgtttagtcggaagaaattttcacctcccaagaaaatattcaattttgctatctttaaggtgaccgcctacgcggtttgggcagttggaattccgctcgcattgttcggttactttgttccctacgtccatcttgcaaagttcagtttcgtgattctgaaatacgaatag

SEQ ID NO: 241039 - DNA, 621 bp, synthetic construct
  misc_feature 1..621: note = Description of Artificial Sequence: Synthetic coding sequence
  source 1..621: mol_type = other DNA
taatgggtgggatccctcagcatgggaatgattttcttttgctgtccaattgtgagcgtgttcacagatctcttcggatgccggaagaccgcagtggtgggagctgcagtagggttcgtagggctcatgtcatcttcattcgtgagcagcatcgagccactgtatctgacttacggaatcattttcgcctgcggttgttcttttgcctaccagcccagcctagtgatcctgggtcactattttaagaaacggttagggcttgttaatggtattgtaacggctggttcaagtgtcttcaccattctgttaccactgctgctccgggtgcttattgactccgtgggcttgttttatacactacgggttctgtgcattttcatgtttgttctgttcctggcagggtttacttacagacccctggcaactagtactaaggataaagagtcaggaggtagcggcagctccttgttttcgaggaagaaattctcaccacctaaaaagattttcaactttgcaatatttaaagtgacagcatacgccgtgtgggctgtcgggatacctctggcactttttggttacttcgtcccctatgtgcacctcgtgtctatgctgctgcactag

SEQ ID NO: 241040 - DNA, 981 bp, synthetic construct
  misc_feature 1..981: note = Description of Artificial Sequence: Synthetic coding sequence
  source 1..981: mol_type = other DNA
atggtgctctcccaagaagagccagactcagcacggggaacgtccgaggcacagccgctgggcccagcccctaccggagcagccccacccccaggacccggaccctctgacagcccggaagccgcagtcgaaaaagtagaggtagagctagccggtccagctaccgcagagccccacgagcccccagaacctccagagggcggatgggggtggctcgtcatgctagctgccatgtggtgtaatggatctgtttttggaattcagaatgcctgtggcgtcttgttcgtatccatgctggagacattcggctcgaaagatgatgacaagatggtgtttaaaaccgcatgggtgggaagtctgagtatgggaatgatcttcttctgttgtccaatagtgtccgtgttcaccgatttgttcgggtgtcgcaagaccgcagttgtcggcgcagctgtaggtttcgtggggcttatgtcctcgtcctttgtgtctagcatcgagcccttgtatctgacctacggcatcatctttgcatgtgggtgcagctttgcataccagccctcgcttgtcattcttggtcactactttaagaagcggctcggcctcgtcaatgggatcgtgaccgctggcagctccgtgtttacaatcctgctgcccctgctgctcagggtgttgatcgatagtgtgggattattttataccctgcgtgtcctgtgtatcttcatgttcgtgctgttcctggctggttttacttaccgaccgttggccaccagcaccaaagacaaggagtcagggggaagcgggagctcgctgttctccaggaagaagttctcgccaccaaaaaatttccagttctgccaccttcagggagattccctctgtagtgtcggctcctggaataccacctgtacgttctggattttatgtgctctgtgcagccttggggagtacgcaccaagtctgataatgaatattaccatttag

SEQ ID NO: 241041 - DNA, 1461 bp, synthetic construct
  misc_feature 1..1461: note = Description of Artificial Sequence: Synthetic coding sequence
  source 1..1461: mol_type = other DNA
atggctaaggttaatcgggcacgatcgacttccccacctgatggcggatgggggtggatgatagtagccggatgtttcctggtgaccatctgtacaagagccgtgacccgctgcatctctatctttttcgtcgaattccagacatacttcacccaagactacgcccagactgcgtggattcacagcatagtcgattgcgtgactatgttgtgtgctccactcgggagcgtggtctcaaatcacctctcatgtcaggtgggcatcatgttaggcggattgttggcctccaccgggctcatcctttcttccttcgcgacatcactgaaacatctgtatctcaccctgggggtgctgaccgggctcggattcgctttgtgctatagccccgcaatagctatggtcggcaagtatttctccagaagaaaggcgcttgcatacggcatcgctatgagtggctcaggtatcggaacattcattctcgccccagttgtccagctcctaattgagcaatttagttggaggggagcattgctgattctcggtggcttcgtactcaatctgtgtgtgtgtggggcacttatgcggccaatcaccttgaaggaggatcataccacccctgaacaaaaccacgtgtgcagaacacagaaggaagatattaagcgcgtgtcaccgtacagcagtttgaccaaagaatgggcacaaacatgcctgtgctgttgcttgcagcaagagtactccttcttgctcatgtcggatttcgtggttctggccgttagcgtcctcttcatggcttacggatgtagccctctcttcgtgtacctagtcccgtacgccctctcagtgggggtaagtcatcaacaggcagcttttctgatgtccatcctgggcgtcatcgacatcatcggcaatattacatttggctggttgacggaccgtaggtgcctcaagaactatcagtacgtctgttacctgtttgcagttgggatggacggactgtgttacttgtgtcttcccatgctccaaagcctccctctcttggtacctttttcctgcacattcgggtactttgatggcgcatacgtcaccctcattcccgtggtgactactgaaatagtgggtactacaagtctctcttcagccctaggcgtcgtctactttctgcacgctgttccatacttagtgagcccccctatagcgggtcgcctggtcgataccaccggatcctatacggccgcttttctcctgtgcggcttcagcatgatcttttcttccgtcctgctggggtttgccagactcataaagcggatgcgtaaaacccagctgcagtttatcgctaaggagtcggatcccaagttacaactgtggaccaatgggtccgtggcatacagcgtggccagagagctggaccaaaaacacggtgagcctgtagccacagccgtccccggatactcattaacttag

SEQ ID NO: 241042 - DNA, 1551 bp, synthetic construct
  misc_feature 1..1551: note = Description of Artificial Sequence: Synthetic coding sequence
  source 1..1551: mol_type = other DNA
atgccgagcgggtctcattggactgctaattcctcgaagattatcacatggctgttggagcagccaggtaaagaagaaaagcgcaaaacgatggctaaggtgaatcgagcgcgatctacaagtcctcctgatggcggatggggatggatgattgtggctggttgctttcttgtgacaatctgtaccagagccgtgacgagatgtatcagcatcttctttgtcgaattccaaacttacttcactcaggactatgcgcagacagcatggatacatagcattgtcgactgcgtaacaatgctgtgtgccccactgggttccgttgttagtaatcatctcagttgtcaagttggaatcatgctgggaggtcttctggcatcgactggattaatcctctcatcattcgccacctcattaaagcacctctacttgactctgggagtgcttacaggcttagggtttgccctctgttactcgcctgccatcgccatggtgggtaaatatttctccagacgcaaggctctggcatacggtattgccatgagcggcagcggtatcggcactttcatccttgcccctgttgtccagctgctgatcgaacaatttagctggcggggagctcttttaatattggggggatttgtactaaacctctgcgtgtgtggcgcactgatgagaccaattacgcttaaggaagaccacacaacccctgaacagaatcatgtatgtcgaactcaaaaggaggatatcaagcgcgtttccccatactcaagcctgaccaaagagtgggcccagacatgcttgtgctgctgcctccagcaggaatactccttcctgttgatgtccgacttcgtggtcctggctgtgagcgtgctgtttatggcttatgggtgttcacccttgtttgtgtacctggtcccgtatgctctgtcagttggcgtgtcccaccagcaagccgcatttttgatgtcaattctgggcgtcatcgacatcatcggcaatattacgttcggctggttaaccgaccggagatgtcttaagaactatcagtacgtctgctacctctttgcggtcggtatggatgggctgtgttacctgtgccttccaatgttacagtcactcccgttactggtgcccttcagttgcacctttgggtacttcgatggtgcctatgtgaccctgatacctgtggtgactaccgaaattgtggggactacttctctgtccagtgcgctgggagtcgtttacttccttcacgccgtcccctacttggttagtccaccaatcgccggacgcctcgtcgacacaactgggagctatactgccgcattccttctctgtggattttctatgatatttagttccgtgctgctgggcttcgctaggcttatcaagcgtatgcgaaaaacacagctgcagttcattgctaaggagtctgaccccaagctacagctatggaccaacggatccgtggcatatagtgttgcacgggagttagaccagaagcacggggagcccgtggcgacagccgtccccggttattccctaacgtag

SEQ ID NO: 241043 - DNA, 78 bp, synthetic construct
  misc_feature 1..78: note = Description of Artificial Sequence: Synthetic coding sequence
  source 1..78: mol_type = other DNA
atgccgtcggggtcacattggacagccaattccagcaagatcattacatggctgttggaacagcccggtaaggagtag

SEQ ID NO: 241044 - DNA, 453 bp, synthetic construct
  misc_feature 1..453: note = Description of Artificial Sequence: Synthetic coding sequence
  source 1..453: mol_type = other DNA
atgcggcctattacactcaaagaggaccacactacccctgaacagaaccacgtctgccgcacgcagaaggaggatatcaagagagtaagcccatactcaagtctcacaaaagaatgggcccagacctgtctctgttgttgtctgcagcaggaatactcattcctgttgatgagcgattttgtggttttggcagtctcggtgctatttatggcttatggctgttcacccttattcgtttatcttgtcccatatgcgctttcagtgggggttagccatcaacaggctgcgtttctgatgtctatattgggtgtgatcgacatcatcggaaacatcaccttcggctggctaacagatcgtcggttctgtattaaaacgttcggaatcttccgtaagtccgtaaggaagatgtacatcttgcgaagcacaattttacacttttatacagagttttag

SEQ ID NO: 241045 - DNA, 1842 bp, synthetic construct
  misc_feature 1..1842: note = Description of Artificial Sequence: Synthetic coding sequence
  source 1..1842: mol_type = other DNA
atgggaagagggggaggaggcttagatgttggagggggtggcgaagggtccagggatcgcctttctagagatgggcttgcctcgtggggggcagagccagggggtggcggaagcggatccgggtcttccagccccccatcctcgagctcatgtagctcccgtaacaagtatcaaccccaatccggctccagcggcccatcctcacatagtccgccagcggcaatggccctccaaagccaagccagtgaggaagcgaaggggccttggcaagaggccgaccaagaacagcaggaaccagtggggtctcctgaaccagaaagcgagcccgagcccgaacctgaacctgagcccgtgcctgtgccacccccagaaccgcagcccgagccccagcccttgccagaccctgcaccactgccagagctggaattcgagagtgagagagtgcacgagccagagcccacccccactgtagaaactaggggaaccgccaggggattccaaccacctgagggaggtttcgggtgggtcgtggtgtttgccgctacctggtgcaatgggtctatttttgggatccataattccgttgggattctgtattctatgttgcttgaagaggaaaaggagaagaacaggcaggtggaattccaggccgcttgggtgggtgcgctcgcaatggggatgatttttttctgttcccccatcgtgtccattttcactgataggttgggttgcagaattactgcgactgccggtgccgcagtcgcttttattgggctacacacctccagcttcaccagcagcttaagcctccgatactttacgtatggcattctctttgggtgcggctgttcatttgctttccaaccaagtctggttattcttggtcactactttcagcggcgattgggactggcaaatggcgtagtgagcgccggaagcagtattttcagtatgtccttccctttccttattcgcatgctgggggacaagattaaattggcccaaacgttccaggtgctgagcacatttatgtttgtactcatgctgttgagtctcacgtacagaccattgttacctagcagccaagacaccccaagtaagcggggagtaagaactctgcaccagcggttcttggcacagctacggaaatacttcaatatgcgagtgtttcggcaacgcacctatcggatttgggcctttggtatcgcagcagctgccctgggttactttgtcccatacgtccacttgatgaaatacgtggaagaagagttcagcgagataaaagagacctgggtcctcttggtgtgcattggagccacctccgggctagggagactggtttccggccatatttctgattcaatccccggattgaaaaagatttatctgcaggttttgagctttctgctgttgggacttatgtctatgatgatcccgctatgtagggattttggaggtttaatcgtggtttgtttgttccttgggctgtgtgacggtttcttcatcaccattatggcaccgattgcctttgaattagttgggcctatgcaagcctcccaggccataggctacctacttggaatgatggctcttccaatgatcgctggacctccaatagcagggttgctgaggaactgcttcggcgattaccacgtggctttttacttcgcgggtgtgccacccatcatcggcgcagttattctcttcttcgtgcccctgatgcatcagagaatgttcaagaaggaacaaagagactcctctaaggataagatgttggctccagatcccgatccaaatggtgagctgctgccaggatctccaaaccccgaagaacctatttag

SEQ ID NO: 241046 - DNA, 1437 bp, synthetic construct
  misc_feature 1..1437: note = Description of Artificial Sequence: Synthetic coding sequence
  source 1..1437: mol_type = other DNA
atgccgcctatgccctctgctccccctgtgcaccctccgcctgatggtggatggggttggattgtcgttggcgctgccttcatctccatcggcttctcatatgcttttcccaaggcagtgaccgttttcttcaaggaaatccagcagatcttccacacaacttattctgagatcgcgtggatctcttcaattatgctcgccgttatgtacgccggtgggccagtgtcaagtgtactggtcaacaagtatggctcgcggcctgttgttatcgccggaggcctgctgtgctgcttaggtatggtcctagcctcttttagcagctctgtcgtgcagctgtatctcacaatgggcttcattacagggcttggcttggcctttaatctccagccagccttaaccatcatcggaaagtacttttaccgcaaacgtcccatggcaaacggccttgctatggccggaagcccagtgttcttgtcatcgctggccccttttaatcagtacctttttaatacttttggatggaaagggagctttcttatcctcggctccctcctgctcaatgcttgcgtagcaggaagtctcatgaggcctctcggtcctaatcagaccacctccaagtccaagaataaaactggtaagaccgaggatgatagttccccaaagaagataaagactaagaaaagtacctgggaaaaggtgaacaagtacctggatttttccttattcaaacatagggggttcctaatctacctttccggaaacgtaattatgtttctcggctttttcgccccaatcatattcctcgcgccatatgctaaggatcagggcatcgatgagtactcagcggctttcctgctgagtgtcatggctttcgtcgacatgttcgccagaccgagtgtcgggctaattgctaacagtaaatacataaggcctcggatccagtacttcttttcctttgcaattatgttcaacggcgtgtgtcacctgctttgtcccctggcacaggattatacttctctggtcctgtatgctgtcttcttcggtcttggttttgggtccgtttcctccgtgctcttcgaaacactgatggatctggttggcgcacctcggttctcaagcgcagttgggctcgtgacgatcgtcgagtgcggccctgtattactcggccctcccctcgcgggaaagctggtcgacttgacaggcgagtataaatatatgtatatgagctgtggggctatcgtagtggccgcaagtgtctggctgttaatcggaaacgccatcaattacagactgctcgcaaaggagagaaaggaggaaaacgctcggcagaagacaagagagagcgagcctctgagcaaatccaagcatagcgaggacgtaaacgtcaaggtgtcaaatgcccagagcgtgacttctgagagggaaacgaacatttag

SEQ ID NO: 241047 - DNA, 1140 bp, synthetic construct
  misc_feature 1..1140: note = Description of Artificial Sequence: Synthetic coding sequence
  source 1..1140: mol_type = other DNA
atggtgctggcaagctttagcagcagcgtggtccaactgtacctaaccatgggctttataaccgggctaggattggccttcaacctccagcctgcactgaccatcattggaaaatacttctaccgcaagcgcccaatggccaacgggctggccatggctggatctcctgtctttctctccagtcttgccccattcaaccagtacctgtttaacacctttgggtggaagggcagtttcctgatacttggatcccttctcctcaacgcatgcgttgcagggtccctcatgcgccctctgggcccaaaccagaccacttccaagagtaagaacaagaccggcaagactgaggacgacagttctcctaagaagatcaaaaccaaaaagtcaacgtgggagaaagtcaataaatacctggacttcagcctattcaagcatcggggattcttgatatatctgtctggaaacgttattatgttcctagggttctttgccccaatcatatttctcgcaccatacgcgaaagaccagggcatcgacgagtattccgcagcattcttgctgtcggttatggctttcgttgatatgttcgccagaccctccgtcggacttatcgccaacagcaagtacatcagacctcgcatccaatacttcttctcctttgccatcatgtttaacggagtctgtcatttgctttgtccgctagcccaggattacaccagcttagtgctttacgccgtgtttttcggactgggcttcggatcagtctcctccgttctctttgagaccctgatggatcttgtcggcgcacccaggttctcatccgcagtggggctggttacaattgtcgagtgcggccctgtgcttctggggccacccctggccggaaaactcgtcgacttgaccggcgaatataaatatatgtacatgtcctgcggggctatcgtagtggcagccagcgtgtggctgcttataggtaacgccatcaactataggctactggccaaagaacgaaaagaggaaaatgcaaggcaaaaaacgagggagagtgagccattgtccaaatcaaaacacagcgaggatgtgaatgtgaaggtaagtaatgctcagtctgtcacctccgaacgcgaaaccaacatctag

SEQ ID NO: 241048 - DNA, 1437 bp, synthetic construct
  misc_feature 1..1437: note = Description of Artificial Sequence: Synthetic coding sequence
  source 1..1437: mol_type = other DNA
atgcctcccatgccaagcgccccacccgttcatcctcctcccgatggcggatggggttggattgtggttggcgctgcctttattagcataggcttttcgtatgcctttccaaaagcagtgactgtttttttcaaggagatacagcagatcttccacacgacctacagtgaaatcgcctggatcagcagtataatgctggcagtgatgtacgcagggggtcctgtgagctccgtgttagtcaacaagtacggatctaggcctgtggtaatcgccggagggttgctgtgctgtctgggaatggtattggctagcttcagctcctcggtggtgcagctctatctgaccatgggctttataaccggactaggactcgctttcaatctccagcccgctctgaccatcattggcaaatatttctaccggaaaaggccgatggccaatggcctggcaatggccggtagtccagtttttctgagcagtctggcccctttcaatcagtatctgtttaatacattcggatggaagggctctttcctcattcttgggtctctccttctgaatgcatgcgtcgccggatccctcatgagacctctggggcctaatcaaaccacttccaagagcaagaacaagacgggcaagacagaggatgattcctctccaaaaaagatcaagacaaaaaaatccacttgggagaaggtgaataagtaccttgatttctccctcttcaaacatcgagggttcctgatttatctgagtggcaatgtgatcatgtttctcggctttttcgcacccataatatttctcgccccttacgcaaaggaccaggggattgacgaatattcggccgcattcctgttatcagtgatggcatttgtggacatgttcgcccgaccctcggttggcctgatagccaactccaaatatatcaggccacggatacagtatttcttcagtttcgctataatgttcaacggtgtgtgtcacctgctttgtcctctggcacaggattacaccagtcttgtcctctacgccgtcttcttcggactcggctttggctccgtctcaagcgttttgttcgagactcttatggacctcgtgggggcacctcgtttcagctctgcagtgggcttggtcactatcgtcgagtgtgggcctgttttactggggccacctctagcgggaaagctggtcgatcttaccggggaatacaaatatatgtacatgagctgtggcgcaattgtggtggccgcatccgtgtggctcttgatcgggaatgccataaactatagactattagctaaagaaagaaaggaggagaacgccaggcaaaagacccgcgagtctgaaccccttagtaagagtaaacactcagaggatgttaacgtcaaagtgtccaacgcacagtctgttacctcagaacgcgagactaacatttag

SEQ ID NO: 241049 - DNA, 1437 bp, synthetic construct
  misc_feature 1..1437: note = Description of Artificial Sequence: Synthetic coding sequence
  source 1..1437: mol_type = other DNA
atgcctcccatgccgtcagcacctcccgtccacccaccaccagacggcggttgggggtggatagttgtgggcgcagcattcatctccattgggttctcctacgccttccctaaggctgtgaccgttttcttcaaggagatacagcagatctttcacacaacgtattcagaaatcgcgtggatctctagtatcatgctggcagtgatgtatgctggtgggcctgtcagttcagttctggtcaacaagtacggaagcaggcctgtggtcatcgcgggtggtcttctttgttgcctgggcatggtgctggcatcattcagttcctccgtcgtacaactgtacttgactatggggtttatcaccggattgggtctggcattcaacctgcagccagctctgacaattattggaaagtatttctaccgtaagagacctatggcaaacgggctggcaatggcaggttctccagtattccttagtagcctggcccctttcaatcagtacttgttcaatacattcgggtggaaaggaagctttctgatcctcggcagcctgctcctgaatgcttgcgtggcagggtcactgatgcgacctttagggcctaaccaaacgaccagcaagtccaagaataagacagggaagacggaagatgattcgtccccaaaaaaaattaagaccaagaagtccacctgggaaaaagttaataagtaccttgatttttcccttttcaaacaccgtggattcctcatctatctgagtggtaacgtgattatgtttctaggattcttcgctcccattattttcctggcaccatatgcgaaggaccaggggatagatgagtattccgctgcttttttacttagcgtgatggccttcgtggacatgttcgctagaccatccgtgggcttaatcgccaacagcaagtatatcagaccacggatccagtactttttctcattcgcaataatgttcaacggagtctgtcatctgctgtgccccctcgcccaggattatacctctctggtgctctatgccgtgttcttcggtctcggctttggctccgtgtcctctgttttgtttgagaccctcatggatctcgtgggagccccacgcttctcatctgctgttgggctcgtgactattgtagagtgcggtcccgttctgctcggtcctcctctggcaggaaaactagtggacctcaccggagagtataagtacatgtacatgagctgcggagcaattgtcgtggccgcttcagtttggctcttgataggaaacgccatcaactatcgcttgctagccaaggagcgcaaggaagaaaatgctaggcaaaagacaagagaatccgaaccactttctaagagtaagcactcagaggatgttaatgttaaggtgtctaacgctcagagcgttactagcgagcgggagactaacatttag

SEQ ID NO: 241050 - DNA, 1437 bp, synthetic construct
  misc_feature 1..1437: note = Description of Artificial Sequence: Synthetic coding sequence
  source 1..1437: mol_type = other DNA
atgcctcctatgccctccgcccctcctgtccatcccccacccgacggcggttggggatggattgtggttggcgcagctttcattagtatcggcttttcatatgctttcccaaaggctgtgaccgtgttctttaaagagatccagcaaatctttcatactacatacagcgagattgcttggatatctagcatcatgctggctgtcatgtatgcaggtggtcccgttagctccgtcttggttaacaaatatggatccaggccagtggttatcgccggtggccttctctgctgtttggggatggtgttggcgtccttttccagcagcgtcgtgcagctttacttgaccatgggattcattaccggattagggctggcctttaatctgcagcctgcactgactatcattggcaagtatttttacaggaagagaccaatggccaatggtctcgctatggctggctctccggtattcctgtcgtctctggccccttttaaccaatacttgttcaatacatttggatggaaggggagctttctcatactcggaagcctgctcctgaacgcttgcgtggccggttctctgatgcgacccctggggccaaaccagaccacaagcaaatctaagaacaaaaccgggaaaaccgaggatgactcgtcccctaagaaaattaagactaagaaaagcacttgggaaaaggtgaacaaatatctggatttctcactgttcaagcatagaggatttctgatttacctgtcgggaaatgtgatcatgtttctgggtttttttgctccaatcatctttctcgcgccatatgccaaagaccaggggatcgacgagtattctgccgctttcctgctgtccgtcatggcctttgtggatatgttcgctcgtccttcggtaggattgatcgccaacagtaagtacatcaggccaagaattcagtattttttcagtttcgccatcatgttcaacggcgtctgtcacttgctgtgcccgctagcccaggactacacttcgctagtcctgtacgctgtgtttttcgggctgggcttcggctctgtgagctccgtcctcttcgagaccctcatggatctagtgggagcccctcgattttccagcgccgtaggcctggtgacaattgtggaatgtggccctgtccttttgggccctccgttggccggtaaacttgtggacctcaccggtgagtataaatatatgtacatgtcctgtggagccatcgtggtggcagccagtgtgtggttacttatcggcaatgccattaattacagattactcgcgaaggagcgcaaagaagaaaacgctcggcagaaaacacgtgaaagcgaaccactcagtaaatctaaacacagcgaagacgtcaacgtgaaggtcagcaatgctcagtccgtgacctccgaaagagagacaaacatttag

SEQ ID NO: 241051 - DNA, 1530 bp, synthetic construct
  misc_feature 1..1530: note = Description of Artificial Sequence: Synthetic coding sequence
  source 1..1530: mol_type = other DNA
atggagctgaagaagtccccagatggcggatggggatgggtgatcgtgttcgtgagtttcctgacccagtttctatgctacgggtcccctctagctgtcggcgtgctctacatcgaatggctagacgccttcggagagggcaagggtaagaccgcctgggttggctctttagcttccggcgttggtctgctggctagtcctgtttgctcgctctgcgtatcatctttcggtgctcgaccagtgactattttttccgggtttatggtggcgggaggcctgatgctatcttcattcgcccctaatatctattttctatttttctcatatggcatagtcgtgggtctgggctgcggcctactgtataccgctaccgtcacaatcacatgtcagtattttgatgaccggagggggctggcactagggctgatcagcactggttccagtgtgggccttttcatttatgccgctctgcaacggatgctcgtcgaattttacggtctggacggttgtctgcttatcgtaggagccttagccctcaacattctcgcctgtggttccctgatgaggccactgcagtccagtgattgccctctccctaaaaaaattgccccagaggacttgccagataagtatagtatatataatgaaaaaggcaagaacctagaagaaaatatcaacattctggataagagctattcgtctgaggaaaaatgcaggatcacgctggccaatggagattggaaacaggacagcctgctgcacaaaaatcccaccgtgacacacaccaaagagcccgaaacatataaaaagaaagttgcggagcagacttatttttgcaagcagctcgccaagagaaaatggcagttatataaaaattattgtggagaaactgtggctctattcaagaacaaagtcttttccgcgctgttcatcgccatcctgctgtttgacatcggcggttttcccccttccctactcatggaagacgtggccagatcatcaaacgttaaggaagaggaatttatcatgcctttgatctccatcatcgggataatgacagccgtgggaaaactgctgctggggattttggcggacttcaagtggatcaataccttatacctgtatgttgctactctcattatcatgggcttggccctctgcgccatccccttcgctaagtcgtacgtgacgttggccttgctcagtgggattttaggtttcctaaccgggaactggtcaatttttccctatgtgacgaccaagaccgtcggaattgagaaactggcccatgcatacggtattctgatgttcttcgcagggttaggcaacagtctgggacctcccattgtcggttggttctatgactggacccagacgtacgatatagccttctacttctcaggcttttgcgtactcctgggcggatttatcctgctcctggccgcactgccttcctgggatacctgcaacaaacagttaccaaagcccgctcctaccacattcttgtacaaggtggccagtaatgtctag

SEQ ID NO: 241052 - DNA, 1530 bp, synthetic construct
  misc_feature 1..1530: note = Description of Artificial Sequence: Synthetic coding sequence
  source 1..1530: mol_type = other DNA
atggagctcaagaaatccccggatggcggttggggctgggtgatagtttttgtgtcttttctgacgcagttcctgtgttacggttcgccactggccgtcggtgtgctgtatatcgagtggctggatgcttttggggaaggcaaaggcaagactgcgtgggtaggatcactggcgagcggagtcggattactggcatcccctgtctgtagcctgtgcgttagtagtttcggggctaggcctgtcaccatcttctccgggtttatggtggcgggtggactgatgttgagcagtttcgcaccgaatatttactttctattcttcagctacggcattgtggtcggactgggatgcggcctgctgtatactgctaccgtaaccattacatgtcagtacttcgatgacaggcgaggactggcactagggctgattagtacgggctcttcagtggggctgtttatatacgcggcactgcaaaggatgcttgttgagttttatggcctggacggctgtctcctgattgtcggagctcttgcccttaatattttagcatgtggctccttaatgagacccctccaaagcagcgattgcccccttcccaagaaaatcgcacccgaggacctgccagataagtacagtatttataatgagaagggcaaaaacctagaggagaacatcaatatcctcgacaaaagttacagtagcgaagagaaatgccggatcaccttggctaacggcgactggaaacaggattctctcctgcacaagaacccgacagtgacccatactaaagagcctgaaacatataagaagaaagttgcagaacagacctatttttgtaagcaattggctaagcgcaaatggcaactatataaaaattactgcggagagaccgttgcattgtttaaaaacaaggtcttttctgccctctttatcgccattctgctctttgatattggcggtttcccacctagcttgttgatggaggatgtggctcgtagtagtaatgttaaggaggaagagtttataatgcctttgattagcatcatcgggatcatgaccgccgttggtaagttgcttctggggatcttagcagactttaaatggattaacacactctacctgtacgtggctactctgattatcatgggcctcgccctctgcgcaatcccattcgccaaatcctacgtgacgttggccctgttgagcgggatcttaggctttctgacagggaactggagcatattcccctatgtgactacgaagacggtgggcattgagaagttggcccatgcatacgggattctgatgttctttgctgggctaggaaacagcctggggccaccaattgtggggtggttctatgactggactcagacctacgacatcgccttctatttctccggcttctgtgtcttacttggtgggttcatcctgctacttgccgctttgccctcttgggatacctgtaataagcagctccctaagcctgcgcctaccacgttcctctacaaagttgcatcgaatgtctag

SEQ ID NO: 241053 - DNA, 198 bp, synthetic construct
  misc_feature 1..198: note = Description of Artificial Sequence: Synthetic coding sequence
  source 1..198: mol_type = other DNA
atggaattaaaaaagagcccggacggcggatggggctgggtcatcgtttttgtctcttttctaacccaattcctgtgttacgggagtcccctggcagtcggggtgttatatatcgaatggctagatgcattcggggaagggaaagggaaaactgcctgggtcggaagtctcgcctctggcgttggcctgctagcttag

SEQ ID NO: 241054 - DNA, 1488 bp, synthetic construct
  misc_feature 1..1488: note = Description of Artificial Sequence: Synthetic coding sequence
  source 1..1488: mol_type = other DNA
atgcgatccccagttagggatctcgcccgaaacgatggggaggagtcaacagatcggactcctcttctacctggagcacctagggctgaggccgcacctgtttgttgctctgctcgctacaacctagccatcctagcttttttcggatttttcatcgtttacgcactgcgcgtaaatctgagcgtggctctagtggatatggtcgacagcaacaccacactggaggacaaccgcacatcgaaggcctgtccagaacattccgcgccaataaaagtgcaccacaatcagaccggcaaaaaataccagtgggatgccgaaactcagggctggattctaggatctttcttctacgggtacattatcacccaaatccccggaggttacgttgctagcaaaatcgggggaaagatgctcctggggttcggcattttaggcactgcagttctcacgctttttactccgattgcagccgacttaggtgtggggccactcatcgtgctgagagctctggaaggcttaggcgaaggcgtcaccttcccggctatgcatgcaatgtggagttcatgggcaccacctctagagcgcagcaaattgctctcaatcagctacgccggtgcacagcttgggacagtcatctctttgcccctcagtggaattatttgctattacatgaactggacctacgttttctacttttttggcaccatcggtattttttggtttttgttgtggatttggctggtcagcgatactcctcaaaaacacaaaaggatctcacactacgaaaaggagtacatactttcgtccctaagaaatcagctctctagtcaaaagagcgtgccttgggtccccatactgaagtctctgcctctctgggccatcgttgtggcccatttctcatataactggactttttacactttgctgaccctcctgcctacctatatgaaagagattttacgatttaacgtccaggagaatgggtttcttagcagtctgccgtatctggggtcatggctgtgcatgatcctctccggccaggcagccgataatctgcgggcaaagtggaatttcagcactctctgtgtgcgtcggatattctccctgatcgggatgatcggcccagctgtgttcctcgtggctgctggcttcattggatgcgactattccctggcagtggcgtttctaactatctcgacaacactcggtggcttttgcagcagtggttttagtatcaaccacttggatatagcacctagctacgcaggcatcctcctggggataacaaacactttcgccactatcccaggcatggtcggtcccgtgatcgccaaatccctgacacctgataatacagtcggagagtggcagacagtcttctatatcgctgcagctattaacgtgtttggagccattttctttaccctcttcgctaagggagaagttcagaattgggcattgaatgatcatcacgggcacaggcattag

SEQ ID NO: 241055 - DNA, 546 bp, synthetic construct
  misc_feature 1..546: note = Description of Artificial Sequence: Synthetic coding sequence
  source 1..546: mol_type = other DNA
atgcggagccctgtaagagatctcgcacggaacgacggtgaggagagcaccgaccgcacaccccttctgccgggagccccacgtgctgaggccgctccagtgtgctgttctgcaaggtacaacttggcaatcttggccttttttggattttttatcgtgtacgcattgcgtgttaatctcagcgtggcgttggtcgatatggtggattcaaacaccaccttagaggataacaggaccagcaaagcctgtccagaacactcagcacctattaaagtgcatcataatcagactggcaagaaatatcagtgggatgctgaaacgcagggttggatactggggtcttttttttatggatatatcattacccagatacccggaggttacgtggcctccaaaatcggaggtaaaatgctgctgggatttgggattcttggtaccgcggtcttaacactctttacgcccatcgccgctgaccttggcgtcggcccacttatcgtcctgagagccctagagggactgggagaagagcattctctgggccagtag

SEQ ID NO: 241056 - DNA, 1404 bp, synthetic construct
  misc_feature 1..1404: note = Description of Artificial Sequence: Synthetic coding sequence
  source 1..1404: mol_type = other DNA
atgcaaatggacaaccgtctgccacccaaaaaggtgcccggtttctgctccttccgctacggcctgtcgtttctggtgcattgctgtaacgtgattatcacggcacagagagcctgcctgaatttaactatggtcgttatggtaaactcgactgacccacatggtctgccgaacactagtaccaaaaagctgctcgataatatcaaaaatccaatgtacaactggtcccctgacatccaggggatcatcttgtccagcaccagctacggagtcatcattatccaggtgcctgtggggtacttttccggaatatattccacaaaaaagatgatcgggtttgccctctgcctctctagcgtgcttagcctgctcataccaccagcggcaggaattggagtggcctgggtggtcgtgtgtcgggcagtgcagggagcagcgcagggaatcgtggccactgcacagtttgaaatttacgtaaaatgggctccacccctcgagcggggacggctgacctccatgagtacaagtggattcttgttaggaccttttatagtcttactggtgactggtgtcatttgtgagagtctgggctggcccatggtcttttatattttcggggcatgtggttgtgctgtatgtttgctgtggtttgtgctattctacgatgatccaaaggaccatccttgcatatcgatttctgaaaaggagtacattacttcatcattggtgcagcaagtctccagctcccggcaatcactgcctatcaaagctatcctgaagagcctcccggtttgggccatttctactggatcttttacttttttctggtcccacaatataatgactttatatacacccatgttcatcaattcaatgctgcacgtcaacatcaaggaaaacggctttttgtcaagtctcccgtatctgttcgcttggatctgtggcaacttggcgggacagttgtcagacttcttcttaacgagaaatattctgtccgttatcgccgttaggaagctgttcactgccgctggcttcctgctcccggctatatttggcgtttgcctgccctacctctctagcactttttactcaattgtcatttttttaattctcgctggcgctacagggtccttttgtctgggaggagtatttataaacggtctggatatagcacctcgatactttgggttcatcaaggcctgctctactctgacaggcatgatcggtggacttatcgcctccactctgaccgggctgatactgaaacaggatcctgagagcgcgtggttcaaaactttcatcctcatggctgccatcaacgtcacaggactgattttctacctcatcgtcgcgacagcagagattcaggactgggccaaggagaagcagcataccagactatag

SEQ ID NO: 241057 - DNA, 630 bp, synthetic construct
  misc_feature 1..630: note = Description of Artificial Sequence: Synthetic coding sequence
  source 1..630: mol_type = other DNA
atgcagatggataatcgcctgccacctaagaaagttccaggattttgtagcttccggtatgggttgagcttcctggtgcattgttgtaacgtaatcataacagcgcagcgcgcttgcctcaacctgaccatggtagtgatggtcaatagcaccgacccccacgggctgccaaatactagcaccaaaaaactgttagataacataaaaaatcccatgtacaactggtcccccgatatacaggggatcatcctgagtagtacatcatatggcgtgattatcatccaggtccctgtgggatatttcagtggtatctacagcacaaaaaagatgatcggatttgccctttgcctgtcttccgtgctctccctgctgatcccgcctgccgctgggataggggtggcatgggtcgtagtgtgtagggccgtacaaggagccgctcagggcatcgtggcaacagctcagtttgaaatttacgtaaaatgggcacctcctcttgagcgtggcagactgacttccatgagtacgtccggttttctgcttggaccttttattgtactcctggtgactggcgtcatctgtgaaagcctgggatggcccatggtgttctatatcttcgggcagtttaaatag

SEQ ID NO: 241058 - DNA, 1242 bp, synthetic construct
  misc_feature 1..1242: note = Description of Artificial Sequence: Synthetic coding sequence
  source 1..1242: mol_type = other DNA
atgcagatggacaacaggctcccccctaagaaagtgcccggtttttgcagtttcaggtacggactatcatttctggtgcattgctgtaatgtcatcattaccgcccagcgcgcttgtctgaatctgactatggtggtcatggtcaactccacagacccccacggtctgccgaatacaagtactaagaagctgctcgacaacataaagaatcctatgtacaattggtctccagacatccaaggaattatcctttcctcgacttcatacggtgtgatcattatacaggttcctgtaggctatttcagtggcatctattctactaaaaagatgatcggttttgcactatgtctgtcctccgtgcttagtctgttaatcccgccagctgccggaatcggagtagcgtgggttgtagtatgtcgggcagtgcagggagccgcacagggcatcgtcgcgacagcccaatttgagatttatgtgaagtgggcacccccactggaacgaggtcgcctgactagtatgagcacttctggcttcctgctcgggcctttcattgtgttgcttgtcacaggtgtaatttgtgagagtctggggtggcctatggtcttttacattttcggcgcttgcggctgcgctgtctgcctgctttggtttgtgttattttacgacgaccccaaagaccatccctgtatctctatctcggaaaaagagtacataacttctagcctcgtccagcagaacggcttcctgagttctcttccctacctgttcgcctggatatgcggcaacctggccggacagctttccgacttcttcctgacccgcaacattttaagcgtgatagccgtgagaaagctttttaccgcagccggtttcctcctgcctgccatcttcggggtctgtttgccttatctcagcagcactttttattccattgtgatctttctgattttagccggagccacgggtagtttttgtcttggaggggtttttatcaatgggttggacatcgcgcctaggtactttggcttcattaaagcttgttccaccttgaccggcatgattggtggcttaattgcatccaccttgacggggctaattctaaagcaagatcctgagtctgcctggtttaaaacttttattctgatggccgcaatcaatgtgacaggacttatcttctacctcatcgtggccactgcagaaatccaagactgggctaaggaaaagcagcatacccggctctag

SEQ ID NO: 241059 - DNA, 1242 bp, synthetic construct
  misc_feature 1..1242: note = Description of Artificial Sequence: Synthetic coding sequence
  source 1..1242: mol_type = other DNA
atgcagatggacaaccggctaccaccgaagaaggtgccaggattctgcagttttcgctatggactctcgttcctcgtgcattgctgtaacgtgattattacggcccagagagcctgcctgaacctcacaatggtggtgatggttaacagcactgacccccacgggctgccgaacaccagcaccaagaaacttttagataacataaaaaaccccatgtacaactggagtcccgacatacagggaatcatcctttcttccaccagctatggtgttatcataatccaggtaccagtaggatatttctcaggtatctattccaccaagaaaatgatcgggttcgccctctgtcttagcagcgtgcttagtctactaatcccacctgcggcaggtatcggggtagcgtgggtagtggtttgtcgcgcagtgcagggcgcagcacaggggatagttgccacggctcagttcgagatttacgttaaatgggctccacctctggagagaggcagattaacctccatgtccacttctggctttctgcttggacccttcattgtgcttttggtcaccggtgttatctgcgagagcctggggtggcccatggttttttacatctttggcgcttgtggctgtgctgtgtgtttgctctggtttgttctgttctacgatgatccaaaggaccatccgtgtatctctatatctgagaaggaatatatcacgagcagcttagtgcagcagaatggctttttgagcagcttgccttacttgtttgcctggatatgtggtaacctcgccggacaactgtccgatttcttcttgactcgcaatatcctgtctgttatcgctgtgcgcaaactgttcacagccgctgggttcctgctacccgcaatatttggcgtatgcctgccttacctctcaagtacattctattccattgtcattttcctgatcctggcaggagcgaccggcagcttctgcctaggaggcgtctttataaacgggctggacatcgcaccgagatacttcggctttattaaggcgtgtagcacactgaccgggatgatagggggactgatcgcttccactcttacaggacttatattaaagcaggaccctgagtcagcctggtttaaaacctttatccttatggcagccatcaatgtcacaggattgatcttctacctcatagttgccaccgccgagatccaggattgggccaaagagaagcaacatacgcgcctgtag

SEQ ID NO: 241060 - DNA, 1404 bp, synthetic construct
  misc_feature 1..1404: note = Description of Artificial Sequence: Synthetic coding sequence
  source 1..1404: mol_type = other DNA
atgcagatggataacaggctgcctcccaagaaagtccccggtttctgcagtttcaggtatggactttcctttctggtgcactgctgtaatgtgataatcactgcccagcgggcttgcctcaaccttacgatggtggtgatggtgaacagtacagatccacatggcttgcccaatactagcaccaaaaagctgcttgataatatcaaaaatcccatgtacaattggtcacctgacatccagggtatcatcctttcctctacctcgtacggtgtgatcatcatccaggtcccagtcgggtatttctctggcatctacagcacgaaaaagatgatcggattcgccttgtgcctctcaagcgttctgagcttgctgatccccccagctgcaggcattggggtcgcctgggtggtggtgtgtagagccgtgcagggagccgcacaagggattgtcgcaaccgcacaattcgagatatatgtgaaatgggcaccacctctcgaacggggacggctaaccagcatgagtacctccgggtttcttctggggccatttattgtccttcttgtaactggagtgatctgcgaatctctgggctggccgatggtgttctacatcttcggcgcatgcgggtgtgccgtgtgtttgctctggtttgtcctcttctacgacgacccaaaagatcacccgtgtatttctattagcgagaaagagtacataacctccagtttggtccagcaggtttcctcgagccgtcaatctctacctatcaaagctattctgaagtctctgcccgtctgggcaatatcaacaggaagcttcacattcttttggtcccacaacattatgactctctacactcccatgttcatcaattctatgcttcatgtcaacataaaagaaaacgggtttctgagctccttgccttatctgttcgcgtggatttgcggtaaccttgcaggtcagctctcagactttttccttacccgcaatatcctgagcgtcatcgctgtcagaaagttgttcactgcggctgggttcctcttgccggctatctttggggtgtgtttgccttatttgtccagtacgttctactctatagtgatttttctcatcctggccggagcgaccggatctttttgcctcgggggtgtcttcattaatggccttgatattgcacccaggtactttggattcatcaaggcatgtagtacccttaccggaatgatcgggggattgattgctagcacgcttactggcttaattttgaagcaagacccagaatctgcctggttcaagactttcatactgatggccgctatcaatgttactgggctgattttttatttgatcgtggctacagctgaaatccaggactgggcaaaagagaaacagcacactcgactgtag

SEQ ID NO: 241061 - DNA, 1320 bp, synthetic construct
  misc_feature 1..1320: note = Description of Artificial Sequence: Synthetic coding sequence
  source 1..1320: mol_type = other DNA
atggacggcaaacccgcaacacgaaaaggccctgatttctgctcactgcgctacgggctcgctctcattatgcatttctccaattttacgatgataactcagcgggtatcattgtctattgcgattatcgccatggtgaacaccactcaacagcagggcctttcaaacgcctctacagaaggcccagtggcggacgcttttaacaacagtagtatctctataaaggagtttgacactaaggcatccgtgtatcagtggtctccagagacccagggcataatcttttcttcaattaattatgggatcatcctgacattaattccgtcagggtacctcgctgggatctttggggcaaagaagatgttaggcgctggcctgttgattagcagccttcttaccctgttcacccccctggctgctgactttggcgtgatcctggtgatcatggtgagaactgtgcaaggtatggctcagggcatggcttggaccgggcagtttaccatctgggctaaatgggccccacctctggaaaggagcaagctgaccacaattgccggtagcggaagcgccttcggatcattcatcatactgtgtgtgggtgggctgatttcccaggccttgtcgtggccattcatcttctatatcttcggatcgacgggctgcgtgtgttgcctcctgtggttcacagtcatttatgacgaccccatgcaccatccctgtatcagcgtcagagaaaaagaacacatcctatcatctctggctcagcaaccgtctagtccaggacgcgctgtgcccataaaggccatggtgacgtgtctccccttgtgggctatttttctgggcttcttcagccacttctggctgtgcaccattattcttacgtatctacctacctacattagcactctgctgcatgtcaacatcagagacagtggggtgttaagctcccttccgtttatagcagcagcctcttgcaccatattagggggacagctcgccgattttctactgtcccgcaatttgctgcggctgattacggtgcgcaaattattttcttcactggggctgctcttgccgagtatctgtgctgtggccctgcccttcgtggcctccagctacgtcatcaccatcattctgctaatacttatccctgggacatccaatttatgcgactcgggattcataattaacactctggacatcgccccacgatacgctagtttcctgatgggcattagcaggggttttggcctgattgctggaatcatttctagtacggccacaggctttctgatctcccaagtcggacccgtgtattag

SEQ ID NO: 241062 - DNA, 1311 bp, synthetic construct
  misc_feature 1..1311: note = Description of Artificial Sequence: Synthetic coding sequence
  source 1..1311: mol_type = other DNA
atggatggtaagcccgctacgagaaagggaccagacttttgcagcctccgctatggactggccctcataatgcatttctccaactttacaatgatcacacaacgcgttagcctctctattgccataatcgccatggtaaacaccacacagcagcagggcctgtccaacgcgtctacagaggggcctgtggctgatgcctttaataacagctctattagtataaaagagtttgatacaaaggcctcagtgtaccagtggtcacccgaaactcagggcattatctttagttcgatcaattatggcattatcctgactctgataccttccggatacctggcaggaatctttggagcaaagaaaatgctcggagctggattgctgatttcttctctgcttactcttttcactcccttggcagcagacttcggggtgattttagtgattatggtgagaaccgtgcaaggcatggcgcaaggcatggcttggacaggacagtttaccatttgggccaagtgggctcccccactagaacgcagtaaactcacaacgatcgctgggtcaggatctgctttcggctccttcattatactatgcgtcggagggctgatttcacaggcactgtcctggccattcatcttctatattttcggatcaactggctgcgtttgttgccttttgtggttcaccgtgatttatgacgatccaatgcaccacccctgtatcagcgtgcgtgagaaagaacacattctgtcaagcctagctcagcaaccttcatcaccaggtagggccgtccccatcaaggcaatggttacttgcctgcccctctgggcaatctttcttggattctttagtcatttttggttgtgcactattatcctgacttatctccccacgtacatctctacactcctgcacgtcaacattcgtgactccggagtcctttcaagcttaccattcattgccgctgcgtcttgcacgatactcgggggacaactggccgacttcctcctttcccgaaaccttctcagacttatcaccgtgcgaaagctattctcctctctggacatgcaggtaagtagttgggagtcccaaggggatcttggatcttcccaagagtcaagcctcccgctgcctctggactctagctccgtgcgaatactttcccttgtcggcggaatgagctttagctgcttgctgcagtcaacatgtctggcatggtctttcacctcccgactcgacaaacagaattttaagaccggtcccaaacgaggtccgcttcccgcttcggaggacattaagttacagacgtag

SEQ ID NO: 241063 - DNA, 1437 bp, synthetic construct
  misc_feature 1..1437: note = Description of Artificial Sequence: Synthetic coding sequence
  source 1..1437: mol_type = other DNA
atggacgggaagcctgccacacgcaaaggccctgatttctgctccttgagatacggcctggccctgatcatgcattttagtaactttacaatgatcacccagagggtgagtctctcgatcgcgattattgctatggtgaatactacgcaacaacagggattgagcaacgctagtacagaggggcctgtggccgacgcgtttaacaactctagtatatcaattaaagaattcgacacaaaagcctctgtgtaccagtggtcacccgagacccagggcatcatcttcagcagcatcaactatggcattattttaaccttgattccaagcggctatcttgcgggtattttcggagctaagaagatgctgggggctggactgctcatcagttctcttttgacgctgtttaccccccttgcggctgatttcggtgtgattctggtcatcatggttcggactgtgcagggaatggcgcagggaatggcatggacaggacagtttaccatatgggctaaatgggcacctccgctcgagcgctctaaactgaccacaatcgctggctccggcagcgcgttcggaagctttattattctttgtgttgggggtctgatttcacaagccctatcctggccttttattttctacatattcggaagtacagggtgtgtttgttgtctgttatggttcacagttatttacgacgacccgatgcaccatccctgtattagcgtgcgagagaaggagcacattcttagtagccttgcacagcaaccaagctcaccaggcagggccgttccaatcaaggctatggtgacttgcctgcccctttgggcaattttcctgggctttttttcgcacttctggctttgtaccatcatccttacctaccttcctacatacatcagcactctgcttcacgtgaatatcagagatagtggcgttctctcctctcttcccttcatagcagcagcctcgtgtacaatcctgggagggcagctcgccgattttctgttgagccggaacttgcttcggctaatcactgttcggaaactgttcagcagcttgggcctgttacttccctccatctgtgcagtggctctgccttttgttgcttcctcttatgtgataacgatcattttgcttatcttaataccaggcacctccaatctgtgcgatagcggattcatcatcaataccctggatatcgctcccaggtacgcaagctttctcatgggcatttctagaggattcggcctcatcgccggtattatctccagcacggccacgggctttttaatctctcaagactttgagtccggttggcgcaatgtgtttttcctgtcagccgcagtgaatatgtttggtttggtgttttatttaacatttggacaagctgagctgcaggattgggctaaagagcgtactctgacaaggctatag

SEQ ID NO: 241064 - DNA, 1263 bp, synthetic construct
  misc_feature 1..1263: note = Description of Artificial Sequence: Synthetic coding sequence
  source 1..1263: mol_type = other DNA
atggcgaccaaaactgagctgtcccctacggctagagagagcaagaacgcacaggatatgcaggtcgacgagacgcttatcccgagaaaggtaccttctttatgttccgctagatacggcatcgccctggtactgcacttttgcaactttactactatagctcaaaatgtgataatgaacattacaatggtcgccatggttaatagtacttctccacagtctcagttaaacgattcatcagaggttctgcccgtggattcctttggcggtctgagtaaggctccaaaaagcctgcctgccaagtctagtatcttaggcggacagttcgctatttgggagaagtggggaccaccccaggaacgctctcgactgtgctctatcgccctgagcggcatgctgctgggctgtttcaccgctatactgatcggtggcttcatcagtgaaacgctgggctggccattcgtattttatatctttggaggagtgggctgcgtgtgctgcttgctgtggttcgtcgtgatttatgacgatcccgtgagctacccttggatctccacaagtgagaaggaatacatcatttcgtctctaaaacagcaagtgggtagttctaagcagcccctgcccatcaaggccatgcttaggtcactgcccatctggtctatttgtcttgggtgcttttcccaccagtggctcgtttcaaccatggtagtgtacatccccacctacatatctagcgtctatcatgttaacatccgcgacaatggcttgctcagtgcactgccttttattgtagcttgggtgattggcatggtcgggggatatctggctgattttctgctgacaaaaaaatttcgcctaattacggtgcggaagatcgcgaccattctggggagcctgccctcctcagccctgattgtgagtcttccatacttgaatagcggctatatcacagcaacagccctattaaccctttcctgcggtttgagtaccctttgccaatccggaatctatatcaacgtcctggacatcgcccctagatactcgagtttcctgatgggagcttcaagagggttttctagcatcgctcctgttatcgttcctacagtttcaggattcttgcttagccaagacccagagtttggctggagaaacgtttttttcctgctctttgccgttaacctactgggcttactgttttacttaatcttcggcgaggccgatgtgcaagagtgggccaaggaaaggaagctcactagactttag

SEQ ID NO: 241065 - DNA, 1263 bp, synthetic construct
  misc_feature 1..1263: note = Description of Artificial Sequence: Synthetic coding sequence
  source 1..1263: mol_type = other DNA
atggccaccaagaccgagctcagccctacagctagagagtcaaaaaatgcgcaagacatgcaggttgacgaaacactgattcctaggaaagttcccagtctatgttccgcgaggtatggcattgcactcgtactccacttttgtaatttcacaacaattgctcagaacgtaattatgaacatcaccatggtggcaatggtgaacagcacatccccgcagtcccagcttaatgattcttctgaggtcctaccggtggattcgttcggaggcctctctaaggctccaaagagtctccctgctaaaagtagcatcctagggggacagttcgctatatgggagaagtggggacctccccaggaaagatctcggctttgctccatcgcccttagcggcatgttgctcggctgtttcaccgccatactgatcggcggttttatcagcgaaactctgggttggccttttgtgttctacattttcggtggtgtcgggtgtgtgtgctgcctcctttggttcgtcgtgatttacgacgatcctgtgtcctatccctggatttccacaagtgaaaaggaatacatcattagtagccttaaacagcaggtcgggtctagcaagcaaccactaccaattaaggccatgctgcggtcactgccgatttggtccatttgcctgggctgcttcagtcatcagtggctggtcagcactatggtggtatacatccccacttacatctcttctgtatatcatgtcaatatccgtgacaacggcttactgtccgctctgccttttattgtcgcttgggtgatcggcatggtcgggggttatctggcggattttctgcttacaaaaaaattcagactgatcacggtcagaaagattgccacaattctgggaagtcttccttcctccgctcttatcgtctccctgccctacctcaacagcggctacattactgcaaccgcactgctgacattgtcatgtggcttgagtactctatgccagagtgggatatacatcaatgtgctggacatcgctccaagatactcatctttcctgatgggcgcatcccggggttttagcagcatagcacccgtaattgttcctactgtgagcggattcctgctgtcccaggatcctgagttcggttggcggaatgtgttctttttgctatttgccgtcaacctgctgggcctccttttttacctgatattcggcgaggcagatgtccaggaatgggctaaagagcggaaactaactcggctgtag

SEQ ID NO: 241066 - DNA, 1497 bp, synthetic construct
  misc_feature 1..1497: note = Description of Artificial Sequence: Synthetic coding sequence
  source 1..1497: mol_type = other DNA
atggccactaagacagagttatcacctacagccagagaatctaagaatgcccaggatatgcaggtagacgagaccttgatacccagaaaggtgccctcactgtgcagcgcccgatacgggatcgcactggtcttgcacttctgtaatttcacaactatcgcccagaacgtcattatgaacattactatggtggcgatggttaatagtacctcacctcagtctcagttaaacgacagctctgaggtactgcctgttgactcctttgggggactgagtaaagcacccaaatccctgcctgccaaggctcctgtgtatgattggtcaccacagattcagggtattatattcggcgctgtcggatacggaggcattctgactatggcccctagcgggtacctcgctggaagggtgggtacgaagagggtggtgggcatatcactgtttgctacatcgtttctgacattgtgcattcccctggctaccgattttggaatcgtcctgctgattgtgacacgcattgttcaaggactttctcagagtagcattctcggcggtcagttcgccatttgggaaaaatggggtccacctcaggaacgatcgaggttatgttccatagccttaagcggaatgctcttgggatgcttcactgcaattttgattggtgggttcatttctgaaacgctgggctggcccttcgtcttctatattttcggaggagttggatgtgtatgctgcctgctttggtttgtggttatctacgacgacccagtgtcatatccgtggatctccacaagcgagaaagagtatattattagctctcttaaacagcaggtagggtcctccaagcaacccctgcctattaaagctatgctgcggtcgctccccatatggtccatctgcctgggatgttttagccaccagtggctggtgagtaccatggttgtgtacatacctacatacatctctagcgtgtaccacgttaatattcgagataacggtcttctcagcgcactgccctttatcgtggcctgggtcattggaatggtgggagggtacttagccgacttcttacttaccaaaaaatttagactgatcacagtaagaaaaattgcgaccatactcggctctcttccatcatccgcccttatcgtaagcttaccatacctcaattcgggctatattaccgcaactgccctactgacccttagctgcgggttatcaaccctgtgccaatccggcatatatataaatgtgttggacatcgccccacggtactcctcctttctgatgggcgcttctaggggtttttcttctatagctcccgtaattgttccaactgtctctggcttcctgctgagccaggacccagaatttgggtggaggaatgtgtttttcctgctattcgcggtcaaccttctgggactgctcttttacctcatctttggtgaagcagatgtgcaagaatgggcgaaagagcgtaaactgaccagactttag

SEQ ID NO: 241067 - DNA, 300 bp, synthetic construct
  misc_feature 1..300: note = Description of Artificial Sequence: Synthetic coding sequence
  source 1..300: mol_type = other DNA
tagactctttcatgtggcctcagcaccttatgccagagcggcatctacattaacgtgttggacattgcccctcggtattcatcattcctgatgggcgcttctagggggttctctagcatcgcccctgtcatagtgccaaccgtgagtgggtttctgctgagtcaggatccggagtttggttggcgcaacgtgttcttccttctattcgctgtcaacctgctcggtctgcttttttacctgattttcggagaagccgacgtacaggagtgggctaaggagagaaaactgacccgattatag

SEQ ID NO: 241068 - DNA, 156 bp, synthetic construct
  misc_feature 1..156: note = Description of Artificial Sequence: Synthetic coding sequence
  source 1..156: mol_type = other DNA
tccggttttctgctgagccaggaccctgagttcgggtggagaaacgtttttttcctcctgttcgctgtcaacttactcgggctgcttttttacctgatcttcggagaggccgatgtccaggaatgggccaaggagcgtaaactcaccaggctctag

SEQ ID NO: 241069 - DNA, 1494 bp, synthetic construct
  misc_feature 1..1494: note = Description of Artificial Sequence: Synthetic coding sequence
  source 1..1494: mol_type = other DNA
atgtctaccgggccagatgtgaaggctactgtgggggatattagcagcgacgggaacctgaacgtggcccaggaggagtgcagtagaaaggggttttgcagcgttagacatggactagctctgatactccagctgtgcaatttctctatctacacccagcaaatgaacttatccatcgccattccagctatggtcaataacaccgccccaccttctcaaccgaacgccagtaccgagcgtcctagcactgatagccagggttattggaacgaaaccctcaaagaatttaaggctatggcccctgcatacgattggagcccagaaatccaggggattatactgtcctccctgaattacggcagcttcctggctccaattcccagcgggtacgtggccggaatctttggtgccaagtatgtggtgggcgctggattgttcatcagctctttcttgactctcttcatccccttagcagcgaatgccggagtggccttgctgatcgtcctgagaattgtccaaggaatcgcacaagtgatggtgcttacaggccagtattccatttgggtcaaatgggctcccccactggaacgttcccagctgactaccattgctgggagtggctccatgcttggtagcttcatcgttctgttggccggagggcttctgtgccagacaataggctggccttacgttttttacatcttcgggggaatcggttgtgcctgttgtcctctgtggttcccgcttatttatgatgacccagtgaaccacccctttattagcgcgggagagaaacgctatattgtgtgcagcctggctcagcaggactgttcacctggatggagtctgccaatccgggcaatgatcaaaagcctcccattatgggcaatcctggtttcttacttctgcgagtattggctgttttataccataatggcctatacacctacctacataagttcagtcctccaggctaacttgagagatagcgggatcctttctgccctgccttttgtcgtgggatgcatctgtatcattctcggcggattactcgccgatttcctactgtcacggaaaatccttagactaatcacaattcgtaagcttttcaccgcaatcggcgttctatttccatcagtcattctggtctccttgccctgggtgcgatccagccatagcatgaccatgacattcttagtgctgagtagcgcgatcagcagcttttgcgaaagcggtgccctggtgaactttctagatatagctccgagatacacaggatttctgaaaggactgcttcaagtgttcgcacacattgcaggtgctatctctccaaccgctgcaggattttttatttcccaggatagcgagttcggatggagaaacgtcttcttactaagcgcagcggtgaatatctctggcctggtattttacctgattttcggtcgagctgacgtgcaggattgggcgaaagagcagaccttcacccacctgtag

SEQ ID NO: 241070 - DNA, 666 bp, synthetic construct
  misc_feature 1..666: note = Description of Artificial Sequence: Synthetic coding sequence
  source 1..666: mol_type = other DNA
atgaacttatccattgccatcccagctatggtcaataacacagctcctccttcccaaccaaacgccagcactgagcggccaagcacagatagtcaggggtattggaatgagactttgaaggaattcaaagctatggactgcagtccgggatggagcttgcctatcagagctatgatcaagagcctccctctttgggccatccttgtgagctacttctgcgagtactggttgttttatacaataatggcctataccccaacatacatttcttcagtgctgcaggctaatttgcgggattccggcattttaagtgcactgcctttcgtcgtggggtgcatctgtattattctgggaggcctgttagcagacttcctcctaagccgtaagatcttacgactgataaccattaggaaactgtttacagctattggcaaaggcgagacgggccaccgcggagaacgcggtaagttacgtgccgcatttagcctattgtgcgtttgcccacccacacccggagtactgtttcctagcgtaatactggtctcacttccctgggtgagatccagccacagcatgactatgacctttctagtcttgtcatctgccatcagctcattttgtgagtctggggcactagtcaattttctcgacatcgctcctcggtag

SEQ ID NO: 241071 - DNA, 804 bp, synthetic construct
  misc_feature 1..804: note = Description of Artificial Sequence: Synthetic coding sequence
  source 1..804: mol_type = other DNA
atgtccaccggccctgatgttaaggctaccgtgggggacattagctcagatgggaatctgaacgtagcacaggaggaatgttcgcgtaaaggtttttgctccgtcagacatggcctggctctgatcctccagctctgcaatttttctatctatacgcaacagatgaacctcagtatagcaattcccgcaatggtgaataacaccgcccctccatcacagccgaatgcaagcacggagcgcccttctacagattctcagggatattggaatgagacccttaaggaattcaaggccatgtccggcatattatcggcgctgccatttgtagtcgggtgtatctgtattatcctgggtggccttctcgctgactttctcttaagcaggaagattctgagattgatcaccattagaaagctgtttaccgccattggtgtgctgttcccctctgtcattctggttagtctgccctgggtgcgatcatcgcatagcatgacgatgacattcctggtgctaagtagcgcaatatcatccttttgtgagtctggcgctctggtaaactttttagacattgcacccagatacacagggttcttgaaagggctccttcaagtcttcgcccacattgcaggggcaatcagcccaacagccgctgggttttttattagccaggattccgagttcggttggcggaacgtgtttttgttaagcgctgccgtgaacatcagtgggctagttttctacctcatctttgggagagccgacgtgcaagactgggcaaaggagcagactttcacccacctgtag

SEQ ID NO: 241072 - DNA, 1749 bp, synthetic construct
  misc_feature 1..1749: note = Description of Artificial Sequence: Synthetic coding sequence
  source 1..1749: mol_type = other DNA
atggagagcgtcaagcagcggattctcgcccctggtaaggagggcctcaagaactttgcgggtaaatctctcggtcagatttatcgcgtattggaaaagaagcaagacacgggggagaccatcgaattgaccgaggatggtaaacctcttgaggtaccagaacgtaaagcgcctctgtgcgattgcacctgctttgggctgcctaggcgctacattatcgccatcatgtcaggactcgggttctgcattagctttggcattcgttgcaaccttggagtggccatcgttgacatggtaaacaacagtactatacatcgcggaggcaaggtcattaaggagaaggctaagttcaactgggaccctgaaaccgttggtatgatccacgggtcattcttttggggctatatcatcacccagattcccggtggttatatcgcatcacgactcgccgcaaatagggtatttggtgcggctatcctgctgacttccacgctgaatatgttgataccaagcgccgcaagagtgcattacgggtgcgtaatctttgtgcgaatcctgcaaggccttgttgaaggggtgacataccccgcttgccacgggatttggtcaaaatgggctccccctctggagcgttcaagacttgcaaccacaagtttttgtggctcatacgccggagccgtaatcgcgatgcccctggccggtatcctggtccagtacaccggctggtcttcggttttctacgtttacggctccttcggcatggtctggtacatgttctggctgctcgtgtcatatgagtccccagctaagcaccccacaatcaccgatgaggagcgtcggtatatcgaggaaagcatcggtgagtctgccaacctcctgggagccatggagaaatttaaaaccccttggcgtaagttctttacgtcaatgcccgtctatgccatcatagtggcaaatttttgccggtcttggacattttacttgctcctcattagccagccggcatactttgaggaagtgttcggattcgagatatcgaaggtgggtatgctgtctgcagtcccccacctagtgatgaccataatcgtgccgatcggtggacagattgccgatttcctgcgttcaaagcagatcctttccacaaccacagtgagaaagattatgaactgtggcggttttggaatggaagcaacactgctcctcgtggttggatacagtcacacgaggggcgtggcaatttcatttctggtcctcgccgtaggcttttcaggttttgctatcagcggctttaatgttaaccatttagatattgctcccagatacgcgtccatcctgatggggataagtaacggagtgggcacacttagtggcatggtgtgccccatcatagtgggtgccatgaccaagaataaatcccgagaggagtggcaatacgtcttcctcatcgccgcactcgttcattacggcggagtcatcttttatgcaatcttcgcatccggcgagaagcaaccatgggcagatccggaggaaaccagcgaagaaaaatgcggattcattcacgaagacgagctggatgaagagacgggagatataacccaaaattacatcaattatggcacgacgaagtcgtacggagccacaacccaagccaatggtggctggcccagcggctgggagaagaaagaggagtttgtgcagggtgaggtccaggattcccactcctataaggaccgcgtggactatagttag

SEQ ID NO: 241073 - DNA, 1413 bp, synthetic construct
  misc_feature 1..1413: note = Description of Artificial Sequence: Synthetic coding sequence
  source 1..1413: mol_type = other DNA
atgaaggctaaatttaactgggatccagaaaccgtcgggatgatccacgggtccttcttttggggctatattattacacagattcctggtggttatatagctagcagattagccgcaaaccgggtctttggcgctgccattctactgacgagtacactgaacatgctgattccttctgccgcaagggtgcattatggatgcgtcattttcgtaaggattctccaaggactggtggagggcgtaacatatcctgcttgtcatgggatttggtccaagtgggccccaccactcgaaagatcccgattggccaccacttctttttgcggctcctatgctggggctgttatagcaatgcccctggcgggaatcctcgtgcagtacacagggtggtcctctgttttctatgtctacggatcatttggcatggtttggtatatgttttggttgttagtatcctacgaatcccctgcgaaacatcccactatcaccgacgaagaaaggagatacatcgaagagtcaattggcgaatccgcgaatctgctcggtgccatggagaagtttaagactccctggcgcaaatttttcacaagcatgcctgtatatgccataattgtggctaatttttgcaggtcctggacattttatctccttcttatttctcagccagcctatttcgaagaggtcttcgggttcgaaatatccaaggttggcatgctcagcgccgtcccccacctggtcatgaccatcattgtacccattgggggacaaattgccgactttttgcgcagtaaacagattcttagcaccaccacagtcaggaagatcatgaactgtggaggttttggtatggaagccacactgctgttagtcgttggatattcgcatacccgcggtgtagccatatccttcttggtacttgcggtgggcttctccggctttgccatttctggattcaacgtgaatcacctggacattgcccctaggtatgcctccattctcatgggaatctcaaatggagttggaacgctatctggcatggtgtgtcccattattgtgggagctatgactaagaacaaaagccgggaagaatggcaatacgtgtttcttattgcggcactggttcattacgggggagtgatcttttatgcgattttcgccagtggcgagaaacagccctgggccgatcccgaggagacttccgaggagaagtgcggattcatccatgaggatgagcttgacgaagagacaggggatattacccagaattatatcaattatggcactacaaaatcttacggcgcaacaacccaagcaaatgggggttggccctcaggatgggagaagaaggaagagttcgtgcagggagaggttcaggactctcatagctacaaggatcgagtcgactactcatag

SEQ ID NO: 241074 - DNA, 5223 bp, synthetic construct
  misc_feature 1..5223: note = Description of Artificial Sequence: Synthetic coding sequence
  source 1..5223: mol_type = other DNA
atgggggagaaattagaactccgactgaagtcaccagttggagctgagcccgctgtgtatccctggcctcttccggtgtacgacaaacaccacgatgccgctcatgagattatcgaaacaatacggtgggtgtgtgaggagatccctgaccttaaattggcaatggagaattatgtactgatagactatgatactaagtccttcgaaagtatgcagcggctctgtgacaagtacaatagggcgatcgatagcatccatcagctatggaagggcactacccaacccatgaagttgaacacccgaccctccaccggccttctgcggcacattctgcagcaggtttataatcatagtgtgacagaccccgagaaactaaacaactacgagccattcagccctgaggtgtacggagagaccagcttcgatttagttgcacaaatgatcgacgaaatcaagatgaccgatgacgatctgttcgtcgacttgggctctggagttgggcaggtggtgttgcaggttgcagcagcgacgaattgcaagcatcactacggagtggaaaaagcggacatcccagccaagtacgccgagaccatggaccgggagttcaggaaatggatgaagtggtacgggaaaaaacacgcggaatatacactggagcgcggagactttctttccgaagaatggagggaaaggattgccaataccagcgtcatattcgtcaacaactttgcattcggcccagaggtcgaccaccaacttaaagagcgtttcgccaacatgaaggagggagggaggattgtttctagcaaacctttcgcacccctgaatttcagaataaactcgcgtaacctgagcgatattggcactatcatgcgtgtagtggagctaagccccctgaaaggttccgtgtcctggaccggaaagcccgttagctactacttgcacaccattgaccgcacgatactagagaattatttctctagcctaaaaaatcccaaactccgcgaagaacaggaagcagcaaggcggaggcagcaacgtgaaagcaagtctaacgcagctacgcccactaaaggccctgaaggaaaggtggctggcccagccgacgccccaatggatagtggggcagaagaagaaaaagcaggggctgctactgtgaaaaagcccagtcccagtaaggcccgtaagaaaaagctgaataagaaaggtcgtaagatggctgggagaaaaaggggacgaccaaaaaagatgaatactgcaaaccctgaacggaagcccaaaaagaatcaaacagcgctcgatgctctgcacgcccagactgtttcccagaccgccgcatcatcaccacaggatgcctaccggtcgccccatagccccttctaccagctgccaccaagcgttcagagacacagccctaatcctcttctcgtcgctcctactcctcccgcattgcagaaattgctggaatcattcaaaattcagtacctgcagttcctggcctataccaaaaccccacaatataaggcatccctacaggagcttctaggtcaggagaaggaaaagaatgcccaactactgggagccgctcagcagctgctgtctcactgccaggcacaaaaggaggaaattcgcaggctgtttcagcaaaagctcgacgaattaggcgttaaagcactcacatataatgatctgattcaagcccaaaaggagattagtgcccacaatcagcaactccgagaacagtcggagcagcttgagcaggacaacagagccctacgcggtcaatcacttcagctcttgaaagccaggtgtgaggagctacaactggactgggccaccctctcccttgagaagctcctgaaagagaaacaagccctcaagtctcagatttctgaaaagcagcgacattgtttagaacttcagatttctatagtagagcttgagaaaagtcagcggcagcaggaactactgcaactgaaatcctgtgtgccccctgatgatgctcttagtctgcatctccgtggcaagggagctcttggacgggagttggagccagatgctagtaggctgcatttggagctggactgtacaaaattttctctgccgcacctgagcagtatgtcacccgaactttccatgaatggacaagccgctggctacgaactctgtggcgtgctctctcgcccaagtagcaagcagaacacacctcagtacttggccagccctcttgaccaagaggttgtgccatgtacaccttctcacgtagggaggcctcgtctagaaaagctctccgggctggcggctcctgattacactcggctttctcctgcaaaaatcgtacttaggaggcacctgtcacaggaccataccgtgcctggtagaccagcggcatctgagttacactccagagccgagcatacgaaggagaatgggttaccatatcaatccccctcggtgccagggtccatgaagctctcaccacaggatccgagacccctctcaccaggggctctgcagctcgctggcgagaaatcaagcgagaaggggctgagagagagagcctacggtagctctggcgaactgatcacctcattacctatctctattccactgtcaacagttcagccaaacaagctgcccgtgtctatcccactcgccagcgtcgtcctgccgtctagggcagaaagggcgaggtctactccctcccccgtgttgcagcctcgcgatccctcctctaccctagagaagcagatcggcgcaaatgcacatggcgctgggtccagaagcttggcactggcccctgcgggtttttcatatgcgggatccgtcgctattagcggagcgctggctggctcgccggcatctctcaccccaggcgctgaacccgctacattggatgaatcaagttcttctgggtccctgttcgccactgtagggtcacggtcctcaactccccagcacccactgttgctggctcaaccacgcaacagtctccctgcctctccagctcatcagctctctagctcccctcgactggggggtgccgcacagggaccactccccgaggcttcgaagggggacttgcccagcgatagcggattcagtgaccccgagtcagaagctaaaagaaggatcgttttcaccatcaccaccggggctggtagtgccaagcagtccccttctagcaagcattcccccctgacggcctcggctaggggcgattgtgtgccctctcacggccaggatagtcggaggaggggaaggagaaaaagggcgtccgctggcacaccgtccctgagcgccggtgttagcccgaaaagacgggctctcccctccgtcgccggtctcttcacccagccatcgggatctccccttaacctcaactcgatggttagcaacatcaaccagccactcgaaatcaccgctatctccagtcccgagaccagtttgaagtctagccccgtcccttaccaggaccacgatcagccccctgttctgaaaaaggagcgtccattgtcccagacaaatggggcacattatagtccgctgacgagtgacgaggagcctggttccgaggatgagcccagctctgcaagaattgagcggaagattgcgacaatctccctcgagtcgaagtctccccctaaaacattagagaatggcggtggtcttgctgggaggaaacccgctcccgcaggagagcccgttaatagtagcaagtggaaatccacattttcgccgatatctgacatcggccttgcgaaaagcgctgattctcccctgcaggcttcttcggctctgtctcagaatagcctgttcacatttcgcccagcactggaagagcccagtgccgatgcaaagttagctgcacaccctcggaagggctttcccggaagcctgtccggtgctgacggtctttcacccggtacgaaccccgctaacggatgtaccttcggaggtggtctggccgcagatttgtctctacacagctttagtgacggcgcatcactgccccataaaggaccagaagccgcaggactctcttcacccttatccttcccgagccagcgcggtaaggaaggaagcgatgccaatccgtttctgtctaagagacagctcgatggtctcgccggtctcaaaggtgaggggagtcggggaaaggaagcaggggaggggggactgccactgtgtgggcctacagataagactccactgctgtccgggaaggcagccaaggctagggaccgtgaggtcgatttgaaaaacggccacaacctcttcatctcagccgctgccgtccctcctggctccctcctgtccggacccggacttgctccggctgccagctccgccggaggcgctgcttcctcagcgcaaacacatcgtagctttctggggccttttcctccaggcccacagtttgcactggggccaatgtccctgcaggcgaacctgggctccgtcgcgggttccagcgtcctgcaatccctcttctccagcgtgcctgccgcagccggactagtccatgtgtccagtgccgctacccgactgaccaactcacatgcaatgggatccttttccggcgttgccggaggaaccgttggggcaggtggagtattcaaccacgccgtcccatccgctagcgcgcatccatttggtgcacgtgtgggcaggggagccgcttgcggtagtgcaaccctgggcccatccccgcttcaagctgcggcatcggcatcagcctcgtctttccaagcccctgcatccgtggaaacccgcccacccccacccccaccacctcctcctcctcccctcccgccaccagcccatttgggtcgttcaccagctggcccacccgtgttacatgctccgcctcccccaaacgcggcacttccccctccgccaacgctcctagcctcaaatcccgagccagctctgctgcagagcctggcctccctgccaccaaaccaggcattccttcccccaacttctgccgcaagcctgccccctgccaacgctagtttgtcaataaaacttacctcactaccccacaagggagctcgaccttcatttaccgtccatcatcaacccctcccacgactcgccctagcacaggcagctcccggaataccccaagcctccgccaccggaccatcagcagtttgggtaagtctggggatgccccctccatatgccgctcacctctccggcgtcaaaccaaggtag

SEQ ID NO: 241075 - DNA, 1647 bp, synthetic construct
  misc_feature 1..1647: note = Description of Artificial Sequence: Synthetic coding sequence
  source 1..1647: mol_type = other DNA
atgggaagtcaacttgccttggctggccttctcgaaaaacggcaggaaggagctgaaaccctggagctaagcgctgacggtagaccagtgaccacccaaacgagagacccccctgtggtcgattgtacttgctttggtctccccagacgatatatcattgccattatgagcggcctgggtttctgtatatctttcggtatccgctgtaatctcggcgttgccattgtgagtatggtgaacaacagtactacacacaggggcggtcacgtggtagtgcagaaagcacaatttagttgggatcccgagaccgtggggcttatccatggctcgtttttctgggggtacatcgtaacccagatcccaggcggattcatctgccagaaattcgcagccaatcgggttttcggttttgctatagtggccacatccactttgaatatgttaatcccgtctgccgcaagagttcattacggatgcgtgatatttgtcaggattctgcagggactggtggaaggtgttacttacccggcttgtcacggcatttggagcaagtgggcccctcccctcgagagatctaggcttgcgacgacagccttttgcggctcctacgccggtgccgtagttgctatgccattggcaggtgtgctggtgcaatactcaggctggagctctgttttctacgtgtacggcagcttcgggatcttttggtatttattctggctgttggtgtcctacgagagtccagctcttcacccttcaatctctgaggaggagcgaaaatatattgaagacgcgataggtgaaagtgccaaattgatgaatccgctgactaaattcagcaccccttggcgccgattcttcacctctatgccagtttacgcgatcatcgttgccaacttttgccgttcctggacattttacttactactgatctcccagccagcttacttcgaggaagtgttcggattcgagatcagtaaagtagggctcgtgagcgcactaccccatctggtaatgactattattgtgcctatcggcggacagatcgcggattttctccgcagtcgaaggattatgtcaacaaccaatgtccgaaaactcatgaattgcggcggatttggaatggaggctacgctgttgctggtggtgggttactcccacagcaagggggtcgccattagctttttggtgcttgcggtgggattcagcggatttgccatctccggattcaacgtgaatcacctggacattgcgcctagatacgcttctatactgatgggaatctccaacggagttggcacgttaagcggaatggtgtgtcctataatcgtcggcgcaatgaccaaacacaagaccagggaagagtggcagtacgtgttcctgattgccagcctcgtgcactacggtggtgttattttttatggtgtgtttgcctccggtgagaaacagccctgggctgaaccagaggagatgtcagaagagaaatgtgggttcgtgggacacgaccagctggctgggagcgatgatagcgagatggaggacgaggccgagcccccaggtgcaccacccgcaccacctccttcttatggggctacacattcaactttccagccccctcggcctccccctccggttcgggattactag

SEQ ID NO: 241076 - DNA, 1770 bp, synthetic construct
  misc_feature 1..1770: note = Description of Artificial Sequence: Synthetic coding sequence
  source 1..1770: mol_type = other DNA
atgcccttcaaggcattcgatacattcaaagaaaagatcctcaaacctggtaaagagggggtcaaaaacgccgtgggggattctcttggaatcctgcagagaaaaattgatgggacaaccgaggaagaagacaacatcgaactcaatgaagagggccgtccggtgcagaccagccgtccatcccctcccctctgtgactgtcactgctgtggcttgccaaaacgctatatcattgccattatgtcaggcctgggattctgtatttcatttggaatcagatgcaacctgggagttgcaattgtggagatggtgaataatagtacagtttacgtagacggaaagccagagatccagacagctcagttcaactgggacccagaaaccgtcggattgattcatggctcttttttttggggatatattatgacgcagattcctggcggttttatcagcaataagtttgcagcaaacagggtgtttggagctgctattttcctgacctccaccctgaacatgttcataccatccgcggctcgcgttcattatggttgtgtgatgtgcgtcagaatcctgcaaggcttggtggaaggggtcacataccctgcatgccacggaatgtggagcaagtgggccccaccactcgaacgctcaagattagctacaactagcttttgcggatcttatgcgggtgccgtggttgccatgcctctggccggagtcttggtgcagtacattgggtggtcttccgtattttacatatacggtatgtttggcattatatggtacatgttctggcttctgcaggcctatgagtgccctgcagcgcatcccacaatctcgaacgaagagaaaacttacatcgaaacttccattggtgaaggagccaatgtggtgagcctctccaagtttagtactccatggaagcgcttttttacaagtttacctgtatacgccatcatcgttgcaaacttctgtagatcttggacgttttacctgcttctcatttctcagccagcctacttcgaggaggtatttggctttgccatctcgaaggtcggcttgctgagtgcagttccacacatggttatgaccattgtggtccctattggaggtcagctagccgactacctccgctctaggcagatactgacaactacagctgtgcgcaagattatgaattgcggaggtttcgggatggaagcgactctgctgctggtcgtgggattctcacatactaagggggtcgccatttccttcttggtcctggccgtgggatttagcggtttcgctatatctggttttaatgtcaaccatttggacatcgcccctagatacgcgtccattctgatgggcattagtaacggtgtcggaaccctgtctggcatggtatgtcccctcattgtgggtgctatgacacgccacaaaacgcgggaggagtggcagaatgtctttctgattgctgccctagttcactattcaggcgtcattttctatggtgtgttcgcttccggggaaaaacaggaatgggccgatcccgagaacttgagcgaggagaaatgcggaattatcgaccaagacgagctggcagaggagatcgaactgaatcatgagtcatttgcctcgccaaaaaagaaaatgtcctacggggctaccagccagaactgtgaggttcagaagaaggaatggaagggccagagaggagctactcttgatgaagaggaactcacatcgtatcagaatgaggaacgcaacttcagcacaatttcttag

SEQ ID NO: 241077 - DNA, 1620 bp, synthetic construct
  misc_feature 1..1620: note = Description of Artificial Sequence: Synthetic coding sequence
  source 1..1620: mol_type = other DNA
atgccatttaaagcattcgataccttcaaagagaagatcctgaagccaggcaaggagggagtaaagaacgcggtgggagactccctgggaattctccagaggaagattgatggaactaccgaggaagaagataatattgagctgaacgaagaaggtaggcctgtgcagacatcaaggccaagtccccctctctgcgattgccattgttgtggtctccctaaacggtacataatagccataatgtcgggtctgggattttgcattagcttcgggatcagatgtaaccttggggtcgccatagttgagatggtgaacaacagtaccgtgtacgttgatgggaagccagagatacagacagcccaattcaactgggacccagagacagtcgggttaattcacgggtcttttttctggggttatattatgacacagattcccggtggcttcatctccaacaagtttgccgcaaatcgcgtctttggagctgccatcttcctaacctcaactctgaatatgttcatacctagcgctgctagagtgcattacggttgcgtcatgtgcgttcggatcttgcagggtcttgttgagggcgtgacttaccctgcttgtcacggcatgtggtccaagtgggccccaccgctcgaacggtccaggctcgctacaacttccttctgtggaagttatgcaggggctgtcgtggctatgcccctggcgggtgtgctagtgcagtacatcggatggtcttctgtgttttatatctatggtatgttcggcatcatttggtacatgttctggctgctgcaggcttatgagtgccctgcagcacaccctactattagcaacgaagaaaagacatatatcgagaccagtattggagagggcgctaatgtcgtgagcctctcggtgggcctgctgtccgctgtaccacatatggtgatgactatcgtggtccccatcgggggacagctggctgactatttgcggtcacggcaaatcctgaccaccacagccgttcgcaaaatcatgaattgcggtgggtttggaatggaagctactttgctcctggtggttggcttctctcacactaaaggagttgctatctcatttctggtgctggcagtgggcttttcagggtttgccatcagcggtttcaatgtgaatcatttggatattgcaccgagatacgcatccattctgatgggtatctcaaacggcgtggggacattatctggaatggtgtgtcctttaatcgtaggggcaatgacccgacacaagacacgagaggagtggcaaaacgtctttttgatagccgcactggttcactactcaggagttattttctatggggtgttcgcctccggtgagaaacaagagtgggccgatcccgagaacctaagcgaggaaaagtgtggtattatcgatcaggacgagctggcggaggagattgagctgaatcatgagagcttcgctagcccgaaaaaaaaaatgagctatggcgcaacctcacagaattgtgaagtgcagaaaaaggagtggaaaggtcaacgaggagccacccttgacgaagaggagctgacctcctatcagaatgaagaaagaaatttctcaaccatctcttag

SEQ ID NO: 241078 - DNA, 1293 bp, synthetic construct
  misc_feature 1..1293: note = Description of Artificial Sequence: Synthetic coding sequence
  source 1..1293: mol_type = other DNA
atgaccctcacttcccgacggcaagactctcaggaggctagacctgagtgccaggcttggaccggcaccttgctgctgggaacttgtctgctttactgcgcacgatcttccatgccgatctgcacagtcagtatgtcccaagactttgggtggaataagaaggaggctggaatcgtgttatccagcttcttttggggctattgcctcacccaggtcgtcggaggccacctgggagaccggataggaggcgaaaaggtgatcctattaagtgcttccgcatggggctcaattactgccgtcaccccgttactggcacatttgtccagcgctcacctggccttcatgacattctcaaggatcctgatggggctgctgcagggtgtatatttccccgcactgacaagcttactcagccagaaagttcgggagagcgaacgggcatttacctattctatcgtgggtgctggatcgcagtttgggactttgctgactggcgctgtcggatctctgttgttagagtggtacggttggcagagcatattctacttcagcggcggtttgacccttttgtgggtttggtacgtgtatcggtatcttctctctgagaaggacctaatcttggccctcggcgtcctggcacaaagccgtcccgtctcacgccataatcgagtgccgtggaggcgcctgtttcggaagcccgcagtctgggccgctgttgtttcccagctttccgcggcatgttctttctttattctacttagctggttgcccacgtttttcgaggaaacttttcccgacgcaaaaggttggatcttcaacgtggtgccctggctggtggcaattcctgcgagcctcttcagcggtttcctcagcgatcacttgatcaatcaggggtaccgcgctattaccgtaagaaagctcatgcagggaatgggattgggcttgagcagtgtgtttgcactgtgtctcggccatactagttctttctgcgaatccgtggtctttgcttcggcatcaatcggcctgcagacctttaaccattctggaatttccgtgaacatccaggatcttgcccctagctgcgccggatttctgtttggagtggcaaacaccgcaggggctctggctggtgtggtgggagtatgtctgggtgggtatctcatggagaccacgggcagctggacatgtctgtttaacctggtcgccatcatttctaatctgggtctttgtacctttttggtattcgggcaggcccagagagtcgacctctcatcaactcacgaggacctatag

SEQ ID NO: 241079 - DNA, 1311 bp, synthetic construct
  misc_feature 1..1311: note = Description of Artificial Sequence: Synthetic coding sequence
  source 1..1311: mol_type = other DNA
atgcagccccctccagatgaagctagaagagatatggcaggcgacacacaatggtccaggccagagtgccaggcctggactggtacccttcttttagggacttgcctgctctactgtgccaggtcaagcatgcctatctgcactgtgagtatgtcacaggacttcgggtggaacaaaaaggaagcgggtatcgtgcttagcagctttttctggggctactgcctgacgcaggttgtgggaggccatctgggagatcgtattggtggcgagaaggtcatcctgttatccgcctctgcctggggaagtatcacagccgttacgcctctgttggcccacctgtcatctgcccacctggcttttatgacttttagtagaattctaatggggctgctgcagggcgtttactttcctgctcttactagtctcttgtcacaaaaggtgcgtgaaagtgagagggcattcacctattcgattgtgggggcaggatctcagttcgggaccttactgacaggcgctgtcggaagtctcctgctagagtggtacggctggcaatctatcttctatttcagtggagggctcactctgttatgggtgtggtacgtctatcggtacctgctatctgagaaggatcttattttggccctgggcgttctggcacagagcagacccgtgtcaagacacaacagggtcccgtggcgtcgcctgtttcgaaagccagccgtctgggcagcagtggtgtcacagctatccgctgcttgcagcttcttcatccttctctcatggctgcctaccttcttcgaggaaacgtttcccgacgccaagggctggatcttcaatgtggtcccctggttagttgccattcccgcatctctgttttcagggttcctcagcgatcatcttatcaatcagggataccgtgccatcaccgtacgtaaacttatgcagggcatggggctggggcttagttcagttttcgccctgtgtctcggacatacaagctcattctgcgagtctgtggtgtttgcaagtgccagcattggcctgcagacctttaatcactccgggatttccgttaatatccaggatctcgcgccatcttgtgctggattcctctttggggtggccaatactgctggggctcttgccggtgttgtcggtgtatgtctggggggatacctaatggagactaccggctcttggacttgcctgtttaatcttgtggccattatctctaatcttggcctctgtactttcttggtgttcggccaggcccagcgggtcgacttaagtagcacgcatgaggatctctag

SEQ ID NO: 241080 - DNA, 459 bp, synthetic construct
  misc_feature 1..459: note = Description of Artificial Sequence: Synthetic coding sequence
  source 1..459: mol_type = other DNA
atgtttccacgccctggggctttgagttggacagtccgcagacacactcctagacaggtggaaccaccatgcgtatgtatgacgctgacatcccgaaggcaagattcccaggaggccaggcccgagtgtcaggcatggactggtacccttcttttaggcacatgtctcctgtactgtgcacggtcttcaatgccgatttgcactgtgagtatgagccaggattttgggtggaacaagaaagaggctggtattgttttaagttccttcttttgggggtattgccttacacaggtcgtcggaggtcacctaggagacaggattggcggagaaaaagtgatactcctgagtgccagtgcttggggcagtatcactgccgtgacccccctgctggctcacctcagtagcgcacacttagcctttatgacattctctaggatactgatgggactcctccagtag

SEQ ID NO: 241081 - DNA, 1599 bp, synthetic construct
  misc_feature 1..1599: note = Description of Artificial Sequence: Synthetic coding sequence
  source 1..1599: mol_type = other DNA
atggaatccgctgagcctgccggacaggcccgagccgcagccactaagctcagcgaagctgtcggagccgcattgcaagagcctcgcaggcaaagacggctcgtcctggtcatcgtgtgcgtggccctcctactcgataacatgctgtacatggtgatcgtgcctattgtgccagattacatcgcacacatgcggggtggcggtgagggacccacacggactcccgaggtatgggagccaaccttgcccctgcctactccggcaaacgccagtgcctatactgctaatacctccgcaagccccaccgccgcatggcccgcaggctctgccctgcgcccacgataccccacagagagcgaggacgtaaaaatcggggttttgtttgcctctaaggctattctgcagctgttagttaatcccctaagtggaccgttcattgacaggatgtcctatgatgtgccgctgttgatcggacttggagttatgttcgccagcaccgtgttgtttgcattcgcggaggattacgcgacactgttcgctgccagaagcctgcagggcctaggaagcgctttcgcggacaccagtgggatcgcgatgatcgcagataagtatcccgaagaacccgaacgttcgagagctctgggcgtggccctcgcctttatatctttcgggagcctggtggcgccaccttttggagggattctctacgagttcgccggaaaaagagttccattcctggtcctggctgccgtgtcacttttcgatgccctcctgctcttagccgtggccaaaccattttctgccgcagcaagggctcgcgcaaatctcccagtgggaaccccaattcacaggctgatgctggatccatacatcgcagtggtggccggtgccttaactacgtgcaatatccctcttgcctttctggagcctaccatagccacctggatgaaacacaccatggccgcatccgaatgggaaatggggatggcctggctaccggcattcgtgcctcacgtgctcggtgtctatctgacagttcgcttggctgccaggtatcctcatctgcaatggctttacggagcattaggcctggctgtgatcggagccagttcctgtatagtgcccgcatgccgcagctttgcccctttggtggtgtcactatgcggcctctgcttcggaatcgccttggtggatacagctcttctgccaactctggcgtttctggtcgacgttcgtcacgtatccgtgtacggctcggtgtacgccatcgccgatatcagctattcggtggcttatgcccttggcccaattgtcgcaggccacattgttcatagtctcggctttgagcaactgtctctagggatggggctggctaacctgctgtacgcaccagtgctgctgttactgcgtaacgttggcctcctgactcgatcacggtctgaaagagacgtcctacttgatgaacccccacaaggactgtatgatgccgttagactcagagagcgccctgtttccgggcaggatggcgaacccaggtctccccctgggcctttcgacgcttgtgaagatgattacaactactactatacaagatcttag

SEQ ID NO: 241082 - DNA, 1482 bp, synthetic construct
  misc_feature 1..1482: note = Description of Artificial Sequence: Synthetic coding sequence
  source 1..1482: mol_type = other DNA
atgctcaggaccatccttgacgctccccagcgcctgctaaaggaagggagagcctctagacaactggtcctggtcgtcgtatttgtggccctgctgctggataatatgttatttactgtcgttgtcccgatcgtcccgaccttcctgtacgacatggaattcaaggaggtcaacagttctctgcacctgggacatgctgggtctagtccccacgcactagcctcacccgcattctccactattttctcttttttcaacaacaacaccgttgccgtggaagaaagtgtgccctctggaatcgcttggatgaacgatacagcgtccactatcccccctcctgctactgaggctatctctgcccataagaacaattgcttacaaggcacgggtttcttggaggaggagataacgagggtgggcgtgctgtttgcttcaaaagccgtcatgcaactgctggtaaacccctttgtgggccctctcaccaaccgcattggataccatatcccaatgtttgccggtttcgtgatcatgtttctctctacagtgatgttcgccttttccggaacttatacgttgctgtttgttgcgaggactctgcagggaataggctcttctttttcgtcggtagctggtcttggaatgctcgcttcggtgtacaccgatgaccacgagcgtggaagggccatggggaccgctctggggggactagcgctgggactcctggttggcgcaccattcgggtctgtcatgtatgagtttgttgggaagagcgcaccttttttgatactcgccttcctcgcccttctggacggtgctctgcagctgtgcattttacagccatccaaggtgagccccgagagtgctaaaggcacccccctcttcatgctgctcaaagatccctatatattggtcgctgctggcctggccttcctccctgctagtgtgtcctatttgattgggacgaacctcttcggtgtgctggctaacaaaatgggcagatggttgtgcagccttatcggaatgcttgtggtggggacgtcattactgtgcgtgccacttgctcataacatattcggtctgattggtccgaacgctggactcggactggcaatcggcatggtggatagtagtatgatgcccattatgggccatcttgtagacctgagacacacgtctgtctacggaagcgtttatgccattgccgatgttgccttctgtatggggttcgctatcgggcctagtacaggcggagctatcgtaaaagctataggattcccatggcttatggtgatcactggagtgatcaatatagtgtacgccccactctgctactaccttcgatccccaccagctaaagaggagaagctagctatcctttcgcaggattgcccaatggagacaagaatgtatgcgacacagaaacccacaaaagagtttcccctgggggaggatagcgacgaagaaccagatcacgaggaatag

SEQ ID NO: 241083 - DNA, 1578 bp, synthetic construct
  misc_feature 1..1578: note = Description of Artificial Sequence: Synthetic coding sequence
  source 1..1578: mol_type = other DNA
atgctgaggaccattctggacgcaccacagcgcctgctgaaggagggacgggcatcaaggcaacttgtgctcgtcgtagtgttcgtcgcccttctccttgacaacatgctctttacagttgtggtgcctatcgttccaactttcctgtatgacatggagtttaaggaggttaactctagtcttcatcttggacacgccggatcctcccctcacgccctcgcttccccggcattttccactatttttagctttttcaataataataccgtcgcagtggaagaaagcgtgccttcaggcatcgcctggatgaatgacacggcctccaccataccccctcctgcgaccgaggctatatcagcccataagaacaattgcttgcagggaacagggttcctggaggaggagatcacccgcgtcggcgtcctgttcgccagcaaagccgtgatgcagctgttggtgaacccctttgtagggcctctgaccaaccggataggttaccacatcccaatgtttgcaggttttgtcataatgttcctgtctacggtgatgtttgcatttagcgggacatacacgctgctctttgttgccagaaccctccagggaatcggctccagcttctctagtgtagctggacttggcatgctcgcttccgtatacaccgacgaccatgaaagggggcgtgctatgggaaccgcgctcggtgggctggctttaggccttttggtgggcgctccatttgggtctgtaatgtatgaattcgtgggaaaatcagccccttttctgatcctggccttcctggccctgctggacggcgcactgcagctctgcatcttgcagcccagcaaagtctctcccgaaagcgcgaaaggaacaccgctctttatgcttctgaaagatccctatattttggtcgctgctgggtccatatgttttgcaaacatgggcgtcgcgatcttggagcccactcttcccatctggatgatgcagacaatgtgcagtcccaagtggcagctgggcctcgcatttttaccggcaagtgtcagttacttgatcggcaccaacctgtttggggtacttgccaataaaatggggcgatggctctgttctcttatcggtatgctggtggtagggacctctttattatgcgtgcctctggcccacaatatttttgggctgatcggacccaatgctggtctaggcctggcaattgggatggtggattcttccatgatgccaataatgggtcatctggtagacctgcgccatacgtcagtttatgggtccgtttatgcgatcgccgacgtggcattttgcatgggttttgctattgggccaagcactggaggcgctattgtcaaagcaattggattcccttggttaatggtgataacaggggttataaatatcgtgtacgcgcctctctgctactacttgagaagcccccctgcgaaagaagaaaagttggctatcttgtctcaggattgccccatggagacaaggatgtacgctactcagaagccaaccaaagaattcccgctcggagaagacagcgacgaagaacccgaccatgaggaatag

SEQ ID NO: 241084 - DNA, 1419 bp, synthetic construct
  misc_feature 1..1419: note = Description of Artificial Sequence: Synthetic coding sequence
  source 1..1419: mol_type = other DNA
atgttaagaacaatcttggacgcgcctcagaggcttctgaaggaaggacgagcttctcgccagctggtcctagtggtggtgttcgttgcacttctgctcgacaacatgttgttcacggttgtcgttccgatagtgcctacattcctttacgacatggagttcaaagaagtcaattcgagcttgcacttgggccacgccggaagctctccacacgccctcgccagccctgcattctcgaccatcttttcttttttcaataataacacagtcgcagtggaagaatcagtgccctctggcatcgcgtggatgaacgatacagcatctactatacccccacccgctaccgaagccatctccgctcataagaataactgtctccagggaacaggctttcttgaagaagaaattacccgcgtcggagttctctttgcctcaaaggcggtgatgcagttgcttgtgaacccatttgttggtccccttaccaatcgcattggctatcacatcccaatgtttgccggttttgtaattatgtttctgtctactgtcatgtttgccttctccggaacttacacccttctgttcgtggcacgcacactccagggaattggaagctcattttctagtgtcgctggactgggaatgctggcaagcgtgtacacagatgaccatgaacgcggaagagcaatgggaactgcacttggtgggctggccttgggcttactggtcggggcaccctttggaagcgtcatgtacgaatttgtcggcaagtcagctccattcctgattttggcctttctggcgctgctcgatggcgctctgcagctttgtatcctgcagccttcaaaggtgtcccccgagtctgccaagggtacgccgctgttcatgctgcttaaggatccctacatccttgtggccgcaggatccatctgcttcgcaaacatgggcgtggcgatactggaaccaacacttcccatttggatgatgcagaccatgtgctcacctaagtggcagctgggcttagctttcctgcccgcttccgttagctatctgatagggacgaaccttttcggcgttttagctaataaaatgggccgatggctgtgctctctgatcggcatgctggttgtgggcacctcactgctctgcgtccctctcgctcacaacatctttgggttaattggccctaatgctgggctgggcctggccataggcatggtggactcaagcatgatgcccattatgggtcaccttgtggacctacgacacactagtgtgtatggcagcgtctatgccatcgccgatgtcgctttttgtatgggcttcgctattggctacagcgagagcggtctgcctcacggagaccccgacgtctgtaatcccgaggcccacgaggggatcagcagcgggggaggccagtag

SEQ ID NO: 241085 - DNA, 1578 bp, synthetic construct
  misc_feature 1..1578: note = Description of Artificial Sequence: Synthetic coding sequence
  source 1..1578: mol_type = other DNA
atgctgaggactatactggacgctccacagcgcttgctgaaggagggaagagccagtagacaattggtgctggtggtagtgttcgttgcactcctgctagacaatatgcttttcacagtggtcgtcccaatcgtgcctacatttctttacgatatggagttcaaggaggtgaatagctcattacaccttgggcacgccggtagctcgcctcacgccctcgcaagcccagcattcagcacgatcttctcattttttaacaacaatactgttgcagtcgaagagagcgtcccatccggcatcgcctggatgaatgacaccgccagcactatcccccctccggctacggaagctatctcggctcacaaaaacaattgtcttcagggcactgggttcctcgaggaagaaatcaccagagttggagtgctatttgcctcgaaggccgtgatgcaattgttggtgaacccattcgttggccctcttacaaatcgaatcggttatcacatccctatgttcgctggctttgtgatcatgttcctctcgaccgttatgttcgcgttcagcggaacctacactctgttgtttgtggccaggactctccagggcatcggcagtagctttagttccgtcgccggattgggtatgttggcgtccgtgtacacagacgaccacgagagagggagagccatgggaaccgctctaggcggactggccctgggcctgttggtgggagcacccttcggatcagtgatgtacgaattcgtgggtaagtctgctcccttccttatattggccttcctggcgctccttgatggagcactccaactctgcatacttcagccaagtaaggtaagtcctgaatccgccaagggaactcctctgtttatgctgttaaaagatccttatatcctcgtcgctgctggaagtatttgctttgccaatatgggcgttgctattttggagcccaccctgccaatctggatgatgcagaccatgtgttcccctaaatggcaactgggtctggcgttcttacctgctagcgtctcttatttaatcgggacaaatctgtttggtgttctcgccaataaaatgggacgatggctctgctcactaattggaatgctcgttgtggggacttcgttgctctgcgtacccctggcccacaacattttcggactgataggtcccaacgccggtctcgggttagcaattggtatggtggattcgtctatgatgcctataatggggcacttggtggacttgaggcatacctcagtgtacggcagcgtgtatgcgattgccgatgtggcattctgtatgggctttgcaatcggaccctcaaccggaggcgcaattgtcaaggctatcggttttccctggctcatggtgattaccggggtgataaatatcgtttacgcgccactctgttattacctgcgaagtcctccagcaaaggaggagaagctggccattttgtcccaggattgcccaatggagactaggatgtacgccactcagaagcccaccaaggaatttcccctgggcgaagactcagacgaagagccagatcacgaggaatag

SEQ ID NO: 241086 - DNA, 1158 bp, synthetic construct
  misc_feature 1..1158: note = Description of Artificial Sequence: Synthetic coding sequence
  source 1..1158: mol_type = other DNA
atgctaaggaccattcttgatgccccacagaggctgctgaaggaggggagagccagccggcaattggtgctagtggtggtcttcgttgcactgctgcttgataatatgctcttcacggtcgtggttcctatcgtgcctacgttcctttatgatatggaattcaaggaggtgaactcctcattgcatctggggcatgctggctcatcaccccatgctttggcttccccagccttctctaccatttttagtttcttcaataacaataccgttgccgtggaagagagtgtcccatcggggattgcctggatgaatgatacagcatccactataccaccacccgctaccgaggccatctcagcccataagaacaattgtctgcaggggactggattcctggaggaggaaatcactcgagtcggcgtcttatttgcttctaaggccgtgatgcagctccttgttaacccctttgtaggccctctgaccaaccgcataggctaccacattcctatgtttgccggattcgttatcatgtttctgtcaaccgtcatgtttgctttttcaggcacatacaccctgctcttcgttgcgagaacactccaaggaattggtagttccttctccagtgtggccggtctgggcatgcttgcctccgtatatacggatgaccacgagcggggacgcgctatgggcacagcgctcggaggactcgccttgggattgctggtgggggctccattcggtagcgtgatgtatgagttcgttggaaaatctgccccttttttgatcctcgcctttctggccctgctggacggtgcacttcagctctgcattttacagccatccaaggtgtcccctgaatcagcgaaaggtacaccactgtttatgctgctgaaggatccatatattctggtggccgcagggagtatttgcttcgctaacatgggagtggcaatactggagcctaccctccccatttggatgatgcagacaatgtgcagccccaagtggcagttgggcttagcatttctccccgctagcgtgagctacttaatagggacaaacttattcggcgtgctcgctaataaaatgggccgatggctgtgctctctcatagggatgctcgtcgtgggcaccagcctattgtgtctgcccagctag

SEQ ID NO: 241087 - DNA, 1482 bp, synthetic construct
  misc_feature 1..1482: note = Description of Artificial Sequence: Synthetic coding sequence
  source 1..1482: mol_type = other DNA
atgctccgcaccattctggacgctcctcagagactcctgaaggagggaagagcgtcgagacagctggtactcgtagttgtgtttgtagctcttctgctggacaacatgctgtttacagtagtggtgcctatcgtcccaaccttcttatatgacatggaatttaaggaggtcaacagtagcctgcaccttggtcatgccggatcctcccctcacgccctggctagcccagccttctcaacaatcttctctttctttaataataataccgttgccgtcgaggagagcgtgccctcagggattgcatggatgaatgacactgcttcgactatacccccacccgcaacagaagcgatttctgcacataaaaataactgcctccagggcacaggattcctagaggaagagatcacccgagtgggagtgctgttcgcttccaaggcagtcatgcagctacttgtcaaccctttcgtggggcctcttaccaaccgcatagggtatcacatacccatgtttgccggttttgtaatcatgttcctatccacagtaatgtttgcgttttccggtacctacaccctgttgtttgtggccagaacccttcagggcatcggcagttcattcagtagtgtcgcaggactcggaatgcttgccagcgtttacacggatgatcatgagcggggtagggctatgggcacagcgctagggggtctggcccttggactcttagtaggggctcctttcggatccgtgatgtacgagtttgtcgggaaatccgcgccatttctcattctggcatttctagctttacttgacggagctctgcaactctgcatcctacaaccttcgaaggtgtcccctgagtcggccaaaggcacacccctcttcatgctcctgaaggatccctacatcctggttgcggcagggctggcctttttgcctgccagcgtgagctacctgattggcaccaacctgttcggtgtgctggcgaataagatggggagatggctctgtagtctcattggaatgctggttgtggggacctccttgctctgtgttcctctggcccacaacatcttcggattgatcggaccgaacgccggactgggcttggcaatcggtatggtggattcatccatgatgcctatcatgggccacctcgtcgatctgaggcacacttctgtgtacggttccgtgtacgccatcgcggatgtggcattttgcatgggattcgcaattggcccttcaaccggcggagctattgtcaaggctatagggttcccctggcttatggtcataacaggagtcataaatatagtgtatgcaccgctgtgctactatctacggtcccccccagctaaggaagaaaagctggcaatactatcacaagattgcccgatggagaccaggatgtatgccacccaaaagcccaccaaggaatttcctcttggggaggactcagacgaggaacccgaccatgaggagtag

SEQ ID NO: 241088 - DNA, 1545 bp, synthetic construct
  misc_feature 1..1545: note = Description of Artificial Sequence: Synthetic coding sequence
  source 1..1545: mol_type = other DNA
atggccttatcagaacttgctctggtgagatggctgcaagagagcaggaggtcaagaaagctcatacttttcattgtctttcttgctttactgctagacaacatgctgcttacagtagttgttcctattattccatcctatttgtatagcatcaagcatgagaaaaatgccaccgagattcagactgcgcgtcctgtgcataccgccagcatcagcgattctttccagtccattttctcttattatgacaatagtactatggtcactggcaacgccacccgcgacctgacacttcaccagactgctactcagcacatggtgacaaacgcctcagccgtgccctccgactgccccagtgaggacaaggacctgcttaacgagaatgttcaggtcggcctgctgtttgcttctaaggccaccgtccagctgatcaccaatccctttattggactcctgaccaatcgcattggatatccgattccaatcttcgcaggtttctgcatcatgttcgtttccaccatcatgtttgctttcagcagctcatatgccttcctgctgatagctcgctccctgcaagggatagggtcatcctgctcgagtgtcgcgggaatgggcatgctcgcatccgtgtacacggatgacgaggaaaggggaaacgtgatgggcattgcactgggtgggctggctatgggtgtgctggttgggccacctttcggctctgtcctctatgagttcgttggcaagacggccccttttctggtcctggcggctttggtgctgctcgacggagctattcagttatttgttctccagccatcacgagtacagcccgagagtcagaagggcacccctctgacaacattgcttaaagatccctatatcctgatcgccgctggtagcatatgcttcgcaaacatgggaatcgcgatgcttgagcctgccctaccaatttggatgatggaaacaatgtgttcaaggaagtggcagcttggagtagccttccttccggcatccatctcataccttatcgggacaaacattttcggcatattagctcacaagatggggaggtggctctgtgccctgcttggaatgatcattgtgggggtgtcaatattgtgcattcccttcgctaaaaacatctatggccttattgccccaaatttcggcgttggctttgccattgggatggtggattcctctatgatgccgatcatgggctaccttgtggacttacgccacgtgtccgtgtacggcagtgtttatgctatcgcggacgtggccttttgcatggggtatgccataggtccaagtgccggaggcgctatcgccaaggccattggttttccctggctgatgactatcatcgggattatagatattctgttcgctcccctgtgcttttttctgagatctcctcccgcaaaggaggagaagatggcaattttaatggatcataactgccccatcaagaccaagatgtatacacaaaataatatacagtcgtatcccataggagaggacgaggagtcagagagtgactag

SEQ ID NO: 241089 - DNA, 1494 bp, synthetic construct
  misc_feature 1..1494: note = Description of Artificial Sequence: Synthetic coding sequence
  source 1..1494: mol_type = other DNA
atggatgtgccagggccagtctctcgccgagcagcagcagcagcagcaacagtgctgctgcgcacagcgagggtcagaagagaatgctggttcctgcccactgccctgctgtgcgcgtatgggttcttcgcttctctgcgtccgagcgagcccttcctgaccccgtatctcttaggtcctgacaagaacctgacagaacgtgaagtttttaatgaaatatacccagtttggacttactcttatttggtactattatttccagttttcctcgctaccgattatctccgttacaaacccgtggtcctgctgcaggggctgtcactcattgttacttggtttatgctactgtacgcacagggactcctggccatccaatttctcgagttcttttatggaatcgccaccgcaactgagatcgcctactattcatatatctactctgtggttgatcttggcatgtaccagaaagttacatcctactgcagaagcgcaacactggttggctttaccgtcgggtcagtgctgggccagatccttgtgtcagttgccggttggtctctcttttcactgaatgtaatctcgctgacatgtgtgtcagtcgctttcgcagtggcatggttcctgcctatgcctcagaagagtctgttctttcaccatattccgagcacgtgccagcgtgtgaacgggatcaaagtacagaacggcggaattgtgacagatacccctgcatcaaaccatctgcctggctgggaagacattgagtccaaaatccctctgaatatggaagagccacccgtggaagagcctgagccaaagcccgatcgtctgcttgttctgaaggtgttgtggaatgactttctgatgtgttacagctctaggcctctcttgtgttggtccgtttggtgggccctatcaacctgcgggtacttccaggtggtgaactacactcagggactgtgggagaaagtgatgccatccagatatgcggctatatataatggcggagttgaagctgtgtcaactctcctcggggcagtggcagtcttcgctgtcggctacatcaagatctcatggagtacttggggagagatgacattgtccttattcagtctgcttattgcggcagcggtgtatattatggacaccgtaggtaacatctgggtttgctacgctagttatgtcgtgtttcgcattatctacatgctgttgatcacaatcgcgaccttccagattgccgctaatctgtccatggagaggtacgcactagtgttcggggtgaatacctttatcgcgttagccctgcagactttgctaacgctgatagtggtcgatgccagcggcctcgggctcgaaatcacaacacagttcctgatctacgcttcttacttcgcccttattgcagtcgtctttctcgcgtccggtgccgtttctgtgatgaagaagtgtcggaaactcgaggaccctcagtcaagcagtcaagtgaccacatcctag

SEQ ID NO: 241090 - DNA, 1380 bp, synthetic construct
  misc_feature 1..1380: note = Description of Artificial Sequence: Synthetic coding sequence
  source 1..1380: mol_type = other DNA
atggatgtgcccggtcccgtcagtcggagagcagctgccgcagccgctactgtcttactgagaaccgctagagtgcgaagagagtgctggttcctacccactgctctactgtgtgcctacggcttcttcgcatccctcaggccgtccgaacccttcttgactccttacttgttgggtccagacaagaatttaaccgagagagaagtgttcaacgaaatataccctgtgtggacttatagctacctagtgttgctttttccggtttttctcgcaaccgactatctgagatacaaaccagtggtcctattacagggcttaagtctgattgtcacttggtttatgttactgtacgcccagggactcctggctatccagttcctggagttcttttacggaatcgctactgcaaccgaaattgcatactattcctacatttattccgtcgtggacttaggaatgtatcagaaagtcacaagctattgccgctcagcaacgctcgtcggatttactgtgggcagtgtgctcgggcaaatcctggtgtcagtcgcgggttggtccctattctccctgaatgttatatcccttacctgcgtgtcggtcgccttcgcagttgcatggttcctccctatgccccagaagtcccttttcttccaccacataccgtccacctgtcaacgagttaacggcatcaaggagcccaaacctgatcgcttactggtccttaaggtgctgtggaatgatttcctgatgtgctacagctccaggcctctcctctgctggtccgtttggtgggccttgagtacctgtggctacttccaggtagtcaattacacgcagggtctgtgggaaaaggtgatgccctctcggtatgccgctatttataatgggggagtcgaagctgtctccaccttgctaggggctgtggccgtatttgcagtgggatatatcaaaatctcctggtcgacttggggcgagatgaccctttctttgttctcgctactgattgcggcagccgtgtacattatggacaccgtcggaaacatttgggtgtgttacgcatcatatgtggtttttaggattatatacatgcttctgatcactattgccaccttccagattgctgctaatctgtctatggagcgctacgccctcgtattcggggttaacacctttattgcgctggcactccaaactctccttactttaatcgtggtcgacgctagtggccttgggctcgaaatcacaacgcagtttttgatctacgcaagttacttcgcattgatcgccgtcgtcttcctggcttccggggcagtgtctgtaatgaaaaagtgtcgtaagctagaagatccccagagcagctctcaggtcaccacatcctag

SEQ ID NO: 241091 - DNA, 891 bp, synthetic construct
  misc_feature 1..891: note = Description of Artificial Sequence: Synthetic coding sequence
  source 1..891: mol_type = other DNA
atggatgtccccggtcctgtctctaggagagcggctgccgctgccgcaacagtgctgcttcgaacagcccgagtgcggagagaatgctggttcctcccaaccgccttactatgcgcttacggattttttgcctcactgcggccatcagagccattcctcactccatacttgttgggccctgacaagaacttgacggaaagggaggagcccaagccagaccggctgcttgtgctgaaagtgctgtggaatgattttctgatgtgttacagtagccggccactcctgtgctggtccgtgtggtgggcactctccacctgcggctatttccaggtagtcaactacacacaaggcctctgggagaaggtgatgcccagccgatacgcagcaatatataacggaggtgttgaggccgtgtcaactctgttgggtgcagtggcagtatttgccgtgggatacattaagatctcttggtcaacgtggggggaaatgaccttatcccttttttcattgctgatcgctgcagccgtgtacatcatggacaccgtggggaatatttgggtgtgttacgcatcctacgttgtgttcaggatcatatacatgttgttgattactatcgctaccttccagatcgcagccaacctatctatggaacgctacgccctggtgttcggcgtgaatacttttattgccctggcattacagaccctgctaaccctgatcgtggtggacgctagcggtctcggcctcgagattacaactcagtttctcatatacgcgtcctatttcgcactaattgctgttgtgttcctggcttccggagcagtcagtgtgatgaagaaatgcaggaagcttgaggatcctcagagttcttcccaggtgaccacctcctag

SEQ ID NO: 241092 - DNA, 1491 bp, synthetic construct
  misc_feature 1..1491: note = Description of Artificial Sequence: Synthetic coding sequence
  source 1..1491: mol_type = other DNA
atggattgttatagaacctctctgtccagcagctggatttacccaaccgtgatcctttgcctatttgggttcttttccatgatgagacccagtgagccttttctcatcccttatctcagtggaccggacaagaatctcacatctgcagaaatcactaatgagatatttcctgtgtggacgtacagctacctcgtacttttgctgcctgtgttcgtgctaacagattacgtgagatacaaaccagtgatcatcttacagggcatcagcttcattataacttggctactcctcctgtttggacaaggtgtcaagaccatgcaggtagtggagttcttctatggaatggttaccgctgcagaggtagcttattatgcatacatctattccgtcgtaagccctgaacactatcagcgagtgagtggatactgcaggtccgtgacactcgcggcttacacggccggttctgtactcgctcaactgctcgtatccctcgccaatatgtcatatttttacctgaatgtcatttcgctggcgagcgttagcgtagccttcttattctccctgttcctgccaatgcccaagaagtccatgttttttcacgccaagccgagcagggagattaagaagtcatccagcgtgaacccagttcttgaggagacacatgagggggaggcacccggttgtgaggaacagaagccgacctctgaaattctttctacctccgggaaactaaacaagggacagctaaacagtctgaaacccagtaatgtcaccgtcgatgtgtttgtccaatggtttcaggacctgaaagaatgttactcttctaaacgactcttttactggtcgctctggtgggccttcgctaccgccggattcaaccaggtgctcaattatgtgcaaattctttgggactacaaggccccaagccaggactccagtatctataacggagcagtagaggccatagccacgttcgggggagccgttgccgcattcgccgtggggtatgtaaaagtgaactgggaccttctgggcgagctggcgctggtcgtgttttccgtcgtgaacgcgggttcattatttctgatgcattacacggccaacatttgggcctgctacgcaggctacctgattttcaagagttcctatatgttgttaatcactattgctgtatttcagatcgccgtaaacttgaatgttgaaaggtatgctttagtgttcggcataaacacgttcatcgccctcgttattcagactattatgacagttattgtggtcgaccagcgcggtctcaatcttcccgtgtcaattcagttcctcgtgtacggctcttattttgcagttattgcaggtattttcctgatgcgatccatgtacattacctactcaacaaagtcacagaaggacgtccagtcgcctgctcccagcgaaaacccagacgtgagtcatcccgaggaggagagcaacattattatgtccacgaagctttag

SEQ ID NO: 241093 - DNA, 165 bp, synthetic construct
  misc_feature 1..165: note = Description of Artificial Sequence: Synthetic coding sequence
  source 1..165: mol_type = other DNA
atggactgttaccgcactagtctttcttcctcctggatataccccaccgtaattctgtgcctgttcggctttttctctatgatgcgcccttcagagccatttctgatcccctacctctcaggtccagataaaaatctaacctctgctgagatcacaaatgaatag

SEQ ID NO: 241094 - DNA, 195 bp, synthetic construct
  misc_feature 1..195: note = Description of Artificial Sequence: Synthetic coding sequence
  source 1..195: mol_type = other DNA
atggattgctatcgcacgagcctctcatcttcctggatctacccaaccgtgattctgtgcctattcggattcttctctatgatgagaccaagtgagccattcttaataccatatctgagtgggcctgacaaaaatctgacttctgcggagatcaccaatgagatattcccagtctggacatacagttatctgtag

SEQ ID NO: 241095 - DNA, 1491 bp, synthetic construct
  misc_feature 1..1491: note = Description of Artificial Sequence: Synthetic coding sequence
  source 1..1491: mol_type = other DNA
atggattgctataggaccagcttaagctcaagctggatttaccctacagtgatcctgtgcctattcggtttctttagcatgatgcggccatctgagccatttctcataccttacctgtcaggacccgataagaatctgacctccgccgaaattaccaatgagatctttcctgtatggacctattcctatctcgtactgctcctccctgtgtttgtgctcactgactatgttcggtacaagcccgttattattctgcagggcatcagctttattattacttggctcctgctgctcttcggtcagggcgtaaagacaatgcaggttgtggagtttttctatgggatggtcacagctgctgaggttgcatactatgcttacatatacagcgttgtttctccagagcattatcaaagggtgagcggttactgccgaagtgtgacattagcagcttacactgcaggctcagttcttgcgcagctgctcgtgtctttagcaaatatgtcttatttttacctgaatgttatatcactggcctcagtgagtgtggcctttcttttttccctgtttctccctatgcctaaaaagtctatgtttttccatgccaagccctctcgcgagatcaaaaagagctcttccgtcaatccagtgctagaagaaactcatgagggcgaggcgcctggctgcgaagaacagaagcccaccagcgagatcctgagtactagcggcaaattgaataaggggcagctgaactctctgaaaccctcgaatgttaccgtcgatgtgtttgtccagtggtttcaggacctcaaggagtgctactccagcaaaaggttgttctattggtccctctggtgggcgttcgcgactgccggtttcaaccaggttctgaattatgtgcaaatcctgtgggattacaaggctcccagtcaagactcttccatttacaacggtgcagtcgaggccatagctacctttggaggtgccgtggccgcatttgcagtaggatacgtgaaggtgaactgggatttgctgggggagctggccctcgttgtgttttcagtcgtcaacgccggtagcctgtttctcatgcactacaccgcaaatatttgggcgtgttatgctggctatttaatcttcaaatccagttacatgttgctgattaccattgcagttttccagattgctgtgaatttaaacgttgaacggtacgcccttgtcttcggcattaacacattcatcgctctagtgatccagaccattatgactgtcatcgtggtcgatcagcggggtctcaaccttccagtgagcatccagtttttagtgtacggttcctattttgctgtaattgctggcatcttcctgatgcgctcgatgtatatcacctacagtactaaatcacagaaagacgtgcagtcaccagcaccttctgagaatcctgacgttagccatcccgaagaggagagcaatattatcatgagcaccaaactctag

SEQ ID NO: 241096 - DNA, 399 bp, synthetic construct
  misc_feature 1..399: note = Description of Artificial Sequence: Synthetic coding sequence
  source 1..399: mol_type = other DNA
atggattgctatcgaaccagtctatccagcagttggatctatcctactgtcattctgtgcctttttggtttctttagcatgatgcgaccttcagagcctttcttgattccctatttgagtggccctgataaaaacctgacctccgccgaaattactaacgaaatcttccctgtctggacgtactcatatctggtgctccttctgcctgtgtttgtgctgactgactacgtgcggtataagcccgtgattattctacagggcatctccttcatcattacctggcttttgttactgttcgggcagggagtgaagaccatgcaggtggtagagttcttctatggaatggtaacagcggctgaggtagcttactacgcttacatctactccgtagttagctag

SEQ ID NO: 241097 - DNA, 1479 bp, synthetic construct
  misc_feature 1..1479: note = Description of Artificial Sequence: Synthetic coding sequence
  source 1..1479: mol_type = other DNA
atgaatccactggggtcagcgagtcgggcaaccgtggaccagctcacggacttgccaagcaaagaacaactgtcatgcgttgtgtttgccctgtggccacctgcattctctagtaacctgagcgatcccggtgtcaaaatcacaaacgagatctttcctgtgtggacctactcctacctggttctgctgctaccagtgtttgttcttaccgattatgtgagatacaagccagttattattctccagggcatcagttttatcatcacttggctcctgctcctgtttgggcagggtgttaagaccatgcaagttgtggagttcttctacggtatggtgaccgcagctgaggtggcgtactacgcctacatctacagcgtcgtgtctcccgaacattaccagagagtgagcgggtattgtaggtcggtaacacttgccgcatacactgcaggttctgtgctggcccagctgctggtctcactggcaaacatgagctacttctacttgaacgtcatctccttggccagcgtttccgtcgctttcctcttcagtctgtttctgccgatgccaaaaaagtccatgtttttccatgcaaagccttcccgagagatcaagaagtcatcttcagttaatcccgtgcttgaagaaacacatgaaggggaggcccctgggtgcgaggagcaaaaacccacaagcgaaatcctgtccacctccgggaaactgaataaagggcagcttaattcgctgaagccaagtaacgtaacggtcgacgttttcgtgcagtggttccaagatctgaaagagtgttattcctctaaaagactcttttattggtctctgtggtgggcctttgccaccgccggatttaaccaagtgctcaattacgtccagatcctgtgggactacaaggcccctagtcaagattctagcatctacaatggggctgtggaggccatcgctacattcgggggtgccgtggctgcattcgcggtggggtatgtcaaagttaattgggacctgctcggagaactggcgcttgtggttttttctgtcgtgaatgctggatcactttttctgatgcactacaccgctaatatttgggcttgctatgccggatatttgatctttaagagcagttatatgttacttattactattgctgtatttcaaatcgcagtaaacttaaatgtcgagaggtacgctctggtctttggcattaatacattcatagccctggtaattcaaaccataatgaccgtgatcgtggtggatcagagaggtttgaacctcccagtcagcatccagtttctagtctacggtagctactttgcagtgatcgctgggatctttctcatgagaagcatgtatatcacatattccaccaaaagccaaaaagacgtgcaaagtcccgctccctctgagaaccctgatgtcagtcaccctgaggaagagagtaatattatcatgtccaccaagctctag

SEQ ID NO: 241098 - DNA, 1626 bp, synthetic construct
  misc_feature 1..1626: note = Description of Artificial Sequence: Synthetic coding sequence
  source 1..1626: mol_type = other DNA
atggggcacagccctcctgttctgccattgtgcgcatctgtgagtctgcttggaggactcacatttggctacgagttagccgtaatatctggggcactgctccccctccagctggacttcggccttagctgcctagagcaggaatttctagtgggatctctgctgctcggagccctgctcgccagcctggtagggggatttctgatcgactgctacggcaggaaacaggcgatactgggtagcaatctcgtgctgctagctggcagtctcacgctgggcctggcaggatcccttgcctggttggtactcggcagggcagtggtggggttcgcaatcagtctgagcagtatggcctgttgcatttacgtgtcagaactggtaggacccagacaaagaggcgtactggtctcactgtatgaggcaggtataaccgtaggcatcctgctctcttatgccctaaactacgccctggccggaacgccatggggttggcgccatatgttcggatgggctaccgcacccgcagtattacagagtctgagtttgctgttcttacccgcaggcacggacgagactgcaacacataaagacttgattcctctgcaaggtggtgaggccccaaagctcggccctggaagaccaagatatagcttcctggacttgtttagagccagagacaatatgaggggacgcaccacggtcggcctaggcctcgtactcttccaacagcttactggtcagcctaatgtgctgtgctacgcctctaccattttttcatccgttgggtttcatgggggttcatccgccgtcctggcctccgttggattgggcgcagtgaaagtcgccgctaccttgaccgccatgggattggtcgatagagccggacgaagggcgcttctgctggccggatgtgcactaatggcactgagcgtgtctggaattggtcttgtcagtttcgccgttcccatggacagcgggcctagctgtctggcagtgccaaacgcaacaggtcagacagggttaccgggagacagtggactgctgcaggattcatcccttcctcccataccacggaccaacgaggaccaacgggaacctatcttaagtacagccaagaaaaccaagccacaccctagatcaggcgatccttccgctccccctagactggccttaagctcagcattaccaggaccaccgctccctgcgagaggccatgccttattgcgctggactgctctactgtgcttaatggtctttgtaagcgctttctctttcggatttggacctgtaacttggctggtcctctctgaaatctacccggtcgaaataagaggacgcgcatttgctttctgcaactcgttcaactgggccgcaaatctcttcatctccctctcctttctcgatctcatcggaacaatcggtctgagctggacttttctgttatatggactgaccgccgtcttaggcttgggttttatttacctgttcgtacctgaaaccaaggggcagagcttagcagagatagatcagcaattccagaagcgcagattcacactgtccttcggacacaggcagaacagcacaggcattccctactcgcgcattgagatatctgccgcaagctag

SEQ ID NO: 241099 - DNA, 1947 bp, synthetic construct
  misc_feature 1..1947: note = Description of Artificial Sequence: Synthetic coding sequence
  source 1..1947: mol_type = other DNA
atgtcacggaaggcgtcagagaatgtggaatatactcttagaagtctctctagcttgatgggagaacgcagaagaaaacagcccgagcccgatgctgcatcagcagctggagaatgctccttgcttgcggctgctgagtcaagcaccagcctccaatctgcaggcgcaggaggcggtggcgtgggtgacttagagcgcgctgccaggagacagtttcagcaggacgagacccccgcattcgtatacgtcgtagcagtctttagcgcactgggtgggttcctgtttgggtacgacacaggcgtggtaagcggggctatgttgctgcttaagcgccagctatctcttgacgccctttggcaggaactcctcgtgtctagtacggtgggagcagctgccgtttctgccttagcaggaggcgctctcaatggagtgttcgggagacgggcagcaattcttcttgcttccgccctctttacagccggatccgctgtgcttgctgctgctaacaataaagagacactgcttgcagggcgtttggtggtgggccttggaattggaatcgcttccatgacagtgcccgtttatatcgccgaggtatcaccgcctaacctgcgcggacgtttagtcactatcaacaccctgttcatcaccggcggacagtttttcgctagcgtggtcgatggggctttttcatatctgcaaaaagacggctggaggtacatgctgggtctggccgctgtgcctgcggttatccaattcttcggttttctgttcctgccagaatctcctcgatggctcatccagaagggccagactcagaaagctagacgcattttaagccagatgcggggaaaccagacaatagacgaggaatacgacagtatcaaaaacaatatcgaggaggaagaaaaagaagtgggatcagctgggcctgtgatttgccgcatgctaagctatccccctacacggagagctctgatagtgggctgtggcctccagatgtttcaacaactgagcgggattaacacaattatgtactactctgcaaccatcttacagatgtcaggcgtagaagacgacaggttggccatatggctggcttctgttacggccttcacgaacttcatttttacgctggtgggcgtatggctggtggaaaaagtcggtagacgtaaactcacatttggcagtctcgcaggcaccaccgtggctttgattatattggccttgggttttgtgctgtccgcccaggtgtctcctcggatcactttcaaacccattgcaccatctgggcaaaatgctacctgcacacggtactcgtattgcaatgaatgcatgttagacccagactgcggcttctgttacaaaatgaataagagtactgtgatagacagctcctgtgtccctgttaacaaggccagcactaacgaagctgcgtgggggaggtgtgagaacgaaacgaagttcaaaacggaggacattttttgggcatacaatttttgccctaccccctactcttggactgcactactcgggctaatattgtacctggtgtttttcgctccgggaatggggcctatgccctggacagttaattccgaaatctaccccctgtgggccagatctacggggaatgcgtgctccagtggtataaactggatcttcaacgtgctcgtttcacttacattccttcacacagctgagtacctgacctattacggcgcattctttctttacgccggattcgcagctgtgggactgctgttcatatacggctgtctccccgagacaaagggaaagaagcttgaagagatcgagagtctttttgacaacagactctgcacttgcggcactagcgacagtgacgaaggacgatacattgagtacatccgagtaaagggctccaattaccatctcagcgacaacgatgcttccgacgtcgaatag

SEQ ID NO: 241100 - DNA, 1074 bp, synthetic construct
  misc_feature 1..1074: note = Description of Artificial Sequence: Synthetic coding sequence
  source 1..1074: mol_type = other DNA
atgagcagaaaagcctctgagaatgtggagtatacattacgcagcctgagttccctgatgggcgaaagaagacgcaagcaacctgagcctgatgccgcttccgcggcaggcgagtgctccttactcgccgctgctgagtcgagcacctccctgcagtctgctggggctggaggagggggagtgggagatttggaacgggctgcgagacgccagttccagcaagacgaaacacctgcattcgtttatgtggtggccgtattttctgcattgggaggctttttattcgggtatgacactggggtcgtatctggagcgatgcttctcctgaaaaggcagctgagcctggacgccttgtggcaggagctcctggtgagcagcaccgtgggagctgctgcagtgagcgccctggcgggaggtgctctgaatggcgtcttcggtcgcagggcggcaatcctgttggcctccgcattgtttacagcaggaagtgcggtgctagccgctgccaacaacaaggagacgctgctggctgggagactggtcgtgggtctgggcatcgggatagcatccatgaccgtacccgtttacatagctgaggtgagcccccctaatctgcgcggtaggcttgtgaccattaatactctatttataactgggggacagtttttcgcatcagttgtggacggcgctttctcctacttacagaaagacgggtggaggtacatgctgggcctcgcagccgtgcccgcagtcatccagttttttggctttctgttcttaccagaatccccacgttggctaatacagaagggtcagacacaaaaggcgagaagaatcttgtctcaaatgcgcggaaatcagaccattgacgaggagtacgattctatcaagaacaacatagaggaggaggagaaggaggtcggctccgcaggccctgtcatctgccggatgcttagctatcccccaaccagacgggctttgatagtcgggtgcgggctccagatgttccagcagctatccggcataaacaccattatgtacgtgtttctgagcggatttttactgaaacgcctatag

SEQ ID NO: 241101 - DNA, 1494 bp, synthetic construct
  misc_feature 1..1494: note = Description of Artificial Sequence: Synthetic coding sequence
  source 1..1494: mol_type = other DNA
atggacaatcgacagaacgtaacccctgccctgattttcgctataaccgtcgccaccataggaagcttccagttcgggtacaataccggggtgatcaacgccccagaaacaattattaaggaatttatcaacaaaactctgacagataaggcaaatgcccctccgagcgaggtgctgcttacaaacctgtggtcactctccgtcgcgatttttagcgttggtgggatgatcggttcttttagcgtcggactgtttgtgaacaggtttggtaggaggaattccatgctaattgtgaacctgttagccgctaccggtgggtgtctgatggggctatgtaaaatcgcagaatcagtagagatgcttattctgggtcgcttggtgattggactattctgtggtctgtgtaccgggttcgtgcccatgtatattggggaaattagcccaaccgcattgaggggcgcatttggcacactgaaccagttagggattgtcattggcattttggtggcacagatcttcggccttgaacttattctggggagcgaagaactgtggcccgtccttttgggcttcactatccttcccgcaatcctgcagagtgctgcgttaccgtgctgtcctgagtctcccaggttcctgctgattaatcggaaaaaggaggagaacgctaccaggatcctccagcgcctctgggggacacaagacgtgagccaggatattcaagagatgaaagacgagtccgcccgaatgagccaggagaagcaggtgaccgtcctggaactgttcagagtgtcttcctataggcagccaatcattatttcgattgttctgcaactcagtcagcagttatctgggatcaacgcagtgttctactattccactgggatattcaaagacgcaggagtccagcagcccatttacgctactatctcagctggcgtggtaaatacaatttttaccctgctgtccttattcctggttgaacgagctggccgacgaacattgcatatgatcggcctgggcggaatggctttctgtagcactcttatgactgtttcactgctgctgaaaaaccattacaatggaatgtcctttgtctgcataggagccatcctggtgttcgtggcatgtttcgaaattggcccagggcctatcccctggttcattgttgccgagcttttttctcagggcccacgccctgctgctatggccgtggctgggtgtagtaattggacttccaacttccttgtcggtttactgttcccatccgccgcttattatcttggcgcatacgtctttatcatcttcacaggtttcctcatcacctttctggcctttacgttctttaaagtaccagagacacggggtcgcacctttgaagacatcaccagagcatttgagggccaagcccatggcgcagataggtccgggaaggacggcgtaatgggcatgaactcaatcgagcccgcaaaagagaccactactaacgtctag

SEQ ID NO: 241102 - DNA, 1563 bp, synthetic construct
  misc_feature 1..1563: note = Description of Artificial Sequence: Synthetic coding sequence
  source 1..1563: mol_type = other DNA
atggaattccataacggcggtcatgtctcagggatcggcggatttctcgtaagtctcacttcccggatgaagccccacactctggccgtgacaccagccctaattttcgccattacagtcgcgactattgggtcctttcaatttggatacaacacaggagtgatcaatgcccctgaaacgataattaaggagttcataaacaagactctgacagacaaggctaatgcacccccaagcgaggtcctactgaccaacctgtggtcgctgagcgtggcaatcttcagtgtggggggaatgatcggcagcttctccgtgggtctatttgttaatcggtttggtcgtagaaacagcatgctcattgttaacctactggccgcaaccgggggatgtctcatgggcctgtgcaaaatcgctgaatccgtagaaatgctgattctcgggaggcttgtcataggtctgttttgcggattatgcacgggcttcgtgcccatgtatattggagaaatctcccccacagcactaagaggagcttttggcacgctcaaccagttggggattgtgatcggaattctcgtggcccagattttcgggctggagctcattcttggctcagaggaattatggccggtactgctgggctttaccatcctaccggcaattcttcagtcagcagccttgccatgctgcccagaaagtccacgctttttgcttattaatagaaagaaagaagaaaacgccacccggattctgcagcgtctttggggaactcaggacgtgtctcaagacattcaagagatgaaagatgaatccgccagaatgtctcaagagaaacaagtgacggttttagagctgtttcgtgtgtccagctaccgccagcccatcatcataagcatcgtcctgcagctctcacaacagctctccggtatcaatgccgtcttctattattcgaccggaatctttaaggacgcgggagttcaacagcctatttatgcgacaatttccgcaggcgttgtcaacaccatctttacgctgttatccctcttcctcgtggagcgcgctggtcggagaactctgcatatgattggattagggggtatggccttctgtagtacgttaatgacagtgagcctgctcctgaagaaccactataacggaatgtcttttgtttgtataggggctatattagtgttcgtggcttgcttcgaaattggcccaggtcctatcccctggtttatcgtggctgagctgttcagtcaaggccctagacctgccgctatggccgtcgctggatgctccaactggactagtaatttcctcgtcggtctgctgttcccaagcgctgcttactatctcggagcctatgtgtttatcatttttacaggattcttgatcacatttctggccttcacattttttaaagtgcccgagacccggggacgcacttttgaggatatcacaagagcttttgaagggcaggcccacggggctgaccgctcaggaaaggatggggtgatgggtatgaacagtatcgaacctgcaaaagaaaccacaaccaacgtgtag

SEQ ID NO: 241103 - DNA, 1494 bp, synthetic construct
  misc_feature 1..1494: note = Description of Artificial Sequence: Synthetic coding sequence
  source 1..1494: mol_type = other DNA
atggataacaggcagaatgtgacccctgccctcatttttgcgataactgtcgccaccatcggatccttccaattcgggtacaataccggggtgataaacgcccctgagaccatcattaaagaattcatcaacaagacactaaccgacaaagccaatgcaccgccttcagaggtactcttgactaacctgtggagcctcagcgtggccattttctcagtgggtggcatgatcggcagcttttctgtcgggctctttgtcaaccgattcggacggaggaattccatgctgatagtaaacttgctagctgctactgggggatgtcttatgggactgtgtaagatcgcagagtctgtggaaatgcttatccttggacggctggtcattggtttgttttgtggactctgtactgggttcgtcccaatgtacattggagaaattagtcccaccgccctcaggggagccttcggaaccttgaaccagctggggattgtgatcggtatcttggtggcccaaatttttggcctcgagctgatattgggaagtgaggagctctggcctgttctcctcggatttacgatcctcccggctattctgcagagcgccgcattaccctgttgccccgagtctccccgtttcttgctcatcaaccggaaaaaggaggaaaatgctactagaatcttacagcgtctgtggggcactcaggatgtatctcaggatatacaggaaatgaaagatgaatcagctcggatgagccaggaaaagcaggtcacagtgctggagctgtttagggtctctagctatcgtcagcccataattataagtattgtgctccagttaagccagcaattatccgggatcaacgcagtgttttactacagcacgggtatatttaaagacgccggtgtccagcaacctatctacgctactatcagcgcaggcgtcgtcaacaccatctttacccttctcagcctgttcctcgtcgaacgggcagggaggcgcaccctgcacatgataggattgggtggaatggctttttgtagcactctgatgaccgttagccttctccttaaaaatcactataatgggatgagctttgtctgtatcggcgcaatcctggtgttcgtggcttgtttcgaaatcggccctggacctataccttggtttatcgtggctgagctgttctctcaggggcctagaccagctgcgatggctgtcgccggatgctcgaactggacctcaaattttctcgttgggttactgttcccatcggccgcttattatctgggagcatatgtctttattatctttacaggcttcctcattaccttcttggcctttacttttttcaaagtgccagaaacccggggtcggactttcgaagacattacgcgggctttcgaaggacaggcccatggcgctgacagatctggcaaggatggtgtgatgggcatgaattccattgaaccggcaaaggagactaccacaaacgtttag

SEQ ID NO: 241104 - DNA, 363 bp, synthetic construct
  misc_feature 1..363: note = Description of Artificial Sequence: Synthetic coding sequence
  source 1..363: mol_type = other DNA
atggaattccacaacgggggacacgtgtctgggatcggcggatttttggtctccttgacatcacgaatgaagcctcatactttggccgtgactccagctttgatatttgccatcacagtcgcgactattgggtccttccaatttggctacaacactggggtcatcaatgcgccagaaaccattataaaagagtttattaacaagaccctcaccgataaggccaatgcccctcctagcgaggtgctgctgacgaatctgtggtctcttagcgtagctatcttttctgtggggggaatgatcgggtctttctctgtcggtctgttcgtcaatagattcgggcgtcgcaattccatgttgatttag

SEQ ID NO: 241105 - DNA, 1236 bp, synthetic construct
  misc_feature 1..1236: note = Description of Artificial Sequence: Synthetic coding sequence
  source 1..1236: mol_type = other DNA
atgcttctaaggagaaggaactctatgctgattgtgaacctcctggctgcgactggcggttgcctgatgggactttgcaagattgcggaaagcgtggagatgctgatcctcggaaggctcgttatcggcctgttctgtggactttgtaccgggttcgtcccaatgtatattggcgagatttccccaaccgccctgcggggtgccttcgggaccttgaaccagctcgggattgtaatcgggatactcgtcgcccagatcttcggcctggagctcatactgggaagcgaagaactctggccagttctactgggattcaccattctgcccgcaattctgcagagcgctgccctgccctgctgtccagaatcaccgagatttctcttaattaataggaagaaagaggagaatgccacgagaatactgcaacgcctgtggggaacccaagacgtgtcccaggacatacaagagatgaaagacgagagtgctagaatgagtcaggagaaacaggtcaccgttctcgagctgttccgggtaagttcttatcggcagcccatcatcatcagtattgtcctccagctgagccaacagctgtccggcattaatgccgtgttctattattctacagggattttcaaagacgcaggcgtccagcagcccatctatgccacaatatcggctggcgtagtgaacaccatattcactttattatccctcttcctggtggaaagggcaggtcggaggaccttgcacatgattggactcggcggtatggccttttgctccaccctgatgacggtctccctgctgctcaaaaaccactacaatgggatgagttttgtctgtatcggtgcaatcctagtattcgtcgcctgttttgaaatcggccctggtccgatcccctggttcatcgttgcggaacttttcagtcagggccctaggcctgcagctatggccgtggcgggttgttcaaattggacatctaatttcctggtaggccttctgttcccctcagctgcctattacctcggggcatacgtgttcataatatttacagggttcctaattaccttcctggcgttcacgttctttaaggtgccagagaccagagggagaaccttcgaggacattacaagagcctttgagggccaggctcatggagccgacaggagcgggaaagatggagtaatgggaatgaacagcatcgagccagcgaaagagacaacaacaaatgtttag

SEQ ID NO: 241106 - DNA, 426 bp, synthetic construct
  misc_feature 1..426: note = Description of Artificial Sequence: Synthetic coding sequence
  source 1..426: mol_type = other DNA
atggacaataggcagaacgtaacccctgccctaattttcgccataaccgttgctaccattggctcgttccaatttggctacaacaccggggtgatcaatgcacctgagacgatcatcaaagagttcataaacaaaaccctcacagacaaggcaaatgcccctccctctgaggtgttattgaccaatctctggtcgctgagcgtcgcaatctttagcgttggcggaatgattggttcattttccgtcggcctgttcgtgaatcgctttgggcgtagaaactccatgctgattgtcaacctgctcgccgcaacagggggatgccttatgggcctgtgcaagatcgctgagtccgtggaaatgctgattctgggacggctggtgattggcctgttctgcggattgtgcacagggtttgtgcctatgtag

SEQ ID NO: 241107 - DNA, 144 bp, synthetic construct
  misc_feature 1..144: note = Description of Artificial Sequence: Synthetic coding sequence
  source 1..144: mol_type = other DNA
atggacaaccgccagaacgtgacccccgcactaatattcgctattacggtggctacaatcgggagctttcagtttggctataatactggcgttatcaacgctccggaaactataattaaggagttcattaacaagaccctttag

SEQ ID NO: 241108 - DNA, 69 bp, synthetic construct
  misc_feature 1..69: note = Description of Artificial Sequence: Synthetic coding sequence
  source 1..69: mol_type = other DNA
atggataaccgacaaaatgtcacgcccgctctgatctttgccataactgtcgcgaccataggttcttag

SEQ ID NO: 241109 - DNA, 426 bp, synthetic construct
  misc_feature 1..426: note = Description of Artificial Sequence: Synthetic coding sequence
  source 1..426: mol_type = other DNA
atggaatttcacaacggaggtcacgtcagtgggatcggagggttcctagtgtcacttacctctcgtatgaagcctcatacgctcgctgtcacacccgcactgatttttgccattacagtggcgaccatcggaagtttccaatttggatacaatactggcgtcattaatgcacccgagacaatcatcaaggaatttattaataaaactctaactgacaaagcaaacgcccctccatccgaggtgcttctgacaaacctgtggagcctcagcgtcgcaatcttcagcgttggtggaatgattggctcattttcagtgggcctgtttgtcaatcgcttcggccgaaggaatagcatgctaatcgtgaacttgctcgccgcaaccgggggttgcctaatggggctgtgtaaaatcgcagagtcagtctag

SEQ ID NO: 241110 - DNA, 1608 bp, synthetic construct
  misc_feature 1..1608: note = Description of Artificial Sequence: Synthetic coding sequence
  source 1..1608: mol_type = other DNA
atgcagcgtctgcaactgctgagggtggaagtgttactaggggtcaaacagggggacgagatgaggcactttttctttagctcccagaccagtaccctggaaaagagccagaacggcggagtgggcgaggaggtcaccccagccctcatctttgccattactgtggccacaattggctctttccagtttggttacaacacaggtgtcatcaacgctccagagaccatcattaaggagttcatcaacaagactctcactgataaagccaatgcaccacctagtgaggtgctgctcaccaacctgtggtctctttccgtcgcaatcttcagcgttggaggcatgattggttcattttccgtggggctctttgtaaaccgatttggacgaaggaattccatgctgatcgtgaatctgctcgccgcaaccggcggttgtctgatgggactctgcaagattgctgagagcgtggaaatgcttatcttaggcaggctggtaataggacttttttgcggcctgtgcaccggctttgtgccaatgtacatcggagagatctctcccaccgccttaagaggtgcctttgggactctgaatcagctcggcatagtcattggcatcctggttgcccaaattttcgggcttgaactcattttgggaagtgaggagctatggcccgtccttcttggtttcactattctgcccgctatcctgcaatcagctgccctgccctgttgccctgagagccctcgttttctattgatcaacagaaaaaaggaggagaatgcaacaagaatcttgcagcgtctctgggggacgcaggatgtgagtcaggatatacaggaaatgaaggacgagagtgccaggatgtcccaggagaagcaggttacggtgctggagctctttcgagtctcatcttacaggcaaccaatcatcatctcgatcgttctccagctgtcccaacagctgagtggcatcaatgctgttttttattactctacgggcatctttaaagacgcaggggtacagcaacccatttacgctacgatttccgcaggcgttgtgaatacaatcttcacccttctctccctgttcctggtagagagggccggtcgtcgaactctccacatgattggcctgggaggcatggctttttgcagcactctcatgactgtgtctcttctcctcaagaaccactacaacggcatgagctttgtgtgcattggggcaatcttggtgttcgttgcatgtttcgaaataggcccagggccaattccttggttcatcgtggccgagctcttcagtcaaggccctcgaccagccgctatggcagtcgcgggatgctcgaattggacgtccaatttcctggtggggttactttttccctcagctgcttactatctgggcgcatacgtgttcataatcttcaccggcttcctgatcacttttctcgccttcacctttttcaaggtgcctgaaactcggggtagaacctttgaggatatcacacgagcatttgagggtcaggcccacggagccgatcgctcgggcaaagacggcgtgatgggcatgaactctatagagcccgcaaaggagactaccacaaacgtttag

SEQ ID NO: 241111 - DNA, 486 bp, synthetic construct
  misc_feature 1..486: note = Description of Artificial Sequence: Synthetic coding sequence
  source 1..486: mol_type = other DNA
atgattgggttagggggtatggccttctgtagtacccttatgaccgtctcactgctgcttaagaatcactacaacggcatgtcctttgtgtgtattggcgctattctggtgttcgttgcttgcttcgaaattggacccggtcctatcccttggttcatcgtcgctgagctcttctcacaggggccacgaccagcagctatggcagtggccggatgtagtaactggactagtaatttcctcgtggggctgctcttccccagtgcagcttactacctgggggcttatgtatttattattttcactggtttcctcatcacgttccttgcctttacctttttcaaggttccagagaccagaggacgaactttcgaggatataacacgggctttcgaagggcaggcgcatggtgccgaccggtccgggaaggacggagtaatgggtatgaactcgatcgagcctgctaaggagaccactactaatgtgtag

SEQ ID NO: 241112 - DNA, 1236 bp, synthetic construct
  misc_feature 1..1236: note = Description of Artificial Sequence: Synthetic coding sequence
  source 1..1236: mol_type = other DNA
atgctgctgagaaggcgcaattccatgctcatagtgaatctgttggccgcaacaggaggctgtcttatgggcttatgtaagattgccgagtccgtggagatgttgatccttgggaggctcgtcattgggctgttttgcggcttgtgcactggcttcgtacctatgtatattggcgagatctctccaacagcacttagaggcgcattcgggaccttgaatcagctgggcatcgtgatcggcatcctggtggcacagatcttcggattagagctcattctagggtctgaagagttatggccggttctgcttggtttcaccatactgcctgcaatcctccagtccgccgcactaccttgctgtccagaaagtccaaggttccttttgataaaccggaaaaaagaggagaatgcaacgcgtatcttgcagagactttggggcactcaggatgtctcacaggatatccaagaaatgaaggatgagtctgctaggatgtctcaggagaagcaagtgaccgttctggagctgttcagggtgtcatcatatagacagcccatcataatcagcatagtgcttcaattgtctcaacaactgtctggcataaacgccgttttttactatagtaccggaatttttaaagatgccggagtgcaacagcctatctatgccaccatctccgctggtgtggttaataccatatttacactactctcgcttttccttgtggagcgagccggaagaaggacactgcacatgatcgggcttggcggaatggctttttgtagtaccctgatgacagtgtcgctacttttgaaaaatcactacaatggaatgagcttcgtgtgcataggggctatccttgtattcgtggcttgttttgagattggcccaggacccatcccatggttcattgtcgccgagctatttagccaggggcctcggccagcagcaatggcagtggccggttgctccaattggacatctaacttcctggtggggttgctttttccctctgctgcatattacttgggagcctacgtgttcattatctttactggctttctgatcactttccttgctttcaccttttttaaagtgccagagactagaggaagaacgtttgaggatataactagggcctttgagggacaggcgcacggcgctgataggtcaggtaaagacggagttatggggatgaacagtattgagccagccaaagagaccactaccaatgtatag

SEQ ID NO: 241113 - DNA, 459 bp, synthetic construct
  misc_feature 1..459: note = Description of Artificial Sequence: Synthetic coding sequence
  source 1..459: mol_type = other DNA
atggataatcggcaaaatgtgaccccagccctaatctttgcaattactgtcgccactattgggagcttccagtttggatataatactggagttatcaacgcccctgagactattattaaagagttcatcaataagacactgacagacaaagcaaatgcccctccttcagaggtcttgctgactaacctgtggagtctttctgttgcaatctttagcgttggaggaatgatcgggtccttctcagtgggcctgttcgttaacaggttcggcaggaggaatagtatgctgatcgtgaacctccttgcggctactggagggtgcctgatgggattgtgcaaaattgcagaatctgttgaaatgttaatcctgggcaggctggtcatcggtctcttctgcggactctgcacaggttttgtacccatgtatatcggtgaaatttcgccaactgccttgcgctag

SEQ ID NO: 241114 - DNA, 255 bp, synthetic construct
  misc_feature 1..255: note = Description of Artificial Sequence: Synthetic coding sequence
  source 1..255: mol_type = other DNA
atggacaacaggcagaatgttacccctgccctgattttcgcgataacagtggccacaatcgggtccttccaatttggctataacacgggtgtgatcaacgcaccagagactataattaaggaatttatcaataagaccctgacagataaagcaaacgcccctcccagcgaagtgcttctcactaacttgtggagcctgtctgtggccatcttcagcgttggcggaatgattggatcctttagtgtggggctctag

SEQ ID NO: 241115 - DNA, 1563 bp, synthetic construct
  misc_feature 1..1563: note = Description of Artificial Sequence: Synthetic coding sequence
  source 1..1563: mol_type = other DNA
atggagtttcacaacgggggtcacgtatcgggtattggcggattcctcgtgagcctcacaagtcggatgaaacctcacacccttgcggtgactcctgcactgattttcgccattaccgtggccaccattgggtcatttcaatttgggtacaatactggtgtgatcaatgcgccagaaaccattatcaaagaattcataaacaaaacattgactgataaggccaacgcccctccttcagaggtcctgctgacaaacctgtggtccctttccgtggcgatcttctcagtcgggggtatgattggctccttcagcgttggactctttgttaacagattcggccgtcgaaactctatgctgatcgtgaatctcctcgccgctaccgggggatgcctcatgggtttgtgcaaaatcgccgaatcagtggagatgctcattcttggcagacttgtcatcggcctcttctgcggcctgtgtactggatttgttcctatgtacatcggggagatcagccccacggccctacgtggcgcatttggcaccctaaatcaacttggaatcgtgattggaatcctcgtggcccagatttttggcctagaactaattttaggatccgaagagctgtggcccgtcctgctcgggtttaccattttaccggcaatcttgcagagcgcagctctgccctgttgtcccgagtcacccaggtttctgctaatcaacaggaagaaggaggagaatgccacccgcattctccaaagactttggggaacccaggacgttagccaggatatacaggaaatgaaagatgagtcggcacggatgtctcaggagaaacaagttactgttcttgaactctttagagtgagctcatacagacagccgatcatcatatccattgtattacagttgtcccagcagctgtccggcattaacgcagtgttctactattctacgggcattttcaaggatgccggagtccagcagccaatttacgccacaatctccgcaggggtggtgaacacaatttttactctgctgtccctgtttctcgttgaacgagccggtcgtcgcacgcttcatatgataggccttggcggtatggcgttttgtagcacactcatgacggtgagcttgttgctgaaaaatcattacaatggaatgtcatttgtttgcattggcgctatcctcgtgttcgtggcatgttttgagatcgggcctggcccaattccatggttcatagtggccgagctattttcccagggcccacggcctgccgcaatggctgtggcagggtgctctaactggacctcaaacttcctggttggactcctgttccctagtgctgcttattacctcggggcatacgtgttcatcatttttacaggctttttgattaccttcctggccttcaccttcttcaaagtgcccgagacacgagggagaacattcgaggatataactcgagcgttcgaggggcaggcacacggagctgatcggagcgggaaggacggggtgatgggaatgaacagtattgaacccgctaaggagaccacaaccaatgtctag

SEQ ID NO: 241116 - DNA, 510 bp, synthetic construct
  misc_feature 1..510: note = Description of Artificial Sequence: Synthetic coding sequence
  source 1..510: mol_type = other DNA
atggataaccgacagaacgtaactccagcccttatcttcgcgattacagttgccactatcggaagctttcagttcggctacaacacaggagtgatcaacgctcccgaaactatcattaaggagtttatcaacaagacgctcacagataaggctaatgctccgccaagcgaagtgctcctgacaaacctgtggtccctatcagtggcaatcttttccgttggaggcatgatcgggtccttctcagtgggactttttgtgaacaggttcggacgacggaactcgatgctgattgttaacctgctggccgcaacgggcggatgtttgatgggactctgtaaaatagccgaatccgtggagatgctgattctcggtagattggtcataggcttattttgcggtctgtgtaccggcttcgtgcctatgtacatcggcgaaatcagccctacggctctcaggggcgcatttggcacactaaaccagttggggattgtcatagggattctcgtgtag

SEQ ID NO: 241117 - DNA, 1491 bp, synthetic construct
  misc_feature 1..1491: note = Description of Artificial Sequence: Synthetic coding sequence
  source 1..1491: mol_type = other DNA
atggggacgcagaaggtgactccggcattgatctttgcaataaccgtcgccacaattggatcctttcagtttggctataacaccggtgtaattaacgcgccagagaaaatcatcaaggaatttattaacaagacgttgaccgataaaggcaacgcaccgccaagcgaagtcctgctgacctcgctgtggtccctttctgtggccatctttagcgtgggcggaatgattgggagcttcagcgttggcctgtttgtcaaccgatttggtcggaggaactcgatgctcattgtgaacctactggctgtgaccggtggatgcttcatgggactgtgcaaagttgcaaaatccgtggaaatgctgattcttgggaggcttgtaattgggctgttctgcggactgtgcaccggattcgtgcctatgtacattggcgagatctcacccactgcattaaggggggcattcggcaccttaaaccagctcggtatcgtggtgggaatactcgttgcacagattttcgggttggagttcattctgggatcagaagaactatggcccctgttgctgggatttacgatcctgccagctatcctgcagtcagcagctctgcctttttgcccagagtcacctaggtttcttctcattaatcggaaggaggaagagaatgctaagcagattctgcagcgattatgggggacacaggacgtctcacaggatatccaagagatgaaagacgaatctgcgaggatgtcacaggaaaaacaagtgacggtgctggagctgtttagagttagcagttaccgacaaccaattattatatccattgtgctgcagctctctcagcagctgtctgggattaacgccgttttttactatagcacagggatattcaaggatgctggcgtccaggaacctatctacgcaaccatcggagctggcgtcgtcaacactatatttactgtcgtgagcctgtttctagtggaacgggcaggcaggagaactctacatatgattgggctgggaggaatggctttctgcagtactcttatgaccgtgtcgctactactgaaggataattataacggcatgtccttcgtgtgtataggcgctatcctagtgtttgtagctttcttcgagattggcccaggccctattccttggtttatcgtggccgaactcttctcccaggggccacggccagcagctatggcagtggccggttgtagcaactggacctctaatttcctggtcggactgctgtttccttctgccgctcattacttaggggcatacgtgttcataatcttcacgggctttctgatcacctttctggcgtttaccttcttcaaggtacccgagactagaggtaggacctttgaggatatcacacgtgcgttcgaggggcaggcccacggagcagacaggtcagggaaagatggggtcatggagatgaacagcatcgaacccgcaaaggagacaactaccaatgtctag

SEQ ID NO: 241118 - DNA, 1269 bp, synthetic construct
  misc_feature 1..1269: note = Description of Artificial Sequence: Synthetic coding sequence
  source 1..1269: mol_type = other DNA
atgatagggtccttcagcgtggggttattcgtaaatcgctttggacggcgaaattcgatgctgatagttaatctcctcgctgtcacaggtggctgcttcatggggctgtgcaaggtcgctaaatctgtagagatgctcatcctgggccgtctcgtgatcggactgttctgcggactgtgcactgggtttgtgcctatgtatattggcgaaattagcccgactgctctacggggagcatttggaacccttaatcagttgggaattgtggtgggaatcctagtcgctcaaatttttggcctggagtttatcctgggcagtgaagagctctggccacttttactgggatttacaatcctgcctgctattttacagagcgccgctctgccattttgtcccgaatctcctcggttccttttaatcaaccgcaaggaggaagaaaatgccaagcagattcttcagcgcctatggggaacccaagacgtcagtcaggatatacaggaaatgaaggacgagtcagctcgaatgtcacaagagaagcaagttacggtgctagaactgttcagagtgtcttcatatcgacagcctattattatcagcatcgtgctgcagttgtcccaacagctctccggaatcaatgccgttttttactatagcaccggaatctttaaggatgcaggggtgcaggaacccatttatgccactataggggctggcgtggttaatactatttttacagtggtgtcattatttctggttgaaagggccggtcggagaacactccacatgatcggcctcggaggcatggccttttgctccacactgatgactgtgtccctgctgctgaaagataattacaatggcatgtcatttgtctgtattggggcaattctggtctttgttgccttttttgagatcggtccgggaccaatcccctggttcattgtcgctgaattgttttctcagggtccgaggcctgcagctatggcagtagccggatgttctaattggacctccaatttcttggtaggcctgctctttccatccgccgcacattacctcggtgcttatgtatttattatatttaccggctttctgataactttcctggccttcaccttttttaaggtgcccgagaccagggggcgtacgtttgaggatatcactcgggctttcgaaggtcaagcacacggggctgacagaagtggcaaagatggagtgatggagatgaacagcatagagcccgcaaaggaaaccaccaccaacgtctag

SEQ ID NO: 241119 - DNA, 1530 bp, synthetic construct
  misc_feature 1..1530: note = Description of Artificial Sequence: Synthetic coding sequence
  source 1..1530: mol_type = other DNA
atgccttcaggcttccaacagatcgggtccgaagacggagagccccctcagcaacgagttaccggcacattggtgcttgccgtattctcagccgttctggggtccctccagtttggctataacataggagtcattaacgcccctcagaaggtcatagagcagagttacaatgaaacttggctgggccgacagggaccagaggggcctagttctattccacccggaactctgaccactctgtgggccctctcggtcgctattttcagtgtgggcggtatgatctcctcgtttctgatcggcatcataagccagtggcttgggaggaagcgagccatgctagttaacaacgttctcgcagttctggggggatcattgatggggctggctaatgctgcggctagctacgagatgctgattctgggaaggttcctcatcggtgcctattccggccttacttcaggcctcgttccgatgtatgtgggagaaatcgcgcctacacatcttcggggtgccctgggcaccctcaaccagttggcaatcgtaattggcattcttatcgcccaggtccttggcttggaaagcttgctgggcaccgcatctctgtggccgttacttttaggccttacagtactgccggctcttctgcaacttgtactcctgcctttttgcccagagagtccacggtatctgtacatcattcagaacctcgagggaccagccaggaagtctttaaaaaggctgacaggatgggctgacgttagtggcgtccttgccgagctgaaagacgagaagaggaagctggagcgagaacggcctctatcgctactgcagctactcggctccagaacacatagacagccactcataattgctgttgtgctccaactgtcgcaacagttgtcagggatcaatgccgtgttctattattccacttccatctttgagacagctggcgttggccagccagcctacgctaccatcggcgctggggttgtgaatacagtctttactttggtttccgtgctgttagttgaaagagctggccgacggactctacatcttttaggcctagctggtatgtgcgggtgtgccatcctcatgaccgtcgcattattactgctggagagggtgcctgccatgagctatgtcagtattgtcgccatatttggcttcgtggctttttttgagataggaccaggtccaatcccctggtttatcgtggctgaactgttcagccaagggcctagacccgcagccatggctgtcgccggattctcaaattggacttccaactttatcattggcatggggttccagtacgtggccgaggctatgggtccttatgtttttctgttatttgctgtgctgctcctgggattcttcatctttacattcctgagagttcccgaaacccgtggtcggacctttgatcaaatctctgcggcattccaccgtacaccgagtttgctggaacaggaggtcaagccctccacggaattggaatacctcggtccggacgagaatgactag

SEQ ID NO: 241120 - DNA, 1356 bp, synthetic construct
  misc_feature 1..1356: note = Description of Artificial Sequence: Synthetic coding sequence
  source 1..1356: mol_type = other DNA
atggacggtgaacctccacaacaacgagtgacaggcaccctggtcctcgcagtattctccgctgtattgggcagtctccagttcggatacaatattggtgttattaacgccccacagaaggtgatagagcagtcatacaacgagacctggctggggaggcagggcccagagggtccctcctccattccccctggaaccctcacgacgctgtgggcacttagcgtagctatcttttccgtaggtggaatgatatcaagttttctgataggaatcatttctcaatggttgggcaggaagcgcgcaatgctggtgaataacgtgctggcagtcctgggcggatctctgatgggtctggcaaacgccgctgctagttatgaaatgcttattctcgggaggtttctcatcggggcttacagcgggctaacaagtggcctggtccccatgtatgtcggcgagattgctcctacgcacctgcgtggcgcattagggaccctgaaccagctggccatagtcattggcatcctgattgcccaggtccttggcctggaatcattgctgggcactgcatcactatggccactgctccttggactaacagtgttaccggctttgttacaactggtgctgttaccattttgccccgaatctcccaggtacctctacattattcagaatctggaagggccagcgagaaagtcgctgaaacgcctgaccggatgggcggacgtgtccggggtgctggcagaattaaaggacgaaaagagaaaactcgagcgggaaaggcctctgtcactgctgcagcttctggggtctagaacccacaggcagccactgattatcgccgtggtgttacagcttagccaacagctatctggcatcaatgcagtattctattacagtacctcaatctttgaaacagccggtgtcggacagccggcatacgccaccatcggcgctggggtggtcaacaccgtgtttactctggtttcagtgctgctggtggaaagggccggacgccgaacattgcatcttctcggcttagcgggtatgtgcggctgtgcaatcctgatgaccgtggcgctcctcctgctggagcgggtgcccgcaatgtcgtacgtctcaatcgtcgccatatttgggttcgtggcgttcttcgaaattggccctggcccaatcccatggtttatcgtagctgagctgttcagtcagggaccccgaccagccgcaatggcagtcgctggcttcagtaactggacctcaaatttcatcatcgggatgggctttcaatatgtagccgtgggccctccagccccagcctctcacacagttggtcagaggtgggcgtcccattcatag

SEQ ID NO: 241121 - DNA, 1338 bp, synthetic construct
  misc_feature 1..1338: note = Description of Artificial Sequence: Synthetic coding sequence
  source 1..1338: mol_type = other DNA
atgcaggagccattactgggcgctgaaggtcctgactacgacactttcccggagaaaccacccccaagccccggagaccgtgcgcgtgtcggcaccctccagaataaacgtgtcttcttggcaaccttcgcagctgtcctgggcaatttttcattcggttacgcgttggtgtacacgagtccggtgataccagcactggagaggagtctcgacccggatctacacctgacgaaatctcaagcttcctggttcggtagcgtcttcacactgggagctgcagccggaggcttgtccgccatgatcctcaacgacctcctgggtcgtaaattgagcatcatgttcagcgcggtgccatcagcagcaggatacgcactcatggcgggtgcccacggcctatggatgctattgctggggcgtacccttacaggctttgccggaggcttgaccgcagcgtgtatcccggtctacgtaagcgaaattgctccaccaggtgtaagaggcgctcttggagcaaccccccaattgatggccgtgtttgggagcctttctctgtatgctctgggactgctccttccctggaggtggttggccgtggccggagaagcacctgtcctgatcatgattctgctgctatctttcatgcccaattcacccaggttcctgctctcaaggggcagggacgaagaggccctacgcgctttggcttggctgcgtggtacggacgtggacgttcactgggaattcgaacagattcaggacaatgtgcgccgtcagagcagcagggttagctgggccgaagcccgagctcctcacgtctgtcgccctataaccgtggccctgctgatgcggttactgcagcaactcaccggaatcacacctatcctggtatacctacaaagtatattcgactctactgcagtgctcctgcctccaaaggacgacgccgctatagtcggggcagtgagacttttatctgtcctgatcgccgctctgacgatggatctagcaggcaggaaggtgctgctgttcgtgagcggctacgccgtgggctgggggccaatcacctggttgctgatgtccgaagtgctaccactgagagccagaggagtggcgagtggcctatgcgtgctggcaagttggctgacagcttttgtactgacgaagtcctttctgcctgtggtgtccacgttcggccttcaagtccctttttttttcttcgccgctatttgtctggtgagtttggtgtttacaggctgctgcgtgcccgaaaccaaagggcgatcgctggagcagattgaatctttctttaggaccggaaggcggtcatttctcaggtag

SEQ ID NO: 241122 - DNA, 1524 bp, synthetic construct
  misc_feature 1..1524: note = Description of Artificial Sequence: Synthetic coding sequence
  source 1..1524: mol_type = other DNA
atgcaagaacccctcctcggagcggaaggccctgactatgatacttttcctgagaagccccctcctagccctggcgaccgggctcgtgtagggacgctgcagaataaacgcgtgtttcttgccacttttgctgcagttctcggaaacttctcctttggctacgctctggtgtacaccagccctgtgattcctgcactggaacgctccctggaccctgacctgcacttaactaagtcccaggcgagttggttcggctcggtttttacccttggcgctgctgcgggtggactgtctgcaatgattctaaatgatttgcttggaagaaaattgtcaatcatgttctcggctgtgcctagcgcggctggttacgctctaatggccggagcccatggactgtggatgctcttgctgggaagaactctgactggatttgccggtggactgactgccgcttgcatccccgtgtatgtaagcgaaattgctcctccaggcgtgaggggcgctttgggagctacacctcagctcatggctgtgttcggctccctatctctgtatgccctgggcctcctcctgccctggaggtggctcgcagtggccggagaagcccctgtccttataatgattttattacttagctttatgcccaacagcccacggtttctcctctcaaggggacgcgacgaggaggctctgcgcgcactcgcctggctacgagggaccgatgtggatgtgcattgggagttcgaacagattcaggacaacgtacggaggcagtcttccagagtgtcatgggcggaggctagagcaccgcatgtatgtaggccaattaccgtcgccttgctgatgcgcctgttacagcagctgactgggataacccctatactggtctacttacagagtatcttcgacagtactgcggttctgctccccccaaaagatgacgcggcaatcgtgggcgctgtgcgcctgctttccgtcttgattgctgcactgactatggacctggccggaaggaaagtgttgctttttgtgagcgcagcaatcatgtttgctgccaatctaaccttgggcctgtacatccactttggaccaagacccctgtcccccaattcgaccgcgggactggaaagtgaatcctggggagacctggcccaacctcttgccgcacccgctggctacctgaccctcgtgccgttgctggccacgatgctgtttatcatgggatatgccgtgggatgggggcctatcacctggctactgatgagcgaggtgctgccacttcgcgcaagaggcgtggcatccggcctgtgcgttcttgcgagttggctgacagccttcgtgctgacaaaatcgtttttacctgtcgtaagcacgttcggcctgcaggtgccttttttttttttcgctgctatctgcttggtctcattagtgtttaccggatgttgcgtgcctgagaccaagggccgttccttggaacaaatagaaagcttcttccggaccgggaggcgttcctttcttaggtag

SEQ ID NO: 241123 - DNA, 441 bp, synthetic construct
  misc_feature 1..441: note = Description of Artificial Sequence: Synthetic coding sequence
  source 1..441: mol_type = other DNA
atgatactgaacgacctcctcggtagaaagttgtctatcatgttctcagctgtgccctccgccgcaggatatgctctcatggccggagcgcatgggctgtggatgttgctgctggggagaaccctgaccgggttcgccggagggctgactgctgcctgcatccccggtttgactctcccaagtcgccctggactgggaacgtctatcttcagcaagacttggtgtggcggatgcgtcctccaggtatacgtaagtgagatagcacccccaggggtacgaggcgctctcggggctacccctcaattgatggcagtgttcggctccctgagcttgtatgcattggggaaggacgaggaggccttaagggcacttgcctggctacggggtaccgacgtggacgtacactgggaattcgaacagatccaagacaatgtccgttag

SEQ ID NO: 241124 - DNA, 660 bp, synthetic construct
  misc_feature 1..660: note = Description of Artificial Sequence: Synthetic coding sequence
  source 1..660: mol_type = other DNA
atgcaggaaccccttctaggggctgaagggcctgactatgatactttcccagaaaagccaccaccaagtccgggtgacagagccagagtagggactctgcagaataagcgtgtctttctggccacatttgccgctgtgttggggaacttttctttcggctatgcactcgtttatacctctcctgtgattccagcactggagcggtctttggaccccgatctgcacctgactaagagccaggctagttggttcggctctgtttttacactcggcgctgctgccggtggcctgtccgccatgattctgaacgacctactcggcagaaagttgtccatcatgttctcggctgtgccgtctgccgctggctatgcactgatggccggagcccacggcctatggatgcttctgctcgggcgaacattgacaggatttgcagggggactgaccgccgcttgtatccctgtctatgtaagtgaaatcgcgcctccaggggtgcgtggtgcgttgggtgcaaccccgcagttaatggctgtcttcggtagtctttcactctatgctctcgggacaaagaggccatgcggccgttggcctggctgcgtgggacgtaccagtatgtcgaccggctcctcatcccgtagtcgtacgaccagcggcgattag

SEQ ID NO: 241125 - DNA, 1539 bp, synthetic construct
  misc_feature 1..1539: note = Description of Artificial Sequence: Synthetic coding sequence
  source 1..1539: mol_type = other DNA
atggagaataaggaggcaggaaccccgccacccatcccttcccgagaaggcagactgcagccgaccctgctactggccactctaagtgctgcctttggcagtgcttttcagtacggctataatctgtccgtggtgaacaccccccataaagtctttaaaagcttctacaacgagacttacttcgaacgccacgcaaccttcatggacgggaaactgatgctactgctatggtcatgcaccgtttcaatgtttcctttgggcggtcttttgggttctctactggtgggcctactggtggactcctgcgggcgaaaagggacactgttgattaataatatctttgcaataattcctgccatcctgatgggcgtctccaaagttgctaaagcattcgagttgatagtgttctcaagagtggtgctcggggtttgcgcaggaataagctactccgctctgccaatgtatcttggagagcttgcacctaagaatttgcggggaatggttggaacgatgactgaagtttttgtcattgttggagtgttccttgcccaaatttttagtctgcaggctattctgggcaatcccgctggctggcccgtgcttttagcgctgacgggggttccggcactcttacagttattaaccctgcccttcttccctgaatccccacgctatagtctcattcagaagggcgacgaggccactgcacggcaggcgctgcgtcgcctgcgtggccacaccgacatggaagcagaattggaggatatgcgcgctgaggcgagggcggaacgggctgaggggcatctgtctgttcttcatctctgcgccctgaggagcctccggtggcagctgcttagtatcattgtcctgatggctgggcagcagctttctggaattaatgctattaattactatgcggacaccatctatacctccgctggagtggaggcggctcatagccaatatgtcacagtgggaagcggtgtcgtgaatatcgtgatgacaatcacctccgccgtcctggttgaacgattaggcagacgccacttgctgttggccggatatggcatttgtggaagcgcgtgccttgtccttaccgttgttctgttgtttcagaatcgcgtccccgaactatcttacctcgggattatttgtgtgtttgcctacatagccggacactcgataggcccttccccagtaccctcagtcgtgcgcacagagatttttctccagagctctaggcgcgcagcatttatggtggacggggctgttcattggttgaccaactttattatcggcttcctcttcccaagtattcaggaggccatcggcgcatactccttcatcattttcgccggaatctgtttgctgacggccatatacatctacgtcgttattcccgaaaccaagggcaagacctttgtggaaataaacagaatattcgcaaaaagaaatagggtgaaactgcccgaagaaaaggaggaaacaatcgacgcaggcccacctacggcctctcctgcaaaagagacttcattctag

SEQ ID NO: 241126 - DNA, 804 bp, synthetic construct
  misc_feature 1..804: note = Description of Artificial Sequence: Synthetic coding sequence
  source 1..804: mol_type = other DNA
atgacgtgctccctgggaaaggtgtatatctctgagatcgcctatcccgctgtgcgtggcttattggggtcctgtgtccaactgatggttgtggttggcattcttctggcgtatctggctggatgggtgctcgaatggcggtggctagccgttctggggtgcgttcccccttctctgatgttgcttttgatgtgtttcatgcctgaaacccctcgcttcctgctcacacagcataggaggcaagaagcaatggccgcattaaggttcctatggggtagtgagcaaggttgggaagaccctcccattggagccgagcaatctttccacctggccttacttcgtcaacctggaatttacaagcccttcataatcggagtttcactgatggccttccaacagctgagtggagtgaacgccgtaatgttttacgcggagactatttttgaggaagcaaaattcaaggactccagcctggcttcggtagttgtaggggtgatccaggtcctgttcacagccgtcgccgctcttatcatggaccgagctgggagacggcttttactcgtgttgtctggagtggtaatggttttcagtacaagcgccttcggggcatacttcaagctgacacagggagggcctggcaactcctcgcacgtggcaatctcagccccagtgtccgctcagccagtggacgctagtgtggggctggcctggctggcagtcggttccatgtgtcttttcatcgcgggtttcgcagtcggctgggggcctatcccatggctgttaatgagtgagatatttccatag

SEQ ID NO: 241127 - DNA, 645 bp, synthetic construct
  misc_feature 1..645: note = Description of Artificial Sequence: Synthetic coding sequence
  source 1..645: mol_type = other DNA
atggccttccagcagttatccggcgtgaatgccgtcatgttttacgctgaaaccattttcgaggaggctaagttcaaggattcatcattggcctcggttgttgtcggcgtcatccaggtgctgttcaccgccgttgccgcactgatcatggacagagccggtcgacgactgctgctggttctaagcggggtcgtgatggtgttcagtacctctgcgtttggggcatactttaaactcacccaaggaggtccgggaaattccagccacgtagccatttccgccccagtgtccgctcagccggttgacgctagcgttggtcttgcctggttggccgtcggatccatgtgtctgttcattgccggatttgcagtcggttgggggccaattccatggctcctgatgtccgagatttttcccctccacgtgaagggggtggctacggggatctgtgtgttgaccaactggttgatggcctttttagtgaccaaagagttcagctcccttatggaagtgcttcggccatacggtgccttttggctggccagtgccttttgcattttctccgtcctgtttaccctcttctgcgtgccagagacaaagggaaagacactggaacagattaccgcccacttcgaagggcgatag

SEQ ID NO: 241128 - DNA, 1236 bp, synthetic construct
  misc_feature 1..1236: note = Description of Artificial Sequence: Synthetic coding sequence
  source 1..1236: mol_type = other DNA
atgactcccgaagatcctgaagagacccaaccactcctgggcccacccggagggagtgcccctcgaggcaggagggtatttctcgccgctttcgcagcagcactgggtcccttgtctttcggttttgcattgggctatagctctcccgcaattccatctttacaaagagcagcgcctcctgctcccagactcgatgatgctgcagctagctggtttggcgcagtggtcacgctcggcgctgccgctggtggcgtcctggggggatggctggtggaccgagctgggaggaaattgtctctcctgttgtgctcggtcccgttcgtggccggttttgccgtgattacagcagcccaggatgtatggatgctgctgggaggcaggctgcttacaggcctcgcgtgcggtgtcgctagtctggtggccccagtgtacattagtgaaattgcctaccccgcagttagaggtctcctcggatcttgcgtacagctgatggtggttgtcggcatccttctcgcgtatttagcaggttgggtgctggaatggcgctggctggcggttcttggttgcgtgcctccatctcttatgcttctcctgatgtgctttatgcccgagacccctaggttcctgttgacacagcatcgcaggcaggaggctatggctgcgctccggttcttgtggggaagcgagcaggggtgggaggatcctccaatcggcgcagagcagtcattccacctcgcgttgctgaggcagcctgggatatataagccttttatcattggcgtgtcacttatggccttccagcagctgagcggagttaacgctgtgatgttctacgcagaaaccatttttgaggaagctaagtttaaagatagctctctggcttcggtggttgttggcgttatacaggttctgttcaccgccgttgccgctctgatcatggatagagccggtcgccgtctgctgcttgtcttatctggtgtggtgatggtgttctccacaagcgcctttggcgcttatttcaaattgacccagggcggtcccggaaactcaagccacgtggctatctccgccccagtttctgcccagccagtggatgcttcggtgggcttggcttggttagccgtcgggtctatgtgcctgtttatcgcgggaggtcctcaggctttatggagcctgttggcatgtctgcggttcctacacctgcagtgccccttccattttgtgctttgcccctag

SEQ ID NO: 241129 - DNA, 1434 bp, synthetic construct
  misc_feature 1..1434: note = Description of Artificial Sequence: Synthetic coding sequence
  source 1..1434: mol_type = other DNA
atgaccccggaggacccagaggaaacacagcctctcctcggtccacctggcggatctgctcctagggggaggcgggtattcctcgccgcttttgctgcggcattggggccattgtcttttggatttgcccttggctatagctcaccggctatccctagcctccagcgggctgctccaccggctcctcggttggatgacgctgcagcctcgtggtttggcgctgtggttactcttggggctgccgctggtggcgtgctgggaggatggctggtcgaccgcgctgggaggaaacttagcctgctactgtgctcagtgccctttgtggctggattcgccgtcataaccgctgctcaggacgtgtggatgctgcttggaggcaggttactgaccggactcgcttgcggcgtggcttctctcgtcgcaccagtgtatattagcgaaatcgcctacccggcagtacgaggactgttgggttcgtgcgtgcagttgatggtagttgtgggaattcttctggcctacctagctggatgggttctggagtggagatggctggctgtactgggctgtgttcctccgtccctaatgcttctcctcatgtgcttcatgccagagacaccacggttcctgctcacacagcataggaggcaggaagccatggccgctctgaggtttctctgggggtccgagcagggctgggaggatccccctattggagccgaacagtctttccacttggccctgctgcgacaacctggcatttacaaaccttttatcataggggtgtccctcatggccttccagcaattgtctggtgtcaacgccgttatgttttatgctgaaactatctttgaggaggcaaaatttaaggatagtagtctcgctagcgttgttgtgggagtgatccaggtgctctttacggcagtggcggcattaatcatggatcgggctgggcgaagacttcttctggtgctatcgggggtcgtcatggtcttttccacctcagcgtttggagcctatttcaagttaacacagggcggacccggaaattcctcccatgttgcaatttctgcacccgtgagcgctcagcctgtcgatgcatcagtaggactggcctggctagctgtaggcagtatgtgtctctttatagcaggctttgccgtgggctggggacccatcccatggctgttaatgagcgaaatctttcccctccatgtcaaaggagtggccacgggaatttgtgtgctcacaaattggctgatggcgtttctggtgactaaggagtttagctccctgatggaggtcctacggccatatggtgcattttggctcgcctccgcattctgcatctttagcgtcctgtttaccctgttctgtgtgcccgaaacgaagggcaaaacacttgagcaaattaccgcccactttgagggccgttag

SEQ ID NO: 241130 - DNA, 510 bp, synthetic construct
  misc_feature 1..510: note = Description of Artificial Sequence: Synthetic coding sequence
  source 1..510: mol_type = other DNA
tagggcagacgggtttttctggccgcttttgctgcagccttgggtcccctgtcttttggattcgctttaggatattcgtcgcctgcgattccatcccttcagagggcagcccctcctgcccctcggctcgacgatgctgcagcctcgtggttcggtgtgtacatcagtgagatcgcgtacccggcagtgcgaggacttttaggcagttgtgtccagctgatggtggtcgtcggcatattactggcatatttggccggttgggtgctggagtggcgctggcttgctgtgctcgggtgtgtaccgccttctctgatgcttctactgatgtgcttcatgcctgagaccccaagatttcttttaacacaacacagaagacaggaggccatggccgctctgcggtttctatggggcagtgagcagggctgggaggaccccccaattggggctgaacagcagctgagcggagtgaatgccgttatgttttacgccgaaactatcttcgaagaatag

SEQ ID NO: 241131 - DNA, 771 bp, synthetic construct
  misc_feature 1..771: note = Description of Artificial Sequence: Synthetic coding sequence
  source 1..771: mol_type = other DNA
atgaccccagaagatccagaggaaacacaacccctgttaggcccacccggtggttccgctcccaggggcaggcgagtcttcctggcggcattcgccgctgctctgggacctctgtcttttggatttgcactgggctattcctcccccgcaattccttctctccaacgggcagcacccccagcgccaagattggacgacgccgctgcctcctggttcggggtgtacattagcgaaatagcttacccagccgttagagggctactgggctcatgcgtccaattaatggtcgtggttggaatattactggcctacctcgcgggatgggtcttagagtggagatggctggctgtactcggatgcgtgcccccatcactgatgctgctcctgatgtgctttatgccagaaacaccacgttttctactgacgcaacaccgacggcaggaagccatggccgctcttcgctttctttggggcagcgagcaggggtgggaggatcctcctatcggcgcagaacagtccttccatctggccctgctgagacagcctggcatttataagccctttatcatcggtgtctccctcatggccttccagcagctgtccggagttaacgctgttatgttctatgctgagactatattcgaggaggcaaaattcaaagactcttccctggcgtcagtggtcgtaggtgtgatccaggtgctcttcactgcagtagctgcactaatcatggaccgagcaggtcggagactgctgctcgttctgtcttag

SEQ ID NO: 241132 - DNA, 804 bp, synthetic construct
  misc_feature 1..804: note = Description of Artificial Sequence: Synthetic coding sequence
  source 1..804: mol_type = other DNA
atgacctgttcactggggaaggtctatatctcagagattgcatacccagctgtgagagggttgctggggtcatgcgtccagttgatggtcgttgttggcatactgcttgcttatctggccggatgggtactggaatggcggtggctggcagtcttaggttgcgtgcctccctctctcatgctcctgcttatgtgctttatgcctgagaccccaaggttcctgctcacccagcatcgtaggcaggaggcaatggctgcactccggtttctatggggatctgagcaggggtgggaagacccccctattggcgcagagcagagcttccacctggcactcctcaggcagcctggcatttacaaaccctttataatcggggtttctctgatggcttttcaacaactgtccggagtaaacgcggttatgttttacgctgagacaatttttgaagaggccaaatttaaagactccagcttggctagcgtggtagtcggggtcatccaggttctgttcacagcagtggctgccctgataatggacagggccggacggaggttgctgctggtgctctcgggtgtggttatggtcttttctactagtgctttcggtgcatactttaaattgacgcaaggtgggccaggcaattcctcacatgtggctatctcggcccctgttagtgcacagcccgttgacgccagcgtgggtctggcgtggctggccgtagggagcatgtgtctctttattgccggttttgctgtgggctggggccctattccatggctgctcatgagcgaaatattcccctag

SEQ ID NO: 241133 - DNA, 831 bp, synthetic construct
  misc_feature 1..831: note = Description of Artificial Sequence: Synthetic coding sequence
  source 1..831: mol_type = other DNA
cagctgatggtggtggttgggatcctgttggcttacctagcgggatgggtgctcgaatggcgctggctcgctgtacttggatgcgtccctccgtctctgatgcttctcctgatgtgcttcatgccagaaacaccaagattcctcctgacgcagcatcgccgtcaagaggcaatggccgcactgagattcctctggggtagcgagcaggggtgggaggaccccccaatcggggctgagcagtcttttcacctcgcattgctgagacagcccggtatctacaagcctttcataattggggtgtctttgatggcttttcagcagctgtcgggcgttaatgcagtgatgttttatgccgaaactatcttcgaggaggctaagtttaaggattcctctctcgctagcgtggttgtgggggtgatccaggtcctgttcacagcggtcgctgcactgatcatggaccgagctggcaggcgcctgctactggtcctgtctggggtcgtaatggtgttttccactagcgccttcggcgcttattttaaactgactcaggggggacccggtaactctagccacgttgccattagtgcccctgtcagcgcccaacctgtcgacgccagtgtgggcctggcatggctcgctgtgggctctatgtgtctgtttattgctggctttgcagtcggctgggggcctatcccttggctgctcatgtcggaaatctttcctttacacgtaaagggagttgctactgggatttgcgttctgaccaactggctgatggcgtttctggtgactaaggaattcagtagtctaatgctgctacttctcttatag

SEQ ID NO: 241134 - DNA, 726 bp, synthetic construct
  misc_feature 1..726: note = Description of Artificial Sequence: Synthetic coding sequence
  source 1..726: mol_type = other DNA
atgacttgcagcctgggtaaagtctacatatctgaaatcgcgtaccctgcagtgcgcggactgctgggatcctgcgtgcagttaatggtcgtggtcggcatcctgctcgcatatctggccggttgggtgctggagtggcggtggctggccgtcctcggttgcgtcccacccagccttatgctgttgttaatgtgcttcatgccagagacacctagatttctgcttacccagcaccgacgacaggaagccatggcagccctgcggttcctttggggctctgagcaggggtgggaagatcctcccattggcgcagagcagcagctcagcggcgtcaatgcagtgatgttctatgccgaaacaattttcgaggaggccaagtttaaagactcatcattggcatccgtcgtggtcggggtaattcaggtcctgttcaccgccgttgccgctctgattatggatagggctggcaggagattactattggtattatccggagtcgtgatggtcttttccacctctgccttcggtgcctatttcaaattgacccagggcggacctggtaatagcagccacgttgccatctcagcccctgtgagcgctcagcccgtggacgcttctgtgggcctcgcatggctcgcggtgggcagtatgtgtctgttcattgccggatttgccgtcggatgggggcctattccatggctgctgatgagtgaaatcttcccttag

SEQ ID NO: 241135 - DNA, 798 bp, synthetic construct
  misc_feature 1..798: note = Description of Artificial Sequence: Synthetic coding sequence
  source 1..798: mol_type = other DNA
atggtcgtcgtcggcatcctgttggcatacttggccggttgggtgctggagtggagatggctggccgtcctcggatgtgtgccccctagcttaatgctgctcttgatgtgctttatgcctgaaacaccaaggtttctgttaacccaacacaggaggcaggaagctatggccgcactgcgctttctgtggggatcagagcagggatgggaggaccccccaatcggagccgagcaatcttttcatctggccctccttcgtcagccagggatttataagccattcatcattggagtcagcctcatggctttccaacaactgtccggagtgaacgcagtgatgttctacgcagagacaatcttcgaggaggctaagttcaaggactccagcttagcctcagtggtggtgggcgtgatccaggtcttgttcactgccgtggcagccctgattatggaccgcgcaggaaggaggctcttgctggtgctgagtggagtggtgatggtctttagtacgtccgcctttggcgcatactttaaactgactcaggggggtccgggaaattcctctcatgtggctatcagtgccccagtcagcgcacagccagtcgatgccagtgtgggattggcttggctcgcagtaggcagtatgtgcctatttatcgctggcttcgccgttggctggggaccgatcccctggctgcttatgagtgaaatttttcccctgcacgtcaagggggtggccactggaatctgtgtcctgacaaattggctcatggctttcctcgtcacgaaggagttctag

SEQ ID NO: 241136 - DNA, 1623 bp, synthetic construct
  misc_feature 1..1623: note = Description of Artificial Sequence: Synthetic coding sequence
  source 1..1623: mol_type = other DNA
atggctaggaaacagaacagaaatagcaaagagctgggtctcgtccctctcacggacgacacatcccacgcgggtcctcctggccctggcagggcattgctggaatgtgatcatcttcgctctggcgtaccagggggacgtagacgcaaagattggagttgttcactgcttgtggcgagtctggccggagccttcgggtctagctttttatacggctacaacctctcagtggtgaacgcacctactccttacattaaggctttttacaatgagagctgggagcgccgacatgggcgtccgattgatccagatacattgacactcctttggagcgtcaccgtgagcatattcgcaatcggaggcctggttgggactctgatagtgaagatgattgggaaagtcctaggccgaaagcatacactcctggccaataatggcttcgccatctcagcagcgctcctgatggcctgttccctgcaagcaggggcatttgagatgcttatcgtcgggcgattcattatgggaatcgacggcggagtggccctgtctgtgctcccaatgtacctgtctgaaatcagtcccaaggagatccgaggctccctaggacaggtgactgctatatttatctgcattggagtgtttacaggacagctgctcggcctccctgaactcctaggaaaggaaagtacctggccctacttatttggggtcatcgtcgtgcctgcagtggttcagctgctctcactgccatttctccccgattctccccgttacctgcttttagaaaaacacaatgaggccagagccgtcaaggcatttcagactttcctggggaaggccgacgtatcccaggaagtggaagaggtcctggcggagtccagagtgcagaggagcatccgcctggtcagcgtgcttgaactcttgcgagcaccgtatgtgcgttggcaggtggtcacagttatcgtgacaatggcgtgctaccaattatgcgggctgaatgccatctggttctatactaactccattttcgggaaagctggaatacccccagccaaaatcccatacgttaccctctccactggtggcattgaaacactagccgcagttttttcaggcctcgtcattgagcacctcggtagaagacctctactaattggcggattcggcctgatgggactcttttttggtaccctcaccattacactcaccctgcaggatcacgctccctgggtgccatacttatcaattgtgggaatcctagcaataattgcaagtttttgcagtggacccggaggtatcccatttatcctcactggagaattcttccagcaaagccaacgtcctgcagcttttatcatcgcagggactgtcaactggctgtccaattttgcagttggcttgctcttccctttcatccagaaatctctggacacttattgcttcctggttttcgcaactatctgcataacgggcgcaatttatctgtatttcgtgcttccagagaccaaaaatcgtacctatgccgagatttcccaagcattcagcaagcgcaacaaggcgtaccctcctgaagaaaagattgattccgcagtaaccgacggaaaaatcaatgggagaccctag

SEQ ID NO: 241137 - DNA, 1536 bp, synthetic construct
  misc_feature 1..1536: note = Description of Artificial Sequence: Synthetic coding sequence
  source 1..1536: mol_type = other DNA
atgaaattgtccaagaaagatcgcggtgaggatgaggaaagtgattcagccaagaagaagctggactggagctgcagtctgctggtcgcgagtttggcaggagctttcggttccagcttcctttacggttacaatctgagtgtggttaacgcaccgaccccttatattaaagcattctataatgaatcatgggaaaggcgtcatggtcgaccgatcgacccagacacactgacactgctgtggagcgttacggtttccatctttgccatcgggggattagtgggaactttgatcgtgaaaatgattggcaaagtgttgggcaggaaacacacactgctggccaacaatggctttgcaatatctgctgcgctgctcatggcttgtagtttgcaggccggtgcgttcgagatgttgattgtcggccgtttcatcatgggtatcgatgggggagtggccctgagcgtgctccccatgtatctgagcgaaatttcgcctaaggaaattcggggttccctcggtcaggtcacagccatatttatttgtatcggagtgtttaccggacagttgctgggcctgcccgaactgctgggcaaagagagcacttggccttacctgtttggcgtgatcgtggtgcccgctgtcgtgcagctgctgtccctcccattcctccccgacagtcctcgctacctgctcctcgagaagcataatgaggcacgcgctgtgaaggcctttcagactttcctaggcaaggccgatgtaagccaggaagtggaagaagtgttagcggagtcgagggtccagaggtctattcgactggtctccgtccttgagctgctgcgagctccttatgttaggtggcaagtggtaacggtgatcgtcactatggcctgctatcagctgtgcgggctgaatgccatctggttttacaccaattccatctttggaaaggctgggatcccccctgccaagattccttacgtaaccctctctaccggcggaatcgaaaccctggcggctgtgttctccggcctagttattgaacacctgggcaggagacctttgctcatcggcggttttggcctgatgggcctattttttggtactctcacaattactctcacactccaagaccatgccccatgggtaccatacctctcgattgtggggattttggccatcatcgcctccttttgcagcggtcccggtggaatcccatttattctcacaggcgagtttttccagcagtcccaacggccagccgcttttattattgccggtaccgtgaactggctgtcaaatttcgccgtaggtctcctcttccccttcatacagaaatcccttgacacatactgttttctggtattcgccacaatttgtattaccggcgcaatatatctttatttcgtgctacctgaaaccaagaaccggacgtatgcagaaatttcccaggcttttagcaagcgaaataaagcttatcctccggaggagaaaattgactcagctgtgactgatggaaagatcaacggcaggccgtag

SEQ ID NO: 241138 - DNA, 1536 bp, synthetic construct
  misc_feature 1..1536: note = Description of Artificial Sequence: Synthetic coding sequence
  source 1..1536: mol_type = other DNA
atgaagttaagtaaaaaggaccgcggtgaagacgaagaatctgactctgctaagaagaagctagactggtcttgcagtttactcgtggcgagtctggcaggggcatttggctccagctttctgtacgggtacaatttgtccgtcgttaacgctcccacaccttacatcaaagctttctataacgagtcttgggagagaagacacgggcgaccgatagaccccgatacactcactctcctttggtccgtgacagtttcaatctttgccattggaggtctcgtcggcacactgatcgtaaagatgatcgggaaggtcctaggcaggaagcacacattgctggcgaataacgggttcgcaatctccgcagctttacttatggcctgctccctgcaagctggagcattcgagatgcttattgtcggaagattcataatggggattgacggaggcgtagcattgagtgtgttacccatgtatctttctgagatcagtccgaaggaaatacggggatctttgggccaggtgactgccatcttcatctgtattggtgtttttacagggcagctgctcggcctgcccgaactcctgggaaaagagtccacctggccctatctctttggcgtcatagtggtgcctgctgtggtccagctcctgagtctgccattcttacctgattcaccaaggtatctccttttggaaaaacacaacgaggccagagcagtgaaagcgttccagacctttctgggaaaggccgatgtctcccaggaggttgaagaagtgctggccgaaagtagagtgcaacgctccatccgcctggtttccgtcctcgagctgctgagagccccttacgttcgctggcaggtggtgacagtcattgtcaccatggcctgttatcagctgtgcggactaaacgccatttggttctatacgaattcaattttcggcaaagccggaatcccaccggctaagataccttacgtgactctgtccacgggaggcatcgagaccctcgcggctgtgttctccggtctggtgatcgaacatttaggaaggagaccactgttgatcggcggattcggtctgatgggcctgttctttggaacattgacaatcaccctgaccctccaggaccatgccccttgggtgccatacctgtccattgttggaattctcgccataattgcatcattttgcagtggtccgggaggcatccctttcatacttactggcgagttcttccagcaaagccagagacctgctgcttttattattgctggcacagttaattggctcagcaactttgcggtggggctcttgttcccattcattcagaaatccctcgacacgtactgctttctggtgttcgcaacgatatgtataactggcgctatatatctgtatttcgtgcttcctgagacaaagaatcgtacctacgcagaaattagtcaggcgttctccaagcggaacaaagcatatcctccagaggagaagattgattccgccgtgaccgatggcaagatcaatggccgtccatag

SEQ ID NO: 241139 - DNA, 597 bp, synthetic construct
  misc_feature 1..597: note = Description of Artificial Sequence: Synthetic coding sequence
  source 1..597: mol_type = other DNA
atgaaactttcaaaaaaggacaggggtgaggatgaggaatctgattccgctaagaaaaaactggactggtcatgctctctgcttgtcgccagcttggcgggagcttttggtagctcctttctgtacggctataacttaagcgtggttaacgcgccaacaccatacattaaggccttctacaatgaatcatgggagcggaggcatggtcgacccatagacccggatacactgacgctcctgtggtctgtgactgtaagtatatttgcaattggcggactggtgggcacactaattgtgaagatgatcggaaaggtccttggaagaaagcacacccttctcgcgaacaacggatttgccattagtgctgctctactgatggcttgtagtcttcaggccggagcgtttgagatgctaattgtggggagattcataatgggcatcgacggaggggtggctctgtctgtgctgcccatgtacctgtcagaaataagcccaaaggagatccgcggttcgctcgggcaggtcaccgctattttcatctgtattggcgtgtttacaggacaattgctgggtttacccgaactgctgggcaagtag

SEQ ID NO: 241140 - DNA, 735 bp, synthetic construct
  misc_feature 1..735: note = Description of Artificial Sequence: Synthetic coding sequence
  source 1..735: mol_type = other DNA
atggaacagcaggatcagtcaatgaaagaaggtcggcttaccctcgtgctggcgttggcaaccctgattgctgcgttcggctcctccttccaatatggatacaacgttgctgccgtcaacagtcctgctctgcttatgcagcagttctataacgagacctactatggtagaacaggcgaattcatggaagacttccccttgaccctgttatggagcgtgaccgtgagcatgttcccattcgggggttttataggcagtctgttggttggccctttggtcaacaagttcggcaggaaaggtgccctgctgttcaataacatattttctattgtgccagctattctcatgggctgctctagagtggcaacctcttttgagttaataatcattagcaggctgctggtcgggatttgtgctggcgtatccagtaacgtcgtgccaatgtacctgggcgagctcgccccaaagaacttaagaggggctctgggcgttgtccctcagctctttattacagtggggatcctagttgcacagatcttcgggcttaggaatctcctagccaatgtggatggcgagtttcggacttctcgcgagcacccccatcccttcacaaccaccctcggcccactcctggtcttccaaagtcatcaccaccggacaggtttgtccgctgactggagtctgctgaccgggtggatgtcactcggaggtccgtcttgtcccgagcccacctag

SEQ ID NO: 241141 - DNA, 1506 bp, synthetic construct
  misc_feature 1..1506: note = Description of Artificial Sequence: Synthetic coding sequence
  source 1..1506: mol_type = other DNA
atggagcagcaggatcaaagcatgaaagaagggcgtttgactctggtgctggcgctcgcgaccctaattgccgctttcggctctagtttccagtacggttataacgttgctgccgtcaattcgccagccctcctaatgcaacaattctacaacgagacctactacggcaggacaggggagttcatggaggatttccccctaacactattgtggtcagtgactgtgtccatgttcccgtttggcggattcatcgggtccctcctggtgggtcccttggtcaacaagttcggaagaaagggtgccctcctgttcaacaacatcttttcaatcgtgccagccatactgatgggatgcagtagagtggctacctccttcgaacttataataattagcaggcttcttgtgggcatctgtgccggagtttctagtaatgtggtccccatgtatctgggcgagctagccccaaagaacttgcgaggagccctgggagtggttccgcagctgttcataaccgtgggcattcttgtggcccagatctttggcctgcgaaacctgcttgcaaatgtggatggatggcctatattgttagggctgacaggggtccctgccgctcttcagctcttgctcctgccatttttccctgaaagccctcggtacctgcttatacagaagaaggatgaagctgcagccaaaaaggcacttcagacattacgaggttgggatagcgttgaccgggaggtagcagagatacgacaggaggatgaagccgagaaagcggctggctttatctcggttttgaaactcttccgcatgaggtcgcttcgctggcagctgttgtctattatcgttctgatgggaggtcagcaactgtctggtgtaaacgcaatttactactatgccgaccagatctacctatctgccggagttcctgaggaacacgtccagtacgtgacagccggaaccggagccgtgaacgttgtgatgacattttgcgcagtgtttgtcgttgaattgctcgggagaagactgctgcttttactgggcttcagtatctgcctgatcgcatgttgtgtcctcacggcggctttggcgcttcaggatacagtatcatggatgccatacatttcaatcgtatgcgtcatctcttacgtaataggccacgctcttggtcctagtcccattcccgctctgctgattaccgagatctttctgcagagctcccgcccaagcgcgttcatggtggggggaagcgtgcattggcttagcaattttaccgtcggtctgatctttccatttattcaggaaggactggggccatattcattcatcgtgtttgctgtgatatgcctgctgaccaccatatacatcttcctgattgtgcctgagaccaaagccaagacctttattgagatcaatcagatctttaccaagatgaataaggtttccgaggtttatcctgaaaaggaggagctgaaggaacttccccctgtgacctcggagcagtag

SEQ ID NO: 241142 - DNA, 1455 bp, synthetic construct
  misc_feature 1..1455: note = Description of Artificial Sequence: Synthetic coding sequence
  source 1..1455: mol_type = other DNA
atggagcagcaagatcagtcaatgaaagaggggaggctcaccttggtgttggctctggccgcagtgaattcacccgctctgctgatgcaacagttctacaatgagacgtattacggacgcactggagaatttatggaagactttccacttactctgctgtggtcagtgacagtatctatgttccctttcggcggttttataggaagtctcttagtcggtcctctggtcaataaattcggaagaaagggcgctctcttgttcaacaacatctttagtatcgttccagccattctgatggggtgctcaagagtcgcaacatctttcgagctgataatcattagcaggctgctggtcggcatttgtgccggtgtgtcatctaacgtcgtgccaatgtacctgggggaactagccccaaagaatctgaggggcgcattaggcgttgtccctcagttgttcattacagtgggaattctagtcgcccagatctttggcctgagaaacctcctggcaaacgttgacgggtggccaatactgctgggattgactggcgtgccggctgctcttcagcttctcctcttgccattcttccccgaatcccctagatatctgctaatccaaaagaaggatgaggccgcagcaaaaaaggccctgcaaactttgcggggatgggactctgttgatcgcgaagttgccgagatacgccaggaggacgaggcagagaaagctgccggattcatctcagtcttaaaattattccgaatgcgctctctgcgttggcagctgctgagcattatcgtactgatgggaggacagcagctctccggggtgaatgcgatctactattacgcggaccagatctacctctcagccggtgtgccagaggagcacgtgcaatatgttaccgcgggtacgggagctgttaacgttgtgatgacattttgtgccgtgttcgtcgttgaattgctgggcagaaggctgttgctgctactgggtttttccatttgtcttattgcctgttgcgtactaacagccgctttggccttacaagacaccgttagttggatgccctacatttctattgtatgtgtaataagctatgtcattggtcacgccctgggcccttcacccatccctgccctcctgattaccgagattttcctacaatcctcccggcctagtgcctttatggtggggggatcagtccactggctaagcaactttaccgtgggtctaatttttccttttatccaggaagggctaggaccgtatagcttcattgttttcgccgtcatttgtctgcttaccaccatttatatttttcttatcgtgccagagacaaaagccaagacttttatcgaaattaaccaaattttcactaaaatgaataaagtgtccgaggtgtatcccgagaaggaagagctcaaagagttaccccctgtgacaagcgaacagtag

SEQ ID NO: 241143 - DNA, 1161 bp, synthetic construct
  misc_feature 1..1161: note = Description of Artificial Sequence: Synthetic coding sequence
  source 1..1161: mol_type = other DNA
atgggatgtagcagggtggccacgtcattcgaactaatcataatatctcggcttctggtggggatctgtgccggagtgagctctaatgtggtgcctatgtatctgggggagctggccccaaagaatctcaggggcgctctgggcgtggtcccacagctgtttatcacagtgggtatcctggtagctcagattttcggtctgcggaatctgctagctaacgtcgatggttggcctatcctcctggggcttacaggcgttccagcagccctgcagctgctgctacttccgtttttccccgagtcaccacggtacctcttgattcaaaaaaaagatgaggcggctgccaagaaagctctacaaacccttaggggctgggattccgtggatagagaggtggcagaaattaggcaggaggatgaggcagaaaaggctgcaggcttcatttctgtgcttaaactgttccgcatgcgcagccttcgttggcagttgctgtccattatcgtgctgatggggggacaacagctgtctggcgtgaacgccatttactattacgcggatcagatttatctatcagcaggtgtccctgaagagcacgtccagtacgtgacagccggaacaggggctgttaacgttgtgatgacgttctgtgcggtatttgtagtggagctcctcggaaggcggctgttgctcttattagggttctccatttgcttaatagcctgctgcgtcctgacagctgctctcgctttacaggatactgtgtcatggatgccttacattagcattgtgtgcgtcatctcctacgtgattggccacgcactcgggccatctcctattcctgcccttctcattactgagatcttcttgcaaagcagcagaccatccgcattcatggtcggcggaagtgtacactggctctccaattttacagtaggcctaatcttcccctttattcaggagggcttaggtccttacagcttcatcgtctttgctgtcatttgtttgctcacaactatctacatatttctaatagttcccgagacaaaagcaaaaactttcatcgaaatcaaccaaatctttaccaaaatgaacaaagtgtctgaagtgtaccccgaaaaagaggagctgaaggaactccccccagtaacctcagaacagtag

SEQ ID NO: 241144 - DNA, 1329 bp, synthetic construct
  misc_feature 1..1329: note = Description of Artificial Sequence: Synthetic coding sequence
  source 1..1329: mol_type = other DNA
atgctggaactgcacagtcttactgccagtagtatcatgcgcgtactgatcatgcgcgcacctctgagagaggctccaccagagaaattcgccctgctgctgtcagggtcccccggaaaaggcgcactgctattcaataatatattctcgattgtaccagctatcctcatgggatgtagccgggttgcaacgagcttcgaattaattattatatctcgcttgttggtgggcatttgtgcaggtgtgtcctccaatgtcgttccaatgtatctgggcgagctggcacctaagaatctcagaggtgcattaggagtagtcccgcagctgtttattaccgtgggcattcttgtcgcacagattttcggcctccgaaacctactggcgaacgtggatggatggccaatcttactcggacttaccggtgtgcccgctgctttgcagcttttgctgttgccttttttcccagagtcaccacggtacctgctaatccaaaaaaaggatgaggccgcagctaagaaagccttgcagactcttcgcggttgggacagcgtcgatcgcgaggtagcagagatccggcaagaggacgaggcagaaaaagctgcgggatttatttcagttctgaagctgtttcggatgaggtctctccggtggcagctgctctctatcatagtgcttatgggcggtcagcaactgtctggagttaacgccatctattattacgctgaccagatttacttgagcgcaggagtgccagaagagcacgtgcaatacgtcaccgcaggcactggtgccgtaaatgtcgtgatgacattttgcgctgtcttcgtggtcgaattgctgggacggcgtttgctcctcctcctgggattctctatctgcttaattgcttgttgtgtccttacagctgcgttagctttacaggacactgtgagctggatgccgtacatttccatcgtttgcgtgattagctacgtcatcggtcatgctctaggcccatctcccatacctgccctgcttatcactgagatcttcctgcagagcagtaggcccagcgccttcatggttggcggtagtgtgcactggctctcgaacttcaccgtgggcttgatcttccccttcatacaagaaggtctgggaccctattcctttattgtctttgctgtgatatgcctgttgactaccatttacattttcctcattgttcccgagactaaggcgaaaacttttatcgagattaatcaaatcttcacaaagatgaacaaagtgagcgaggtgtatcctgaaaaagaggagctcaaagaactgccccctgttactagtgagcaatag

SEQ ID NO: 241145 - DNA, 2040 bp, synthetic construct
  misc_feature 1..2040: note = Description of Artificial Sequence: Synthetic coding sequence
  source 1..2040: mol_type = other DNA
atggcaactctcattactagcacaacagctgccaccgcagcatctggaccactggtggattacttgtggatgctcattttggggttcattatcgccttcgtattggccttctctgttggagctaacgacgttgccaacagctttggcacggctgtaggcagcggagtcgtgacgctgaaacaggcttgcattctggcctccatcttcgagaccgttgggtcagtccttctaggggctaaagttagtgagaccattagaaagggactcatcgatgttgagatgtataattctacacagggtttgctgatggcgggatccgtgtctgccatgttcggatctgctgtgtggcagctcgtggcctcgttcctcaaactgcctatcagcgggacacactgcatcgtgggggctaccattggattttcacttgtcgcgaaaggccaagaaggcgttaagtggagtgaactcatcaaaatcgtaatgtcctggtttgtaagcccacttctgagcggcataatgtccggcatactctttttcctggtgagagcatttatattgcacaaagccgaccccgtgccaaacggcctcagagcactacccgtcttttatgcatgtacagtgggtataaatctttttagtatcatgtacactggcgctcccctactgggtttcgataagctacctctgtgggggacgattctcatttcagtcggatgtgcagtgttttgcgctcttatcgtgtggttcttcgtttgccctcggatgaaacgcaagatcgaaagggaaatcaaatgctcaccgagcgaatctcctttaatggaaaaaaaaaactcgttgaaggaggatcatgaggaaaccaagttgtctgtgggagacatagagaataagcatcctgtgtctgaggtgggcccagccaccgtaccgttgcaggcagtggtcgaagagaggacagtgtcatttaagttgggggatctggaggaagcacccgagcgagagagactgcccagcgtcgacctcaaggaggaaacatccattgattccaccgtgaatggagccgtgcaattaccaaatggtaacctcgttcagttttcccaggccgtttcaaatcagataaattcttcggggcactatcagtaccacaccgttcacaaggattccggcctctacaaagagctcctgcataaactccatttggcaaaggtgggcgactgcatgggagactcgggcgacaaaccattgcgtagaaacaacagttacacgtcttacactatggcaatctgcggaatgccgctggactcctttcgggcaaaagagggtgagcagaagggagaagaaatggagaagctaacgtggccgaacgccgactcgaagaagcggattcggatggattcatacacgtcatactgcaatgctgtgagtgacctgcactccgcgagtgagatcgacatgtcagtgaaagccgaaatgggcttgggcgaccggaaaggaagcaatgggtctctcgaagaatggtatgatcaggacaagcccgaggtgtcccttctctttcagtttctacaaattttgacagcctgctttggttcattcgctcatggcggaaatgacgtgagtaatgccataggcccattagttgcactctatctagtttacgacacaggggatgtgtcgagcaaagtcgccacccccatttggctcctgctgtatggaggggtggggatttgtgtgggcttgtgggtgtggggtcggagagtgatccagacaatgggtaaggatctcaccccaattaccccctccagcggcttctccatcgagctggccagtgccctgacagttgtaatcgccagtaatataggactcccaattagtaccacgcactgtaaagtggggtcagtggtctcagtaggctggctgcgcagcaagaaggccgtggattggcgtctgttcaggaacatcttcatggcttggttcgtgacagtccctatttccggggtgatttctgctgccatcatggctatttttcggtacgttattctcaggatgtag

SEQ ID NO: 241146 - DNA, 1137 bp, synthetic construct
  misc_feature 1..1137: note = Description of Artificial Sequence: Synthetic coding sequence
  source 1..1137: mol_type = other DNA
atggggaacccatctgtgcctagaggaggttttacccaatactgtcggggactccttccttggggctttcaggatgccccattttatctcctggtcctcggattcgacaagttgcctctgtggggcaccatattgatctcggtcggatgcgccgtcttctgtgcactgattgtgtggttctttgtgtgtcctcgaatgaagcgtaaaattgaacgtgaaattaagtgtagcccatcagaatccccgctcatggagaagaaaaattccctcaaggaggatcatgaagagaccaaactgagcgtaggggatatagaaaataaacatccggtaagcgaagtgggccctgctaccgtcccccttcaggctgttgtggaggagcgcacagtctcattcaaattgggggacttggaggaagcgccagaacgtgagagactgccctccgtggatctgaaggaggagacttccatcgattctactgttaacggggctgtgcagctccctaatggaaacttagtgcagttctcccaggctgtgtctaatcagataaatagtagtgggcattaccagtaccatactgtccacaaagactctggcctttataaggagctcttgcacaaattacatcttgcaaaagtcggtgactgcatgggtgatagtggagataagccactgcgtagaaacaattcctatactagttacacgatggccatctgcggcatgccccttgacagtttccgagccaaggaaggcgaacaaaagggcgaggagatggagaagttgacatggcccaacgcagactccaagaagcgtatccgcatggacagttacacttcctattgcaatgccgtgtcagaccttcacagcgcgtctgaaatcgatatgtccgtcaaggccgagatggggctcggggatagaaaaggctcaaacggttcgttagaagagtggtacgatcaggacaagccagaagtaagtctcctgtttcaatttctccagattctgaccgcctgtttcggctcttttgcgcacggcggaaatgacgtaagcaatgcaataggcccactcgtcgcattgtacctggtgtacgatacaggcgacgtaagcagcaaggtagccacgcctatctggctgttatgttag

SEQ ID NO: 241147 - DNA, 1959 bp, synthetic construct
  misc_feature 1..1959: note = Description of Artificial Sequence: Synthetic coding sequence
  source 1..1959: mol_type = other DNA
atggccatggacgagtatctgtggatggtcattctgggttttattattgccttcattcttgcattttcggttggcgcaaatgatgtggcaaattcttttgggacagctgtgggttcaggtgtggtcacgcttcggcaggcttgcatcctggcatctatttttgagactacaggcagtgtcctccttggcgcaaaggtgggtgaaacaatccgcaaggggataatcgatgttaacctgtataatgagactgtagagactctgatggctggggaagttagtgcgatggtgggcagcgccgtttggcagctgatagccagtttcctgcgactgccaatatctgggacccactgcattgtaggaagtaccattgggttcagcctggtggccatcggcacaaaaggtgttcagtggatggagctggtcaaaattgtggccagctggttcatttccccacttctgtcaggtttcatgagcggactccttttcgtactcattcgcatctttatcttgaagaaagaggacccagtgccaaacggtctgcgagccctgccagtgttctatgccgctaccattgctataaacgtcttctccatcatgtacaccggggcacctgtgctgggcctggttctgcccatgtgggctatcgctctcattagttttggcgtggccctgctgtttgcctttttcgtgtggttgtttgtctgtccatggatgcgaaggaaaattaccgggaaactacagaaggaaggggctctgagcagggtcagtgatgagtctctttctaaagtgcaagaagccgaatcccccgtgtttaaagagctgccaggtgccaaggcgaatgacgacagcaccatcccactcacaggcgctgctggggaaactcttggcacgagcgagggcacaagcgctggaagtcacccaagggccgcatacgggagggcactgtctatgactcatggttctgtcaagagtcccatctcgaacggcacctttgggttcgatggtcatacccgtagcgacggccatgtgtaccacactgtgcacaaagatagcggcttgtacaaggacctgctgcataaaatccacatagaccgcggacctgaggaaaaacccgctcaggaatccaactacaggctgctgcggaggaataattcttacacttgttacacagctgctatttgcgggctgcccgtccatgcgacctttagggctgcggactcatccgccccagaggatagcgagaagcttgtaggtgatacagtctcatactcaaaaaaacgtctgcggtatgatagctacagtagttactgcaacgcagtcgcagaggctgagattgaggctgaggagggaggagtggagatgaagctggccagcgaactggcggacccagaccagcctcgggaagaccctgcagaagaggagaaagaggaaaaagatgcgccagaggtgcacctcctgttccattttctccaggtactaacagcttgtttcggctcatttgctcatggcggaaacgacgtgtctaacgctataggacctctcgtcgccctgtggctgatttataagcagggaggggttactcaagaagccgctacccccgtgtggctccttttttatgggggagtgggcatctgcacaggcctctgggtgtgggggagaagagtgattcagacaatgggtaaggatttaacccctattacgccatcctcaggctttaccatcgaacttgcatccgccttcacggtggtcatcgctagcaacataggactacccgtttctactacccactgcaaagtgggttccgtcgtggcagtgggctggattcggagccgaaaagcagtcgactggagactcttcagaaatatctttgtggcttggtttgttacggtgcctgttgccggtttgttttccgctgcagtgatggctctgttaatgtatggaatcttgccttacgtgtag

SEQ ID NO: 241148 - DNA, 216 bp, synthetic construct
  misc_feature 1..216: note = Description of Artificial Sequence: Synthetic coding sequence
  source 1..216: mol_type = other DNA
atggcgatggacgaatatctttggatggtgatcctggggtttattatcgccttcattctggccttcagcgttggggctaacgatgttgcaaatagcttcggaactgcagtaggctctggggttgtgactcttcggcaggcgtgcatactggccagtatctttgaaacaaccggctccgtgctgttgggcgctaaagtaggggagacaattaggtag

SEQ ID NO: 241149 - DNA, 87 bp, synthetic construct
  misc_feature 1..87: note = Description of Artificial Sequence: Synthetic coding sequence
  source 1..87: mol_type = other DNA
atggcgatggacgaatatttatggatggtcatccttggctttatcatcgcttttattctggcattctcagtaggggcaaatgattag

SEQ ID NO: 241150 - DNA, 237 bp, synthetic construct
  misc_feature 1..237: note = Description of Artificial Sequence: Synthetic coding sequence
  source 1..237: mol_type = other DNA
atggcgatggacgagtacttatggatggtgatcttaggcttcatcattgcctttatcctggcttttagcgttggggcaaatgacgtggccaatagtttcggaaccgctgtggggtcaggtgtggtgaccctgaggcaggcctgcatcctggccagcattttcgagacaactggaagcgtgttgctgggtgccaaagtcggcgagacaatccggaaaggcattattgatgttaactag

SEQ ID NO: 241151 - DNA, 1959 bp, synthetic construct
  misc_feature 1..1959: note = Description of Artificial Sequence: Synthetic coding sequence
  source 1..1959: mol_type = other DNA
atggccatggatgagtacctgtggatggttattctgggcttcatcatcgcttttatcctggccttctccgttggagccaatgacgtagccaattccttcggaacagccgtcggctccggcgtggttactctgcgccaggcctgtatcttagcgtccatttttgagacaacaggatcggtgctgctgggcgctaaggtgggcgagaccattagaaagggtatcatcgatgtaaacctctacaacgagacagtggaaactttaatggctggagaagtctctgcaatggtgggctccgccgtgtggcaactgattgcttccttcctccgactccccatctcagggactcattgtattgtgggatccaccatcggattctccctcgtggccattggcactaagggtgtgcagtggatggaactggtgaaaattgtggcttcctggtttatctcccccctgctctcaggtttcatgtctgggcttctgttcgttctcatcagaatttttatactcaagaaagaggacccagtccccaacggcctccgcgctctgcccgtattttacgccgctaccatcgccatcaacgtgttctctattatgtacactggggctcccgttttaggcctcgtcctcccgatgtgggctatcgccctgatctcattcggcgtggctctcctctttgccttcttcgtgtggttgttcgtgtgtccttggatgaggaggaaaattactgggaagcttcagaaagaaggcgcactcagtagggtgtctgacgagtctttgtctaaggtgcaagaggccgagtctcctgtgtttaaagagctccccggagcaaaggccaacgatgattctaccatacccctgacaggcgcagccggagaaacactgggcacatcagaaggcacgtcagcagggtctcacccgagggccgcttatggacgggcactgtccatgacgcacgggtctgtcaagtctccgatttccaacggtacctttggatttgatgggcatacgcgcagtgacggccacgtttatcatacagtccacaaggatagcgggctgtacaaggatctccttcataagatccacatcgaccgcggaccagaggagaaacccgcacaggaaagcaactacagactcctgagacggaataatagctatacgtgttacactgccgcaatttgtggacttccagtgcacgcaacatttcgcgctgcggattcgtccgcacctgaggattcggagaaattggtgggcgacacagtcagttatagcaaaaaaagactccgatatgatagttactcttcttactgcaatgccgtggcagaagccgagatcgaggcggaggaaggcggtgtcgagatgaagctggccagcgagctggccgatccggaccagcccagagaggatccagccgaggaagagaaagaggagaaagacgccccagaggtccacctcctgtttcattttctccaggtgctgacagcatgcttcggaagcttcgcgcacggtggaaatgacgtgtctaatgcaatcggtcccctcgtggctttgtggttaatatacaaacaagggggtgtgacacaagaagccgctacacccgtgtggctattgttttacgggggtgtgggcatctgcaccggcctgtgggtgtggggcaggagggtgatccagactatggggaaagacttgactcccataactccctccagcggttttacgatcgagctcgcttctgcattcaccgtagtcatcgcctcgaatattggcctccccgtgtcaaccactcattgcaaagtcgggtctgtcgtggccgtagggtggatacgcagtcgtaaagctgtagactggcgcttgtttcgaaatatctttgtggcctggttcgtgaccgtccccgtcgctggcctcttcagcgcggcagttatggccctgctgatgtacggcattctcccttacgtctag

SEQ ID NO: 241152 - DNA, 1959 bp, synthetic construct
  misc_feature 1..1959: note = Description of Artificial Sequence: Synthetic coding sequence
  source 1..1959: mol_type = other DNA
atggcgatggatgagtacctgtggatggtgatcctcggtttcataattgccttcattctggcttttagcgtcggggctaatgacgtggccaatagtttcggcaccgccgttggctccggcgtggtcaccctgcgccaggcttgcatactggcctctatttttgagacgacaggctcagtgttgctgggcgctaaggtaggggagactattcggaaggggataatcgacgttaacttgtacaacgagaccgtggagactctcatggcaggggaggtgtccgcgatggttggaagcgcagtgtggcagctgatcgcttcttttctgaggctacccattagcggaactcattgcatcgtgggtagcactattgggttctcgctggtggccattggcaccaagggcgtgcagtggatggagctcgtcaaaattgtggcatcttggttcatttctccactgctttccggctttatgagtggcctgttgtttgttcttataaggatctttatcctcaagaaggaagatccagtacccaacggcctgagggccttgcctgttttctacgcagcgactattgctatcaacgtgttttcaatcatgtacaccggggctcccgttttgggcctggtactgcctatgtgggcgatcgctctgattagctttggcgttgcactactcttcgccttcttcgtttggctgttcgtttgtccttggatgcgcaggaaaattacagggaagctgcagaaagagggtgcattgagtcgcgtgtccgacgagagtttatcgaaagtacaggaggccgagagtccggtgtttaaagagctccctggggcaaaagctaacgacgacagcaccattcccctaaccggtgcggcaggagaaaccttgggaactagcgaggggacctcagccggaagccaccctagagctgcctacggccgtgcgttgtctatgacacacggtagcgtgaaaagccctatcagtaacggcacattcggattcgacgggcacacccgatcggacgggcatgtttaccacaccgttcataaggatagcggtctatataaagatctgctgcacaagatccacattgaccggggtcccgaggagaagccagcacaagaaagcaactatcggctgctgcgacgcaataactcatatacgtgctacacagcagccatttgcgggcttcccgtccacgctacgtttagagctgccgatagctcagccccagaggatagcgaaaagctggtcggagataccgttagttacagcaagaagcgccttagatatgacagttactcctcatattgtaatgcggtagccgaggcagagatcgaagcagaggaaggtggcgttgaaatgaaactggctagtgaactcgctgatcccgaccaacctcgggaagaccccgctgaggaagagaaggaggagaaggatgccccagaggtccacctcttgttccacttcctccaagttctaacagcgtgttttggcagcttcgctcacggcggaaacgatgtttctaatgcgatcggacctctggtggcactgtggctgatttataagcaggggggagtcacacaagaagctgcaaccccagtgtggctgttgttttatggcggagtggggatttgcaccggcttatgggtttggggacgtcgggtcatccaaacaatggggaaggatctgactcccattaccccctctagcggattcaccatcgagctggcctctgccttcaccgttgtgattgcatccaatattggtctgcctgtgtcaaccactcactgcaaagtcgggagtgtcgtggcagtagggtggattcgttccaggaaggccgtcgactggaggctgttcaggaacatttttgttgcatggttcgtcactgtgccggtggccggactgttctccgctgctgtaatggccctccttatgtacggcatcctaccttatgtgtag

SEQ ID NO: 241153 - DNA, 144 bp, synthetic construct
  misc_feature 1..144: note = Description of Artificial Sequence: Synthetic coding sequence
  source 1..144: mol_type = other DNA
atggccatggatgaatatctctggatggtgatcctgggctttatcatagcattcatccttgccttttctgtgggagccaacgatgtcgctaactcttttggaaccgcagttgggagtggcgtcgtgactctcagacaggcatag

SEQ ID NO: 241154 - DNA, 1260 bp, synthetic construct
  misc_feature 1..1260: note = Description of Artificial Sequence: Synthetic coding sequence
  source 1..1260: mol_type = other DNA
atggcccagtctatctttatggccggtatactgatcggcggtctggtgttgggcgacctaagtgaccgattcggacggaggccaatactgacttgttcatacctcttactagccgcttccgggtcaggcgctgcgttctcccctacattcccgatatacatggtctttaggtttctttgcggcttcggcatctctgggattaccctttccaccgtcattctaaatgtagagtgggtacctacgcgtatgcgggctattatgtctaccgcgctcggatactgctacacttttggtcagttcattctgcccggtctagcttacgcaatccctcaatggcgttggttgcagctcaccgtctccatccccttctttgttttctttctgtcttcctggtggaccccagaaagcattagatggcttgttctgtctggcaaaagcagtaaggctcttaaaatacttcgtcgcgtggccgtcttcaatgggaagaaggaggagggcgagcgcctgtctttggaagagctaaagttgaatctccaaaaggagatctctctggccaaggcaaagtacaccgcctctgacctgtttcggatccctatgctgaggaggatgacattttgtctttcactggcttggttcgccaccggcttcgcatattattcactggctatgggggtggaggagtttggtgtgaacctgtacatactgcaaatcatcttcggcggtgtggatgtgcctgcgaaattcatcacaattctatccttgtcctacctaggccgtcatactacacaggctgctgccctattgcttgcagggggagccattttggctcttactttcgtgcctctggatctccaaacggtgaggacagtcttggccgttttcggtaagggatgtctgtcctcctctttttcctgcctgtttctgtatacatctgagctttaccctacagtcatccgtcagacgggcatgggcgtatccaacctgtggacgcgagtgggtagcatggtctccccattggtgaaaatcactggagaggtacagccttttattccgaacattatttacggaatcacagcccttttgggagggtccgccgcactgttcctgcctgagacccttaaccaacccttaccggagactatcgaggatctcgaaaattggagcttgcgggcaaagaagcctaaacaagagccagaagtggaaaaagccagccaaagaattcccctccagccccacggtcccggactggggtcttcttag

SEQ ID NO: 241155 - DNA, 1356 bp, synthetic construct
  misc_feature 1..1356: note = Description of Artificial Sequence: Synthetic coding sequence
  source 1..1356: mol_type = other DNA
atggaaccttgtttagacggttgggtttataacagtacgaaagatagtatagttactgaatgggacctagtgtgtaacagcaataaactgaaagaaatggctcagagcatttttatggcaggcatcctaattggtggcctcgtgctgggcgatctcagcgaccggtttggacgcagacccatacttacctgcagttaccttctgctggcggcttccggatctggcgctgcgtttagccccacgttcccgatttatatggtgttccgattcctgtgcggattcggaatctcggggattaccctctcaaccgttatcctgaacgtggagtgggtccccactcgcatgcgtgcaattatgagcacagccttaggatactgttacactttcgggcagttcattctgcctggcttagcatacgccattccccagtggaggtggctgcagctgactgtcagcatccctttcttcgtgttcttcttgtccagttggtggacgcccgagagtatcaggtggctggttctctcaggaaaatcttcaaaggccttgaagattcttaggcgtgtggcggtgttcaacggcaagaaggaggaaggcgagcggctgagcttggaagaattaaaacttaacctacagaaggaaattagtctggcaaaggctaagtacactgctagcgatttgtttaggataccaatgctacggcgaatgaccttctgcctaagcctggcctggttcgctaccgggtttgcgtactactctctggctatgggagtcgaggagttcggcgtgaacctgtacatcttgcagatcatttttggtggcgttgatgtgcctgcaaaattcataaccatcctgtcactgagctatctgggtcgccacactactcaagcagccgctctcctgttagccggtggtgcgattctggctctgacctttgttccactggatctccagacagtgcgcactgtcctggccgtgttcggcaagggctgcttgagcagctcattcagctgtctgtttctgtacaccagtgagctgtatcccaccgtcatccgccaaactggtatgggtgtgagtaacctttggactagggtcgggagtatggtctccccgcttgttaagattactggagaagttcaacccttcataccaaacattatttacgggattaccgctctgctgggcggttcggctgcactctttcttccagagaccttaaaccagccattacccgagacaattgaagatctggagaattggtctctgcgggcaaagaagccaaaacaggagcccgaggttgagaaagcgagtcaacggattccgctgcagccacacggcccagggctgggatccagctag

SEQ ID NO: 241156 - DNA, 1653 bp, synthetic construct
  misc_feature 1..1653: note = Description of Artificial Sequence: Synthetic coding sequence
  source 1..1653: mol_type = other DNA
atggctttcaacgacctcctgcagcaggtgggaggggtgggaaggttccagcaaatccaggtaaccctcgtcgtattaccccttctgctgatggccagccacaatacattacagaattttaccgccgcaataccaacccatcactgccgacctcccgcagacgccaatctgagcaagaacggcggactcgaagtgtggctgcctcgggacaggcaggggcaaccggaatcttgtttgcgcttcacttccccacagtgggggctcccgttcttaaatggcacagaggcgaacggcacaggagcgaccgaaccttgcaccgacggctggatctatgacaacagtacgtttccgagcaccattgtaacagaatgggatctcgtgtgcagccacagggccttacgccaattggcgcagagcctctatatggtcggggtcctgctgggggctatggtgtttggatatctggccgacaggctaggtcgtagaaaggttctgatcctcaactatttacaaactgctgtgagtggcacctgtgccgcattcgcaccaaacttccccatctactgcgcatttaggctgctcagcgggatggcgctggcgggaatctcccttaactgcatgacattgaatgtggaatggatgcctatccacacgagagcttgcgtggggaccctcatagggtacgtgtattccctcggtcagttcctacttgccggtgtggcctacgcggtgccccactggcgacacctccagctgctggtgagtgctccatttttcgcatttttcatatattcctggttcttcatcgaatcagcaaggtggcactcatcctcagggcgacttgatttgaccctgagggctctacaaagggttgctaggatcaacggaaaaagagaagaaggggctaagctttctatggaagtcttgcgggcttccctgcaaaaggagcttacaatgggaaagggacaggcttccgctatggagctattgaggtgtcctaccttgagacacctgtttctgtgcctgtctatgttatggtttgccaccagcttcgcatattatgggctggttatggacttgcagggattcggtgtgtccatttaccttattcaagtgatttttggcgctgtggatctcccggcaaagcttgtgggtttcctggtgatcaattctctaggcagaagaccggctcagatggccgctttgctactcgcagggatatgtattctcctgaacggcgtcattccacaggatcagtccattgtgaggacttcacttgcagtcctaggcaagggctgtttggccgcaagctttaattgtatatttttatatacaggggagttgtaccccaccatgatccgccagaccggcatgggcatgggcagtaccatggcccgtgtggggagtatagtgagccctctggtctcaatgaccgccgagctgtatcctagcatgccactatttatatacggagcagtgccagtggcagccagcgccgtgactgtgctcctaccggaaacactggggcaacccctccctgacacagtgcaggacctggagtccagaaaggggaagcagactagacaacagcaagaacatcagaaatatatggtgcccttgcaggcatcggcgcaagagaagaacggtctgtag

SEQ ID NO: 241157 - DNA, 1692 bp, synthetic construct
  misc_feature 1..1692: note = Description of Artificial Sequence: Synthetic coding sequence
  source 1..1692: mol_type = other DNA
atggcgtttaacgacctactgcagcaggtggggggagtgggcagatttcagcaaatccaggtgacactagtggtgctgcctctcctgcttatggcttcccataatacactccagaatttcaccgccgcaattcccactcaccactgtagacccccagcggacgcgaatctcagcaagaacggaggactggaagtgtggttgccacgcgacagacaggggcagcctgagagttgcttgcgcttcacctcacctcagtggggcttgcccttcctgaacggtactgaggctaacgggaccggggcaacagaaccctgtactgacggatggatttatgataattctacattccccagtaccatcgtcacggagtgggatctggtgtgtagccatcgagccttgcgacagttagctcagagtctttatatggtaggcgtcctactcggggctatggtcttcggttacctggccgatcggctgggcaggcgcaaggtgctcattctgaattacctccagacagctgtgagcgggacctgcgccgcatttgcaccaaatttcccaatctactgtgcctttcggttgctgagcggaatggctctagcgggaatctccctaaattgtatgactttgaatgtggagtggatgcctatacatactcgcgcatgtgtaggaaccctcatcgggtacgtgtactccctggggcaatttttgttagcgggagtggcttatgcagtacctcactggcggcacctgcaactgctggtatcggctcccttctttgcatttttcatatattcctggtttttcattgagtccgcccgatggcatagcagctcaggaaggctagacctcactctgcgcgcactgcagagggtcgcgagaataaacgggaagagagaggagggcgctaaactgtctatggaagtcctgcgcgcatcacttcagaaagagctgaccatgggcaagggccaagcgagcgctatggaactgttgaggtgcccaacactgaggcacctgttcctttgtctgagtatgctatggttcgccacaagttttgcctattacgggctggtgatggatcttcagggctttggcgtgtcgatctatctcatccaggtgattttcggagcagtcgacctgcccgctaagctggtggggttcctggttatcaactccctgggaaggcgcccagcccagatggctgcattgttactggccggtatttgtatcctgttgaatggcgtgataccccaggatcaaagcatcgtaaggacgtctctggctgtgctcgggaagggatgcctggccgcatcttttaattgcatctttctctatacaggggagttgtatcctaccatgatcaggcaaacaggaatggggatgggatccactatggccagagtgggctccatagtctcacctttggtctcgatgactgctgagttgtatccaagtatgcccctttttatttacggtgccgtcccagtggcagcgagcgcagtgactgtccttttaccggaaaccctaggccagcctcttcccgacactgtgcaggacttggagagcaggtgggcgcctacccagaaagaggccggtatatacccaagaaaaggcaagcagactaggcagcagcaagagcaccaaaaatacatggtgcccctgcaggcgagtgctcaggagaagaacgggctgtag

SEQ ID NO: 241158 - DNA, 1590 bp, synthetic construct
  misc_feature 1..1590: note = Description of Artificial Sequence: Synthetic coding sequence
  source 1..1590: mol_type = other DNA
atggcctttaacgacctactgttgctgatggcctctcataacacactgcagaatttcactgcagctatccccacacatcattgtaggcctcctgccgatgccaatctcagcaaaaatggtgggctcgaagtttggctgcctcgggatcggcaaggccagcctgaatcttgtctgagatttactagtccccagtggggactcccctttctgaacggcacagaagctaatggcaccggtgccactgagccgtgcacagacggatggatctacgataatagtacattcccttccaccattgtcactgaatgggaccttgtctgttcacatcgggcactccgccagttggctcaatctttatacatggtgggcgtgctcctcggcgctatggtctttgggtatctcgctgacagactcggccgtagaaaggtcttaatccttaattatcttcagaccgccgtctcaggtacatgtgcggctttcgcgccaaattttcctatctactgcgcctttagactcctctctggaatggcactggccggtattagcctgaactgtatgacactcaacgtcgagtggatgccaattcatacacgtgcttgcgtaggcaccttgatcgggtatgtgtatagtctaggccagtttctgctggcaggcgtagcttacgctgtgccacactggaggcaccttcagctcttagtctcagctccattctttgcattctttatttactcttggttcttcattgaaagtgccagatggcattccagttctggcaggctggacctaacgctgcgcgctctccagcgggtcgctcgtatcaatggcaagcgtgaggaaggggctaaactgtcgatggaggttctacgggcttccctgcagaaagaactgaccatggggaaaggacaggcatccgccatggaactgctgcgctgtcccacactgcggcacctgttcttgtgcttgtccatgctctggtttgctaccagcttcgcttattatggcctcgtgatggacttgcagggctttggggtaagcatctacctgatacaggtgatctttggagcagtggatctgccggctaaacttgtgggattcctggttattaactccctcggaaggagaccagcccagatggctgcactgttacttgctggcatttgcatactgctgaacggtgtgataccgcaagatcaatcaatcgtgcgaacgtctctggcggtgctggggaagggttgcctcgctgctagcttcaactgcatctttctttacacaggcgagctctacccaacgatgatcagacagaccgggatgggaatgggctcaaccatggccagagtcgggtctatcgtgtccccactggtgagtatgacggctgaactgtaccctagcatgcccttattcatatacggcgcagtcccggttgcggcaagcgcagtgactgttttgctgccagagacactcggacaacctctgcccgacaccgtgcaagatttagagtcaaggaaggggaagcagactcgacaacagcaggagcaccaaaaatacatggtacccttgcaggcctctgcgcaggagaagaacggtttgtag

SEQ ID NO: 241159 - DNA, 1560 bp, synthetic construct
  misc_feature 1..1560: note = Description of Artificial Sequence: Synthetic coding sequence
  source 1..1560: mol_type = other DNA
atggcatttaacgacctcctgcaacaagtcggaggagtgggtcggtttcagcagatacaggtgacactggtcgttctgcctctcctgctgatggcttctcacaacactctgcaaaacttcactgcggcaatccccacccaccattgtcgaccccctgccgatgcgaatttaagcaagaatggcggtttagaagtgtggcttccacgcgaccgccagggccagcctgaaagttgcttgcgctttacttcaccacaatggggtctgccctttctgaatggtactgaggcaaatggaactggcgctaccgagccatgcactgatggctggatttacgataatagcacattcccttcgactattgttaccgagtgggatcttgtgtgtagtcatcgggctctgaggcagttggcccagtcactttacatggtcggcgtcttattaggagctatggtgtttggctaccttgccgacagactgggcagaagaaaagtgcttatcttgaattatcttcaaacggccgtgagcggcacatgcgctgcatttgccccaaattttcctatttattgcgcttttcgcctgctgtccggaatggcactggctggtatctcactgaactgcatgactctgaatgtggagtggatgcccattcacacaagggcctgcgtgggtactctgataggatacgtgtatagcttggggcagttcttactggctggtgtcgcatatgccgtgcctcactggcgtcacctgcaactgttagtgtcagccccttttttcgcattctttatctactcatggtttttcattgaatccgcgagatggcactcctcctccggtagactagacttgactctgcgtgccttgcaacgggttgctcgaatcaacggcaagcgagaggagggcgcaaaactttctatggaggtgttgcgggcttccttgcagaaggagctgacgatggggaaagggcaggcgtccgcaatggagctgctgagatgcccaacactgcgtcatctgtttctctgcctgtcaatgctgtggtttgcaacatccttcgcctactacggcttggttatggacctgcagggattcggagtgtccatctacttaatccaggtaatattcggggctgtcgacctgccagcaaagcttgttgggttcctcgtgattaactcccttggacgtagacccgcacaaatggccgctctgctgttggctggcatttgtattctgctcaatggcgtcattcctcaggaccagtccattgtcagaacatcgcttgcagttttgggtaaaggatgtcttgcagcctcctttaattgcattttcctctacaccggggagctgtatccaacaatgattcgagcagtgaccgtgttactcccagagactctcgggcaaccactgcctgacacagtgcaggacctagagtcgcgctgggcccctacccagaaggaagcaggtatttaccctaggaaagggaagcagaccaggcaacagcaggagcatcaaaagtatatggtccccctccaggcctccgcacaggaaaagaatggcctttag

SEQ ID NO: 241160 - DNA, 1521 bp, synthetic construct
  misc_feature 1..1521: note = Description of Artificial Sequence: Synthetic coding sequence
  source 1..1521: mol_type = other DNA
atggctttcaatgatctgcttcagcaggtgggaggcgtaggcaggttccagcagattcaagtgactttagttgtcctccccttactgctgatggcatctcacaataccctgcagaatttcacagctgcaattcccacacatcactgcaggcccccagctgacgctaacctctctaagaatgggggacttgaagtgtggttaccaagggatagacagggacaacccgagtcttgccttcggttcaccagtccccagtggggactgcccttcctcaacggcacagaggcaaatggcactggcgctacggagccatgtaccgatggatggatttacgataatagtacattcccttccacaattgtgacagaatgggacctggtgtgtagccaccgggctttgagacagctcgctcaaagcctctacatggtgggggttctccttggggcaatggtgttcggatatctggccgaccggcttggaagaaggaaggtactgattctcaattaccttcagactgccgtgtccggcacctgtgccgcattcgcccctaacttcccaatctactgcgcgtttcggcttttatctgggatggctcttgccggtattagtcttaattgtatgactctgaatgtcgagtggatgcccatccatacgagagcatgtgtcggcacactgattggctacgtgtatagcctcggtcagttcctgctagctggcgtggcctatgctgtgccacattggcgccacctgcagctgcttgtgtccgcacccttttttgcatttttcatctattcctggttttttattgagtctgctagatggcacagctccagcggcaggctggacctcactctccgcgcactgcagcgggtggcccgaataaatgggaaaagagaagagggcgctaaactcagtatggaggtgctgcgggcatccctgcagaaagagttaactatggggaaagggcaagcaagcgctatggagctgctgcggtgccctaccctgcgacatctgttcctttgcctgagcatgctttggtttgccacatcgtttgcatattacgggttagtcatggacctacagggcttcggcgtctccatatatttgatccaggtgattttcggggctgtcgatctgcctgcaaagcttgttggattcctggttattaattcgctgggcagacgccctgcccagatggctgccttactactcgctggcatctgcatcctcttgaacggcgttatcccacaggaccagagcattgtgaggacttcattggcagtgttgggcaaaggatgcctggcggctagcttcaactgtatttttctctacactggcgagctctacccaacaatgattcgcgctgtgaccgtgctgctgcccgagactctcggccagccgctccctgataccgtccaggacctcgagtcaagaaaagggaagcagacaagacaacagcaggagcaccagaaatatatggtacctttgcaagcaagcgcccaggagaaaaacggcctttag

SEQ ID NO: 241161 - DNA, 1620 bp, synthetic construct
  misc_feature 1..1620: note = Description of Artificial Sequence: Synthetic coding sequence
  source 1..1620: mol_type = other DNA
atgggattcgaggagcttcttgaacaggtggggggttttggtcctttccagctgcgaaatgtggctctcctcgctctccccagagttctacttcccctgcattttctgctgcctatattcctggccgctgttcccgctcaccgatgtgcactccctggggctccagccaattttagtcaccaggacgtttggcttgaggcccacctgcctcgggagcctgatggaacgctctcttcttgcctccgatttgcgtacccccaggctctgccaaacacaacactgggcgaagagcggcagtcccggggtgagttagaggatgagcccgctaccgtgccgtgttcacaaggctgggagtacgaccattcagaatttagcagcaccatcgctaccgagtgggacttagtgtgtgaacagaaaggtctaaaccgagccgcaagcacattcttcttcgccggagtgctggttggcgcagttgcctttggatatcttagcgaccgtttcggccgaagacgactcctcctggtggcatatgtatctactctcgtgctaggtctggcatcagccgcttccgtcagttatgtgatgtttgcaataaccagaactcttacaggatccgcacttgccggattcacgatcatcgttatgcctcttgagcttgaatggctcgacgtcgagcaccgcactgtggcgggagtgctgtcttctaccttctggactggcggtgttatgttgcttgcactggtgggttacctgattcgggactggcgatggcttctcctcgctgtgaccctgccctgcgctcccggtatactcagcttgtggtgggtccccgaaagcgcaaggtggctgctgactcaaggccatgtgaaggaagcgcataggtatctgctgcactgcgcgaggttaaacggcagacccgtgtgcgaagacagcttcagccaagaggcagtctcgaaggtggctgcgggtgagcgtgtggtgcgaaggccatcctatctcgatctgtttaggaccccacggctgcgtcacatttctctgtgctgcgttgtggtttggttcggcgtaaactttagttactatggccttagtctggatgtctcaggcctcggcctgaacgtttatcagacccagttactatttggagccgttgagttgccctctaagctgctcgtctatctgagcgtcagatacgctgggaggcgtctgacccaggcaggcacactgctaggcactgcactggcatttgggactaggctgttagtatcctctgatatgaaatcgtggtcaacagtactggcagtgatggggaaagccttctccgaagctgcatttaccacggcatacctgtttacatcagaactgtacccgacagttctacgtcagaccggtatgggattaaccgccctggtgggccgactcgggggaagcctggcccctctggcagcacttctcgacggcgtatggttgagcctccctaaacttacctacggagggatcgctctactggctgcgggaaccgctctgctgctgccggagaccagacaagcacagcttcctgagaccatccaagacgtcgagcgcaagcggtgtgtccatcggactgtgagcgtctatgtgtag

SEQ ID NO: 241162 - DNA, 1647 bp, synthetic construct
  misc_feature 1..1647: note = Description of Artificial Sequence: Synthetic coding sequence
  source 1..1647: mol_type = other DNA
atgggctttgaagaactcctggagcaggtcggagggtttggcccattccagctgcgcaacgtcgcactcctcgccctgcctcgggtgctgctccccctgcatttccttctgccgatttttcttgccgctgtgcccgctcatcgatgcgcccttccaggcgcaccagcgaatttttcccaccaggacgtatggctggaggctcatcttccacgcgagcctgatggcacactgagtagttgcttgcgctttgcctacccacaggcactgccaaacacgacactcggcgaggaacggcagtcgcggggtgagctggaggatgaaccagcaaccgtgccctgtagtcagggctgggaatatgaccattctgaattctcaagtactatagctacagaatcacagtgggaccttgtctgcgagcaaaagggactgaaccgtgcagccagcaccttcttttttgcgggagtgctggtaggcgcagtggcctttgggtatctttccgacagattcgggaggcgtagactgctgctggtggcatacgtaagtacactggtgctcggattagcgagtgctgccagcgtaagctacgtgatgtttgccataacaagaactcttactggaagcgcactcgccggtttcacaatcattgttatgcccttagaactggaatggttggacgtggagcaccggacggtggccggtgttctctcctctacattctggactggaggggtcatgctcctggctttagtagggtatcttattagggattggcggtggctgcttttggctgttacgctcccatgcgcaccagggatcttaagcttgtggtgggtaccggaatccgccagatggctgttgacacaagggcacgtgaaggaggcgcacagatacctactccactgtgcgaggctgaacggtaggcccgtgtgcgaggatagcttttctcaggaggctgtaagtaaggtcgctgctggcgaaagagtcgttcggagaccttcctacctcgacctgtttagaacgcctcgccttcggcacatctctctttgctgcgtggtggtgtggtttggggtgaacttctcctactatggactgagcctcgacgtatctgggctgggattgaacgtgtatcagacgcaattattgtttggagctgtcgagctgccttccaagctattagtgtacctttccgtccgctacgctggcagaagattgacacaagccggaacgttgctgggcactgcattggcctttggaactagactcttggtctcctcagacatgaaaagctggtcaaccgtgctcgctgtgatgggtaaggcattttcagaggccgctttcaccacagcttatctatttacctccgagctttaccccacagtgctgaggcagaccggcatggggctgaccgccctggtgggtcgcctgggtgggagtctggcgcctctagcagctttgctcgatggggtctggctgtcattgcccaaactgacctatggaggcatagccctgcttgcagccggtaccgcacttctgctgcccgagaccagacaggctcagctccctgagaccatccaggatgtggagcgtaaatccgcacccaccagcttacaggaggaggagatgcctatgaaacaagttcagaactag

SEQ ID NO: 241163 - DNA, 1641 bp, synthetic construct
  misc_feature 1..1641: note = Description of Artificial Sequence: Synthetic coding sequence
  source 1..1641: mol_type = other DNA
atgggctttgaagagctgctggaacaagtgggcggatttgggcctttccaactgcgcaatgttgcccttctggcgctgcccagggtactgcttcctctgcattttttattaccaatctttttggcggctgtgcccgctcaccgatgcgccctgcctggcgctccggcaaatttttcacaccaggacgtctggctggaagcgcacctcccacgggagccagatgggacactctcaagctgtcttagatttgcctaccctcaggcattgcccaatactactctgggcgaggaaagacaatcaagaggggaattggaggatgagcctgcgaccgtgccatgttcgcaaggctgggagtatgaccattccgaattcagctcaactattgctactgaatgggatttagtgtgtgaacagaaaggcctgaaccgggctgcttcgacattctttttcgcgggagtcctagtcggtgccgtagccttcggctacttgagcgaccgcttcggtaggcgcagacttctgctggtagcctatgtctcaacacttgtgctgggcttagccagcgccgcttctgtcagttatgtcatgtttgcaataacccgcacacttaccgggtctgccttggcaggttttactattattgtgatgccccttgaactcgagtggctagatgtcgaacaccggaccgttgcaggcgtgctgtctagcaccttttggaccggcggagtaatgttgctggcactggtgggttatttgattcgcgattggcggtggctgctgctggcagtgacattgccctgtgccccagggatccttagcttatggtgggtgcccgaatctgcacgttggctgcttacgcaaggacatgttaaggaagctcacagatatctcctccactgcgccagactgaatggcagaccagtctgcgaggactcattttcacaggaggccgtgtctaaggtcgctgccggtgagcgggttgtgcggagaccatcttatctagacctgttccgaactcctaggctccgccatatcagcctttgttgcgtggtggtgtggttcggagttaatttcagctattatgggttgtcgttggatgttagtggcctgggtctgaacgtctatcaaactcagttactgttcggggctgtggagttgcccagcaagttgctcgtctacctgtcagttcgatatgccggacggaggcttacccaggctggcaccttgttagggactgcacttgccttcggtacgcgcctcttggtgagtagtgatatgaagtcctggtcaacagtactcgctgttatgggaaaggcattcagcgaagctgcattcacaacagcctatcttttcacatctgagctgtaccctacagtactccggcaaacaggcatgggactgacggctctggttgggcgactcggtggcagcttggctcctctggctgccctgctggacggagtctggctgtcgctccctaaacttacctatggtgggatcgcgctgctagcagcgggaacagctctgttattacccgaaacccggcaggcccagttgccagagactatacaggacgtggaacgaaaaagcgcccctacctcgctccaggaagaagagatgcctatgaagcaggttcagaactag

SEQ ID NO: 241164 - DNA, 636 bp, synthetic construct
  misc_feature 1..636: note = Description of Artificial Sequence: Synthetic coding sequence
  source 1..636: mol_type = other DNA
atgctgcagcctcacctcttaccataccaagccgtcagcaaagttgcagccggagaacgcgtggtccgtagacctagttaccttgatcttttccgtactccccgtctgcgccacatctctctgtgttgtgtggtcgtgtggttcggagtcaatttctcttactatggtctctctctggacgttagcggtctagggctgaatgtgtaccagacgcagctgttgttcggagctgtagagctgcctagcaaacttctcgtctacctgtccgtgagatatgcgggacggaggttgacccaggcgggaaccctgctgggaaccgctcttgccttcggcactaggttgctcgtcagttccgacatgaaatcttggagtacagtgttggccgtgatggggaaggccttcagcgaagccgcttttacaacagcgtacctcttcactagtgagctctacccaactgtgctccggcagacaggcatgggactgaccgctctcgttggaaggttaggaggctcccttgccccactcgcggctctcctcgatggagtgtggctgtccctgccgaagctgacctatgggggaattgctctgttggcagccggaaccgcattgctgctccccgagacccgtcaggcttag

SEQ ID NO: 241165 - DNA, 837 bp, synthetic construct
  misc_feature 1..837: note = Description of Artificial Sequence: Synthetic coding sequence
  source 1..837: mol_type = other DNA
atgggcttcgaggagcttctcgagcaggtcggtggcttcggccctttccaattgagaaacgtagccctcttagcgctacctcgagtcctcctgccccttcactttctcctgccaatcttcctggccgctgtacccgctcacaggtgtgcgctgcccggtgcaccggctaatttctcacatcaggatgtgtggcttgaggctcacctgcctcgcgagcccgatggaacactgagttcatgccttaggtttgcataccctcaagctcttcctaataccacactgggagaggaaagacagagtaggggagagctggaagacgaacccgctacagttccttgttctcaggggtgggaatatgaccatagcgagttttcatctactatcgccactgaatcccaggtgggcatctacataatccatctggaggtggagtgtaggtggagacagagtccctgggaggccgctggacgaggtctcccctgggaggaggctgaggccgcaggactcggaagagataaagtaagctactcaccttcttggcgagagtcacttggcggtctgctgtccggaatggagtgggacctcgtatgcgagcagaagggtctaaaccgcgctgctagtaccttcttcttcgctggggtgcttgtgggcgctgtggccttcggctatttatctgatcggtttggcagaagacgcctactcctcgtggcttacgtgagtaccctcgtactgggcctcgccagcgccgcatcggtttcctatgtgatgttcgctattacccgaacacttactgggtctgctctggctgggttcaccattattgttatgccgctgtag

SEQ ID NO: 241166 - DNA, 444 bp, synthetic construct
  misc_feature 1..444: note = Description of Artificial Sequence: Synthetic coding sequence
  source 1..444: mol_type = other DNA
atggaatgggaccttgtgtgtgagcagaaagggctcaaccgggctgctagtacttttttcttcgctggggttctggtcggggcagtcgcctttgggtacttgtcagatagattcgggcgaagacgcctcctgctggtggcgtatgtttccacattggttctgggcctggccagcgccgcaagtgtgagctacgtaatgtttgccataaccagaacattgaccggtagtgccttggcaggatttactatcattgtaatgcccctcggggaagctgaacttgaatggctggacgtggaacacagaactgttgcaggagttctctcgtctacgttttggactgggggtgtcatgctgctagctcttgtgggttatcttatacgggactggcgatggctgttgcttgccgtgacgttgccctgcgcaccgggaatcttgtcactgtag

SEQ ID NO: 241167 - DNA, 1629 bp, synthetic construct
  misc_feature 1..1629: note = Description of Artificial Sequence: Synthetic coding sequence
  source 1..1629: mol_type = other DNA
atgaccttcagcgaaatactggatcgggtggggtcaatggggcattttcagttcttgcacgtagccattcttggtttgcctatcctcaatatggctaatcacaatctgctgcagatttttacggcagcaacccctgtgcaccattgtagacccccacataacgcaagcacaggaccttgggtgctacccatggggcctaatgggaagcccgagcggtgtctcaggttcgttcatcccccaaatgcatccctgcctaatgatacccaaagagctatggagccttgcctcgacggctgggtatacaatagcactaaggatagcatagtgacagagtgggaccttgtatgtaactccaataaactgaaggagatggcacagtctatattcatggcaggaatcctgattggcggtctggtgctcggggacttatcagaccgctttggacggcgacctattctcacgtgtagctacttactactcgctgcgtctggctcaggcgcagccttttctccaactttccccatatatatggtcttccgatttttatgtggcttcggaatctccggcattaccttatctaccgtgattctaaatgtggagtgggtcccaacacgcatgcgcgcaattatgtctaccgcattgggctactgttacacattcggccagtttatcctccccggtctggcctacgcaatccctcaatggaggtggttgcagctcacggtgagcataccgttttttgtgtttttcctgagctcttggtggacccctgagtccatcaggtggttggtgctctccggcaaaagttccaaagccttaaaaatcctccgtcgcgtcgccgtgttcaacgggaagaaagaagagggggagcgactcagcttggaggaactgaagcttaacctgcagaaagaaatatcgctggcgaaagcaaagtacaccgcttcagacctcttccgtatccctatgctgaggcgtatgaccttttgtctatccttggcctggtttgcaactgggtttgcatactatagtcttgccatgggcgtagaagaatttggcgtgaacctatacatcttgcagataatctttggcggagtggacgtgcctgcaaagttcataaccatcctcagcttgagttatttgggacgacacactactcaggcagcggctcttctcctggccggaggagctatcctcgccctcacattcgtgcccctggatctccagaccgtgcgtacagtcctggccgttttcgggaagggatgcctttctagctcatttagctgtttatttctgtatacctcagagctgtaccctaccgtcattcgacaaaccggaatgggggtctctaatctctggacccgagtcggtagcatggtgtcaccgctcgtaaaaattactggtgaggtacagccgtttatacccaacataatttatggcataactgccctgctcgggggatcagccgctctttttctgcccgagaccctcaatcaacccctgccggaaacgatcgaagacctggaaaattggagtctgcgcgctaagaagccaaagcaggagcctgaggtggaaaaggctagtcagcgaattccactgcaaccccacggcccaggcctgggctcatcctag

SEQ ID NO: 241168 - DNA, 1629 bp, synthetic construct
  misc_feature 1..1629: note = Description of Artificial Sequence: Synthetic coding sequence
  source 1..1629: mol_type = other DNA
atgacattttctgaaatcctggaccgggtgggctcaatgggccattttcagttcctgcacgttgccattttagggctgccgattcttaatatggctaaccataacctgcttcagatcttcaccgctgctacccccgtccatcactgccgacccccacataacgcatccaccggcccatgggtactacctatgggtcccaacggaaaacctgagcggtgtctaagatttgtgcatcctccaaatgcttcattgcccaatgatacccaacgggcaatggaaccatgtctcgacgggtgggtgtacaatagcactaaagactcaatcgtgacagagtgggaccttgtctgtaatagcaacaagctaaaggagatggcccagtcaattttcatggccggaatccttattgggggtctggttcttggggatctatcggatagatttggaagacgcccaatcttaacatgctcataccttctgctcgcggcttcgggctcaggagcagccttctcacctacctttcccatctacatggtcttccgattcttatgtggatttggcatctcagggatcaccctcagcaccgtgatcttaaatgtggaatgggtgcccactcggatgcgtgcgatcatgtctacagcccttggctattgctacacgtttggacaattcattttgccgggactggcgtacgcaatcccacaatggcgctggttgcagctgacggtttctatccccttctttgtatttttcctgagtagctggtggacgccagagtctatccggtggttggtcctttctggtaaatcctccaaggctttgaaaatcctccgacgcgtcgctgtatttaacggaaagaaagaggagggcgagaggctgagccttgaagagctcaagctgaaccttcaaaaagaaatttcccttgcaaaggcaaaatacactgcctcagacctctttcggattcctatgctgaggcggatgacattttgcttgtctctggcatggtttgctaccggctttgcatactactcgctggctatgggtgtggaggaatttggggtcaacctgtatatattgcagataatttttgggggagttgatgtcccagccaaatttattaccatactctcactctcctatctgggcagacacacaacacaagccgctgctcttctccttgcgggaggcgcaattctagctctgacattcgtaccacttgacttgcagacagtacgcacggttttggccgtgttcggcaaaggttgccttagctcctccttctcatgcttgtttttgtacacctccgaactttacccgaccgtgattcgccagacgggcatgggagttagcaacctgtggacgcgggtgggttcaatggtttcccctcttgtgaaaattactggcgaggtccaaccctttatcccaaacatcatttatgggatcaccgcgctcctgggagggtcagctgccttgttcctcccagagaccctcaaccagcctcttcctgagacgattgaagatcttgaaaattggtcgttacgggcaaagaagcctaagcaggagccagaagtggagaaggctagccagaggattcccctgcagcctcacggcccaggcctcgggagtagctag

SEQ ID NO: 241169 - DNA, 1587 bp, synthetic construct
  misc_feature 1..1587: note = Description of Artificial Sequence: Synthetic coding sequence
  source 1..1587: mol_type = other DNA
atgaccttctccgagatcctggatagggtgggtagtatggggcacttccaatttctgcatgtggccatcttagggctccctatattgaacatggctaatcactgccgtccccctcataacgcctccacaggcccatgggtgctacccatggggccaaacgggaagccagagaggtgcctccgattcgtccatcctcctaatgcctcccttccaaacgacactcagcgcgcaatggaaccttgcctagacggctgggtatacaatagtacaaaagactctatcgtcaccgaatgggacctggtgtgcaactccaacaaactgaaggagatggcacaaagcatttttatggcgggaattcttattggaggcttggtcctcggcgacctgtctgacaggtttggcaggcgtccaatcctgacctgcagctatcttctgctcgcagcgagcggctcaggcgcagcttttagcccgaccttccctatttatatggtatttaggtttctgtgcggcttcggaattagcggcataactctgagtaccgttatcctcaatgttgaatgggtgcccacaaggatgagagcaattatgagcacagccttggggtattgctacactttcgggcaattcatactccccggtctagcctacgctattccccagtggcggtggctgcagttgactgtctctattcctttctttgtattcttcctgagcagttggtggacacccgagtcaatcaggtggcttgtgttgtccggcaagtcgtcaaaagcgctaaagatcctaaggagggtagccgtgttcaacggaaaaaaggaagaaggcgagagactgtccctggaggagcttaagctgaacctccaaaaagagattagcctcgctaaagctaaatataccgcatctgatctctttagaatacccatgttaagaaggatgacattctgcttgagtctcgcctggttcgcgactggctttgcctactactcactggctatgggcgtggaggagttcggcgtgaatctctatatcttacagattatctttggcggagtggacgtgccggctaaattcatcaccatcctttccctgtcatatctgggcaggcatactacccaagctgccgctttgctgctggccggaggtgcaatcctcgcgttgaccttcgtgcctctggatctgcaaaccgtgagaactgtcttggctgtgtttgggaaggggtgcctgagctccagtttctcttgtctgttcctttatacaagtgagctgtacccaaccgtgatccgccagactgggatgggtgtctctaacctttggaccagggtaggcagcatggtgagcccactggttaagattaccggcgaggtccagccctttatcccaaatattatctatggtatcacagctctgctgggcggtagtgctgccctcttcctgccggagaccctgaatcaacctttgccagagacgatcgaggacctggagaactggtcactccgcgctaagaagccaaagcaggaacctgaagtcgaaaaggcctcccagaggatacccttgcagcctcacggaccagggctgggatcttcctag

SEQ ID NO: 241170 - DNA, 1653 bp, synthetic construct
  misc_feature 1..1653: note = Description of Artificial Sequence: Synthetic coding sequence
  source 1..1653: mol_type = other DNA
atggctttttcaaagctcctggagcaggccggaggtgtagggttgttccagacactgcaggtgcttacctttattctaccgtgcctgatgatccctagtcaaatgctgctcgaaaatttctccgctgctatacccggtcacagatgttggactcacatgctggacaacggatcagccgtgagcacaaatatgacgccgaaagcattgttgactatctccattccccctggacctaaccaaggcccacaccaatgtagacggtttagacagccccagtggcaactcttagaccccaacgcaacggccaccagctggtctgaggctgatacagaaccatgcgtcgacggatgggtttacgaccgctctgtgttcacaagcacaatagtggctaagtgggacctggtgtgcagctctcagggtctcaagccgctctcccagtctatatttatgtctggaatcttggtgggctcatttatctggggtttgctctcatatagatttgggcgtaaacctatgctttcatggtgctgcctgcaattagctgtggcgggaacctcaactatatttgccccaactttcgtgatttactgcggattacgcttcgttgctgcatttggtatggcagggatctttcttagtagtctaacattgatggtggaatggacaacaacgagccgcagagccgtgaccatgaccgtggtgggatgcgccttcagcgccggtcaggcggcactgggtggattggcatttgccctcagggattggaggacactgcagctcgccgctagcgtgccattcttcgccatcagtctgatcagttggtggctgccggaaagcgctcggtggctgattatcaagggcaaacccgatcaggcccttcaggagctgcgcaaagtggctagaatcaacgggcataaggaagctaagaacttgacgatcgaggtactgatgtccagcgtgaaagaagaggtagcttcagccaaggaacctcgtagcgtgttagatcttttctgcgtgcccgtgttgcgttggcgctcttgtgccatgctagtggttaatttctctctcttaatttcctactatgggctggtctttgacctgcagtctctgggcagggatatttttttgttacaggccctattcggtgccgtggattttttgggcagggccacaaccgcactgctgcttagctttctgggtcgtagaacgatccaggcaggttcccaggctatggctggactcgccatcctcgccaatatgttagtgccccaggatctgcagactttaagggtagtttttgccgttttgggaaagggctgcttcggtatttccctcacctgcctgaccatttacaaggcggagctgttcccgactcctgttagaatgacagcggatggtattctccatacagtcggccgtctcggagcaatgatgggacccctgatcctcatgagcaggcaggcactgcccctcctgcctcctctcctgtatggggtgatcagtattgcctcctccctagtcgtactgtttttcctgccggaaactcagggattacctttaccggatacaatacaggatctggagagccagaagagcacagccgctcagggcaatcgacaagaagcagttacggtagagtcgacttcgttatag

SEQ ID NO: 241171 - DNA, 1338 bp, synthetic construct
  misc_feature 1..1338: note = Description of Artificial Sequence: Synthetic coding sequence
  source 1..1338: mol_type = other DNA
atggcttttagcgaactgctggatcttgtaggaggtctgggacgcttccaagttctacagacaatggcccttatggtcagtatcatgtggttgtgtacacagtccatgctcgaaaatttctccgccgctgtgccttctcacagatgctgggcacctctcttagacaattccaccgcccaggcctcgatccttgggtctctgtcccctgaggccctccttgccatcagcatcccaccgggaccaaatcagcgccctcaccagtgtaggcgctttaggcagccgcagtggcagttgctggacccgaatgcaacagctacttcttggagcgaagcagatacagagccctgcgttgacggctgggtgtacgataggtccatttttacttcaacaatcgtggctaaatggaacctcgtctgtgacagccacgcgctgaagccaatggcacagtccatctatttggccggtatactcgttggagctgccgcttgcggccctgcaagcgaccgctggctcgccgagtccgctcgctggcttctaaccaccgggagactggattggggactgcaagagctctggagggtagccgctattaatggcaagggagcggtgcaggatacccttaccccggaagtccttctcagcgcaatgagggaagagttaagcatgggccagcctcctgctagtctgggcacactattgagaatgccaggcctgagatttcgcacctgcatcagtacgctctgctggtttgccttcggattcacattttttggcctggctctggatctgcaggctttagggtctaatatctttctgctgcaaatgtttatcggcgtggtcgacattcccgcaaagatgggggctttgctcttacttagtcacttgggtcggcgaccgacgttggctgcctccttgctattggccggactgtgtattcttgctaatacgttggtcccacacgagatgggtgccttacgaagcgctctggctgttctcggcctggggggtgtgggtgcagccttcacctgtataactatttactcctctgagctcttccccaccgtactccgaatgacagccgtcggattgggtcagatggcggctaggggcggagctattctggggccactcgtgagactcctgggcgttcacggcccatggctcccactgctcgtttatggtaccgtccctgtgctgagcggtctagctgccctattgcttcctgaaacccagagtctgcctttaccggatacaattcaggatgtccagaaccaagccgtcaagaaggcgacccacggcaccctgggtaacagcgtcctgaagtcaactcagttttag

SEQ ID NO: 241172 - DNA, 1662 bp, synthetic construct
  misc_feature 1..1662: note = Description of Artificial Sequence: Synthetic coding sequence
  source 1..1662: mol_type = other DNA
atggcattcagcgaactgctcgatctcgtgggcggtctgggaagattccaggtcctccaaaccatggctctcatggtttctattatgtggttgtgtactcagagtatgctcgagaatttctccgccgcagttccctctcataggtgttgggcccctcttctggataattcaaccgcacaggcatccattttgggctccctgtcacctgaggccctccttgccatttcaatccccccaggtcctaatcagcgcccacatcagtgtcgccgattccggcagccccagtggcagctcttagacccaaatgctacagccacatcatggagtgaggctgacaccgagccttgtgtcgacggctgggtgtatgaccgatcaatctttacttcgaccatagtcgccaagtggaacctagtgtgcgacagccatgcactcaagcctatggcgcagtctatttacctcgctggaatcctcgttggtgctgcagcatgtgggcctgcctcagacaggttcggcaggcgcttggtgctaacctggtcttacctgcagatggccgtaatgggcactgccgcagccttcgcacctgcgtttcctgtgtactgtctgtttcgatttctgctggcctttgctgttgccggagtcatgatgaacacagggactctcctcatggagtggaccgccgcacgggctcgccctctggtaatgaccttgaacagtctgggctttagctttgggcatgggctgaccgccgcagtagcttatggtgtgagagactggacactacttcagcttgtggtgagcgtgcccttctttctctgcttcttatattcttggtggctggctgagtcagccagatggctgctgaccaccggccgactcgactgggggctccaggaactgtggagagtggcagccataaacggaaagggcgcagtccaggacactctcactcccgaggtactgctttcagcaatgcgggaggaattgagtatgggacagcctcctgctagccttgggacgctgctgcgcatgccgggactcaggttccggacatgtatttccacactttgttggttcgcatttggctttacgttcttcggccttgccctcgacctccaggcgctcggaagcaatatcttcctattgcagatgtttataggtgttgtagatattccagccaaaatgggcgctcttttattactgtcacatctcggacgtcgcccaacattagcagccagtctgcttttagcaggcctatgtattctggctaacactctagtgccgcacgagatgggtgccctccggagcgccttggctgtgttaggccttggaggcgttggagctgccttcacttgcattacaatttattccagcgagctgttccccaccgtactgcggatgacagctgtcgggttgggccagatggccgctagaggcggagccatattggggcctctggtgcgccttttgggcgtgcacgggccttggctgcccctcttggtgtacggcacagtgccggtgctttcaggcctggcagccctgctgttgcccgaaacacagtcactccctctgcccgacactattcaggacgtgcagaatcaggcggtcaaaaaggcgactcacggaaccctgggaaactctgtgttgaaaagcacacaattttag

SEQ ID NO: 241173 - DNA, 999 bp, synthetic construct
  misc_feature 1..999: note = Description of Artificial Sequence: Synthetic coding sequence
  source 1..999: mol_type = other DNA
atggaatggaccgcggctagagcgaggccccttgtcatgacgctcaactctctcggtttctcatttggacacggcctgaccgctgcagtggcctacggggtgagggactggactctgctgcagctggtagtgtctgtgccctttttcttgtgttttctgtattcctggtggctggcagagagcgcgagatggcttctcaccaccggacgactggattggggtcttcaggagctgtggcgggtggctgcgataaatgggaagggagctgtacaggatacattaactcccgaggtccttcttagcgcaatgcgcgaagaactcagcatgggccagccacccgcatccctcggtacacttctgcgtatgcctgggcttcgctttaggacatgtatatctacgctgtgctggttcgcatttggctttactttttttgggcttgccctggatctgcaagctcttggtagtaatatatttctccttcaaatgttcataggagtggttgacattccagccaaaatgggggcactgctgctgctgtcccacctcgggagacggccaaccttagctgcttccctgctgctggcaggactgtgcattctcgcaaatacactcgtgccgcatgaaatgggagctctgcgaagcgctctggctgtgctaggtttgggaggggtgggcgctgccttcacttgtattacaatctattccagcgagctctttccaaccgtgctccgtatgactgcggtgggactcgggcaaatggcggcaaggggcggagccatactggggccactggttcggctactgggagtgcacgggccatggctgcccttgctcgtgtacggcactgtacctgtgctttctggattggcagccctactcctgcctgagacccagtctctaccattaccagatacgattcaggacgtacagaaccaggccgtgaaaaaagcgacacacgggaccctgggcaattctgtgcttaaatccacgcagttctag

SEQ ID NO: 241174 - DNA, 1665 bp, synthetic construct
  misc_feature 1..1665: note = Description of Artificial Sequence: Synthetic coding sequence
  source 1..1665: mol_type = other DNA
atgccaaccgttgacgacattctggagcaggtaggcgaatccggctggtttcagaagcaggccttcctcatactatgcctcttatctgccgctttcgctccaatttgcgtcggtatcgttttcctcggatttactccagatcatcattgccagtccccaggcgtcgcggaactgtcccagagatgcggatggtctcccgcagaagaacttaactacactgtacctggcctcggacctgccggtgaggcattcttaggtcagtgccgtagatatgaggtagattggaatcagtcagccttatcctgtgtggatccgctcgccagcttggccactaacagaagtcatctccctctgggtccctgtcaggacggttgggtgtatgataccccaggatcatccatcgtgactgagtttaacctagtttgtgctgattcctggaaattagatctgttccaaagctgcctgaacgccggttttctatttgggagcctgggcgttggttatttcgccgatcgttttggccgaaagttgtgcctgcttgggacagtgttggtcaacgccgtatctggcgtgttaatggctttttcacccaattacatgagcatgttgctatttcgcctgctgcagggactagtatccaagggcaactggatggccggatatactcttatcacggaatttgtgggttctggcagccgtaggaccgtggccattatgtaccaaatggcttttactgttggcctggttgctctgacagggcttgcttacgcgctaccgcactggaggtggctccagctggccgttagcctacctacctttctgtttctgctctattactggtgcgtccctgagtcccctcggtggctgctctcccagaagaggaacacggaggcaatcaaaataatggaccacattgcccaaaagaacggcaagctcccaccggctgatctgaagatgctgagcctagaggaagacgtcactgagaagctgtccccctcttttgccgacttgtttcgcactccccgactgaggaaaaggacgttcatcctgatgtatttatggttcactgactctgtgttgtatcagggtttgatactccatatgggggctacctccggaaacctatatctggattttctttactcagccctcgtggaaatcccaggggcttttatcgcgttaatcactatagaccgcgttggtaggatctaccccatggccatgagcaatctgctcgctggggctgcatgtctggttatgatcttcatatcaccggacctgcattggctgaatattatcatcatgtgcgtgggcagaatgggtatcactatcgctatccaaatgatctgcttagtgaacgcagagttgtatcccaccttcgtgcgtaatctcggagtgatggtgtgctcctcattgtgtgacatcggagggattataactcccttcatagtattcagattgagggaagtgtggcaggcgctcccacttatattgtttgccgtgctgggcctcctggccgcaggtgtaactctattgctgccagagacaaagggggtagcactgcctgagacgatgaaagacgctgagaacctggggcgtaaagctaaacccaaggagaacacaatttacctgaaagtacagacaagcgagccgtccggtacatag

SEQ ID NO: 241175 - DNA, 1005 bp, synthetic construct
  misc_feature 1..1005: note = Description of Artificial Sequence: Synthetic coding sequence
  source 1..1005: mol_type = other DNA
atgttcttcctgctggcattgctttcagcaactttcgcacccatttacgtgggcatcgtgttcctcggctttacgccagaccatcgctgtaggagcccaggcgtggcagagctctctttgaggtgcggttggtccccagctgaggagctcaactacactgtgccgggtccgggacctgctggggaagctagcccgagacagtgcagacgatacgaggtggattggaaccagagcaccttcgattgtgtggacccactggcctcgttggacaccaatcggagccggctacccctcggtccttgccgcgacggatgggtttacgagacacccggatcatccattgttacagaattcaacctcgtctgcgcgaactcctggatgcttgacctgttccagtctagtgtgaatgtggggttcttcattgggtcaatgtcgattggctatattgccgaccgcttcggtcgaaagctgtgtctgttaacaactgtgctaatcaatgctgccgctggtgtgctgatggccattagtcccacctatacgtggatgttaatctttcgtctcatccagggactggtatctaaggccggttggctaataggttatatactcattaccgaatttgtcggaaggagatacaggagaactgtggggattttttaccaagtagcgtacactgtaggcctgcttgtgctggccggtgtggcatacgccctgccccattggcggtggctgcagtttaccgtctcgctgcccaatttttttttcctgctgtattactggtgtatacctgagagccctcgctggttaatctcccagaacaaaaatgcagaagccatgcgcataataaagcacattgccaaaaagaacggtaagtctctgccagcatccctgcagcggctgcggttggaggaggagaccggcaagaagctgaatccaagttttctggacctggtcaggacgccccaaattcgcaaacataccatgattcttatgtacaactggtag

SEQ ID NO: 241176 - DNA, 1668 bp, synthetic construct
  misc_feature 1..1668: note = Description of Artificial Sequence: Synthetic coding sequence
  source 1..1668: mol_type = other DNA
atgccgactaccgtggacgacgttctggagcatgggggtgagtttcacttttttcagaagcagatgttctttctactggcgctgctgtctgccacatttgcacccatatatgtggggatcgtgtttttgggattcacaccagaccacagatgccgaagcccaggtgttgctgaattaagcttgagatgcgggtggtcccccgcagaagaacttaactacaccgtcccaggtcctggtcccgctggcgaagcaagccccagacaatgccggcgatacgaagttgactggaaccaaagtacgttcgactgtgtagatcccctcgcctccctggatacgaatagatcgcggctgcctctaggaccatgccgcgatgggtgggtgtatgaaactcccggatcaagcatcgtgacagaattcaatttggtttgcgcaaatagttggatgctggacctgtttcaaagttccgtaaatgtgggatttttcattggatccatgtctataggttacatcgcagatagattcggcaggaaattgtgcctcctgaccactgtgttaataaatgcggcagctggagtactcatggcaattagccctacctacacatggatgctgatatttcgtcttatccagggcttggtgtccaaggccggttggctgatcggttatattctcatcactgagtttgtgggcaggaggtatcgcagaacggttggcattttctaccaggtcgcctatacagtgggtctgcttgtattagctggcgtggcgtacgccctcccacattggagatggttacagtttacagtgtcattaccgaactttttttttctactgtactactggtgtatcccagaatcaccaagatggcttatcagccagaataaaaatgccgaggccatgagaatcatcaagcacatcgcaaaaaagaatggaaaatcgcttcccgcaagtctccagaggcttagactcgaagaagagactgggaagaaactgaatcctagctttctcgatctggtacggactccgcagatacgcaaacataccatgatcctgatgtacaattggtttacctcaagtgtgttgtatcaggggctcatcatgcatatgggtctggctggggacaatatttacctcgattttttttattcagcactagtcgagttcccagccgcatttatgatcattctgactatagatcgtataggcaggcggtacccatgggctgctagcaatatggtcgccggtgctgcatgcctggcttcggtatttataccaggcgacctgcagtggctaaagattattattagctgtctaggcagaatggggatcactatggcctacgagattgtctgtctggtgaacgctgagttatatcccactttcatcagaaacctcggcgtgcatatctgctcaagcatgtgtgatattggaggtatcatcaccccctttctggtgtatcgcctgactaacatatggctggagctgcccctcatggtctttggtgtactggggttggtcgccggaggactggtcctgctcctccccgagaccaaggggaaggccctgcctgaaacaattgaagaggccgaaaatatgcagaggcctcgaaaaaacaaggagaagatgatttatctgcaggtccagaagcttgacattccgctcaattag

SEQ ID NO: 241177 - DNA, 1632 bp, synthetic construct
  misc_feature 1..1632: note = Description of Artificial Sequence: Synthetic coding sequence
  source 1..1632: mol_type = other DNA
atgcgtaccttgcacgccgtgtcacatccttatagcaacagcatgcgctttcaacgcgtgctttactttatctgtgctttccaaaatatcagctgcggcatccactatctagcaagtgtgttcatgggagtgacgcctcaccacgtgtgtcgccctccgggaaacttgcagaatggcgagatctgggagttatcacggtgcagccgaaacaaaagagagaatacgtcctccctggggtatgagtatactggttctaaaaaagaatttccatgtgtagatgggtatatctatgaccagaacacatggaaaagcactgccgtcacccagtggaaccttgtttgcgataggaaatggttagccatgctgattcagccattgttcatgttcggagtgctcttggggtctgtaacatttgggtacttctccgatcgtcttggtcgcagagtcgttttatgggccactagcagcagcatgttcctgttcggaatagcagccgcatttgctgtggattattatacatttatggccgcacgttttttcctcgctatggtggcgtccgggtaccttgtcgtgggttttgtctatgtaatggagttcatcggcatgaaatctcggacatgggcgtctgtacacctgcactcattttttgccgtgggaacactgcttgtcgcactcactggctacttggtgagaacttggtggttataccagatgattctcagtaccgtaacggtgccttttatcttatgttgttgggtgctaccggaaactccattctggctgctgtctgaggggcgatacgaagaagcccagaaaatcgtggacatcatggccaaatggaatagggcaagtagttgcaagctgagcgagctgctgtcactggatcttcaaggtccagtttcaaatagccccaccgaggtccagaagcataatcttagctatctcttctataattggtccatcacaaagaggacattgactgtgtggctaatctggttcacaggttctctgggtttttactcatttagcttgaattctgtcaacttaggcggaaacgagtatcttaacttatttctgcttggggtggtggagatacctgcttatacattcgtctgtattgccatggataaagtgggccgtcgaacggtgctggcctattctctgttctgttcagctctagcctgcggcgttgtgatggtaattccccagaagcactacatattgggtgtcgtgaccgccatggtcggtaaatttgctatcggagcagcttttggcttgatttatctttacaccgcagaactctatcccaccatagtgagatctctcgccgtgggatcgggctctatggtgtgccgcctcgcatcaatcttggctccgttctctgtggatctgagtagcatctggatttttattccccagctattcgtgggaaccatggctctcctgagcggcgtgctgaccctgaagttgcctgagacactaggaaaaagactcgccacgacgtgggaggaagcagccaaactggagagcgaaaatgaaagcaaatctagtaagctgctcctcactactaacaacagtggcctcgagaaaacagaagcgattacccctagagattctggattaggagagtag

SEQ ID NO: 241178 - DNA, 1734 bp, synthetic construct
  misc_feature 1..1734: note = Description of Artificial Sequence: Synthetic coding sequence
  source 1..1734: mol_type = other DNA
atgggctcacggcactttgaagggatatacgatcatgtgggacactttggacgattccagcgggtcctgtacttcatttgtgctttccagaatatatcctgtggcatacactatcttgcttcagtattcatgggagtcacacctcatcacgtgtgccggcctccgggtaacgtctcacaggtggtgtttcataaccatagcaattggtcactggaagacaccggagcccttctcagcagtgggcaaaaagactacgtcacggtgcagctgcagaacggagagatctgggagctctcgaggtgctcaagaaataaaagagaaaatactagcagcctgggatatgagtacaccgggagcaaaaaggagttcccatgcgtcgatggatatatttacgaccagaatacctggaagtctaccgccgtgacccaatggaatctcgtctgcgacaggaagtggcttgccatgttgatccagcccctgtttatgttcggcgtgctgctcggttctgtcacgtttggctatttttccgacaggttggggagacgagttgtgttgtgggctacttcctctagcatgtttctatttggaattgctgcagcattcgccgtcgattactatacctttatggccgctcgattttttctggctatggttgcttctggttatctggtagtgggcttcgtgtacgtgatggaattcataggcatgaaatcccgcacatgggcatctgtgcacctccactcttttttcgcagtgggaacattgttggtcgcactcacaggatatctagttagaacctggtggctctatcagatgattctcagtaccgtcacggtgcctttcatcttgtgctgctgggtgctgcccgagacccccttttggttactgtccgagggccgatacgaggaagctcagaaaatcgtggacataatggccaagtggaatagagcctctagttgtaaacttagtgaattgctcagtctcgatctgcaggggccagtgagcaatagtcctaccgaagttcaaaaacacaacctatcatacctgttttataactggagcataaccaagaggacgctgaccgtctggcttatctggttcacaggatctctggggttctactccttcagcctgaactccgtcaatctgggagggaacgagtatctgaatctttttcttctgggcgtggttgagattcctgcttacacattcgtatgcattgccatggacaaagttgggaggagaaccgtcttggcatattccttgttctgcagtgcgttggcctgtggagtggtgatggtgattccacagaagcactatattctcggtgttgttacagctatggtcggcaaattcgccatcggagccgctttcggtcttatctatttgtataccgccgagctatatcccaccattgtccggtctctggcggtgggaagcgggagcatggtttgcagactggcaagtatactagcgcctttttcagtggatctatcaagcatctggatatttattccacagctgtttgtgggaactatggcgctcctcagtggcgtactgactctgaagctaccggaaactctgggaaagaggctagccaccacctgggaagaggccgctaagttagagtccgaaaacgagtcgaaatcgtctaaattactgctgaccacaaacaattcaggcttggagaagaccgaggcaatcactcccagagacagcgggttgggtgagtag

SEQ ID NO: 241179 - DNA, 525 bp, synthetic construct
  misc_feature 1..525: note = Description of Artificial Sequence: Synthetic coding sequence
  source 1..525: mol_type = other DNA
atgggagtcacgccccaccatgtgtgtcgcccacctggtaacgtcagccaagtggtgtttcataatcattccaattggtcacttgaagatactggcgctctgctcagctccggacagaaggattatgtgacagtgcagttacagaatggggaaatttgggaattgtccaggtgctcgaggaataagagggagaacaccagctccctagggtatgagtatactggcagcaagaaggagtttccttgcgttgacgggtacatttatgaccaaaacacatggaaatctaccgccgtgacccaatggaatctcgtctgcgatcgaaagtggcttgcaatgttaattcagcccctattcatgtttggggtcttgctgggctctgtcacattcggatacttctccgataggctggggcgacgagtggtgctctgggctactagctcaagcatgtttctgttcggcatcgctgcagcatttgccgtggactattatacatttatggctgctagattcttcctagctatgtag

SEQ ID NO: 241180 - DNA, 804 bp, synthetic construct
  misc_feature 1..804: note = Description of Artificial Sequence: Synthetic coding sequence
  source 1..804: mol_type = other DNA
atgtctgctggccctcaggctatgttgggtaggcgggttgtactgtgggctacgtcttctagcatgttcctgtttggtattgccgcagcctttgccgtcgattattacactttcatggccgctaggttcttcctggccatggtggcaagtggttacctcgtcgtgggatttgtctacgtgatggagttcatcggcatgaagagccgtacatgggcctcagttcacttgcactctttcttcgctgtgggaacactactggtggcactcaccggttaccttgtccggacctggtggttatatcagatgatactatcaaccgttaccgtgccctttatactttgttgctgggtgctgccagagacacctttctggctcctttctgaagggcgttatgaggaggcccaaaaaatagtggacattatggctaagtggaatagggcctcatcatgcaaactgtccgagctgttgtctctggatctccagggcccagtgagcaattccccaaccgaggtccagaagcacaacctcagctatctgttctacaactggtccatcaccaagcgtactctgaccgtgtggttgatttggttcactggttccctgggcttctattcattctccctcaattccgttaacctgggcggaaacgaatatctgaacctatttcttttaggcgtagtagaaattcctgcctatactttcgtatgtatcgccatggacaaggtgggcagacggaccgtgctggcatacagcttgttttgctcagccctggcatgcggggtagttatggtcataccgcagtag

SEQ ID NO: 241181 - DNA, 1056 bp, synthetic construct
  misc_feature 1..1056: note = Description of Artificial Sequence: Synthetic coding sequence
  source 1..1056: mol_type = other DNA
atgggtgtgactccccaccacgtctgcagacctcccggaaacgtgagccaagtcgtattccacaatcattccaactggagcttggaagacacaggagctctgctatccagtggccagaaagactatgtgacagtgcaactccaaaatggagagatctgggagctgtccagatgtagtcgtaataagagagaaaacacgagctcgctcggttacgagtatacgggcagcaagaaagagttcccgtgtgtggacggatacatatacgaccagaacacgtggaagagtacggcagtgacccaatggaatttggtatgcgacaggaaatggctggccatgctgatacagcctctgttcatgttcggggttctcctggggtcagtaaccttcggctattttagcgatcgcttagggagacgagtagtcctctgggccacttcaagcagcatgtttttgttcggcattgccgctgcgtttgccgtagactactacacctttatggccgcacgattcttcttagcgatggtggcatctggttacctggtggtgggattcgtgtatgtcatggagtttataggcatgaaatcccggacctgggccagtgtacatctgcattctttctttgcagtgggcactcttctggtggctctgacgggttacctggtgagaacatggtggttataccagatgatactgtccacggtaacagtgcccttcatcttatgctgctgggtcttgcctgagactcccttctggctactgtcagaaggtagatacgaggaagcgcagaagatcgtggacattatggccaagtggaatcgtgccagttcatgcaagctcagtgaacttctaagtctcgacctccagggcccagtaagcaattcccctaccgaggtacagaagcataatttatcctacctattctataattggtcaattaccaaacggacactcacagtgtggctgatatggttcacaggatccctcggattctacagtttctccctgaatagcgtgaacttggggggaaacgagtacttaaacctgttcttgctttag

SEQ ID NO: 241182 - DNA, 1548 bp, synthetic construct
  misc_feature 1..1548: note = Description of Artificial Sequence: Synthetic coding sequence
  source 1..1548: mol_type = other DNA
atgggctccagacatttcgaaggcatttatgaccatgttggtcattttgggaggtttcagagagtcttgtactttatttgtgcattccagaacattagttgtgggatacattatctggccagcgtgttcatgggagtgacaccacaccacgtttgtcgcccacccggtaatgtgtcacaggtggtgttccacaatcattccaattggtccctggaagataccggtgccctgctctccagcggacagaaagattacgtaactgtccaactgcagaacggcgagatatgggagctctctaggtgttctaggaacaagcgagaaaataccagttctcttggttatgagtacactggtagcaaaaaggaattcccctgcgtggacgggtatatttacgatcaaaacacctggaagagtaccgctgttacccagtggaacctcgtgtgtgacaggaagtggctggcaatgctgattcagccacttttcatgttcggtgtactgctcgggtcagtcacttttgggtactttagtgatcgcttggggcgtcgtgtcgttctgtgggctacatccagttccatgttcctgtttgggatagctgcggcttttgcagtggactactacacgttcatggcggctaggttttttctggccatggtggcttccgggtatttggtggtaggattcgtgtacgtgatggagtttattggcatgaagtcccgtacctgggcctctgtacacctgcactcattttttgccgtcggaacactgctagtagctctgacgggatacctggtgcgcacttggtggctgtatcagatgatcctgagtactgtcactgtccctttcatcctgtgctgctgggttttgcctgagactcccttctggcttttgtcggagggtcgttacgaagaggcccagaagattgtagatataatggctaagtggaaccgtgcctcatcatgcaaattgagtgaattgttgtcacttgaccttcaaggaccagtgtctaattccccaactgaagtacagaagcataacctttcttatcttttttacaattggagcattacaaaacgcacgctgacagtgtggctgatttggttcactgggtcactggggttctacagcttctcattgaactccgttaacctcggcggtaatgagtacctcaacttatttctgctgggcgtagttgaaatccccgcttatacttttgtttgcatagctatggacaaagtcggtcggaggacagtcctcgcttacagtcttttttgttctgctttggcctgtggagttgtgatggtcatccctcagaaacattacatcctgggggtcgtcactgcaatggtaggcaaatttgctataggcgctgccttcggactcatctacctctacaccgccgagctctatcccacgattgtcagaagcttagcagtggggagtggttccatggtctgccgcttggcatccattctcgcccctttttctgtggatttgagcagcatatggatattcatccctcagctgctcgggcagcatctacaggaatag

SEQ ID NO: 241183 - DNA, 1299 bp, synthetic construct
  misc_feature 1..1299: note = Description of Artificial Sequence: Synthetic coding sequence
  source 1..1299: mol_type = other DNA
gactatgtgacggtgcaacttcaaaacggggagatttgggaactgtcaagatgttcccgaaataagagagagaatacatcatcgcttggctacgagtatacagggagtaagaaggagttcccttgcgtggacgggtacatatacgaccagaatacgtggaaaagtacagcagtgacccagtggaacctggtatgtgataggaagtggctggccatgctgattcagcccttatttatgttcggggtgctattaggcagcgtaacctttggttatttctctgatcggctgggccgaagagtggttttatgggcaacctcttcttcaatgttccttttcggtattgctgcagcttttgccgtggactactatacgttcatggcagctagattcttcctcgcaatggtggccagtggctatctcgtggtcgggttcgtgtacgtgatggaatttatcgggatgaagtctcggacgtgggcaagtgtgcacctgcactcttttttcgctgtcggcacactccttgtggccttgaccggctacttggtgcggacctggtggctgtaccaaatgatattgtccacggtgactgtcccctttatcctctgctgctgggtcctcccagaaacaccattctggttgctctccgaagggagatacgaggaggcccagaaaattgtagacatcatggccaaatggaacagggcgagttcctgcaaactgagcgagttgctatctctcgatctgcaaggccctgtgtctaactcccccactgaggtgcagaaacataatctcagctacctgttttacaattggtcaattacgaagcgaactctgacggtttggctcatctggttcactggctcattgggattctactctttctctcttaatagcgtgaatttggggggtaatgagtacctcaacctctttcttctgggggtggtggagataccggcatacaccttcgtgtgcatcgcgatggataaggtgggcaggaggactgtgctcgcatactccctgttctgttcagcactggcttgcggagtggtgatggtgatccctcagaaacattatattttgggagtcgtgacagcaatggtggggaagtttgcaataggggcagccttcggcctgatatacctgtatacagcggaactgtatcctacaattgttaggtcactggccgttggcagcggatcaatggtttgccggctggctagcattctagccccattcagcgttgatctgtcttcgatatggatcttcatccctcagttacttgggcagcaccttcaggaatag

SEQ ID NO: 241184 - DNA, 600 bp, synthetic construct
  misc_feature 1..600: note = Description of Artificial Sequence: Synthetic coding sequence
  source 1..600: mol_type = other DNA
atggggagccgccacttcgagggaatctacgaccacgtgggccacttcggtcggttccaacgtgtattatattttatctgcgcatttcagaatatcagttgtggcatccactatctggcgtcagtgttcatgggcgtgacaccgcaccacgtgtgccgtccccctggcaatgtctcccaggtggttttccataaccatagcaactggtctctggaggacacaggcgctcttctatcatccggccagaaagattacgtgacagtccagctccagaacggagagatttgggaattgagcagatgttcccgaaacaaaagggagaacacaagctccttgggttatgagtacaccgggtccaagaaggagttcccctgtgttgatgggtacatttatgatcagaatacatggaaaagcacagccgtcacccaatggaacctcgtatgtgatcgcaaatggctggccatgttaatccaacctctgtttatgttcggcgtgctgctggggtctgttaccttcggatacttttccgacagagtgggttttctgacagcctggtataaaaccagtggtttccccacatcaagcgcccctcccctttag

SEQ ID NO: 241185 - DNA, 1674 bp, synthetic construct
  misc_feature 1..1674: note = Description of Artificial Sequence: Synthetic coding sequence
  source 1..1674: mol_type = other DNA
atgcgagactatgacgaagtgaccgccttccttggtgagtggggaccttttcagaggctgatttttttcctactatctgcatctataatccctaacgggtttacaggcctgtcgtccgtcttcttgatcgccaccccagaacaccgctgccgagtccccgacgctgccaatctgtccagtgcatggcggaatcatactgtgcctctgaggctgcgcgacggcagagaggtgccgcacagctgtcgcaggtataggcttgcaactatcgctaacttctctgctttaggtctggaacctggtagagatgtggatctaggacagctagaacaagagtcatgtctggacggctgggagttttcacaagatgtgtacctgtcaaccatcgttaccgagtggaatttggtttgtgaagacgattggaaagcgccactgaccattagtctgttctttgtcggggtactgctgggaagttttattagtggccagcttagcgaccgtttcgggagaaagaacgtgttgttcgtgaccatggggatgcagactggcttttctttcctccagattttctcgaaaaatttcgagatgttcgtggtgctgttcgtgcttgtcggaatgggccagatctccaattatgtggctgcctttgttcttggcaccgagatcctcggcaagtctgtgaggattatattttctactctcggtgtatgcattttttacgctttcggatatatggtcttgcccctctttgcctattttatcagagactggcggatgctgttggtcgccttgactatgcctggggtgctgtgtgtggctctttggtggttcataccggaatcaccccgatggctgattagccagggcagatttgaagaggctgaagtaattattaggaaggctgccaaagccaacggaattgtcgtcccttctactatattcgacccttccgaactacaggacctgtcctcaaagaaacagcagtcacacaatattctcgatctgttgcgtacctggaatatccgaatggtgaccatcatgtccatcatgttgtggatgactatcagcgtgggatattttgggttgagcttagatactcccaacttgcacggcgatatcttcgtgaattgtttcctatcagcgatggttgaggtgcccgcatatgttttagcctggttactcctgcagtacttgccgcgaaggtatagtatggccactgccctctttctggggggttctgtgctgttatttatgcagctagtcccgcctgatctttattatctcgcaacggttctcgtaatggtgggcaagtttggagtcaccgctgccttctccatggtgtacgtttacacggccgaattataccccacagtagtgcgcaatatgggcgtgggtgtatcttcgacagcttctcggttagggtctattctgtctccatacttcgtctacctgggtgcttatgatcgatttttgccttacattctgatggggtcactgaccatcctcactgcaattctgactctgttcctgccagagtcctttggtacccctttacccgatacaatcgatcaaatgcttcgcgtgaaggggatgaaacacagaaagacccccagtcacacgcgcatgcttaaggacggtcaggaaagaccaactatcctcaagagcacagcattctag

SEQ ID NO: 241186 - DNA, 1746 bp, synthetic construct
  misc_feature 1..1746: note = Description of Artificial Sequence: Synthetic coding sequence
  source 1..1746: mol_type = other DNA
atgcgcgactacgacgaggttactgctttcctaggcgagtggggcccattccagagactgatcttctttctgctgtcagcatctataattcccaatggatttacgggtctctctagtgtctttctgatcgccacacccgaacaccgttgccgggtgcccgatgctgcaaacctgagcagcgcttggagaaatcatactgtccctctgaggctcagggacgggcgagaagtgccccattcttgtcgaaggtatcgactcgccacgattgccaacttctcagccctaggcttggagcctggcagagatgtggacctggggcagcttgaacaggaaagctgtctggatggctgggagtttagccaggatgtatatttgtccacgattgtaactgagcaggattcaggcgcatataacgcaatgaagaacagaatgggtaagaagcccgctctgtgtcttcctgcgcagtggaacctggtgtgcgaagacgattggaaggctccccttacaatttctcttttcttcgtgggggtcttgcttggtagtttcatatctggccagctgtctgatcggttcggaagaaaaaatgtgctttttgttaccatgggaatgcagaccggcttcagttttctgcagatatttagcaaaaactttgaaatgtttgtggtgcttttcgtgttagttggtatggggcaaatctctaactacgtggccgcattcgtgcttggcacagagatccttgggaaatcggtgcgaataattttctctactctcggggtatgcatcttctatgctttcggatacatggtgctgcccttatttgcatatttcattcgggattggcgcatgctcctggtcgctctcactatgcctggtgtgctctgtgttgctctgtggtggtttattcctgaaagccctcgctggctgattagtcagggacgattcgaagaggccgaagtaataataagaaaagctgcaaaggctaacgggatagttgtgcccagcactatattcgatcctagtgaactgcaagacctgagctccaaaaagcagcagtcccataatatcctggatctgctgcggacatggaacatcaggatggtgacaatcatgtctatcatgctgtggatgacaatctctgtgggctactttggtctgagcttggacacccctaacctgcacggggacatattcgtcaattgtttcctctctgcaatggtggaagtgccggcttacgtgctggcatggctgcttctgcagtacctgccaaggagatactctatggcaacagccctgttccttggcggaagcgttttgctgtttatgcaattagtaccacctgatctgtactatctggccaccgtgttggttatggtggggaaattcggggttaccgccgcattctccatggtctacgtgtatacagctgagctttaccctacagtggtccgaaatatgggcgtgggagtcagctccactgccagccggcttgggagtatcctctcgccatactttgtgtatctgggtgcatacgaccgcttcctgccgtatatacttatgggttccctaactatcctgacggccatcttaaccctctttttacctgagtcctttggaacaccactgccagacaccatcgaccagatgctgcgggtgaaggggatgaagcacaggaagacacctagccatactcggatgttaaaggacggacaggagcggccaactatcttaaaatccacagctttctag

SEQ ID NO: 241187 - DNA, 1656 bp, synthetic construct
  misc_feature 1..1656: note = Description of Artificial Sequence: Synthetic coding sequence
  source 1..1656: mol_type = other DNA
atgcgcgactacgacgaagtgattgcgttcctgggagagtgggggccattccagagactgatcttttttttgctcagcgccagcatcatcccaaatggctttaacgggatgtctgtggtgtttctcgccggaacaccggaacataggtgtcgcgtacctgacgccgctaacctgagtagtgcttggaggaacaatagcgtcccactgagactgagagacggcagggaggtccctcactcctgcagcaggtatcgcctggctaccattgcaaatttctcagcactcgggctcgaacccggaagagacgttgacctcggccagctagagcaggagagctgcctggacggctgggaattctcgcaggacgtatatttgagcactgtggttactgaatggaatcttgtatgcgaagacaactggaaggttccattgacaacatcactgttttttgtgggagtcctgttgggcagcttcgtgtctgggcagctgagtgatcgatttgggcgtaagaatgtgttattcgccaccatggcagtccagactggctttagctttttacagatcttttccatcagttgggaaatgtttactgtgctatttgtcattgtgggcatgggacagatcagtaactatgtggtggccttcatcctgggtaccgagattctgggaaagtctgtcagaatcatattttctacacttggtgtgtgtacgttcttcgccgtggggtatatgctgttaccgctgtttgcctacttcattcgggattggaggatgctgctacttgcgctgacagtgcccggtgtgctgtgtgtccccctgtggtggttcattccagaatcccccaggtggctgatctcccagagaaggtttcgcgaggcggaggatattattcagaaggcagctaagatgaacaacattgcagttcccgcagtgattttcgatagtgtggaggagctgaaccccttgaagcagcagaaggcgtttatcctcgacctcttccgcacgcgtaacattgctatcatgaccataatgagtctgcttctgtggatgctcacctccgttggctatttcgctcttagcctcgacgctcctaacctgcacggggacgcttacctaaattgtttcctcagcgcattaattgaaattccagcctacatcacagcttggctgctgctgaggacattacctaggagatacattattgcagccgttctgttctggggcggaggcgtgctgctgtttatacaattagttccggtcgattactacttcctctccatcggcctggttatgctgggcaagtttggtattacgtcagctttcagtatgctctatgtgtttaccgcagaactctaccctaccctagtgcgtaacatggcagtcggggtcacctctactgcatccagggttggtagcataatagccccttatttcgtatacctgggggcttataatcggatgcttccctatatcgtcatgggctcattgaccgtcctcataggtattctcacccttttctttccggaatcgcttggaatgacccttccagagaccttggagcaaatgcagaaagtgaaatggttccgatctggaaagaaaacacgcgacagcatggaaaccgaggaaaatcctaaagtgcttatcactgctttttag

SEQ ID NO: 241188 - DNA, 1656 bp, synthetic construct
  misc_feature 1..1656: note = Description of Artificial Sequence: Synthetic coding sequence
  source 1..1656: mol_type = other DNA
atgggctttgacgtgctgctggatcaggttgggggaatggggagattccagatttgcttaattgccttcttctgtatcactaatattctcctgttcccaaatattgttcttgagaactttaccgccttcacaccgagtcaccgctgctgggttcctctgttggacaatgataccgtctctgacaatgacactggaacactgagcaaggacgacctgctaagaataagtattcccttggacagcaatctaagaccacagaagtgccaaagatttattcatcctcagtggcagctgctccatctcaatggcacatttcctaataccaacgagcctgacaccgagccgtgcgttgacggttgggtctacgaccgatcttcttttttgtcaaccatcgtcactgagtgggatttagtgtgtgagtcccagtctctgaaaagcatggtccagtccttgtttatggccggtagcctacttggaggactgatttacggccatctatccgacagagtcggacgcaagatcatctgtaagttgtgttttctccagctggccattagtaacacatgcgccgcttttgcaccaacatttctggtatattgtatcctacggttcctggccggttttagcactatgaccatactcgggaacacatttattctaagtctggaatggaccttgccacgttccaggtccatgaccattatggtgttgctatgctcatactccgtcggccaaatgctgctaggcggtcttgccttcgccattcaggattggcatatcctgcaactgacagtttctacacccatcatcgtgttattcctgtcttcctggaaaatggtcgaatctgcacggtggctcatcatcaacaaccaactagatgaagggttgaaagagctccgcagggtcgctcatattaatggcaagaagaacacggaagaaacgctgaccacggaattggtgcggtctactatgaagaaagagcttgacgccgtcagaatcaagacttctatcttctccctctttagagctccaaaactcagaatgcgcgttttcggcctgtgtttcgtgaggtttgccatcacagtccccttctacggcctgatcctgaatctccagcatctaggctctaacgtaagcctgttccaaattctgtgcggggctgtgacattcactgcccgatgtgtttctcttctaactctgaatcatatgggtcgcaggatttcccagatcctgttcacattccccgtcggcctttttatcctggttaatacatttttaccccaggagatgcagatcctaagagtggtgctggctactcttgggataggctccgtaagcgcagcctcgaattccgcctctgtgcaccataatgaattggtccccaccatcctgaggtccaccgtcgccggtattaacgctgttagtggtaggaccggggctgccttggcacccttgctaatgactctcatggcctactcgccgcatcttccgtggatatcctatggagttttccctattctcgcggtgcccgtgatactcttgttgccagaaacgcgcgatctgcccctacccaacacgatccaagacgttgagaacgagaaggactctaggaatataaagcaggaggatacatgtatgaaagttacgcagttttag

SEQ ID NO: 241189 - DNA, 738 bp, synthetic construct
  misc_feature 1..738: note = Description of Artificial Sequence: Synthetic coding sequence
  source 1..738: mol_type = other DNA
atggaggttgaagaagcattccaggcagtgggcgagatggggatataccagatgtatctctgttttctcctggcagtcctgctgcagttgtatgtggctactgaagcaattttgatcgcattagtgggggctacccctagttatcactgggacctggccgagctcctacccaaccagtcccatggcaatcagtccgctggggaagatcaggcttttggagattggctgttgacagctaacgggtcagagatccacaagcatgttcattttagctctagttttacatctatcgccagcgaatggttcctcattgctaatcgcagttataaggtgagtgcagcatctagtttttttttttccggagtattcgtgggagtgatttcatttggccagctctctgaccggtttgggaggaagaaagtgtatttgacaggattcgcgttggatattctgttcgctatcgcgaacgggttctccccatcctacgagttttttgccgtaacacggttcctggtcggcatgatgaacggcggaatgtcattagtcgcgtttgtgctgctgaacgaatgcgttggtaccgcatattgggcccttgccggtagcataggcggtctgttcttcgccgttggcattgctcagtacgcccttctgggatatttcatccggtcctggcgtacgttggctatactcgtcaacttgcaaggcactgtagtattcctcctctcccttgttgactag

SEQ ID NO: 241190 - DNA, 1644 bp, synthetic construct
  misc_feature 1..1644: note = Description of Artificial Sequence: Synthetic coding sequence
  source 1..1644: mol_type = other DNA
atggaggttgaagaggcattccaggcggtaggggaaatgggaatctatcagatgtacctgtgcttccttctcgcggtgctcctccaactgtacgtggctactgaggcaattttgatcgccctggtcggggctacccccagctatcactgggacctggcagagcttttacccaatcagagccacggaaatcagtcagcaggcgaggaccaggcctttggtgactggctattaaccgcaaacggaagcgaaattcacaaacacgtgcatttttcatcctcatttactagtatagcctctgaatggtttttaatcgcaaacaggtcatataaagtttcggctgcttcatcctttttcttttccggggtgtttgtgggcgtaatctcctttggtcaattgtctgatcgttttggtcgcaagaaggtctatctgacgggtttcgctttggatatcctgtttgctatcgcaaacggcttttcaccatcatacgagttctttgccgttacaagatttctggtcggaatgatgaacggcggtatgagtctggtggctttcgtcctcctaaatgaatgtgtgggaaccgcatactgggcattagcaggatctataggaggcttattctttgcagtcggaatagcacagtacgccctgctggggtactttatcagaagctggcgcaccctggctatcctcgttaatcttcaagggaccgtggtgttcctgctatcactgttcatacccgagtccccaaggtggttgtattctcagggcagactgagcgaggccgaagaggcactgtatctgattgcgaagagaaatcgcaaactgaagtgtacattcagcctaactcatccagcaaataggagttgcagggaaacaggctcatttctggatttgttcagataccgtgtgctgctgggtcacacactgattctaatgtttatatggttcgtgtgttcactagtgtactacggcctgacattgtccgctggggacttaggtggaagcatctatgccaatctggctctgagtggcctgatcgaaatacccagttatccactgtgtatctacctgataaatcagaagtggttcggcagaaagaggaccttgtccgccttcctctgcctcgggggattggcctgtttgatcgtgatgtttctgccagagaagaaagacacaggcgtgtttgcggtcgttaacagccacagcttgagtctgcttgggaagctgactatctccgcggctttcaacatcgtgtacatttacacatcagagttgtacccgacagtgatccgaaacgtaggcctgggtacctgtagcatgttctctagggtgggtgggatcatcgccccattcatcccctccctcaaatatgtgcagtggagcctgcccttcatcgtgtttggggctactggcttgacatctggactgcttagcctattattacctgaaactctgaacagtccactattggagaccttcagcgacctacaagtctatagttatcgaagactcggggaagaggccctgtccctgcaggccctggaccctcagcaatgtgtcgacaaagaatcctcactggggtcagaatccgaagaagaagaggagttctacgatgccgatgaggaaacacaaatgatcaaatag

SEQ ID NO: 241191 - DNA, 1008 bp, synthetic construct
  misc_feature 1..1008: note = Description of Artificial Sequence: Synthetic coding sequence
  source 1..1008: mol_type = other DNA
atgcccgctgtgctgggatttgaaggctcagctaataagatcggtgtgggcgtggtgagagacgggaaagttctcgccaaccccaggaggacgtacgtgacgccccctggcacaggcttcctgcctggagatacagcccgtcaccaccgcgctgtgattttggatctgctgcaagaggcactgaccgagtctggactgactagccaggatattgattgtatcgcatatacaaagggcccagggatgggcgcaccactggtctctgtggccgtcgttgctagaactgtggcccaactatggaacaagccgctcgtcggcgtaaatcactgcatcggacacatcgaaatggggaggctgatcacaggggctacatccccgaccgtattgtatgtgagtgggggaaacactcaggtcatagcttatagcgagcacagataccgaattttcggggagactattgacatcgctgtcggtaattgcctcgatcggttcgcacgcgttttgaaaatttccaatgatccttcccccggatacaacatcgagcagatggccaaacgagggaagaaactggtcgagcttccctacactgtgaaaggtatggacgtgagcttctccggcattttgagttttatagaagacgttgcacatcgcatgctagccacaggtgaatgcaccccggaagatttatgtttctcactgcaggagactgtgttcgctatgcttgtggagatcactgaacgagccatggcccactgtggcagtcaggaggcccttatcgttggcggtgtgggatgcaatgtgcgtttacaagaaatgatggccactatgtgtcaggagagaggcgctaggctttttgctactgacgagagattctgcattgacaatggggctatgatcgcccaggccggatgggaaatgtttagagccggtcaccggacaccactgagtgacagtggagtgacacagcgctatcgaaccgacgaggtggaggtgacctggagggactag

SEQ ID NO: 241192 - DNA, 1563 bp, synthetic construct
  misc_feature 1..1563: note = Description of Artificial Sequence: Synthetic coding sequence
  source 1..1563: mol_type = other DNA
atggccagcgatcccatattcactcttgccccacctctccattgtcattacggggcttttccccctaatgctagtggatgggagcagccacctaatgcttcgggtgtcagcgtcgccagtgctgcactcgctgcgtccgcggcatcccgcgtagcgacttctacggatccctcttgctctggattcgccccaccagattttaaccattgcctgaaggattgggattacaatggcctcccggtgctcaccaccaacgccatcgggcagtgggatctggtatgtgatcttggctggcaggtgatcctggaacagattctgtttattcttgggttcgcaagtggatatctgtttctgggttatccagctgaccggttcgggagaaggggaattgtgctgctgaccctgggacttgttgggccatgcggcgtggggggagccgcagccggttcgtctaccggagtcatggccctgcgttttctgctgggcttcctactggctggggtcgacctgggcgtctaccttatgcggctggaactgtgtgaccctactcagcgactgcgggtggcactagccggtgagttggttggagttggcggtcattttctgttccttggcttagccctcgtttctaaggattggaggtttctgcagagaatgatcacggccccttgtatcctgttcctgttttacgggtggccaggactgtttttagaatcagcccgttggctaatcgtgaaaaggcagatcgaggaagctcaatctgtcctcagaattctggcagaacgcaacaggcctcatggtcagatgctaggtgaggaggcacaagaggcactccaggatctggagaacacttgccctctgccggcaaccagttctttcagcttcgcaagcttgctgaactataggaacatctggaaaaatctgttgatcctgggtttcaccaatttcatagcacacgccatcaggcattgttatcagcccgtcgggggaggaggcagcccgagtgatttttacctgtgcagcctcctcgcaagcggaactgccgcactggcatgtgtcttcctgggggtaacagtggacagatttgggcgtcgtggcatcctcctgctgtccatgaccctgactgggatcgcctccctggtgctgcttgggctttgggactatctgaacgaagccgcaatcacaaccttttcagtgttaggtttatttagtagtcaggccgctgcaatcctatcaactctcctcgcagctgaggttatcccaactacggtgcgcggtagaggactcgggctgatcatggcgcttggcgcactcggcggtctctcgggccctgcccagcgcctgcatatgggacacggcgcatttctccagcacgtcgtgctggcagcttgcgcccttttgtgcatcctttccatcatgctgctgcccgaaaccaagagaaaactacttcccgaggtcctgcgagatggggaactttgtcgcagaccttccctgttgcgtcagccacctcctactcgctgtgaccacgtgcctctactggcgactcccaatcccgcactatag

SEQ ID NO: 241193 - DNA, 1617 bp, synthetic construct
  misc_feature 1..1617: note = Description of Artificial Sequence: Synthetic coding sequence
  source 1..1617: mol_type = other DNA
atggcatcagatcctatatttacgctggcccctcctctgcactgtcattatggcgcattccctccgaatgctagcggttgggagcagccaccaaacgccagtggcgtgagcgtggcatccgcagccctggccgcttccgctgcctccagagtggcaactagcacggacccaagctgttccgggttcgccccaccggactttaaccactgtttgaaagactgggactacaacggccttccagttctaaccacaaatgccatcggccagtgggatttggtgtgcgacctgggctggcaggtcattctggagcaaatcttattcattttggggttcgctagtggctatttgttcctgggctaccccgctgaccggttcggtagacggggtatagttctgttgacattaggcctggttggcccttgtggcgtcggaggtgctgcagctggttcttcgacaggagtgatggccctgcgctttttgcttggctttcttctggctggggtcgacctcggggtgtatctgatgaggctagagctctgcgaccctacacagcggttgcgggtagcactagccggagaattggttggcgttggaggccattttctctttcttggactcgcactggtgagcaaagactggcgctttttacagcgcatgatcactgcaccttgcattctatttctgttctacggttggcctgggctgttcctggaaagtgcacggtggctcattgtgaagcgccagattgaagaggcacagtccgttctgagaattctggccgaaagaaataggccccacgggcagatgctgggggaagaagcccaggaagcactccaggacctcgagaatacttgccccctgcccgctacatctagtttctccttcgctagtctgttgaattataggaatatctggaaaaatctcctcatcctgggttttacaaactttattgctcacgccatcaggcactgttaccaaccagtaggtggcggaggtagtccgtccgatttttacctctgctctctcctcgcaagtggaactgcagcattggcatgcgtgtttcttggtgtcacagtggacagatttgggaggcggggtattctcctgctgtccatgaccctgactggcatcgcttctctcgtgctcttaggcctttgggattgcgagcacccgatctttcctacagtgtgggctcaacagggaaatccaaatagggatctgaatgaagctgctatcaccacctttagtgtgctaggattattcagctcgcaggcagccgcaattttatcaacactcctggcagcagaggtcattcccacaactgtgaggggccgaggactgggcctaattatggccctgggcgcactcggcggactcagcggccctgcccagagattgcacatgggtcacggagctttcctacaacacgtcgtgctcgccgcatgtgccctgctgtgcatcctctctatcatgctcttacctgagaccaagcggaagctgttgcccgaagtcttacgcgatggagaactgtgtagaagaccctctctgctcagacagcccccaccaaccaggtgcgaccacgttcccctgctggccacgcctaatcctgccctctag

SEQ ID NO: 241194 - DNA, 1086 bp, synthetic construct
  misc_feature 1..1086: note = Description of Artificial Sequence: Synthetic coding sequence
  source 1..1086: mol_type = other DNA
atggccatcgatagaaggcgcgaggccgcaggaggcggacccggacgccagcctgcacccgctgaggaaaacggcagtctgccaccaggcgacgcagcagccagtgcacccctgggaggtagagccggacctggaggcggagcagaaatccagccactgcctccattgcatcctgggggtgggccacatcccagctgttgctccgcggctgctgctccatccctcctgctcctggactacgacggctccgtactgccgttcctgggtggcctgggagggggttaccaaaaaacactggtgctcctgacgtggatacccgctttgtttattggcttctcccagtttagtgattctttcttgctcgatcagcctaatttctggtgtagaggagcagggaagggcacagaactggccggagtcacaaccactggtcgaggcggagacatgggaaattggacttcactgccaactacaccatttgcgacagctccttgggaagctgcagggaatcgttcaaactctagcggcgctgatggcggtgacacaccacctctgccctctccaccggacaagggcgataatgccagtaactgtgattgtcgggcttgggattacggcattagagccggactggttcaaaacgtggtgtcaaagtgggaccttgtgtgcgataacgcatggaaggttcacattgctaagtttagcctgctggtaggtcttatctttgggtatctgattaccggatgcatcgcagactgggtgggtagaaggcctgttctgctttttagcatcatctttatactcatttttgggctgactgtagccctgtctgtgaacgtaacaatgttttctacactgcgtttctttgagggcttttgcctggcaggcattatcttgaccctctatgcgctccgcattgaactgtgccctccaggcaaacgtttcatgatcactatggtggcctcttttgtggcaatggcaggtcagttcctgatgccgggtctcgctgccctgtgtagagattggcaggtgctccaggcattgattatctgcccctttctcctaatgttgctgtattggtcatag

SEQ ID NO: 241195 - DNA, 1218 bp, synthetic construct
  misc_feature 1..1218: note = Description of Artificial Sequence: Synthetic coding sequence
  source 1..1218: mol_type = other DNA
atgttttctaccctccgcttcttcgaaggcttttgccttgcgggaatcatcctgaccttatatgccctcagaattgagctgtgcccccctggcaaacgctttatgatcacaatggtggccagttttgtcgctatggccggtcagttcctgatgcccggactggccgcactgtgtcgcgactggcaggtgctgcaggccctgattatttgcccgttcctgttgatgctgctctattggagtatttttccagaaagtctcaggtggctgatggctacgcagcagtttgaatccgctaagcgtctgatattgcattttacacagaagaatcgcatgaatccggagggcgatatcaagggcgtcatcccagagctggagaaagagctgagccggcgacccaaaaaggtttgtatcgtgaaggtcgtgggcactaggaatctgtggaaaaatatcgttgtcctgtgtgtgaatagcctgaccggatacgggatacaccattgctttgcacggtccatgatgggacacgaggtgaaggtaccccttctggaaaatttttatgccgattactacaccactgcaagcattgccttggtgtcctgcctggctatgtgtgtcgtggttcgctttctggggcgtaggggtggactgcttctctttatgatattaacagcgttagctagccttctgcagttgggcttacttaacctgatcggaaagtatagtcaacaccccgatagcgggatgtcggacagcgtgaaggacaaattttccattgcgttctctatagtgggaatgttcgcctcccatgccgtaggtagtttatctgtttttttctgcgctgagattacccctaccgtgattaggtgtggaggcctgggactggtcctcgcctcagctggctttggaatgctcaccgcccctattatcgaactccacaatcagaagggctacttccttcaccatatcatatttgcctgctgtaccctgatttgtatcatctgtatcttgctgttgcctgagtctagggatcagaacttgcctgagaatatttccaacggcgagcattatacaaggcagcctttgctgccccacaaaaaaggagagcagccgctgctgctcactaacgccgaactcaaggattatagcggtctccatgatgccgcagcagctggcgataccctacccgagggagctaccgccaacggcatgaaggcaatgtag

SEQ ID NO: 241196 - DNA, 2061 bp, synthetic construct
  misc_feature 1..2061: note = Description of Artificial Sequence: Synthetic coding sequence
  source 1..2061: mol_type = other DNA
atggccatcgaccggagacgggaggctgccggtggaggaccaggaaggcagccggctcctgcggaagagaatggttcccttcctccaggggatgccgcagcctctgccccactaggaggcagagctggtcctggtggtggggctgagattcaaccactgccccctctgcatcctggtgggggtccccacccttcttgctgttccgcagccgcagctccttccctgcttttactcgattacgacggatctgtgctgccgtttctgggtgggctgggcggagggtaccagaagactctcgtcctgctgacctggattccggctttgtttattggttttagtcagttcagcgactcctttttgctggatcaacccaatttctggtgtcgtggagccggaaagggaaccgagctcgccggagtgaccaccaccggacgcggaggggacatgggcaactggacctcactgcccaccactccgttcgccactgccccatgggaagccgctgggaaccgtagtaactcatcaggagcagatggcggagacactccacccctgccctcccccccagacaaaggagataacgcaagcaattgtgactgtcgggcatgggactatggtattcgcgctgggttggttcagaacgtcgtttctaaatgggatctcgtctgtgacaacgcgtggaaagtgcatatcgctaagttctctctgctggtggggctgattttcggttacctgatcacagggtgcattgccgactgggtcgggaggcggcctgtgctgctgttctctattatctttatcctgatttttggcctgacagtggctcttagcgttaacgtgactatgttcagcaccctccggttctttgagggtttttgcctagctggtatcatcttgactctgtatgccctgcggatagaactatgccctccgggaaagagattcatgattacgatggtggcaagcttcgtggctatggctggccaatttttgatgccaggacttgctgcactttgccgagactggcaggtattacaggccctcattatttgccctttcctcctgatgcttctgtactggtccatctttccagagtcgctgcgttggttaatggccactcagcagttcgagtccgctaagcgactgattctacactttactcaaaaaaacagaatgaaccccgaaggggatattaagggtgtcattcccgagttggaaaaggaactttctaggagacctaagaaagtctgtattgtaaaggtggtggggaccagaaacctctggaaaaacattgtagtgctgtgtgtgaactcgctgaccggatacggcattcaccattgttttgcgcgttctatgatgggacacgaggtgaaagtgccactactggaaaacttctacgcagattattacaccactgcttccattgccctcgttagttgcctcgccatgtgcgtagtggtgagattcttggggagaagaggcggactgcttcttttcatgatactgaccgctttggctagcctcctccagctgggcctcttgaacctgattggtaagtattcacagcaccccgattctggcatgagcgattctgtcaaagacaaattttccattgctttcagcatcgttggtatgtttgcttcccatgctgtgggttcgttgagtgtgttcttctgtgccgagatcaccccaaccgtcatccgctgtgggggattagggctggtgctggcttccgctggtttcggaatgctgaccgccccaatcatagaactccataatcagaaaggatatttcctgcaccacataatttttgcctgttgcactctgatatgcataatttgcatcctgctgctccccgagtctcgcgatcagaacctccctgaaaatatctcaaacggagagcactatacgcggcaacctctgttacctcacaaaaagggcgaacaacctctcctgctgaccaatgccgagctcaaagactattctggactgcatgatgccgctgcagccggtgacacactgcccgagggagccacggccaacggtatgaaggcaatgtag

SEQ ID NO: 241197 - DNA, 1218 bp, synthetic construct
  misc_feature 1..1218: note = Description of Artificial Sequence: Synthetic coding sequence
  source 1..1218: mol_type = other DNA
atgtttagcacacttcgcttctttgagggtttttgtctggccggaattattttgacactctacgccttgcggatcgaactctgtccccctggaaagagattcatgatcaccatggtggcctcatttgtggccatggcaggccaattcctcatgcccggtctcgctgcactctgtagggattggcaagtcttgcaggcgttaattatctgcccattcctccttatgctcctttactggtcgatattcccagaatcacttcgatggctcatggctacgcagcaattcgaatcagccaagaggctcattcttcacttcacccaaaagaaccggatgaaccctgagggtgatataaagggcgttatccccgaattagaaaaagagttgagtcgacgccctaagaaagtgtgtatcgtcaaagttgtgggaactcggaacctgtggaagaacattgttgttttatgtgtgaactctttaacggggtacgggattcaccattgctttgctcgatccatgatgggccacgaagtgaaggttccccttcttgagaatttttacgcagactattacacaacagcttcaatcgctctggtaagttgtcttgcaatgtgtgtggtggtgcggttcttgggccgtcgcggaggactgctgttatttatgatactgacagctctcgcttccctgctacagctgggtctgctgaacctaattgggaaatattcgcagcatcccgatagtgggatgagtgacagcgttaaggacaaattctctatcgccttctcgattgttgggatgttcgctagtcacgccgtgggctctctctccgtgtttttctgcgccgagataacaccaaccgtcatcagatgtggcggactggggctagttctcgcgtctgccggtttcgggatgctcacagcacccattattgaactacacaatcaaaaaggttatttcctgcatcatatcattttcgcatgctgtacccttatctgcattatctgcattctgctgctgcctgagtccagagatcagaaccttccagagaatatatcaaatggtgaacactacacgaggcaacccctgctgcctcataagaagggagagcaaccgttgctcctaaccaacgccgaactcaaggactactctgggttacatgacgccgcagccgcaggcgacaccctgcctgagggggcaaccgcgaacggaatgaaggccatgtag

SEQ ID NO: 241198 - DNA, 969 bp, synthetic construct
  misc_feature 1..969: note = Description of Artificial Sequence: Synthetic coding sequence
  source 1..969: mol_type = other DNA
atgggctttgacgtgttgctcgaccaagtggggggaatgggtaggttccagatttgtctgattgctttcttttgtattaccaatattttgctgtttccaaatatagttctagaaaatttcaccgcttttacaccaagtcaccggtgttgggtccccttgctcgataatgataccgtctccgataacgacacaggcaccttatcaaaggatgatctcctgaggatctcaatccctttggatagtaacctgaggcctcagaagtgccagagattcatacaccctcagtggcagctactccatctgaatggcacatttccaaacaccaatgagcccgacactgagccctgtgtcgacggctgggtgtacgatcgaagtagctttttgagcactatcgtgacagagtgggacctggtgtgtgaatctcagtcgctcaaatctatggtgcaaagcctgttcatggccggaagccttctgggaggcctcatctacggtcatctgtccgacagggtcggcagaaaaattatatgtaaactgtgcttcctacagctggccatctccaacacttgcgcggctttcgctccgacattcctggtttactgtatcttgcggtttcttgcagggttctccacaatgactatcctgggcaatacatttatcctatctcttgagtggaccctccctagaagtaggagtatgaccattatggtcctcttatgcagctactcggtagggcagatgctgctaggcggactggcttttgccatccaggactggcatatcttgcagttgacagtgtctactcccattatcgtgcttttcctcagttcttggtacgaacagtcgccacactccctcccggtctcagaagccatggtggacatcgagcgtaagattctgacccctggcatttgctccgtgtccgggctcgtgctgtcacatgatgtccactctacgtattgtgtgacatag

SEQ ID NO: 241199 - DNA, 780 bp, synthetic construct
  misc_feature 1..780: note = Description of Artificial Sequence: Synthetic coding sequence
  source 1..780: mol_type = other DNA
atgcgggcacaggaggacctggaggggcgaacacagcacgagacaactagagacccctcaacacctctaccaacagaacccaagtttgacatgctatacaaaatagaggatgtgcccccatggtatctttgcattttacttggctttcaacattacctgacctgcttctccgggaccatcgccgtgccttttctactcgctgaggccctttgcgtgggacacgatcagcatatggtaagtcagttgatcggtactatttttacatgcgtaggcatgttctgtactcttttcgggatgatcactgcagtcggtctgtccaatttgcagtttgtcgacatgaactctagtcggaatctgtttgttctcggcttctctatgttcttcggattgactctgccaaattaccttgagtcaaaccctggggctatcaatactggcatcctggaggtagaccaaattctgattgttttgctcactacagaaatgtttgtggggggttgcctggccttcatcctggacaacaccgttccagggtctccagaggagaggggactgatccagtggaaagctggggcacatgccaactctgacatgtcgtcctccctcaagtcatacgactttcccattgggatgggtatagttaagagaattactttcttgaagtacattcctatttgccctgtgtttaaaggatttagctccagtagcaaggaccagattgccatacctgaagacaccccagaaaatacagagacagcatcagtttgtactaaggtttag

SEQ ID NO: 241200 - DNA, 1797 bp, synthetic construct
  misc_feature 1..1797: note = Description of Artificial Sequence: Synthetic coding sequence
  source 1..1797: mol_type = other DNA
atgagggcgcaggaggatctggagggtcgcacgcagcacgagacaactagagatcccagcacacccttgcctacggagccaaagtttgacatgctttacaagatcgaggatgtcccgccatggtacctctgcattctgctgggattccagcactatctgacatgcttctcaggtactattgccgtcccattcctgttagcggaagccctttgcgttgggcacgaccagcatatggtgtcacagcttatcggaacaatatttacttgcgttggaatcacaacactgattcagaccacagttggcattaggctccccttattccaggctagcgcattcgcgtttcttgtgccagcaaaggctattctggccctggagcggtggaagtgccccccagaggaggaaatctatggcaattggtccctgcctctgaatacctctcacatctggcaccctcgcatccgggaagtgcaaggggcaattatggtttcttcggtcgtggaagtcgtcatcggtctcctcggattaccgggagctctgcttaactatattggtcccctcactgtcacccctaccgtctctctgataggattaagtgtattccaggcggctggcgatagagcaggttcccactgggggattagcgcctgctccatcctgctcataatcttattttcccaatatctcagaaatctgacattcctgctgcctgtctaccgctgggggaaagggctgacattgcttcggattcagatcttcaaaatgttccctattatgcttgccattatgacagtgtggctcttatgctatgtcctgactctgaccgacgtgcttcccactgaccctaaagcatacgggttccaggcacgcacggatgccaggggtgacataatggctatagccccatggattcgcataccgtatccatgccagtgggggcttcccacggtcacagccgctgcagtgcttggaatgttttctgccacattggcaggtattatcgaatccatcggcgattattacgcatgcgccaggctggcgggagctcctcctcctcctgtccacgccatcaacagggggatattcaccgaaggtatctgctgtattatcgctgggctcctgggaactgggaatgggagcacttctagctctcctaacattggagtgctggggattacgaaagtgggaagtcgcagggtggtgcagtacggggctgctatcatgctagttctaggcaccattggcaagtttacagccttattctcttctcttccagaccccattttggggggaatgttctgtaccctgttcggaatgatcacagccgtagggctctctaaccttcagttcgtggacatgaactcaagtcggaatttattcgtgttgggattttccatgttctttggtctgacgctgccaaactacctggaatcaaatccgggagccatcaatacgggaatattggaggtggatcagatcttaatcgtgctgttaacaactgaaatgttcgtgggagggtgtctggctttcatcctggacaacacggtcccaggctctccagaagagagaggcctgatacaatggaaggccggagctcacgctaactccgatatgtcctccagcctgaagagttatgacttcccaattggaatgggaatcgtgaaaagaatcacatttctgaaatacatccccatctgtcctgtgttcaagggattctcttctagctccaaggatcaaatcgcgattcctgaggacactcccgaaaatacagaaactgcaagtgtatgcactaaggtttag

SEQ ID NO: 241201 - DNA, 1809 bp, synthetic construct
  misc_feature 1..1809: note = Description of Artificial Sequence: Synthetic coding sequence
  source 1..1809: mol_type = other DNA
atgcgggcacaggaagatttagaagggaggactcagcacgaaaccacgagagaccccagcaccccactcccaacagagccgaagtttgacatgctgtataagatagaagacgtgcccccatggtacctctgtattctgctcgggttccagcattacctaacctgcttctccggtactatcgcagtcccctttttactggccgaagctctgtgtgtgggccacgaccagcatatggtaagccaattgatcggtaccatcttcacctgcgtgggcatcactactctcatccagactactgtcggcatccgccttcctctcttccaagcttccgctttcgctttcctcgtgcctgcaaaagctatcttggcactggagcgttggaagtgtcccccagaagaggaaatttacggcaattggtctttacctctgaacaccagccacatctggcatcccagaatacgcgaggtggggctgcatgtccagggcgctattatggtatcctccgtcgtggaggtggtgattggactgctcggactcccaggcgctctccttaattacatcggccctctcactgtgacaccgacggtttctttgatcggtctatcagtttttcaggcagccggtgacagggctggctcacactggggcatctctgcctgcagtatcttgttgatcattctgttttctcagtatctgcggaatctgacgtttttactacctgtctacaggtggggaaagggacttacacttctgcgcatccagatatttaaaatgtttcctattatgctggcgataatgacagtgtggttgctttgttatgttttaaccctaaccgacgtgctgcccaccgaccctaaagcgtatggctttcaggctcgaactgacgcccgaggcgacatcatggctattgctccctggattcgtataccctatccctgccagtggggtctcccaacagtgactgctgctgccgtgctgggcatgttctccgctaccctggcagggattattgagtccattggggattactacgcttgcgccagattggcaggcgctccaccccctcccgtgcacgccatcaaccggggaatctttaccgagggtatatgctgcatcatcgccggtctgctcggaaccggaaacgggagcacaagcagctctccaaatatcggcgtgctgggcattactaaagtaggttccagacgagttgtccagtacggtgctgcaataatgctggtgctgggaactattgggaagtttaccgctctgttctcttcccttccagaccccattctcggtggcatgttctgtactttgttcggaatgataacagccgtgggattaagcaacttacagttcgtagacatgaacagctcaagaaacctttttgtgctgggatttagcatgtttttcggattaaccctgcccaactatctggaatccaatcctggcgctatcaacaccggcatacttgaagttgatcagatcttgatagtgttgttgacaactgaaatgtttgtagggggatgtcttgcctttatcctcgataacaccgtgcccggatcaccagaagagagggggttaattcagtggaaggctggcgcacacgctaacagcgacatgagcagcagcttgaaatcatacgacttcccgattggtatgggaatcgtgaagagaattactttcttgaaatatatcccaatttgtcccgtgtttaaggggttcagcagttcatccaaagaccagatcgcaatccccgaagacacaccagagaacaccgaaactgcctctgtttgtacgaaagtgtag

SEQ ID NO: 241202 - DNA, 1179 bp, synthetic construct
  misc_feature 1..1179: note = Description of Artificial Sequence: Synthetic coding sequence
  source 1..1179: mol_type = other DNA
atgagggcacaggaggacttggaggggcgaacacagcacgaaacaaccagagaccccagcacacctttgccgacagaacctaagttcgatatgctttataagatagaggacgtcccaccttggtatctctgcattttactgggcttccagcattatcttacgtgtttctccgggacaatagcagtgccttttctcctggcagaagccctttgcgtcgggcacgatcaacatatggtgtctcagctgattgggactattttcacttgtgtcgggatcacgacactgatccagaccacggttgggatacgactgccactttttcaagccagtgcatttgcgtttcttgtgccagccaaagccatactggcactcgagagatggaagtgtccccctgaagaggaaatttacggaaactggtcactgcctctcaatactagtcatatttggcacccgagaattagggaagttggtttgcacgtgagcatagaagaagccggtggctacatgggtgtgagggtggcggctgagtttggcgacctcagaagatggtcaagaagcttcgttcccgcaagttcgagccaggtgcagggagcaattatggtgagcagcgtggtggaagtcgtcatcgggctactagggctgccaggagctttgctgaactatataggaccactgacagtgacgcccaccgtgagtctcattggtctgtcagtgtttcaggctgccggtgaccgggctggcagtcactggggcatatcagcctgcagtattctgctgataattcttttcagtcaatatctgcgcaatttgaccttccttctgccgtgtgctcaacaaagcgctccactgtggcaggcctcgctctcaccttccgagatcactacacccgtacctgcttggctggttcaccacccactccagtacatgttatccaccggagcgtcgagcccgaaagcgtttgccgctagctctcgcggttattgggcacgggctaccgggcctcctcggcctgtccctacattggccagttgggagctaccaaggtgggctgcaggggcatggtgcagcatggttaggctttcctgttggtcatgggctccctccgcttctagcaggccgtctagccccagatcacttacaccttcatggggtgcttgtagtgcccttagcttggcatag

SEQ ID NO: 241203 - DNA, 1953 bp, synthetic construct
  misc_feature 1..1953: note = Description of Artificial Sequence: Synthetic coding sequence
  source 1..1953: mol_type = other DNA
atgatggggattgggaaaaatacaacgtcaaagtcaatggaggcaggaagttcaactgagggtaaatatgaggatgaggccaagcaccctgccttcttcaccctgcccgtcgtgatcaacggtggtgcaacaagcagcggcgaacaggacaatgaggataccgaactgatggcaatatatactactgaaaacggcattgcggagaagtcatcccttgctgaaacactagattcaactggaagtttggatcctcagcggtccgatatgatttacacaattgaggacgtgccgccatggtatctgtgtatattccttggcctgcagcattacctcacgtgcttctcaggcactatagcggtccctttcctgttggctgatgccatgtgcgtgggctacgaccagtgggcaacaagccagctgatcggcactatcttcttctgtgtggggattactacgcttctgcaaactaccttcgggtgtcgtctaccactgttccaggcaagcgccttcgcattcttggccccagctcgggctattttgagcttggacaagtggaagtgtaatacaacggacgtcagtgttgcgaatgggactgctgaactcctgcacacagagcatatttggtacccacgaatccgcgaaattcagggcgctatcatcatgagcagtctgatcgaggtggtcattgggctcttaggattgcctggcgcactactgaagtatatcggaccattaacaatcacacctaccgttgccctcattggactctctgggttccaggccgctggggagcgcgctggcaagcactggggaatcgctatgttaaccatttttcttgtgctactgttttcgcaatatgccaggaacgtgaagtttcctctcccaatttacaaatcgaagaagggctggactgcatataaactgcaactgtttaagatgtttcccattatcttggctatcctcgtctcctggttgctgtgcttcattttcaccgtcaccgacgtgtttcccccagactcgaccaagtatggattctacgctcgcacagatgctcgccagggcgtgcttctggtggccccttggttcaaggtgccttacccgttccagtgggggttaccaacagtttccgcagccggagtgattggcatgcttagcgctgtcgtggcctctattattgagtccatcggcgattactatgcatgtgcaaggctgtcctgtgcaccccctccgcctattcacgcaataaatcgaggtattttcgtggaaggtctcagttgcgttttggacgggatttttggaaccggcaacggcagtaccagtagctctcctaacatcggcgtcctaggtatcaccaaggtaggctcaagacgagttatccagtgcggggctgcactgatgcttgccctggggatgattggaaagttctctgccctgttcgcgtctttgcccgacccagtgctgggagcattattctgtacactgttcggaatgatcacagccgtggggctctctaatttgcagtttatcgaccttaacagttctaggaacctcttcgtgctggggttctctattttctttggactcgtgctaccaagttatcttcgacagaaccccctcgtaaccggtataacgggcatcgaccaggttctcaatgtgctgctcaccacagctatgttcgtgggcggatgcgtggcatttattctagacaataccattcctggtaccccggaggaacggggtatcagaaagtggaagaagggggtggggaagggaaacaagagtctcgatggaatggagtcctacaatctgccttttgggatgaacattatcaaaaagtaccggtgtttttcttatctgccgatcagccctacctttgtagggtatacttggaaggggctcagaaagagtgacaacagccggagcagcgacgaagatagccaggctactgggtag

SEQ ID NO: 241204 - DNA, 1953 bp, synthetic construct
  misc_feature 1..1953: note = Description of Artificial Sequence: Synthetic coding sequence
  source 1..1953: mol_type = other DNA
atgatgggaattggtaagaatacaactagcaaatcaatggaggcagggtcgtcgaccgagggaaaatatgaggatgaggccaagcaccctgccttcttcaccctgccagtcgtgattaatggcggtgcaacaagctccggtgagcaggacaacgaggacactgagctgatggcaatttataccactgagaacggaatcgctgagaaaagctccttagcggagacactggatagtacaggatctctggatccccaacggagcgatatgatatacaccatcgaggatgtgcctccatggtacctctgtattttcctgggcttacagcactacctgacctgtttttccgggaccattgccgtgcccttcttgctcgcagacgctatgtgcgtgggctatgatcagtgggccacatcacagttaattgggaccatctttttctgtgtaggtatcaccactttactccagactacattcggttgccgtctccccctgtttcaagcttctgccttcgccttcctggccccagcgagagccattctgtccctggacaagtggaagtgcaatacaacggatgtgtctgtcgctaatggaacggctgagttgctgcataccgagcacatctggtacccccgaatcagagagatccaaggggctatcatcatgtcctctctgattgaggtcgttatcgggctgttagggctgccgggagccctcctgaagtacatcggccctctgacgataacacctaccgtagctctcataggtctgagtgggttccaggcagcaggggagcgcgcaggtaagcactgggggattgcaatgttaacgattttcctggtcttgctcttctcacagtacgctagaaatgtcaagtttcccctgccaatctataaaagcaagaagggatggacagcttacaagttgcaactatttaaaatgtttccgattatactcgcaatcctggtttcgtggttgctgtgttttatcttcaccgtcaccgacgtgttcccccctgactccactaagtatgggttctatgccagaaccgacgcacggcagggtgtgttgctagtagcaccgtggttcaaggtcccgtatccatttcagtggggcttaccaactgtcagtgccgcaggcgtgatcggtatgctgagcgccgtcgtggcaagcattattgagtcgatcggtgattactacgcttgcgccaggctgagctgtgccccacctccccctatccatgcaattaaccggggaatctttgtagaaggtttaagttgcgttctggacgggatctttggaacaggcaacggatcaacatccagcagtcctaacatcggggtgcttggcattactaaggtggggtctagacgggtgattcaatgtggtgccgcactcatgctggccctaggaatgatcggcaagttcagcgccttatttgcaagtctgcctgatccagtcttgggggctctattctgtaccctgttcggaatgatcacagctgttgggctgagcaacttacagttcatagatctgaactcctcaaggaacctatttgtgctgggattcagtatatttttcgggctggttctgccgtcctaccttagacaaaaccctctagttacaggcatcacagggattgaccaggtgctcaatgtgctcctgactaccgccatgtttgttggcggatgcgtggcattcattttggacaatactattccagggacgccggaggagaggggaataaggaaatggaagaagggcgtaggaaagggaaacaagagccttgacgggatggaaagctacaacttgccctttggcatgaatatcatcaagaaataccgctgtttttcatacctgccaatctcacccacctttgtaggttacacttggaagggcctgcgaaaatcggacaattcccgttcctcagacgaagatagccaggctaccgggtag

SEQ ID NO: 241205 - DNA, 915 bp, synthetic construct
  misc_feature 1..915: note = Description of Artificial Sequence: Synthetic coding sequence
  source 1..915: mol_type = other DNA
taaggctacgaccaatgggccacctcccagctgattgggacaatctttttttgcgtgggaatcacaacactgctgcagactacttttggatgtcgcacgatatttttggttctcctgttctcccagtatgcaagaaatgttaagttccctcttccaatctataagagtaaaaaaggctggactgcgtacaagttacagctgttcaagatgtttcccataattctcgccattctggttagttggctgctctgttttattttcactgtaactgatgtcttccctcctgactccacaaagtacggcttctacgcacggacggacgctagacagggcgtgcttctggtggccccttggtttaaggtgccttaccccttccagtggggtctgcctaccgtgagcgccgctggagtgattggaatgctgagtgcagttgtggcatccattatcgaatccattggcgactactacgcatgcgcgcgtctgagctgcgccccacctcccccaattcacgctatcaaccggggaatcttcgtcgagggacttagctgcgtgctcgatggcatattcgggacgggaaatggcagcacctccagcagtcctaacatcggcgtgctgggaatcactaaggtgggctcccggagagtgatccaatgcggagctgcgttgatgttggctctgggtatgattgggaagttttccgccctattcgcttctctgccagatcctgtgctaggcgctctgttctgcacgctgttcggaatgatcaccgccgtcggcctgagtaacctccagtttatagatctgaactccagcagaaatttgtttgttttgggctttagcatatttttcgggctggtgctcccctcatatctaaggcagaatccactagtgactggaattacaggtatcgactag

SEQ ID NO: 241206 - DNA, 1611 bp, synthetic construct
  misc_feature 1..1611: note = Description of Artificial Sequence: Synthetic coding sequence
  source 1..1611: mol_type = other DNA
atgatggggatcggaaagaataccacctcaaagtctatggaggctgggagctctacagaaggaaaatatgaggacgaagcaaagcacccggcttttttcactcttccggtggtgattaacggaggggcaacatctagcggagagcaggacaatgaggacacagagctaatggccatctacacaactgaaaatggaattgccgagaagtcatctctggctgagaccctcgattcaacaggaagcctggatccccagcgcagtgatatgatttatacaatcgaagacgtcccaccctggtatctctgcatctttctgggcctgcagcactacctgacctgctttagtggcaccattgctgtaccttttctcctggctgatgccatgtgtgtgggatatgaccagtgggccacctcgcagctgattggaactattttcttctgtgtcggcatcactacactcttgcagaccactttcggctgccgcacgattttcctggttctgctctttagtcagtatgctaggaatgtgaagttccctctccccatatacaaaagcaagaaaggatggactgcttacaaactgcagctgtttaaaatgttccccattatcctggcaatattggttagctggctgttgtgcttcatatttaccgttaccgatgttttcccccctgacagcaccaaatatggattttacgcaaggactgacgcacgccagggggtcctgcttgtggccccatggtttaaggttccctatccatttcaatggggactcccgacagtgagcgccgctggtgtaattggtatgcttagtgcagtggtagcctcaatcattgaaagcatcggcgattattacgcttgcgcccgactttcatgtgctcctcctccacctattcacgccatcaacaggggtatatttgtcgaggggctgagctgcgttctggacgggatatttggcactggaaacggatctacaagttcgagccccaatatcggtgtgctgggtattacaaaggtagggagccgccgtgtgatacaatgtggggctgcgcttatgctcgctctaggcatgattggaaaattctcggctctgttcgcatctctgcctgatcctgtgctgggcgcactgttttgcacgctgttcgggatgattactgctgtaggcctgagtaacctgcagtttattgacctcaatagctcacggaacctgtttgtcctaggttttagcatcttcttcggactggtactcccctcatatttgaggcagaacccactcgtcacgggtatcaccggcattgaccaggtgctgaacgttcttctaactaccgccatgttcgttggtggctgcgtggcctttattctggataacaccatacccggtactcccgaggagagagggataaggaaatggaaaaagggtgtcggtaaggggaacaaatctctggatggcatggagagttacaatctgcctttcgggatgaacatcatcaagaagtatcgttgcttctcctatttgcctatcagtcccacattcgtaggctatacctggaaggggctgcggaagagcgataattcccggagctctgacgaagacagccaagccacaggctag

SEQ ID NO: 241207 - DNA, 3300 bp, synthetic construct
  misc_feature 1..3300: note = Description of Artificial Sequence: Synthetic coding sequence
  source 1..3300: mol_type = other DNA
atgggcaaactgataagaatgggcccacaggagcggtggttattgcgtacaaaaaggctccactggtcacgcttgttgtttctccttggtatgttgatcatagggagcacgtaccagcatctgcgccgtccccgaggcctatcctcactgtgggccgcagtgagcagccaccagccgatcaagttggcatccagagatctgtcaagtgaagagatgatgatgatgtctagctctccttccaagccttccagcgagatgggcggaaagatgctagtccctcaggcatcggtcggctccgatgaggctacgttgtccatgacagtggagaacatcccaagcatgcccaagaggaccgcgaagatgattccgactaccaccaagaataactattccccaacagccgctggaactgaacgcagaaaagaggacacgcccacctcatctcgcaccctgacctactatacctccacatccagcaggcagatagtcaagaagtatactccgacaccacgcggtgagatgaagagctatagcccaactcaagtgcgggagaaggttaaatatactccctcaccacgcggacggagagtcggtacatatgtccctagtacgtttatgactatggagacatcacatgcgatcaccccgagaacaaccgtgaaggatagcgacatcacagcaacatataaaatcctcgaaacgaacagcttaaagcgtatcatggaagaaacaaccccaaccacgttaaaaggtatgtttgattcaacccccacgttcttgacccacgaagtggaagcgaacgttctgactagtcctcgtagtgtaatggaaaagaataatctgtttcccccacgtcgagtggaatctaactcatctgcccatccttggggactcgtggggaagagcaacccgaaaactcctcagggcacggttctgctgcacacccctgcgactagcgagggccaagtaacaatctccaccatgaccggttcctctcccgcagagaccaaggctttcaccgccgcatggagcctccgaaatccgtcccccagaacatccgtgtccgcaattaaaactgcccctgctatcgtgtggagactagctaagaaaccaagtacggcgccttcaaccagcaccactcctacagtgagggccaaactaacaatgcaggtgcaccactgcgtcgtggtcaagcccacaccagctatgctcaccacgcctagcccctcactgacaactgcactgctgccagaggagctgagcccatcaccttctgtgctgccaccttctcttccagacttacatccaaaaggagagtaccctccagacctgttctccgttgaggagaggaggcagggatgggtggtgctgcatgtctttggaatgatgtatgtgttcgtggccttggcaatcgtctgtgacgagtacttcgtgcccgcactgggcgttatcacggataagttgcaaatctccgaagatgtcgccggagcaacctttatggcagctggcggttccgcacccgaactgttcaccagcttaataggtgtcttcatatcacattccaacgttggaattgggactattgttggctccgcagtttttaacatcctgtttgttataggcacctgcagtctgttctcgcgggaaattctaaatcttacatggtggccattgtttagagacgtgagtttttatattctggacctgattatgctgattctatttttcctcgatagcttgatagcttggtgggagtctctgcttcttttgttggcatatgccttctatgtgttcaccatgaagtggaacaagcatattgaggtctgggtcaaggagcagctcagtcgacggccagttgctaaagtgatggctctcgaagatctgagcaagcccggagacggggctattgctgttgatgaactgcaggacaacaaaaaactaaaactgcccagtcttctaacacgcggatccagctccaccagccttcacaattccacaattcgcagtacgatctaccaactcatgctgcattcattggaccccctgcgcgaggtgcgattagctaaggagaaagaggaggagtcattaaatcagggagcgagggcccagccacaggctaaagcagaatcgaagccggaggaggaggaaccagccaagctgcctgccgtgactgtgactcccgcaccagttccagacattaagggggatcagaaggaaaaccctggcggtcaggaggatgttgccgaggccgagtccacaggggaaatgcccggagaagaaggcgaaactgctggcgaaggcgagacagaagagaaatcaggaggcgagactcagcctgaaggagaaggtgaaacagagacacaaggcaagggagaggaatgtgaggacgaaaacgaggccgagggaaagggcgataacgaaggcgaagacgaaggtgagatccatgctgaggatggtgaaatgaaagggaacgagggcgagacagagtcacaagagctgtccgccgagaaccatggggaggccaagaacgatgagaagggggtggaagacggtggcggttccgacggcggagattccgaagaagaggaggaggaggaagaagaacaggaggaggaagaagaagaggaagaacaagaggaagaggaggaggaggaggaagaggaggaagagaagggcaatgaagagcccttgtccctagactggccagagaccaggcagaagcaggcaatttacctatttttgttgcccatagtgtttcctttatggttaaccgtacccgacgtgcgaagacaggagagtcggaaattcttcgtgtttacattcctgggatcaatcatgtggattgctatgttcagttaccttatggtttggtgggcacatcaggtgggtgaaactattggcatttcggaggagattatgggcttaaccattctagccgcaggcacgtctatccccgatttgataacatcagtgattgtggctcgaaagggattgggggacatggcagtcagctcctctgtgggctccaatatattcgatatcacggttggactgcctgttccatggcttctcttctcactaatcaacggactgcagccagtccccgtgtcttccaacgggctcttctgtgctattgtgctcctgtttctcatgctcctgtttgtgatcagtagcatcgctagctgtaaatggcgcatgaacaagatcctaggcttcacaatgttcctgctttatttcgtgttcctgatcatctctgtgatgctggaagatcgcattatatcttgccctgtctcagtgtag

SEQ ID NO: 241208 - DNA, 3246 bp, synthetic construct
  misc_feature 1..3246: note = Description of Artificial Sequence: Synthetic coding sequence
  source 1..3246: mol_type = other DNA
atgggcaagttgatccgaatggggcctcaggagaggtggctactgcgcaccaagaggctgcactggagcagactgctgttcctactcggtatgctgattatcgggtcaacttaccagcacctgcggagacctcgaggcctttcgtctctttgggctgccgtgtcttcccatcagccaattaaattagcatctagagacctcagcagcgaagagatgatgatgatgagctcaagcccttccaagccaagctccgaaatggggggaaaaatgttggtaccacaagctagtgttggaagtgatgaagccactctgtccatgaccgtggagaacattccctccatgccgaaacgcaccgctaaaatgatccctactactacgaaaaacaactatagcccaaccgccgcagggactgagcgacgcaaggaggacacgcctacttcatcacggactctcacatattacaccagcacctcctctaggcagattgtgaagaaatatacaccaactcccaggggagaaatgaagagttattcacccacccaagtgagggagaaagtgaagtatacgccaagccccagaggccgacgcgtggggacatatgttccaagcacatttatgacaatggagactagccatgccatcaccccaaggaccaccgtgaaagactcagacatcacggctacctacaagattctggagactaatagtttgaagcggatcatggaggagacaacacccacaacgcttaaggggatgtttgactctacacccacatttctgacacatgaggtggaagctaacgtgctgacctcacctcgaagtgttatggagaagaataatctctttccccctagacgcgtcgagtcaaactcgagcgcccatccatggggactggtgggaaagtctaacccaaaaactccacagggcacagtgctcttgcacaccccagccactagcgaggggcaggtgaccatcagcacgatgacaggatcgagtcctgctgaaacaaaggcctttacagcagcatggtccctcaggaaccccagcccacgcacctctgtcagcgctatcaaaactgctcctgccattgtatggaggctggccaaaaaaccttctacagctccttccacatctacgacacccactgttcgtgccaagctgaccatgcaagttcaccactgcgtagttgtcaagcctacgcccgcaatgttgactacaccatcaccctctctcactacggctctgctccctgaggagctctctccttctcccagtgttctccccccaagcctgccagatctccaccccaaaggagagtatcctccggatctgtttagcgttgaggagcgtagacaaggctgggtcgtgctccatgtatttgggatgatgtacgtgttcgtggctctggcaattgtgtgtgacgagtacttcgtccccgcactaggagtgattacagacaaattacagatcagcgaagatgttgcgggagccacctttatggctgccggtgggagcgccccagagctctttacttcactcattggagtttttatctctcactcaaatgtcggtattggcaccatcgtggggtccgcagtgttcaacatcctcttcgtcatcggaacttgcagcctgttttcgcgcgaaattctgaacctaacatggtggccactgttccgagacgtgagcttttacatcctcgacttgatcatgttgattctgttcttcctcgattcactgatcgcctggtgggagagcttgctgctattactcgcttatgctttctatgtcttcaccatgaaatggaataaacatatcgaggtgtgggtgaaagaacagctgagcagacggccagtagccaaagttatggcactagaagatctatctaagttgccctcacttctgacacgagggtcttccagcacatcgcttcacaacagtacaattcggtccacaatctatcagctgatgctccatagcctggacccgcttcgcgaagtcagactggccaaggaaaaagaagaagagagcctgaatcaaggagcccgtgcccaacctcaagccaaagcggaaagtaagccggaagaggaggaacccgcaaagctaccggcagtcaccgtgacgcctgctcctgtccctgatattaagggggaccagaaggagaaccctggtggccaggaagacgttgctgaggcagaaagcaccggcgaaatgccgggtgaggagggggaaacagccggtgagggagagactgaggaaaaaagcggaggcgaaacccagccagaaggcgagggggaaaccgagactcaagggaagggtgaggagtgcgaagacgagaacgaagctgaaggtaaaggcgataatgaaggcgaagacgaaggcgaaatacatgccgaggacggcgagatgaagggaaatgagggggagacagagtcacaggagctcagcgccgagaatcacggcgaagctaaaaatgacgagaagggcgtggaggacggcggtggttcagatggcggagactctgaagaagaggaggaagaggaagaagagcaggaagaagaggaagaagaggaggaacaagaggaggaggaggaggaggaggaggaggaagaggagaaaggtaatgaggagccactcagcttagactggccagagacccgccagaaacaggcaatctacctgtttctcctgcctatcgtgtttcctttgtggctgacggtaccagacgtccggagacaggagtccaggaagttcttcgtgtttacttttttaggcagcataatgtggattgccatgttctcttacctgatggtatggtgggcccaccaggtgggagaaactatagggatttccgaggagattatgggcctgaccatcctagcagctggaaccagcatcccggatttaatcacatctgtgatagtggccaggaagggtttaggtgatatggccgtcagctcaagcgtcggcagtaacatttttgatataaccgtgggcctacccgtgccttggctgttattctctctgatcaatgggctacagccggtacctgtttccagcaatgggctcttttgcgcaatcgttctcctgtttctgatgctgctgttcgtcatatcctccatcgcctcttgcaagtggcgtatgaacaaaattcttggctttacgatgtttctgctctattttgtgttcctcatcatttcagtaatgcttgaggacagaattatttcgtgtccagtctctgtgtag

SEQ ID NO: 241209 - DNA, 3210 bp, synthetic construct
  misc_feature 1..3210: note = Description of Artificial Sequence: Synthetic coding sequence
  source 1..3210: mol_type = other DNA
atgggaaagttgatccgaatgggcccacaggagagatggctcttgcgtactaaaagactgcattggtcaagactgctgttcctcttggggatgctgattataggttccacttatcagcatttaaggcggccaaggggattatcatctctgtgggccgctgtgtcctctcaccagcccataaagctggcctccagggacctgagctccgaggagatgatgatgatgtcttcctcccccagcaaaccatcaagtgaaatgggagggaaaatgctggtgcctcaggcaagtgtcggatccgacgaagccacactgagtatgaccgtggaaaacatccctagcatgcctaaacggaccgctaagatgatccccactactactaaaaacaactatagtccgacagctgccggaacggagcgaagaaaagaggatacaccaacaagttctcgcaccctgacctactacaccagtacatccagcagacaaatcgtgaaaaagtacaccccaacacctagaggggagatgaagtcttattcccctacgcaggtccgcgaaaaggtgaaatataccccttctccgcgtgggagacgagttggcacctacgtcccttctacctttatgaccatggagacatcccacgcgataacccctaggaccacggtaaaagatagtgatatcacagctacatacaaaattctggagacaaactcactcaagaggattatggaagaaaccacgcccaccacactgaagggcatgttcgacagtacgccaacttttctgacccacgaggtggaagccaatgtgttgacatccccacgctcagttatggaaaagaataacctgttcccaccacggagagtagaaagtaactctagcgctcacccctggggtctggtggggaagtccaaccctaagactccacaaggcaccgtcttgctccacaccccagccaccagcgagggccaggtgactatcagcacaatgacaggctccagccccgctgagaccaaggctttcactgcggcatggagtttgaggaatccctcccctagaacgtccgtgtccgcaatcaagacggcgcctgctatcgtgtggagactcgctaagaagccctcgactgctccatcaacaagcacaactccaaccgttagagctaagctaacaatgcaggttcatcattgtgtggtggtgaagcctacgcctgccatgctgactacccctagccctagcttaacaactgccctgctccccgaagagttatcccctagtccatcagtgttgcccccatctttaccagatctacatcctaagggagagtatccccctgacctatttagcgtcgaggaacgacggcagggttgggtcgtattgcacgttttcggtatgatgtacgtcttcgtggcattggccatcgtgtgcgatgagtatttcgtacccgcactgggcgtaatcactgacaaactgcagatcagtgaagacgtggctggtgccacctttatggccgctggcggttccgcgccagaactgttcacatcactgattggcgttttcataagccactctaatgtggggatcggaactatagttggctccgccgttttcaatatcctgtttgttatcggtacatgcagcctcttttctcgggagattttaaatcttacatggtggcccctgtttcgggacgtatctttttatatcctagatctcatcatgctcattctgttcttcttagatagcctcatcgcatggtgggagagcttactactactgctggcttacgccttctatgtgttcactatgaaatggaacaagcacatcgaggtttgggttaaagaacagctgtcccgcaggccagtcgctaaggtgatggcgttagaggaccttagtaagcccggagatggcgctatcgcggtcgacgaactgcaggacaataaaaaactgaaactaccctcactattaaccaggggttcaagctcgacgtctttacacaacagcacaatccgctccacaatataccagctgatgttgcactcccttgatccacttagggaagtccgcttagccaaggagaaggaggaggagtctctgaaccagggagcccgagcccagcctcaggcaaaggcagaaagtaagccagaagaggaagagcctgccaagctcccagcagtcactgtgacccctgcacctgtcccggacatcaaaggagaccagaaggagaatccaggaggccaggaagatgttgctgaggcagagtcaacaggagaaatgccaggggaggagggcgagaccgcgggtgagggcgagaccgaggagaagtctggcggtgagacccaaccagaaggcgagggagagaccgagacacagggaaaaggagaggaatgtgaagacgagaatgaggctgagggaaaaggggacaacgagggcgaggacgaaggtgaaatccacgccgaagacggcgagatgaagggtaatgagggcgaaacagagagccaggagttaagcgccgagaaccacggcgaagcgaaaaacgatgagaagggcgtggaggatgggggaggttctgacgggggagactcggaagaggaagaagaagaggaggaagaacaagaggaagaagaagaggaggaggagcaagaggaggaggaggaggaagaagaggaagaggaagagaaaggaaacgaagaaccactttccctggactggccagagacaagacagaagcaagctatatacctgttcctgctgcccatagtgttccctctgtggctaaccgtccctgacgttcgaagacaggtcggcgagactataggtatctcagaggagatcatgggtctgactattctggccgctggcaccagcattcccgatctgattaccagcgtgatcgtggcaagaaaaggtctcggggacatggcggtaagcagttcggtggggtctaacattttcgatataactgtgggcttgccagtgccctggctcctcttctcactcatcaacgggcttcagcccgtgcccgtgtcctcaaacggtttattttgtgctatagtgctgctcttcctcatgctgctttttgtgatctcctcgatcgcttcctgcaaatggcgcatgaacaaaatcctgggtttcaccatgttcttactatattttgttttcctgatcatcagcgtgatgctcgaagatcgtatcatctcatgcccagtctcagtgtag

SEQ ID NO: 241210 - DNA, 3246 bp, synthetic construct
  misc_feature 1..3246: note = Description of Artificial Sequence: Synthetic coding sequence
  source 1..3246: mol_type = other DNA
atgggaaaattaatccgtatggggccacaggaacgctggctgctaaggaccaagaggctccattggtcccgtctgttatttctccttggcatgttaatcatcggcagtacatatcaacatttgaggagacctcgaggacttagctctctgtgggccgctgtgagtagccatcaacctataaagttggcgagtcgagatctaagttcggaagagatgatgatgatgtcaagcagcccatcgaaaccaagttccgagatgggtggcaagatgttggtgcctcaggcaagcgtcggctcagacgaggccaccctaagtatgacggtggaaaacatcccgtccatgcctaagagaactgccaaaatgatccccaccaccaccaaaaacaactattcacctaccgcggcaggaaccgagagaagaaaagaggacaccccgacatcgagccggacccttacctactacactagtacatcatccagacagattgtgaagaaatacacacccacgcccaggggcgaaatgaagagctattctcccacccaggtgagggaaaaggttaagtacactccctcccccagaggacggcgtgttggaacctacgtgccttcgacatttatgaccatggaaacctcacatgctattaccccccgaacaacagtcaaggatagcgacattactgcaacatataagatactggagacaaatagtcttaagcgtatcatggaggagacgacgcctaccacgttgaaaggtatgtttgactctactcctacctttctaacccacgaggtggaggcgaacgtgttaacctccccaagatctgttatggaaaagaataaccttttcccaccccgtagagtggagtctaatagctccgcccacccttggggcctggtggggaagtcaaatccaaaaacgccccagggaacagtgctgctgcacacaccggcaacatctgaaggacaagtcacaatttctactatgactgggagcagtcccgctgaaaccaaggcctttaccgcagcatggtcacttcggaatccaagtcctagaacaagcgtgtccgcgattaaaacagcgcctgctattgtgtggaggctggcgaaaaaaccttctactgcaccttcaacctctaccacccccaccgtgagggccaaactcaccatgcaggttcaccattgcgtcgtagtcaaacctactcccgctatgctgaccactccctctcctagccttactacagcattgctgcctgaagagctgagccctagcccttcagtgctgccacctagcctcccagatctgcatccaaagggcgaatatcctcccgacctcttctcagtggaagagagaagacagggctgggttgtgctccatgtatttgggatgatgtacgtgttcgtggccttggcaattgtgtgcgacgagtatttcgtgcccgcacttggagtgattaccgacaagttgcagatatctgaggatgtggcaggagccactttcatggcagccggaggttcagctcccgagttattcacatctctaataggggtgttcatctcccattcaaacgtcggcatcggaacaattgtaggaagcgccgtctttaatatcctgtttgttattggcacctgttccctcttcagcagagaaatcctgaatctgacatggtggccactctttagagacgtgtcgttctacattctggacctcatcatgctgatccttttcttcctcgactccctgatcgcctggtgggaaagcttattgctgttacttgcctatgccttctacgtttttactatgaagtggaataagcatatagaagtctgggtaaaggagcaactgagcaggagaccagttgctaaggtgatggcgctggaagacttgtctaagttaccatcattgctgacgagggggtcatcctctacttccttacacaactcaacaattagaagtactatttaccaattgatgctgcacagcttagacccgctgcgggaggtccggctggctaaggagaaagaggaggagtctttgaatcagggggctcgggctcaacctcaggcgaaagcggaatccaagcctgaagaggaagaacctgccaagctgccagcagttaccgtaaccccggcaccagtaccggacattaaaggcgaccagaaggaaaaccccggtggccaggaggatgtggcagaagccgagagcaccggagaaatgccaggagaggaaggcgaaaccgcaggggagggcgaaacggaggaaaagtcaggcggagaaacccaacccgagggcgaaggtgagaccgagacccagggtaaaggagaggagtgcgaagacgagaacgaggcagagggaaagggcgacaatgagggcgaagatgagggggaaattcatgccgaggatggggaaatgaagggaaatgagggcgagacagagagtcaggaactgtccgctgagaatcacggagaagctaaaaatgacgagaaaggtgttgaagacggaggcggtagtgacggtggagacagcgaagaggaggaggaagaggaggaagaacaggaggaggaagaggaagaagaggaacaggaagaggaggaagaggaagaggaagaggaggaggaaaaaggaaatgaagagcctctgagtcttgactggccagagactcgacagaagcaggcaatttacttatttcttttgccaatcgtgttcccattgtggctcacagttccggacgtgaggaggcaggaatctcggaaatttttcgtgttcactttcctcgggagtattatgtggattgcaatgttctcctaccttatggtctggtgggcacaccaggtgggtgaaacaattggaatctccgaagaaattatggggctcaccattctcgccgctggaacgtctattcccgatctgattactagtgtgatcgtggcgagaaaaggtctgggcgacatggctgtgtctagtagcgtcggctcgaatatcttcgatattactgtgggtcttccagtgccttggctgctgtttagtttgatcaatggcttacaaccagttcctgtgagcagtaatggactgttttgcgccattgtcctactatttctcatgctcctgtttgtgatatcaagcatcgcatcgtgtaagtggcgaatgaacaaaattctcggctttaccatgtttctgctctactttgtctttttgatcatttccgtgatgctggaagatcggattatctcttgccccgtgagcgtctag

SEQ ID NO: 241211 - DNA, 1935 bp, synthetic construct
  misc_feature 1..1935: note = Description of Artificial Sequence: Synthetic coding sequence
  source 1..1935: mol_type = other DNA
atggatctgcagcagagcactactattacatctcttgagaagtggtgtttggacgaatctctctccggctgtcggagacattattctgtgaagaaaaaactgaaactcatccgagtgttggggctgttcatgggactggtggccatcagtaccgtatccttttctattagcgcattctcagaaactgacactcaatctactggggaagcctccgtggtgtccggcccacgcgtggcccaggggtaccaccagcggaccctcctggatctgaacgataagatcctagactacacacctcagcctcctttgtccaaggagggggagtcggagaactccacagatcatgcccagggcgactaccccaaggacatctttagcttggaggaaagaagaaagggggcaatcattctgcacgtcattggcatgatatacatgttcatcgccctagcgattgtctgcgacgagttcttcgtgccaagtctgacagttattactgagaaactggggatctctgacgatgtggccggagccacttttatggccgctggcggatccgctcccgagctgtttacatctctgatcggagttttcatcgcccactctaatgtggggattggaactatagttgggtcagctgttttcaacattctattcgtgattggaatgtgcgctttgttttcacgggaaatcttgaacctgacctggtggcctctctttagagatgtgtctttctacattgtcgacctaattatgcttattatcttcttccttgacaacgttatcatgtggtgggagtccctgctgttgcttactgcatacttctgttatgtagtgttcatgaaatttaatgtccaagtggagaaatgggtcaagcagatgatcaaccgcaataaggttgtgaaggtgacggctcctgaggcgcaggccaagccttctgcagcccgagacaaagatgagcctaccctgcctgcaaagccgaggttgcagaggggaggctcctccgctagcctccacaattcacttatgaggaactccatattccaactaatgatccacaccctagacccactcgcagaaggccgattccgggagaaagcctctattctccataagatcgcaaagaagaagtgccacgtggacgaaaacgaacgtcagaatggagctgccaaccatgtggagaaaatcgagttgccaaattcaacctccaccgacgtggagatgaccccctcctcagacgcctcagaacctgtgcagaacggtaatctaagtcacaacattgagggcgcagaggcccagactgcagatgaggaggaggatcaacccctgagtctggcatggccctccgaaacacggaaacaagtgacgtttctgattgtgtttcccattgtgttcccactatggatcactctgccagacgtgaggaaaccttcgtcgagaaagtttttccctatcacctttttcggctcaatcacttggattgctgtgttcagttaccttatggtatggtgggcccaccaggtcggggaaacaattggaatttcagaagaaataatgggacttaccatactagccgcaggcactagcatacccgatctcatcacatcagtgatcgtggcgagaaaagggctgggagacatggctgtttcatcaagtgtcgggtccaatatctttgacattacagtggggctgccactgccctggctgctctacaccgtcatccatcgctttcagccggtggcggtgagttccaatggtctgttctgtgcaatcgtcctgttatttataatgctgctgtttgttattttgagcattgccctctgcaagtggcgtatgaataagattctgggatttattatgttcggcctctactttgtctttttggttgtgtccgttctgctggaggatcgtattctgacctgtccggtgtcaatctag

SEQ ID NO: 241212 - DNA, 1986 bp, synthetic construct
  misc_feature 1..1986: note = Description of Artificial Sequence: Synthetic coding sequence
  source 1..1986: mol_type = other DNA
atggacttgcagcagtccacaactataacaagcctcgagaagtggtgcctggatgagagcctgagcggctgtagacgacactatagcgtgaagaagaagcttaagctaattagagtgttggggctgtttatgggacttgtcgcaataagcacagtgagctttagcatatcagctttcagcgagaccgacactcagagtaccggcgaagccagtgtggtgagtggtccgagggtcgcgcaaggctatcatcagagaacactcctggacctgaacgataaaatcctagactacaccccacagcctcccctgagtaaagaaggggagtcagagaacagcactgaccatgcccagggggactacccaaaggatatttttagtcttgaggaaaggcgaaagggtgcaattatcttacacgtaatcggtatgatttacatgtttatcgcccttgcaattgtttgtgacgagttcttcgtacccagcctgacagtgatcaccgaaaaactgggcatatctgatgatgtggcaggtgccacattcatggccgctggcggatcagcccctgaactgtttacaagtctgattggagtttttatcgcccactctaatgtaggcattgggacgatcgttggatcagccgtgttcaatatcctgttcgtcatcggcatgtgtgcgctgttctctcgcgagattcttaacctgacatggtggccactgtttcgagatgtgagcttctacattgttgacctcatcatgcttatcattttcttcctagataatgtcattatgtggtgggagagcctccttcttttaaccgcctatttctgttatgtggtatttatgaagtttaatgttcaggtcgagaaatgggttaagcagatgataaatagaaataaggtggtgaaggtaacagcgccagaggcccaggcaaaacctagcgccgcaagggacaaggacgagccaacacttcccgcaaagccaaggctgcagcgaggtggttctagcgcttcccttcataactcacttatgaggaacagcatatttcaactgatgattcataccctcgaccccttagccgaggagctgggatcttacggcaaacttaagtactacgacacgatgaccgaggagggcagattccgagaaaaagccagcatcttgcacaagatcgctaaaaagaaatgtcacgtggacgaaaatgagcggcagaatggcgcagccaaccacgtcgagaagattgagttaccgaactctactagcaccgacgttgagatgactccaagctcagatgcctcagaacctgtgcaaaacggtaacttgtcccataatatcgagggtgcggaggcgcagaccgccgacgaagaggaggatcagccactttcattggcctggcccagtgaaaccaggaagcaggttactttccttatcgtcttccccatcgtgttcccattgtggatcacacttcctgatgtcaggaagccatcttcacgcaaattctttcccatcactttcttcggatctatcacttggatcgctgtgttctcttatttgatggtgtggtgggctcatcaagttggagaaacgataggtatcagtgaagagattatgggtctcacaattctcgccgcaggcacatccatccctgacctcattacatccgtgattgtcgcgcgtaaaggccttggcgatatggctgtgagctctagcgttggctctaacatatttgatatcaccgttggcctccctctgccttggctgttatacaccgttattcaccgattccagccggtagccgtcagttctaatgggttgttttgtgccatcgttttgctcttcataatgctgctatttgtcatattatccattgcactctgtaaatggcgcatgaacaagatcttaggcttcatcatgtttggactctattttgtcttcctggtagtgtcagtactgctcgaggatagaattctgacatgcccagtaagtatctag

SEQ ID NO: 241213 - DNA, 1935 bp, synthetic construct
  misc_feature 1..1935: note = Description of Artificial Sequence: Synthetic coding sequence
  source 1..1935: mol_type = other DNA
atgcggccaagcggggatgaagacagagccaggcggcgacggaggcgaagaaggaggcgcgaccttttgctcagtcagctttgctttctggccagtgtggctcttctgctgtggtccctgtccagtctgcgcgagcagaaagaacttgacctgatggatctagtcggggaagaccgcaagtggatgatggcacgcaaacttatgcaggtgaatgacacccttacctctgaagatgccggtctgcgcaacagcaaaaactgcacagagcccgcactgcacgaattccccaatgatatttttaccaacgaagaccgcaggcagggggcagtcgtcctgcatgtgctgtgtgcgatttacatgttctatgctctagcgatcgtgtgtgacgatttcttcgtgcccagtttggagaaaatctgcgagaggttgcacctatcggaggatgtagcaggcgctactttcatggccgctggaagctccgcccctgaactctttacatctgtaatcggtgtgttcatcacaaaaggcgacgtgggagtgggtaccatcgtcggctctgctgtcttcaacatactgtgtatcattggcgtctgcggtttgttcgcgggacaggtcgtagcgctgtcatcgtggtgccttcttagagatagcatctattacaccctgtcggtaatcgccttgatcgtgttcatttacgacgagaaagtgtcctggtgggagtctttggttttggtgctgatgtacttgatctatattgtgattatgaagtataacgcatgtatacatcagtgcttcgagaggcgtaccaaaggagccggtaacatggtgaatggcctggcaaataacgccgagatcgacgatagcagcaattgtgatgccactgtcgttctactcaaaaaagcaaactttcataggaaagcctccgtcatcatggtggatgaactcttaagcgcatatcctcaccaattatcattctccgaagcagggctaaggatcatgattacctcccacttcccaccaaaaacaaggctgtcgatggcctcacgcatgctgatcaatgagagacagcgcctgatcaattcacgggcatacacaaatggtgagtccgaggtcgccatcaagattcccatcaagcatacagtcgagaatggaacaggaccgtctagtgccccagaccggggagtgaatgggaccaggcgggacgatgtagtcgcagaagccggtaacgaaaccgagaatgaaaacgaagacaacgaaaatgacgaggaggaggaggaggacgaggacgatgacgaggggccttacaccccgtttgacacgcctagtggcaagctggagaccgtcaaatgggcttttacatggcccctaagtttcgtcctatactttaccgtgccaaactgcaacaaacctcgctgggaaaagtggttcatggtcacttttgcctccagtaccctatggattgccgcattctcatacatgatggtatggatggttaccatcatcggatataccttaggaattcccgatgtgatcatgggaatcacatttttggctgcaggcacaagcgtgccagattgtatggccagtcttattgtggctcgacaagggatgggcgacatggccgtgagcaattccatagggtcgaacgtcttcgatatactgatcggccttggattgccttgggcgctccaaacactggccgtggattacggttcatacattcgactcaatagtcgtggcctgatttatagtgtgggactgttacttgccagcgtcttcgtcaccgtctttggggtgcacctcaacaagtggcagctcgataaaaaactggggtgtggctgcctcttactatacggggttttcctttgtttcagcatcatgacggagttcaacgttttcacatttgttaacttgcccatgtgcggcgaccattag

SEQ ID NO: 241214 - DNA, 1755 bp, synthetic construct
  misc_feature 1..1755: note = Description of Artificial Sequence: Synthetic coding sequence
  source 1..1755: mol_type = other DNA
atggccggaaggagattaaacctgaggtgggcactgtccgtgttgtgtgtactgctgatggccgagactgtatcagggacccgcggaagctccactggagcccacataagtccacagtttcctgcttcaggagttaaccagacaccggttgtggactgccgaaaagtgtgcggacttaacgttagcgataggtgtgattttattcggactaacccggactgccacagcgatggtggatacctggactacctggaaggcattttttgccactttccaccatccctccttcccctggccgtgactctctatgtgtcttggcttctttacctctttctcattctcggggtgaccgccgctaagtttttttgtccaaatctctccgctatcagcacaacgctgaaactgagtcataatgtggcgggagtaacgttccttgcttttggaaacggggcaccagacatattcagcgccctggtcgcattttccgatccacacaccgcaggcctggctctcggagcattgttcggggctggcgtgctggtgacaaccgtggttgctggaggcataacaatcctgcatccatttatggctgcaagtagacctttcttcagagacattgttttttacatggtggccgtgtttctcacatttctcatgttgtttcggggaagggtaaccctcgcctgggccctcggttacctcgggctatacgtcttctacgtggtaacagtgatcctctgcacgtggatctaccaacggcaacggaggggctcactcttctgccctatgcccgtgacacccgagatcttgagtgactccgaggaggatcgcgtcagtagcaacaccaacagctatgattatggtgatgagtacagaccgcttttcttctaccaggagactaccgcgcaaatccttgtgagggctctgaatcccctagactacatgaagtggcgtcgcaagagtgcttattggaaagcactgaaagtgttcaaactcccagttgaatttctccttctcctgaccgtcccagtagtcgatccagacaaggacgaccagaattggaaaagacctctgaactgcctacatctggtgattagccctctcgttgtggtgctcacactgcaaagtggtacctacggggtatacgagatcgggggactggtgccagtgtgggtcgtggtggtcatcgccggaacggccctcgctagcgtgacgttcttcgctaccagtgattcccagcctcccaggctgcactggctgttcgcttttctcggctttctgaccagtgccttgtggattaatgcagctgctacggaggtggtcaacatcctgcggagtctgggcgttgtatttcggttatctaataccgtgctaggactcactctactggcatggggcaacagcattggcgatgctttcagtgatttcactctggctcgccagggatatccacggatggccttctctgcctgctttggtgggatcatctttaatatcctggtgggcgttgggttaggctgcctgctccagatcagccgcagtcacactgaagttaaactagagcccgatggcctgctggtgtgggttctcgctggggctctgggcctgagcctggttttctccctggttagcgtgccactgcagtgcttccagctctctcgcgtctatggtttctgcctgctgctcttttatctcaattttctggttgtggcattgctgaccgagtttggggttatacacctgaaatcaatgtag

SEQ ID NO: 241215 - DNA, 1587 bp, synthetic construct
  misc_feature 1..1587: note = Description of Artificial Sequence: Synthetic coding sequence
  source 1..1587: mol_type = other DNA
atggcgggacgcaggctgaacctgagatgggctctgtccgtcttgtgcgttctactgatggcagagactgtcagcggaacacgtgggtctagtacaggcgctcacatcagcccccaatttcccgcaagcggggtaaatcaaaccccagtggtagactgcagaaaagtgtgcggcctgaacgtgtctgacagatgcgacttcataaggacgaatcctgattgccactcagacggtggctatctggactatttggagggcatattttgtcactttcccccttcactcctccccttggcggtcaccctgtacgtgtcctggctgctctacctgttcctgattctgggcgtaaccgctgccaaattcttttgtcccaacttaagcgccatcagcactaccctgaagctgtcccacaacgtcgcaggagttactttcctggcatttgggaatggtgctcccgatatattcagtgcacttgtcgccttttcagatccccacaccgcaggcttggcactcggcgctctgttcggctatctcgggctatacgtcttctacgtggtgaccgtcatcttgtgcacgtggatatatcaacgacagcggagaggcagcctgttttgccctatgccggtgaccccagagattctctccgatagtgaggaggacagggtgtcttccaatactaactcatacgactatggggacgaatacagacccctttttttttaccaggaaacaacagcccagatcttggtgcgagcacttaaccccctcgactacatgaagtggaggcgtaaaagcgcatactggaaggccctgaaagttttcaagctccctgtggagttccttttacttctgaccgtccctgtggtcgaccccgacaaagatgatcaaaattggaagcgacctctgaactgcctgcacctggtgatctctcctctggtcgtcgtgctgacccttcagtctggtacctacggtgtatacgagatagggggtcttgtgcctgtttgggtggtcgtggtcatcgcaggcactgctctcgcatcagtcaccttcttcgccacatctgatagtcaaccaccccgacttcattggctttttgccttcctgggctttctgacaagcgccttatggattaacgcagccgctactgaggtagtgaatattcttcggtcactcggcgttgtctttcggctctccaatacagtactgggactcaccctcttggcttggggtaacagcattggagacgctttttctgactttactctggctcggcaaggttatcccaggatggcctttagcgcctgcttcggtggcattatattcaatatactcgtgggcgttgggttaggttgcctccttcagatctccaggagtcatacggaagtgaaactggaaccagacggcctgctggtgtgggtgttggcaggcgctctggggctgtctttggtcttttcattggtctcagttcctttgcaatgtttccaacttagcagagtatatggcttttgtctcttgctcttttatctgaactttctggttgttgccctgcttaccgagttcggcgtcattcacctcaaatccatgtag

SEQ ID NO: 241216 - DNA, 1587 bp, synthetic construct
  misc_feature 1..1587: note = Description of Artificial Sequence: Synthetic coding sequence
  source 1..1587: mol_type = other DNA
atggctggacgcagactgaatcttagatgggctctctcggtactgtgtgtgttattgatggcggaaaccgtgagtgggactcggggttcaagcacaggggctcatatatctccccaattccctgccagtggagtgaaccaaacccccgttgtggactgccgcaaggtgtgcggcctgaacgtgtccgatagatgtgacttcattagaacgaaccctgactgccattcagacggcggatatctggactatcttgagggtatcttttgccatttccctccaagcctcttaccgctggccgtcacgctctacgtgtcctggctcctatacttgtttctgattttgggcgtgacagctgcgaaattcttctgtcccaacttgagcgccattagcacaactttaaagctgagtcataacgtagccggagttacatttctcgcctttgggaacggcgctcctgacattttttcagctctcgttgcctttagtgatccgcatacagccggtctagccctgggagcattgtttggatatctgggactgtacgttttttacgtcgtcaccgtcatcctgtgtacatggatctaccagcgccagaggagggggtcactcttctgcccaatgcctgtcacacctgaaatactgtctgactccgaggaagaccgcgtgagttccaacactaactcatacgactacggagatgagtaccgaccgctgttcttttatcaggaaactacagctcaaatcctggtgcgtgccctcaaccccctcgattatatgaagtggagacggaagtcagcctactggaaagcacttaaagtgtttaagctccctgtggaattcctcctgttactcaccgtgccagtggttgacccagacaaggatgaccagaattggaaacggcctcttaactgtctgcacctggtgatctcacctttggtggtcgtcctgacccttcagtctggtacgtatggcgtttacgagatcggaggcctggtgccagtgtgggtagtcgtggtaatagccggaacggcattggcctccgtgacattctttgccacgtcagattcacaaccaccgaggttacattggctgttcgccttcctcggttttttgacctctgccctgtggattaatgctgccgctacggaggtggtgaacattctccgctctttaggcgtagtctttagactgagcaatacagttcttggtctcactcttctcgcatggggcaactctattggtgacgcattttcagatttcacccttgcacggcagggctaccctcggatggctttctcagcatgttttggcggtatcatatttaatatcctggtgggagtaggactgggatgtctgctacagatatccagatcccataccgaagtgaagttggagccggacgggctactggtgtgggtcctcgccggtgcgctcgggctctccctcgtgtttagtctagtgtcggttcctttacaatgttttcagctcagcagagtttacggattttgcctgctcctcttttacctcaattttctggtcgtggccctgctcacagaattcggggttatccacctgaaatccatgtag

SEQ ID NO: 241217 - DNA, 396 bp, synthetic construct
  misc_feature 1..396: note = Description of Artificial Sequence: Synthetic coding sequence
  source 1..396: mol_type = other DNA
atggccggtagacgcctgaacctgcgctgggctcttagcgtactgtgcgtgctgctaatggcggaaacggtgtccggaaccaggggctcatcaacaggcgctcacatctcgccccaattccccgcttccggtgttaaccaaacaccagtggtcgactgcagaaaggtgtgtgggctgaatgtcagtgacaggtgcgactttatacgaaccaaccctgactgccactcagatggagggtacctcgactatttggagggcattttctgtcactttcccccttctctcttaccattggccgtcactctgtacgtcagctggctattgtacctctttctaatccttggtgtgactgccgctaagttcttttgccccaacctttcagccatttccacttag

SEQ ID NO: 241218 - DNA, 696 bp, synthetic construct
  misc_feature 1..696: note = Description of Artificial Sequence: Synthetic coding sequence
  source 1..696: mol_type = other DNA
atggcaggcaggcggctgaacctaagatgggctctttccgtcctgtgtgtcctgcttatggccgaaacagtctccggcactaggggaagcagcactggagcacacatttccccacagtttccagcctctggcgtcaaccagacccctgtggtcgactgccggaaggtgtgcggcttaaacgttagtgatcggtgtgattttatacgaacaaaccccgactgccattccgacggaggctacctcgattatttggaaggcattttttgtcattttcctccttcactgctgccccttgccgtcaccttgtacgtgtcttggcttctttacctattcttaatccttggggtgactgccgctaagtttttttgtccaaacctcagtgctatcagtaccaccctgaagctgtcgcacaacgtcgcaggagttacctttcttgcatttggaaacggagcaccggacatattctccgctttagtagctttttccgatccacataccgctggcctcgccctgggggctctgtttggggcaggtgtgctggtaactactgtagtcgcaggtgggataactattttgcatcccttcatggccgcttctcgcccattttttcgagacatcgtgttttacatggtggcagtcttcttgactttcttaatgctgttcagagggagggtgacattggcgtgggcactgtag

SEQ ID NO: 241219 - DNA, 312 bp, synthetic construct
  misc_feature 1..312: note = Description of Artificial Sequence: Synthetic coding sequence
  source 1..312: mol_type = other DNA
atggcaggccgtcggttgaatttgagatgggcgctctcagtgctctgcgtgttgctgatggctgaaacagtttccggaacaaggggctccagcacgggggctcatatctctcctcagtttcccgctagcggcgtaaaccagactccagtggtggattgcagaaaggtctgtgggttaaacgtgagcgatcgatgtgatttcatacgaacaaaccctgattgccattcagacgggggttaccttgattacttggagggcattttctgccacttccccccaagcctgctgccgctcgcagtgacgctgtattag

SEQ ID NO: 241220 - DNA, 1755 bp, synthetic construct
  misc_feature 1..1755: note = Description of Artificial Sequence: Synthetic coding sequence
  source 1..1755: mol_type = other DNA
atggccggaaggcgccttaacctgaggtgggccctcagtgtcttgtgcgtgctcctgatggccgagacggtgagtggaacccgcggaagttccacaggggcacatatttccccccaattcccggcatctggagttaatcagactcctgtggtggattgccgaaaagtgtgtggcctgaatgtcagcgacaggtgtgactttatccggaccaaccccgactgccactccgatgggggatatctcgactatttggaggggatcttctgtcacttccccccttccctcctgcccctggccgtcactctttacgtgtcctggttactgtatctgtttcttattttgggcgtgaccgcagcaaaattcttctgcccaaacctgtccgccatctctaccacgctcaaattgtcccacaacgtggccggagttacgttcctcgcgtttgggaatggcgctcccgatatcttcagcgcactggtggcatttagcgacccccatactgcaggactggcactcggcgctttgtttggagcaggcgtgctggtaacaacagtcgtggcaggtggaattactatcctccacccgttcatggcagcttcaagacccttcttccgcgacatcgtgttttatatggttgccgtattcttaacctttctgatgttatttagggggcgagtgacacttgcctgggctctcggttatctcggcctgtatgtgttttatgttgttaccgtcatcctgtgtacctggatctaccagcggcagcggaggggctcattgttctgtccaatgcctgtgactcctgagatcctctctgacagcgaggaggatcgagtctcaagtaacaccaacagctatgattacggcgacgaataccgaccactgtttttctaccaagaaacgacagcccagattttagtccgtgcactgaatcccctggattacatgaagtggagacgcaaaagcgcatattggaaggctctgaaggtcttcaaattgccagttgaattcctgctccttctgacagttcccgttgtggatccagacaaggatgaccaaaattggaagagaccgctgaattgcttgcacctggttatctcaccgctcgtagtggtgctgactctgcagtctggcacatacggggtctatgagattggcggattggtgccagtctgggtcgtggtagtcatcgcagggaccgccctcgcgtctgttacatttttcgctaccagtgattcccaaccccctaggctccactggctcttcgctttcctggggtttcttacctcagctttatggattaatgctgccgctaccgaagtcgttaatatccttcgctcacttggcgtggtgtttcggctttccaataccgttctgggattaacactcctcgcttggggtaattcaattggagacgctttctccgactttacccttgcacgccagggctatccacgcatggctttttcagcttgcttcggcggaatcatctttaacatactcgtcggagtgggattaggctgtttgctgcagatttctcgatcccacacagaggtgaaactggaaccagacgggctgctggtgtgggtgctcgccggtgccctgggattgagccttgtcttttctctcgtgtcagttccgcttcagtgcttccagctcagccgcgtgtacggcttctgtctactgctgttttatctgaacttcctggtcgtagcactgctcaccgaatttggggtcatccacctaaaatccatgtag

SEQ ID NO: 241221 - DNA, 906 bp, synthetic construct
  misc_feature 1..906: note = Description of Artificial Sequence: Synthetic coding sequence
  source 1..906: mol_type = other DNA
atggcagaccagcccaaaccaatatccccactaaagaatctgctggcaggtggatttggaggtgtctgcttggtgttcgtcggccaccctctcgacacagtgaaagtacgactgcagacgcaacccccatctctgccgggacagccgccaatgtactccgggactttcgactgctttcggaagaccctgttccgagagggtatcacaggtctttacagaggaatggctgccccaattattggagtgacacccatgttcgctgtctgcttcttcggctttggattgggcaaaaagttgcagcagaaacatcctgaagacgttcttagctaccctcagctgttcgccgcaggcatgctgtccggcgtatttactaccggcatcatgacccctggggaaaggattaaatgtttgcttcagattcaggccagcagcggagaatctaaatacacagggaccctcgactgcgcgaaaaaactctatcaggagtttggaatcagggggatttacaagggtactgtgttgaccctgatgagagatgtcccggctagcggcatgtactttatgacatatgaatggctcaagaacattttcacaccagagggcaagcgagtgtctgaactgtccgccccaagaatcctggtcgcagggggaatagccggaatttttaactgggccgtggctatccctcctgacgtgctaaagtcaagatttcagactgctcccccaggaaagtaccccaacgggtttagggacgtcttgagggaacttattcgcgacgagggcgtcaccagcctttacaagggatttaacgctgtgatgatcagggctttcccagctaacgctgcgtgttttctgggctttgaagtcgccatgaaattcctgaactgggccacacccaacctatag

SEQ ID NO: 241222 - DNA, 756 bp, synthetic construct
  misc_feature 1..756: note = Description of Artificial Sequence: Synthetic coding sequence
  source 1..756: mol_type = other DNA
atgtatagcgggacttttgactgctttcgtaaaaccctgtttagggaaggcattacggggctttataggggcatggcagctccgattattggcgtcaccccaatgttcgccgtgtgctttttcggatttggtctgggaaagaaacttcagcagaagcaccccgaggacgtgctctcctacccccagctgtttgcagcaggaatgctgagtggggttttcacgactggtataatgactcctggagagcgtattaaatgcctcctgcaaatccaggcttcctccggcgagagcaaatacacaggcactctggattgcgctaagaaactttaccaagagttcggaatccgtgggatttataaggggactgttttaacactcatgcgagacgtaccagcctccggcatgtacttcatgacctatgagtggctaaaaaacatctttacgcctgagggaaagcgcgtgagtgagctcagcgcacctcgcattctggtggccggaggcatcgccggtatcttcaattgggcagtggctatacctcccgacgtcctcaaatcccgtttccaaacggctcctccaggcaagtatcctaatggatttagggatgtcctacgggagttgattagagacgagggagttacctccctgtacaaagggtttaatgcagtcatgatcagggctttccctgccaacgcggcatgtttcctgggattcgaagtcgctatgaaatttctgaactgggcaactccgaacctctag

SEQ ID NO: 241223 - DNA, 948 bp, synthetic construct
  misc_feature 1..948: note = Description of Artificial Sequence: Synthetic coding sequence
  source 1..948: mol_type = other DNA
atgacccaccaggacctgagtatcacagctaaactgatcaatggaggggtcgctgggctcgtcggcgtaacttgtgtgtttcccattgacctggccaaaactcgcttacagaaccagcacggtaaggccatgtacaaggggatgattgattgcctgatgaaaactgctagggccgagggatttttcggcatgtatcgcggagccgcagtcaatcttacactggtgactcccgagaaagccatcaaactcgccgctaacgatttctttcggcgtcttctcatggaggatggcatgcaacggaatctgaaaatggagatgctcgcgggttgcggtgcgggaatgtgccaggtggtagtgacttgtcctatggaaatgcttaagattcagctacaagatgcaggcagacttgccgtgcatcatcaggggtcagctagtgccccaagtacttcacggtcttatactaccggatcagcttctacgcaccgcagaccgtccgctactttgattgcatgggaactccttcgcacgcaggggctcgcaggtctgtataggggactgggcgctaccctgctccgggacattccattctccataatctattttccactgttcgccaacctgaacaacctgggatttaatgaattggccggaaaagcttccttcgcccatagctttgtgtcaggttgtgtggccggaagcatcgccgcagtcgcagttacgcctctggacgtgctgaagactcgaatccagacactgaaaaagggtcttggcgaggatatgtactctggcattaccgactgcgcccgaaagctgtggatacaggaggggccatcggcgttcatgaagggggctgggtgccgagccctggtgatagctccattgtttggaatcgctcagggcgtttacttcatcggcatcggggaacgaatattgaaatgtttcgattag

SEQ ID NO: 241224 - DNA, 948 bp, synthetic construct
  misc_feature 1..948: note = Description of Artificial Sequence: Synthetic coding sequence
  source 1..948: mol_type = other DNA
atgactcaccaagacctttctatcaccgccaaactgatcaacggcggtgtggctgggcttgtgggagttacttgcgtctttcctattgaccttgccaaaacacgtctgcaaaaccaacacggtaaagcaatgtacaagggcatgatcgattgtctcatgaaaacagctagggctgaaggattttttggaatgtacaggggtgccgcagtgaatctgaccctcgtcacccccgagaaagcaattaagcttgcagcaaatgacttctttaggcgtttgcttatggaagacgggatgcagcggaatctgaaaatggagatgctggcaggatgtggtgctggaatgtgtcaggtggtggttacatgcccgatggagatgctcaagatccagctgcaggacgctgggagactggcggtgcaccatcagggttccgcctcggccccttccacaagcaggagttacactaccggctcagccagcacacaccggagaccatccgccacccttatagcgtgggagctgctccggacccaaggcctggcaggcttgtaccggggtctgggtgccaccctgctccgtgatattcctttttccatcatctatttccccctgttcgccaacctgaataatctgggctttaatgagctcgccggaaaggcgtctttcgcacacagttttgtatccggttgtgtggccggaagcatcgccgctgtcgcggtcacgccccttgacgtgctcaagactagaattcaaaccctgaagaaagggctgggcgaggacatgtatagcggtattactgattgcgcacggaagctctggatccaggaagggccaagtgcatttatgaagggggcaggctgtcgagcattagttatcgcaccactgttcggaattgcccagggggtttatttcattggcatcggcgaacgcatattgaagtgcttcgattag

SEQ ID NO: 241225 - DNA, 1716 bp, synthetic construct
  misc_feature 1..1716: note = Description of Artificial Sequence: Synthetic coding sequence
  source 1..1716: mol_type = other DNA
atggaaaacgttaaggaaatctttggccagaccattattcatcatcatatcccattcaattgggactgtgagtttataaggcttcacttcggtcacaataggaagaaacacctaaactacacagagttcacacaattcctgcaagagctgcagctggaacacgctcgtcaggcattcgctctcaaggataaatccaaatcagggatgatttcgggactggattttagcgacattatggtcaccataaggagccacatgctcaccccatttgtcgaggagaacctggttagcgctgccggaggcagtatttcacatcaggtcagcttcagctacttcaacgcctttaattccctgctgaacaatatggagctggttaggaaaatttacagtactctcgccggtacacggaaggatgtggaagtgaccaaagaagaatttgcccagtctgccataaggtacgggcaggtgacccctctagaaatcgacatcctctaccaactggcggatctatacaacgccagtggtagacttactctggccgatatcgagagaatcgcccctttagcggaaggagcgctcccatacaatctagcagaacttcagcggcagcagagccctggcctgggcagacctatttggctccagattgctgagtccgcttacagatttactctgggaagtgtagctggagccgtgggcgcaacagcagtctacccgatagacctggtcaaaacaagaatgcaaaaccaaaggggtagcggttcagtggtcggagaattgatgtacaaaaatagttttgactgctttaagaaggtgctccgctacgagggattttttggcctctatagggggttaatcccccagctcatcggtgtggctccagagaaagccataaagcttacagttaacgactttgtgcgagacaagttcacccggagggacggttccgttccactccccgcagaagtgctcgcaggcggttgtgccggagggtcccaggtgatcttcaccaaccccctggaaatcgtaaagatccggcttcaagttgcaggagagattaccacaggaccacgcgtttctgcactaaacgtcctgagggatttaggaatcttcggtctgtacaaaggtgcaaaagcctgctttcttcgcgacatcccgttctccgccatctactttcctgtctatgcccattgtaagctgctgctcgcagacgaaaatggccacgtggggggtctcaatttgctggccgctggagctatggctggagtaccagccgctagtctcgttacccctgccgacgtgatcaaaacccgcctgcaggttgctgcacgcgcaggccagacgacatatagcggcgtcattgactgctttagaaaaatcctccgggaagaagggccatccgcattttggaaaggcacagccgctcgggtgttcaggtctagtcctcagttcggggtgacactggttacttacgagttgttgcagcgctggttctatattgacttcggtggactgaagcccgcaggctctgaaccaaccccaaaatcccggatcgccgatctccccccagcgaatcccgaccacatcgggggttaccgtttagctactgctacgtttgcaggcatcgagaataagtttggactgtacctgcccaagttcaagtcgccaagcgttgccgtggtgcaaccgaaggccgctgtggccgcaactcagtag

SEQ ID NO: 241226 - DNA, 2037 bp, synthetic construct
  misc_feature 1..2037: note = Description of Artificial Sequence: Synthetic coding sequence
  source 1..2037: mol_type = other DNA
atggccgtcaaggtgcagactacgaaacgcggagacccccatgaattgagaaacatcttcctccaatacgccagcaccgaagtcgacggtgagcgatatatgaccccagaagacttcgtgcagagatacctgggactctataacgaccccaactccaaccccaaaatcgtgcagctgttggcaggggtggcagatcagacaaaggatggtctgattagctatcaggagttcttagctttcgagtctgtgctatgcgccccagactcaatgttcatcgtcgcgttccagctgttcgataagagtggcaacggggaagtcactttcgagaacgtgaaagaaatcttcgggcaaaccattattcaccatcacatcccattcaactgggactgtgagttcatccgcctccattttggtcataacagaaaaaagcacctgaattatacagaattcacacagtttctgcaggaattgcagctggagcacgccaggcaagcctttgctcttaaagataagtccaagtcagggatgatctccggcctggacttcagcgatatcatggtgacaatccgcagtcacatgttgaccccttttgttgaggagaacctggtcagtgctgctggcggatctatcagtcaccaggtatcgttttcatactttaacgctttcaacagccttctcaacaacatggagctggtcagaaagatctactccacactcgccggaacacgcaaggatgtggaagttaccaaggaggagttcgctcagtccgcaatccgctatggacaggtgacccctctcgagattgacatattgtatcagctggcagatctgtacaatgcaagcggaagactgaccttagctgatatagagcgaattgccccactagctgagggagccctcccatataatctggccgaactccagaggcagcagtcgccgggtctcggccgtcccatctggctccagatcgccgagtccgcttatcgctttacgctcgggtccgtcgcaggcgctgtgggggctaccgccgtatatcccattgacctggtaaagacccgcatgcagaaccagaggggaagtggctccgtcgtcggggagctgatgtataagaacagtttcgactgctttaagaaggtgctaagatatgaggggttttttggcctatatcgagggttgatacctcaactgatcggcgtggctccagaaaaagccattaaactcaccgtcaacgattttgttagagacaaatttactcggcgagatggtagcgtccctcttcccgcagaagtgctcgctggaggatgcgcagggggaagccaagtcatttttacaaatcccctggagatcgtgaagattcgactgcaggtagcaggagagattactactgggcctcgcgtgagtgctctgaatgtgctgcgtgacctcgggatcttcggcctgtacaaaggagcaaaggcttgctttctgcgagatatccctttttcagccatatacttccccgtgtatgcacactgcaaactacttttggctgatgagaatgggcatgttggtggcttgaatcttctagcagccggtgcgatggcaggcgtaccagctgcaagcctcgtcactccagccgatgttatcaaaacacgtctgcaggtggccgcacgtgccggacagactacctattcgggtgtgatagattgctttcgaaaaatccttagagaagaaggaccctccgctttttggaaaggaacagccgctcgagttttccgctcatcaccccagttcggggtaactctcgtgacctatgaactgctgcagcgatggttctacattgatttcgggggactgaagccagcaggcagcgaacccacccccaaaagccgtatagcggatcttccacccgcaaacccagaccacatcggaggctatcgcctggcaaccgctacatttgccggaattgagaacaaatttggcttatacctgcctaaattcaaatcaccatcagttgctgtggtgcagccaaaagcggctgttgctgctacccagtag

SEQ ID NO: 241227 - DNA, 1944 bp, synthetic construct
  misc_feature 1..1944: note = Description of Artificial Sequence: Synthetic coding sequence
  source 1..1944: mol_type = other DNA
atggctgccggactggccacatggctgccattcgccagggccgcagcagtgggatggcttcctctggcccagcagcccctgccaccagccccaggcgtgaaggcatcgcgaggcgacgaggtcctagtggtgaacgtgagtggacgcagattcgagacatggaaaaatactctggataggtaccccgatacactcttagggtccagtgagaaagaatttttctacgacgctgatagcggcgaatatttctttgatagggatcctgacatgttccggcacgtcctgaacttttaccggactggaagactgcactgtccaaggcaggaatgtatccaggcctttgacgaggagctggccttttacggcctggtcccggagctggtcggcgattgctgtctggaagagtacagggatcgaaagaaggagaatgctgagcgcttggcggaagatgaagaggcggagcaggctggggatggacctgcactgccagccggatcctctttgagacaacgattgtggcgggcatttgaaaacccacacacctctactgcagccctggtgttttattatgtaaccggatttttcattgccgtctccgtgatcgccaacgtggtggaaacaattccatgccgcggatctgctaggcgatctagccgggaacagccatgtggcgagcgtttcccacaggcattcttttgcatggacactgcttgtgtgttaatattcaccggagaatatctactgaggctctttgcggcaccctcccggtgtcgctttctccgctctgtaatgtcactcattgacgtcgtggctattctgccctattacatcggcttgctagtacctaagaacgatgacgtgtctggtgccttcgtcacactcagggtgttccgggtgtttagaattttcaagttttcccgtcactcgcagggccttagaatcctagggtacaccttaaaatcctgtgcctcagagctaggctttctgctgttcagcctcactatggctattataattttcgccacagttatgttttatgccgagaagggaacaaacaagaccaacttcacttcaattccggctgccttttggtacaccattgtcaccatgacaaccctgggatacggcgacatggtgccgtccactattgccggaaagatattcggatcaatttgctcattgtctggagtcctcgtcatcgccttgccagtgccggttatagtgtctaattttagtagaatctaccaccagaaccagagggccgataaaaggagagcacagcagaaggtgcgattagccaggatccgcctcgctaagagcggtacaaccaacgctttcctgcagtacaagcagaacgggggactggaggacagtgggtccggtgaagagcaagcattgtgcgtccgcaatcgcagcgcattcgagcagcagcatcatcacctgctgcactgtctggagaagactacctgccatgagtttacggacgagttgacgttcagcgaagccctcggtgccgtgtcacctggaggccgaacttcgagatccacgagtgtgagttctcagccagtgggccctggatcgctgctttcgagttgctgtcccagaagggccaagcgcagagcgatcagacttgccaacagcaccgcatctgtgtcccgtggaagtatgcaggaattggacatgttagccggacttaggcgctcccatgcccctcagagccgcagctctctcaacgctaagcctcacgattctcttgacctcaattgtgactcccgcgatttcgtggcggctatcatatcgatccctacaccacctgcaaatactcccgacgaatctcagccgtcatctcccggaggaggaggacgggctggtagcaccctacgtaattcgagcttaggcaccccatgcttatttcctgagaccgtgaaaatcagttcactctag

SEQ ID NO: 241228 - DNA, 1062 bp, synthetic construct
  misc_feature 1..1062: note = Description of Artificial Sequence: Synthetic coding sequence
  source 1..1062: mol_type = other DNA
atgggcatcttccctggtattatacttatcttccttcgcgttaaatttgcaacggcagcagttattcaccagaagagcaccacagtgtcccacgaaatgtctggcctaaactggaaacctttcgtatacggcggactggcgtcaatcgttgcagagtttgggacatttcctgtggacctgacaaaaacacggcttcaggtgcaagggcaaagcattgatgcccgattcaaggaaatcaagtatcggggaatgtttcatgcgctcttcaggatctgtaaagaggaaggagttctcgctttgtactcaggaatagctcccgctctgctccgccaggccagctatgggacgatcaagatcggaatataccaatcgctgaaaaggctgtttgtcgagaggctagaagatgagaccctgttaattaacatgatctgcggagtggtgtctggggtaatttcttcaaccattgccaaccctacagatgttctgaagatccgcatgcaggcccaggggtccctctttcagggctctatgataggaagcttcattgatatctaccagcaagagggcacacgcggtctatggagatgcctgtgtagcaaagctgtaaccggttgcgtgctttggctgatgccagttattcccgcattatgggaagctaatgccggtggaagcctcgaaggggtcgtgcccacggcccagagagccgctattgtcgtcggggtggagctgcctgtgtacgatattactaagaaacacttaatcctgtcaggcatgatgggggacactatcctgactcacttcgtgtcctccttcacctgcggactcgcgggagcactcgcctcaaacccagtcgacgtggtgagaacccgcatgatgaaccagcgagctatcgtcgggcacgtggatttatacaaaggaactgtcgatggaatcctcaaaatgtggaagcatgagggattctttgctctttacaagggattctggccaaactggcttagattggggccatggaacattattttcttcatcacctacgagcagctgaagagactgcagatatag

SEQ ID NO: 241229 - DNA, 969 bp, synthetic construct
  misc_feature 1..969: note = Description of Artificial Sequence: Synthetic coding sequence
  source 1..969: mol_type = other DNA
atgggaattttcccagggattatcctcatattcttgcgggtaaagtttgccacggccgcagtgattcatcagaagtcaaccacggtctcacatgagatgtcagggctcaactggaaaccctttgtatatggcggactggccagcattgttgcggagtttggcacatttccagtggacctgacgaaaacacgcctgcaggtgcagggccagagcatcgacgcccgttttaaggaaattaaatatcggggtatgtttcacgctctctttcgtatttgcaaagaagaaggagtgttagcgctctactcaggtatcgctccggcactcttgaggcaggccagctacggaactataaaaatcggcatttatcagtcacttaaacggctgttcgtggagcgcctggaggatgagacattactcatcaatatgatttgtggagtagtctcaggggtgatttcaagtactattgctaatcccacagacgtgctgaagatcaggatgcaagcccaaggttcattatttcagggctctatgattggcagcttcattgacatttaccagcaggagggaactagggggctctggagaggcgtggtgccaaccgcccagcgggctgcaatcgtagttggcgtcgagttgcctgtctacgacatcaccaagaaacacctgatcctttccggaatgatgggcgatacgatacttacacactttgtcagtagcttcacctgcgggttggccggtgcgttggcatccaaccctgtcgacgtcgtgcggaccagaatgatgaatcagcgtgccatcgtggggcacgttgatctgtacaagggcaccgtcgacggtatactcaagatgtggaaacatgaaggcttcttcgcactatacaaagggttttggccaaactggctccgcctgggaccatggaatataatattcttcattacgtacgaacagctgaagcggctccagatatag

SEQ ID NO: 241230 - DNA, 597 bp, synthetic construct
  misc_feature 1..597: note = Description of Artificial Sequence: Synthetic coding sequence
  source 1..597: mol_type = other DNA
atgggcattttcccagggattatcctgatttttctcagggtgaagttcgccaccgccgcagtgattgtgtcaggacaccagaaatctacgacagtgtcgcacgagatgtcagggttgaattggaaaccatttgtttatggaggcttagcttcaattgtggcagaatttggcacgtttcctgttgatctgacaaagactaggctccaggtgcaaggacagtctattgacgcacggttcaaggaaatcaagtatcgtggcatgttccatgcattatttaggatttgcaaagaggagggcgttctagccttgtactctggcatcgcacctgcgctgctgaggcaggcttcctatggtactatcaagatcggaatttatcagtctctgaaaagactgtttgtggagagactggaagatgagacactcttgatcaacatgatctgtggagttgtaagcggggtgattagttccacaatagctaaccctactgatgtcctgaagataaggatgcaggcccaaggcagtcttttccaggggtcgatgatcggaagttttatagatatctaccagcaggagggaacccggggactgtggaggtag

SEQ ID NO: 241231 - DNA, 618 bp, synthetic construct
  misc_feature 1..618: note = Description of Artificial Sequence: Synthetic coding sequence
  source 1..618: mol_type = other DNA
atgagtggactgaactggaaaccattcgtgtatggaggtctggccagcattgtcgcggagtttggtacctttccggtggatctgaccaagacacgactccaagtccaaggacagtcgatagacgcccgattcaaagagattaagtatcgagggatgttccatgccctgttccgcatttgtaaagaagaaggcgtcctggcattatattcggggattgcccctgccctcttaaggcaagccagttacggtaccattaaaatcggcatctaccagtcactgaaacgactgttcgtggagcgcctggaagacgagactctcctgatcaacatgatctgcggcgtggtgtccggggtgattagtagcacaatcgctaaccccaccgatgttctgaagattaggatgcaggctcaggggtccctctttcagggaagcatgataggatcattcatcgacatctaccagcaagagggaacaagaggactttggaggggcgtggtcccaacggcacagagagctgcaatcgtcgtgggggttgagcttccagtttatgacattacaaagaagcacctgattctgtctggtatgatgggagacaccatcctgacgcactttgtttag

SEQ ID NO: 241232 - DNA, 723 bp, synthetic construct
  misc_feature 1..723: note = Description of Artificial Sequence: Synthetic coding sequence
  source 1..723: mol_type = other DNA
atgggaattttccctggcattatcctaatcttcctgcgagttaaatttgccacagccgcagtgattgtctcgggccatcagaagagcacgactgtgagtcatgagatgagcggtttaaactggaaaccattcgtatacggaggcttggcgagcatcgtggcggagttcgggacctttccagtagatcttacaaaaacaaggctgcaggtgcagggccagtcaattgacgctagattcaaagagatcaagtatcgcggtatgtttcatgctttgtttcgaatttgcaaagaagaaggcgttttggcactgtacagtggtattgcgcctgccctccttcggcaggctagttatgggactataaaaataggcatttaccaaagtctaaagcgcctgttcgttgagagacttgaggacgagaccttattgataaacatgatttgcggggtggttagcggcgttattagcagcactattgccaatcccaccgatgtcctgaagatccgaatgcaagcgcaggggtccctttttcaagggagcatgatcggctcatttattgatatctaccaacaggagggcactcgagggctgtggagaggcgtggtgcctacagcacagagggcagcaatcgttgtcggcgtggaactgcctgtgtatgacatcacaaagaaacatctgatcttgagcggtatgatgggtgacaccatcctgacccactttgtttag

SEQ ID NO: 241233 - DNA, 972 bp, synthetic construct
  misc_feature 1..972: note = Description of Artificial Sequence: Synthetic coding sequence
  source 1..972: mol_type = other DNA
atggcggacaaacaaatttcactgcccgcaaagctcatcaacgggggaatcgccggacttatcggagttacctgtgtctttccgatagacctggccaagactcgtctgcagaaccaacaaaacggtcaacgagtgtatacgagtatgtctgattgtctgatcaagaccgtccgctctgagggctactttggaatgtatcgcggagcagctgtgaacctgaccctggtgacgcctgagaaggctatcaagctcgccgcaaacgacttcttccgacaccagctttccaaagatgggcaaaagctgaccttgcttaaagaaatgctagccggatgtggagcgggaacctgccaggttatcgtgactactccgatggagatgctgaagatccaactgcaggacgcaggaaggatcgccgctcaaagaaagatcctggcagcccagggccagcttagcgcccagggaggagctcagcccagtgtggaggcacctgcagctccaaggccaacggctactcagttgacccgggatcttctgcggtcacggggtattgccggtttgtacaaggggcttggtgccaccctcctcagagatgtgccattttcagtagtgtacttccccctgttcgccaatctaaaccagctcggaagacccgctagcgaggaaaagagtcctttctatgtgtcttttctagctggctgtgttgcaggaagcgctgcagctgtggcagtgaacccctgtgacgttgtgaaaaccaggctgcaaagcctgcagagaggcgtcaacgaggacacctatagcggaatactggactgtgctcgaaaaatcttgcgacatgaaggtcccagtgcattcttgaagggagcatattgtagggccttagtcatcgcaccgctgtttggaatcgcacaggtcgtctatttcctcgggatagccgagagcctgctcggacttcttcaggacccccaggcttag

SEQ ID NO: 241234 - DNA, 333 bp, synthetic construct
  misc_feature 1..333: note = Description of Artificial Sequence: Synthetic coding sequence
  source 1..333: mol_type = other DNA
atggccgacaagcagatctcccttcctgctaagctgatcaacggagggattgccggattgataggtgtcacttgtgtttttccaatcgatctcgccaaaactaggctccagaatcagcagaacggccaaagagtgtacacaagtatgtcagattgcctgattaaaactgtccgatcagaggggtactttggtatgtatcgtggcgcagccgtgaacctgacactagttacccctgagaaggccattaaactagccgcaaatgattttttcagacaccagctgtcaaaggatgggcagaagcttactttgctgaaagagatgttggctggatag

SEQ ID NO: 241235 - DNA, 384 bp, synthetic construct
  misc_feature 1..384: note = Description of Artificial Sequence: Synthetic coding sequence
  source 1..384: mol_type = other DNA
atggccgataaacagatctcccttcccgcaaaacttatcaatggtggaattgccggactgatcggcgtgacatgcgtttttcccattgatctggctaagaccagactgcaaaaccagcagaacggtcaaagagtgtacacaagcatgagcgactgcttgatcaagaccgtcagaagtgaagggtattttgggatgtataggggcgcagcagtcaaccttaccctggtgactccggaaaaggccatcaagctggccgctaacgattttttcaggcaccagttgagtaaggacggtcagaaattgactctgcttaaggagatgttggcgggatgtggagccggtacctgtcaggttatcgtgactacccctatggaaatgctgtag

SEQ ID NO: 241236 - DNA, 360 bp, synthetic construct
  misc_feature 1..360: note = Description of Artificial Sequence: Synthetic coding sequence
  source 1..360: mol_type = other DNA
atggcagacaaacagatcagcctgcctgcaaagttgataaacggtggcattgcaggcctgataggggtgacttgtgtctttccaatcgacttggccaaaacaagattacagaatcagcaaaacggacaaagggtatatacaagcatgtcagattgtctaataaagacagtgcgctccgagggatactttggcatgtatcgcggagccgcagttaacctgacactcgttacaccagaaaaagccattaagctggcagccaatgattttttcaggcaccagctgtctaaggatggccagaagctaacgctgcttaaagagatgctcgctggctgcggagcagggacttgccaggtgatctag

SEQ ID NO: 241237 - DNA, 372 bp, synthetic construct
  misc_feature 1..372: note = Description of Artificial Sequence: Synthetic coding sequence
  source 1..372: mol_type = other DNA
atggccgacaagcagatttctttgccagcgaaattgattaatggcggtatcgcaggtttgataggagtcacctgcgtgttcccaatagaccttgcaaagaccaggctgcagaaccagcagaacggacagcgtgtttatacttctatgtccgactgtttgatcaaaactgtgcggagcgagggatatttcggcatgtataggggggcagccgtaaatcttactttggtcactcctgagaaggcaatcaaactggctgctaacgacttctttaggcaccaactgagcaaggacggccaaaaacttaccttactgaaggaaatgctcgctggctgcggagccggaacctgtcaggtgattgtcaccactccctag

SEQ ID NO: 241238 - DNA, 342 bp, synthetic construct
  misc_feature 1..342: note = Description of Artificial Sequence: Synthetic coding sequence
  source 1..342: mol_type = other DNA
atggcggacaagcaaatatccctgcctgctaagctgattaatgggggtatcgcgggtctgattggagtcacctgcgtgtttccaatagaccttgcaaagacacgcctacagaaccagcagaatggacagcgggtgtacaccagcatgtctgactgtttaattaaaaccgtgcgctccgaaggatactttgggatgtataggggagctgcagtgaatctaacgcttgtgacgccagagaaagcaataaagcttgcggctaatgatttcttccggcatcagttatctaaggacggacagaaactgaccctgctgaaggaaatgttggcagggtgcggcgcttag

SEQ ID NO: 241239 - DNA, 237 bp, synthetic construct
  misc_feature 1..237: note = Description of Artificial Sequence: Synthetic coding sequence
  source 1..237: mol_type = other DNA
atggctgataagcagatcagcctgccagctaaactcatcaatgggggaatcgcagggctgatcggagtgacatgtgttttcccaatcgatctcgcaaaaaccaggcttcagaaccagcagaatggacaaagagtatacacgagtatgagtgattgtctgattaaaactgtgcgatccgaaggatattttgggatgtacaggggcgcagccgtaaatcttacccttgtgacaccttag

SEQ ID NO: 241240 - DNA, 180 bp, synthetic construct
  misc_feature 1..180: note = Description of Artificial Sequence: Synthetic coding sequence
  source 1..180: mol_type = other DNA
atggccgacaagcagatttctctcccagcaaaactgattaacggaggcattgcaggcctgatcggggtgacctgcgtctttcccatcgatctggccaaaacacggctgcagaatcagcagaatggtcagcgcgtctataccagcatgagcgattgtctcattaaaacagtgcggagctag

SEQ ID NO: 241241 - DNA, 972 bp, synthetic construct
  misc_feature 1..972: note = Description of Artificial Sequence: Synthetic coding sequence
  source 1..972: mol_type = other DNA
atggccgataaacagatcagcttaccggcaaagctgatcaatggaggcatagccggtctgatcggcgtgacctgtgtatttccaatagacctcgcgaagactcggctgcagaaccagcagaacggtcagagggtgtatacgtctatgtcagattgcttgatcaaaactgtcaggtccgaggggtacttcggcatgtaccgcggtgcagctgtgaacctgaccctagtgacacctgagaaggcaatcaaactcgccgcaaacgatttctttcgtcaccagttgagcaaggatggccaaaagctgacattactgaaagagatgctggcgggttgcggagccggaacttgccaggtgattgttacgacacctatggagatgcttaaaatccagcttcaggatgccggaaggatcgcagcacaacgaaaaatcctcgccgcacaaggccagctgagcgcccagggtggcgctcagccatccgtggaagctcccgcagctcctcgtcccacagccactcagttgacacgcgatctgctgaggagcagaggaatcgctggactgtataagggtctaggcgcaacgctcctgcgggacgtgcccttctcggtggtatactttcccctgttcgctaatctgaatcagctcggcagaccagcatccgaggagaaaagcccattttatgtgtccttcttagcaggatgtgtcgcagggtccgccgctgcagtggcggtcaacccgtgtgacgtggttaagacgcggctgcaaagcctccagcgcggagtgaatgaggacacttactctgggatcctagactgtgctcgtaaaatcttgcgtcatgaaggacccagcgcctttttgaaaggtgcttattgccgggctctcgtgatcgcacccttatttgggattgcccaggttgtgtacttcctgggcatcgcagagtcgcttctcggcctcctccaggatccacaggcatag

SEQ ID NO: 241242 - DNA, 345 bp, synthetic construct
  misc_feature 1..345: note = Description of Artificial Sequence: Synthetic coding sequence
  source 1..345: mol_type = other DNA
atggccgacaagcagattagtctacctgcaaagctgattaacggtggcattgcaggcctcatcggcgtcacttgtgtctttcccattgacctggccaaaactaggctgcagaaccagcaaaatggtcaaagggtgtacacttccatgtccgattgtctcattaagacagtccggagtgaagggtacttcgggatgtatcgcggagccgctgtcaacctcaccctcgtgaccccagagaaggctattaagcttgctgccaacgatttctttagacatcagctgtccaaggacggacaaaagctgacactgttgaaagagatgctggctggttgcggagctgggtag

SEQ ID NO: 241243 - DNA, 237 bp, synthetic construct
  misc_feature 1..237: note = Description of Artificial Sequence: Synthetic coding sequence
  source 1..237: mol_type = other DNA
atggctgacaaacagatcagcctgcccgcaaagctgataaatggcggtatcgccggtctaattggcgttacctgtgtattcccaatcgatctcgccaaaacccgtctgcagaatcaacagaacggacagcgggtttacacatcaatgtcggactgtctcatcaagaccgtgaggtctgagggatatttcggaatgtaccgcggagcagccgtcaacctcactctagtcactccttag

SEQ ID NO: 241244 - DNA, 321 bp, synthetic construct
  misc_feature 1..321: note = Description of Artificial Sequence: Synthetic coding sequence
  source 1..321: mol_type = other DNA
atggctgacaaacaaatctctctccctgcaaagctgattaatggcggaatagctggcttaatcggcgtgacttgcgtctttcccatcgacttagcaaagacaaggcttcagaaccagcagaacggccagcgagtatatacctctatgagcgactgcctgatcaaaaccgtcaggagtgaaggatattttggcatgtatcgcggagctgccgttaatttaaccctagtgaccccagaaaaagccatcaaattggccgcaaatgattttttcaggcaccagctgtctaaggacgggcagaaacttaccttgcttaaggagtag

SEQ ID NO: 241245 - DNA, 408 bp, synthetic construct
  misc_feature 1..408: note = Description of Artificial Sequence: Synthetic coding sequence
  source 1..408: mol_type = other DNA
atggccgacaaacagatctccctcccagccaagctgatcaatggaggtattgctgggcttatcggcgtgacgtgcgtgtttcctatagacctagctaagactcggttacagaatcagcagaacgggcagagggtctacacctccatgtcagactgcctgatcaaaactgtgaggagtgaggggtattttggaatgtacagaggcgcagctgtaaacctcacgcttgtgacgccggagaaggccattaagttggccgcaaacgatttctttcggcaccagttatctaaagatggacagaaactgactctgttgaaggagatgttggccggatgcggcgctgggacttgtcaggtcatcgtcaccactccaatggaaatgctaaagatccaactccaggatgccggatag

SEQ ID NO: 241246 - DNA, 948 bp, synthetic construct
  misc_feature 1..948: note = Description of Artificial Sequence: Synthetic coding sequence
  source 1..948: mol_type = other DNA
atgcaccgagagcctgctaaaaagaaggccgagaagcgcctctttgatgccagctcatttgggaaggaccttctggccggaggagtggctgctgccgtcagcaagactgctgttgcccctattgaacgggtcaaattgctgctgcaggtgcaggccagcagcaagcagatcagcccagaggcaagatataagggtatggttgactgcctggtgcggataccgagggaacagggcttcttcagcttctggcgcggaaacttggctaatgttataagatactttccgacacaggccctcaattttgctttcaaggataagtacaagcagctattcatgtctggagttaacaaggagaagcaattctggagatggtttctggcgaatttggccagcggtggtgccgcaggagccacaagtctctgcgtggtttacccgctggattttgcccgaacacgcctaggagtcgacatagggaaaggccctgaggagcgacagtttaagggcctgggcgactgcatcatgaaaattgcaaaaagcgatgggatcgccggtctgtatcaaggcttcggcgtgtcggtacagggcattatagtgtaccgagcctcctattttggggcttatgatacggtgaagggcctgctacccaaacccaaaaagacaccgtttctggtgtcctttttcattgcacaggttgtgaccacatgcagcggtatactcagttacccctttgataccgttaggcgcagaatgatgatgcagtccggtgaagctaagaggcagtataaggggaccttggattgcttcgtaaagatatatcaacatgagggtatttctagcttttttcgaggcgcttttagtaatgtgctgcgtggaacgggaggcgcattagttctcgtgctctacgacaagatcaaggaatttttccacatcgacatcggaggcaggtag

SEQ ID NO: 241247 - DNA, 897 bp, synthetic construct
  misc_feature 1..897: note = Description of Artificial Sequence: Synthetic coding sequence
  source 1..897: mol_type = other DNA
atgggggaccacgcatggtccttcctgaaggacttccttgccggtggagtggcagccgcagtgtctaaaacagccgtcgcccctatcgaaagagtgaagttattgctccaggtccagcacgcttcaaaacagatatccgccgaaaagcagtataagggaatcatcgattgcgtggtgaggatacctaaggagcaaggctttctgagcttttggcgcggaaacctggccaatgtaattagatacttccctacgcaggcgctaaattttgcatttaaagacaaatataaacagctgtttcttggtggcgtggataggcataagcagttttggcgctactttgcgggaaaccttgccagcggcggagcagccggtgccaccagcttgtgcttcgtgtaccccctcgacttcgcaagaactcggctggccgctgacgtcgggaagggagcggctcagagggagtttcacgggttaggtgactgcataatcaaaatcttcaaatcggacggccttcgaggactctaccagggcttcaacgtctctgtacagggcatcatcatataccgtgcggcttactttggggtgtatgacaccgccaagggaatgctccctgaccccaaaaatgtccatattttcgtgtcctggatgattgcacagtcagtaacagctgtcgccggtctggtgtcctaccccttcgacactgtcaggcgaagaatgatgatgcagtctggccgtaagggagctgacatcatgtacacaggaacggtggactgttggcggaagatagccaaagatgagggcgctaaggccttttttaagggtgcctggtctaacgtccttagaggtatgggcggtgcgtttgttttagtcttgtatgatgagattaagaaatatgtgtag

SEQ ID NO: 241248 - DNA, 897 bp, synthetic construct
  misc_feature 1..897: note = Description of Artificial Sequence: Synthetic coding sequence
  source 1..897: mol_type = other DNA
atgacagatgcggctgttagtttcgccaaggatttcttagccggaggagtggcagcagctatctcaaagactgcagttgcccctatcgaaagggtgaagttgctgcttcaggttcaacatgcgagtaagcaaattaccgcagacaagcagtacaaaggaataatagactgtgtggtgcggattccaaaagagcagggggtcctctcattctggagaggcaacctggccaacgttattcgctattttcctactcaggccctcaacttcgcgtttaaagacaagtataaacaaatttttttgggaggggtcgataagcgaacccaattctggttatacttcgccggaaacctggcttcaggcggagctgctggcgcaacttccctatgttttgtctatccccttgactttgcacggaccagactggctgcggatgttggtaaagccggagccgaacgcgaatttcggggacttggcgactgtctggtaaagatttacaaatccgacggcatcaagggattataccagggattcaacgtctccgtccaaggcatcatcatatacagagccgcttacttcgggatatatgacaccgccaaaggaatgttgcccgatcctaagaatacccacatagtgatctcctggatgatcgcccaaactgtaactgccgttgccggactaacctcatatccttttgacactgtgcggaggcgtatgatgatgcagtccgggcgtaaaggcacagacataatgtacacaggaacactcgattgctggcggaaaatagccagggacgaggggggtaaggccttctttaaaggcgcttggagtaatgtcttgcgtggaatggggggagcttttgtgctggtgctgtacgacgaaatcaaaaaatacacatag

SEQ ID NO: 241249 - DNA, 897 bp, synthetic construct
  misc_feature 1..897: note = Description of Artificial Sequence: Synthetic coding sequence
  source 1..897: mol_type = other DNA
atgaccgaacaggctatcagctttgccaaagactttctcgcgggaggaatagccgcagctatcagcaagaccgccgtggcacctatcgagcgcgttaagctcctcttacaggttcagcacgcatccaagcaaattgccgctgataagcaatacaaaggcatcgtggactgcatcgttcgaatccctaaggaacaaggcgtactgtctttttggcgcggtaacctggctaacgtcatcagatattttcctacccaggcccttaacttcgcattcaaagacaagtacaaacagatctttctggggggtgtagataagcatactcagttttggaggtactttgctgggaacttggcctctggaggggctgccggagcaacttccctgtgtttcgtttatcctctggatttcgctcggacccgtttggctgccgacgttggtaaaagtggaactgagcgcgagttcaggggactaggggactgtctggttaaaataacaaagtctgatggaatccgcggtctgtaccagggtttttccgtaagcgttcaaggaataatcatctacagagcagcatattttggggtgtatgataccgccaaggggatgttgcccgatccaaagaatactcatattgttgtcagttggatgatcgcacagacggttaccgctgtggcaggcgtagtctcgtacccctttgacaccgtgagaagacgaatgatgatgcagtcaggacggaagggcgctgacatcatgtacaccgggaccgtggattgctggagaaaaatctttcgagacgaaggtgggaaggcgtttttcaaaggcgcatggagtaatgtcctgagggggatgggaggtgctttcgttctggtactgtatgatgagctgaaaaaggtgatttag

SEQ ID NO: 241250 - DNA, 477 bp, synthetic construct
  misc_feature 1..477: note = Description of Artificial Sequence: Synthetic coding sequence
  source 1..477: mol_type = other DNA
atgaccgagcaggctatcagcttcgccaaagactttctggcgggagggatcgccgcagctatatcgaaaacagcagtcgcacctatcgagcgggttaaactgctcctgcaagtgcaacacgcaagcaagcagatcgctgccgacaaacagtacaaaggcatcgttgactgtattgtccggattccaaaagaacagggcgtgttaagcttctggcgcggtaacctggctaacgttatacgctactttcctacacaagctctgaacttcgctttcaaagacaagtacaagcagatttttctgggtggtgttgacaaacatacgcaattctggcgttatttcgctggcaatctggcgtctggtggggctgctggcgcaacaagcttgtgcttcgtctaccccctggattttgcgcgaactagactcgcggctgacgtggggaagagtggtactgagcgcgaattccgaggattgggatag

SEQ ID NO: 241251 - DNA, 2913 bp, synthetic construct
  misc_feature 1..2913: note = Description of Artificial Sequence: Synthetic coding sequence
  source 1..2913: mol_type = other DNA
atgctgtgtttcctggatgatggcgctggcatggatccctcagacgcagcctcggttattcagttcggcaaatccgccaagcggacacccgaaagcactcagatcggtcaatacggtaatggactgaagtccggatctatgaggattgggaaggactttattctattcacaaaaaaggaagacaccatgacgtgtctgttcctcagtcggaccttccacgaagaggaggggatcgacgaggttattgtgccgctgcctacctggaatgcccgaacgcgagaacctgtaaccgataatgttgagaaattcgctattgagaccgagttgatctataagtacagtcccttccggaccgaggaagaagtgatgacccagttcatgaaaatcccaggtgacagcggcactctggtcatcatctttaacctgaagctgatggacaacggggaacccgagctagacatcatttcaaacccaagggatattcagatggctgaaacaagccctgaaggcactaaacccgagagacggtcttttagggcctatgcagccgtgctatacattgaccctcgtatgcggattttcattcacggccacaaggtgcagaccaagcgcctgtcctgttgcttgtataagccaagaatgtacaagtacacaagcagtcgcttcaaaacgagggctgagcaggaggtgaagaaagccgagcacgtcgccagaattgccgaggagaaggcgcgtgaggcagaatctaaagcccgtacactggaagtgagacttggtggagatttgacacgggattctcgagttatgttgcgacaggtgcagaatcgagccatcactctcagaagggaggccgacgtcaaaaagaggattaaagaggccaagcaaagggcactgaaggaaccaaaggagctgaatttcgtcttcggcgtcaacatagaacaccgtgaccttgacggcatgtttatttacaactgttcacgattgatcaagatgtacgaaaaggttgggccacaactagagggcggaatggcttgcgggggagttgtcggtgtggtggatgtgccatatctggtgctggagccaacacacaacaaacaggactttgccgatgccaaagagtaccggcacctcctccgggctatgggcgagcatttggcccagtactggaaggatatcgccatcgctcagcggggaatcatcaaattttgggacgagttcggttatctgtccgccaactggaaccaacctcctagcagcgagctacggtataagagacggagagctatggagattccgactactattcagtgtgacctgtgtttaaaatggaggacactgcccttccaacttagctcggtggagaaggactatccagatacctgggtttgttctatgaatcctgatcccgagcaggatcggtgtgaggccagtgagcagaagcagaaggtgccgctgggcacatttcggaaggatatgaagacccaggaagaaaaacagaaacagctcacggagaagattaggcagcagcaggagaaactagaagccttacagaaaaccactccaatccggtcccaggccgacctgaagaagctccccctcgaggtgacaaccagacccagtacagaggagccagtgaggcgaccccaaagaccccgttcgccaccgctcccggcagtgatacggaatgccccatcacgccctccatccctgccgactcctcggcctgccagtcagcccagaaaggcacctgtgattagtagcacaccaaagctgcctgccttggctgctcgcgaggaggcttctacttcccggcttttgcagcccccagaggcgcctaggaagccggctaacacgctggttaagactgcgagtcgacctgcacctttagtgcagcagctgtccccttcattgctgcccaactcaaaaagtcccagagaggtgccatctcctaaggtgataaagacccctgtggtgaaaaagaccgaatcacccatcaagttgagccccgctacaccttcgaggaaacggagcgtcgcagtttccgacgaggaggaagtggaggaggaggctgagcggagaaaggaacgttgtaagcggggtagatttgttgttaaggaagagaaaaaagatagcaacgagctgtctgattccgccggagaggaggattctgccgatctgaagagggctcagaaggacaagggcttacatgtggaagtccgagtcaatagagagtggtacaccggcagagtaaccgccgtcgaagtgggaaaacacgtagtccgatggaaggtaaagttcgattatgtgccgacagacactacaccgagagaccgatgggtcgagaagggatccgaagatgtgcgcctgatgaagccgcctagcccagaacaccagtcgctagacacgcaacaggaagggggagaagaggaggttggtcctgttgctcagcaggccatcgccgtggccgagccctctacctccgaatgtctacggatcgaaccggacacaactgcattgagcacaaatcacgagactatcgatctcctggtgcaaattctcaggaactgtttgcgctatttcttgcccccatccttccccatttccaagaaacagctttccgccatgaactcagatgaactgatctctttcccacttaaagagtactttaaacagtacgaggtaggcctccaaaatctgtgcaactcctaccagagtcgcgctgacagtagagcgaaagcctcagaagaatcccttaggacctcagagcggaagctgcgggaaacagaggaaaagcttcagaagctgcgaaccaatattgtggcccttttgcaaaaagttcaggaggatatcgacattaatactgacgacgagttggatgcatatatcgaggatctgataactaagggggactag

SEQ ID NO: 241252 - DNA, 627 bp, synthetic construct
  misc_feature 1..627: note = Description of Artificial Sequence: Synthetic coding sequence
  source 1..627: mol_type = other DNA
atgtttgaatttttaagtaatcacatgcgggacgctcaagggagactcgactctacccgcggactgctctgtggattgggggctggcgtcgccgaggcagttgttgttgtatgccctatggagactattaaagtgaaattcattcacgaccagacatcacccaatcctaaataccgcggattcttccatggagtgagggaaattgtacgggagcagggcttgaagggaacctatcagggactgaccgcgacagttctgaaacaggggagcaaccaggctatcaggttcttcgtcatgacctcattaagaaattggtacaggggcgataacccgaataaaccgatgaaccccttgattactggcgtcttcggtgcaattgctggagcagcttccgttttcgggaatactccactggatgtgatcaaaacgcgaatgcagggtctggaagcccacaagtatcggaacacatgggattgtggactacagattctgaaaaaagagggcctcaaagccttttacaaggggacagttccacggctgggtcgggtatgtcttgacgtggccatcgtgtttgtgatttatgatgaagttgttaagctgcttaacaaagtatggaagacggattag

SEQ ID NO: 241253 - DNA, 999 bp, synthetic construct
  misc_feature 1..999: note = Description of Artificial Sequence: Synthetic coding sequence
  source 1..999: mol_type = other DNA
atggccgcagctaccgcagctgccgcactggccgcagcggatcctccgccagccatgccgcaggcggctggagctgggggacctacaacccggagggatttttattggttacgatcttttctggccggtggcatcgcgggttgttgtgccaagacaacggttgccccactggacagagtgaaggtactgctccaggcccataaccaccattataagcacctcggggtgttttccgctctcagggccgtccctcaaaaggaaggtttcctcggcctttacaagggtaacggtgccatgatgatcagaatatttccatacggcgctattcagttcatggcatttgagcactacaagacactgatcacgacgaagctcgggatcagtggtcatgtgcaccgcttgatggctggcagcatggccggaatgacagccgtgatttgcacataccctctagacatggtgcgcgtgaggctggcatttcaggtcaaaggcgagcactcttacacggggattatccatgccttcaagacaatctatgctaaagagggaggattctttggcttctacagaggtttaatgcctactatattggggatggccccatatgctggcgtctctttttttacctttgggactctgaagtctgtgggtttaagccacgccccaacgctactcggaagaccttcctctgacaaccccaatgtgctcgtgctgaaaacccacgtgaatctcctgtgtggcggtgtggcaggcgctatcgcgcaaaccatctcctaccccttcgacgtgacgcgccgacgaatgcagctggggacagttcttccggagtttgagaaatgtctgacaatgcgggacaccatgaagtatgtgtacggacatcacggtatcagaaaaggattgtacagaggcttgtcactcaactacatcaggtgtattcctagccaggcagtcgcctttaccacctacgagctcatgaagcagttcttccacctcaattag

SEQ ID NO: 241254 - DNA, 705 bp, synthetic construct
  misc_feature 1..705: note = Description of Artificial Sequence: Synthetic coding sequence
  source 1..705: mol_type = other DNA
atgatgattagaatctttccctacggtgccatacagttcatggcttttgagcattacaagactctcattacaaccaagctgggaattagcggccacgtccacagacttatggcaggctcaatggccggaatgactgccgtcatctgcacctatccactcgacatggtgcgggtgcgactcgctttccaggtgaagggggagcacagctatactgggatcatccatgccttcaagacaatttacgcaaaggaagggggattctttggcttctacagggggctgatgcctacgatcttagggatggcaccgtacgcaggcgtcagtttctttaccttcgggacactcaagagtgttggtctctcccacgctcccaccctcttggggagaccgagttcagacaatccgaacgtgcttgtgctaaagacccacgtgaatctgctgtgcggcggagtagcaggcgcaatagcccagacaatcagttatccattcgacgtcaccagacgacggatgcagctggggacagttctcccagaattcgaaaagtgcctgaccatgcgtgatactatgaagtatgtgtatgggcatcatggcatacgtaagggactctacagaggactgagcctcaattacatccgatgcatcccttcacaggccgtggctttcacaacatatgaactgatgaaacagttttttcatctgaactag

SEQ ID NO: 241255 - DNA, 906 bp, synthetic construct
  misc_feature 1..906: note = Description of Artificial Sequence: Synthetic coding sequence
  source 1..906: mol_type = other DNA
atgaagagtaaccccgcaatccaagccgctatagatcttacagccggagcagcaggaggtaccgcatgcgtgctgaccggccagcccttcgatacaatgaaagtcaagatgcagacttttcctgacttatatcggggtttgacggactgctgcctcaagacatacagccaggtaggattcaggggcttctacaaaggtacctctcccgcattaatagctaacatcgccgagaatagtgtcctgttcatgtgctatggtttttgccaacaggtggtccgcaaagtggctgggctggacaagcaagctaaactgtctgacctgcaaaacgcagctgcgggatcctttgcttccgcatttgccgcactagttctatgtcccactgaacttgttaagtgccgcctccagacaatgtacgagatggagactagcggaaagatagccaaaagtcaaaacaccgtgtggagtgtaatcaaatcaatcctccggaaggatggcccactaggtttctaccatgggttgagtagtacgctgctgagggaggtcccaggatactttttcttctttgggggttatgaactctcacgatccttttttgctagcggtaggagtaaagacgaactggggccagttccactcatgctgtctggaggagttggaggtatctgcctctggctcgccgtctatccagtggattgtatcaaaagccggatccaggtgctgtccatgagcgggaagcaagccggattcatcagaaccttcattaatgtggttaagaacgagggtatcacggccctctattcaggactcaaaccaacaatgatccgtgcttttcccgctaacggagcactatttctggcctacgagtattcaagaaaactcatgatgaaccaactggaagcttactag

SEQ ID NO: 241256 - DNA, 402 bp, synthetic construct
  misc_feature 1..402: note = Description of Artificial Sequence: Synthetic coding sequence
  source 1..402: mol_type = other DNA
atgaagagtaatcccgcaatccaggccgctatcgacctcaccgctggtgcagcaggaggcactgcgtgcgttctcacaggccagcctttcgacaccatgaaggttaagatgcagaccttccccgacctgtacagaggcttaacggattgttgcctgaaaacttatagtcaagttggcttcagagggttctataaagggactagcccagctctaatcgcaaacatagctgaaaactccgtcctgttcatgtgctacggattctgccagcaggttgtgcggaaggttgctggcctggataagcaagccaaactgtcaactgtgtggtctgtgatcaagtcaatcttgaggaaagacggtcctctcggtttttatcacggtctgtccagcactttactgaggtag

SEQ ID NO: 241257 - DNA, 402 bp, synthetic construct
  misc_feature 1..402: note = Description of Artificial Sequence: Synthetic coding sequence
  source 1..402: mol_type = other DNA
atgaagtcaaatcctgccatccaagctgccatcgatcttacggccggtgccgcaggcggaactgcatgtgtgctcactggacagccgtttgacacaatgaaggtgaagatgcagacgtttcccgacctgtatagaggccttacagactgttgcctgaaaacatactctcaagttggcttcagggggttctataagggcacttcccctgctctcatcgcgaacattgcagagaacagcgtgctgtttatgtgctacggcttctgtcagcaggttgtcagaaaggttgcaggtctcgacaagcaagctaagctgtcaactgtatggagcgtaataaaatcgatcctccgtaaggatggccctctgggcttctaccatggcttatcctccaccctcctgagatag

SEQ ID NO: 241258 - DNA, 906 bp, synthetic construct
  misc_feature 1..906: note = Description of Artificial Sequence: Synthetic coding sequence
  source 1..906: mol_type = other DNA
atgaaatctaatccagctatacaagccgctatagacttgactgccggagcagccggtgggacggcctgcgtcctcactggtcaacctttcgatacgatgaaagtgaaaatgcagacatttcccgatctgtacaggggactgaccgattgctgtttgaagacctatagtcaagtgggcttccgcggattctataaaggcacctctcctgctctcatagccaacatcgccgaaaattccgttctttttatgtgctatggcttctgtcagcaagtggtccggaaggtggccggtttggataaacaggccaaactgtccgacttgcagaacgcagccgcagggagcttcgcgagcgcattcgcggctctggttctgtgtcccaccgaactggtgaaatgcagactccaaactatgtatgaaatggagacttccggcaaaatagccaaaagccagaatacagtctggtccgtgattaaatccattttgagaaaggacggcccacttggtttttaccacggtctttcatctaccctgttgcgagaggtgcctggctattttttctttttcggcggatacgagctgtcgaggagcttttttgcgagcggaagaagcaaagacgagctcggccctgtgccgctcatgttgtccggtggggtcgggggaatctgtttgtggctggccgtgtacccagtggattgcatcaagagcaggatccaggtgttatccatgagcggaaaacaagcagggtttattcggacattcatcaacgtggttaagaatgaaggcatcacagcactctatagtggattgaagcccacaatgatcagagcatttccagcaaatggagccctattcctagcatatgaatacagcaggaagcttatgatgaaccagctagaagcctactag

SEQ ID NO: 241259 - DNA, 726 bp, synthetic construct
  misc_feature 1..726: note = Description of Artificial Sequence: Synthetic coding sequence
  source 1..726: mol_type = other DNA
atgaagagcaatcccgctattcaggctgccatagacctcacagctggggctgctgggggaaccgcgtgtgtgctcacagggcagcctttcgatacaatgaaggtcgccggactggacaaacaggctaagctgtcggacctgcagaatgcagccgcaggctccttcgcctctgctttcgcagctctcgtgctgtgccctaccgaactggttaaatgtagacttcagactatgtacgaaatggagaccagcggcaagattgccaagtcacaaaacactgtatggagcgtgatcaagagcattctgcggaaagatggccctctgggattctaccatggcctgtctagcacgctgctgcgggaggtgcccggttacttttttttctttggaggttatgaattatcccgttctttttttgcctctggcaggagtaaagatgagttgggccctgtgcccttgatgttgagcggaggcgtcggaggcatatgcctttggctcgcagtgtacccggtggattgcatcaagtcgcgtatacaggttctctctatgtcggggaaacaggctggattcattcgtacctttattaacgtagtcaaaaacgagggcattacagctctatatagcgggctgaagccaaccatgatacgggcatttcctgcgaacggcgctctgtttctggcatacgagtatagccgaaaactgatgatgaatcaactggaggcgtactag

SEQ ID NO: 241260 - DNA, 906 bp, synthetic construct
  misc_feature 1..906: note = Description of Artificial Sequence: Synthetic coding sequence
  source 1..906: mol_type = other DNA
atgaagtccgggcctggaatccaggccgcaattgatctgactgccggagctgccggtggcaccgcctgcgtgttgacagggcagccatttgatactattaaggtcaaaatgcaaacattccctgatttgtacaagggactcacggactgtttcctcaagacttacgctcaggtgggcctacggggtttctacaagggtacaggcccagcgctaatggcttatgtggccgagaatagtgtactgttcatgtgctatggcttttgccagcagttcgtaaggaaagtggctggcatggacaaacaggcgaaactgagtgatctccagacggcggcagccggtagcttcgcttccgcttttgccgcactcgcattgtgccccaccgaacttgtcaagtgccgactacagaccatgtatgaaatggaaatgtccggcaagatcgccaaaagccataacacaatttggagcgttgtgaagggcattctcaaaaaagacggtccattgggcttctatcatggcttgagctctacactgctgcaggaagtgcctggttactttttcttctttgggggatatgagcttagtcgctccttctttgcctcggggcgaagcaaggacgaactcggcccagtccacctgatgctgtccggtggagtagcgggtatttgcctttggcttgtggtgtttcccgtcgactgtattaaaagtaggatccaggtactgtccatgtatggcaagcaggctgggtttattggcaccttactgtcagtagtccgtaatgaaggaatcgtggccttgtacagtgggttaaaagcaacaatgattcgggcaatacccgcaaatggcgctttgttcgtggcctatgaatacagtcgaaaaatgatgatgaagcagcttgaagcctactag

SEQ ID NO: 241261 - DNA, 423 bp, synthetic construct
  misc_feature 1..423: note = Description of Artificial Sequence: Synthetic coding sequence
  source 1..423: mol_type = other DNA
atggcaggatggaacgcgtatatcgacaacctcatggctgacggaacgtgtcaagatgcagcaatcgtcgggtacaaagattccccatcagtctgggcggcagtacccggtaaaacgttcgtgaatatcacccccgcagaagttggagtcctggttggcaaagatcggagctcgttctacgtgaacggcttaactctagggggacaaaagtgctccgtcattcgtgacagtctcttgcaggatggggaatttagcatggatctgcgcaccaagagcactggcggtgcacctaccttcaatgtcaccgtgactaagaccgataagaccctcgttcttctgatgggtaaagagggtgtgcacggcggactcatcaacaagaagtgttacgaaatggctagtcacttaaggcgcagccagtactag

SEQ ID NO: 241262 - DNA, 792 bp, synthetic construct
  misc_feature 1..792: note = Description of Artificial Sequence: Synthetic coding sequence
  source 1..792: mol_type = other DNA
atggcagcaaccgcaagtgctggagccggaggaatcgacggtaaaccaaggaccagccccaagagcgtgaaattcttgttcggtggtctggctggtctcagcgccggtttgcttcgccaggccacatatactaccacccggctcggaatttacacagtcctcttcgagcgacttaccggagctgacggtacgcctccgggattcctgttaaaagccgtgatcgggatgactgctggcgctaccggagcttttgtggggacaccagccgaagtggcgctaatacggatgacggccgatgggcgactgcctgccgatcagagacgaggttacaaaaacgtgtttaacgcgttgatcagaattacccgggaggaaggcgttctcacactttggcgcggatgcattccaaccatggctagagccgtggtcgtgaatgctgcccagctggcttcatactctcaatccaagcagttcctgctcgatagcggttattttagcgataacatattgtgtcacttctgcgcgtctatgatatctggcctggtgacaactgccgcaagcatgccagtggatattgccaagacccgcattcagaatatgagaatgatcgacggaaagccagaatacaagaacggccttgacgtgcttttcaaggtcgtgcgctacgaaggcttcttcagtttgtggaagggcttcaccccatattatgctagacttggcccacacacagtcttgacctttatttttctcgagcagatgaacaaggcctataaacgcctcttccttagtggatag

SEQ ID NO: 241263 - DNA, 678 bp, synthetic construct
  misc_feature 1..678: note = Description of Artificial Sequence: Synthetic coding sequence
  source 1..678: mol_type = other DNA
atggaatactggtacgtggcactgaagcagcagtcactgaaggcagacattctgccctccctgttccttagtatcttcctggtaaaaggggtcgtgaacgtgttactgactaccccgttgtgggttgtaaatacaagattgaaattgcaaggtgcaaagttcaggaacgaggacattgtgccaaccaattacaaaggaatcattgacgcgttccaccaaatcatccgtgacgagggcatctctgcactgtggaacggcacatttccctccttgctcttggtgtttaatcccgctatccagttcatgttctacgagggactgaaacgccagctgctgaaaaagaggatgaagctgagcagtcttgacgtcttcattatcggggctgtggccaaggcaattgctacaactgtgacgtacccactgcaaacagtgcagagcattctgagatttgggaggcatcgactgaaccccgagaacagaaccctcggaagcctaaggaacattctgtatctactgcatcagagagtccgcaggttcggcatcatggggctctacaaaggcctggaagctaaacttctccagacagttctgacagccgcactcatgttcctagtgtatgagaagttgaccgcagcaacattcacagtgatgggcttgaagcgcgctcatcagcattag

SEQ ID NO: 241264 - DNA, 279 bp, synthetic construct
  misc_feature 1..279: note = Description of Artificial Sequence: Synthetic coding sequence
  source 1..279: mol_type = other DNA
atggggtccgtgacagccatgacagtatttttcccattagacaccgcgagactgcgcctccaggtggatgagaaaagaaagtccaaaacaacacacatggtgctgctggaaattatcaaggaggagggccttctggcgccttaccgcggatggttccctgtgatctcatccctgtgctgttctaactttgtgtacttctataccttcaactcactcaaggcactgtgggtgaaaggccagcattcgaccacaggaaaggatctggttgtaggcttttag

SEQ ID NO: 241265 - DNA, 924 bp, synthetic construct
  misc_feature 1..924: note = Description of Artificial Sequence: Synthetic coding sequence
  source 1..924: mol_type = other DNA
atggcctcagtgctgtcctacgagtcgctggtgcatgcagttgccggagctgtggggagcgtgacagcaatgactgtgttttttcccctcgatacagccagacttcgcttgcaagtggatgagaaaagaaagtccaagaccacccatatggtccttctagagatcatcaaggaggaaggtctgcttgcaccttatagagggtggttcccagttatttcatctctgtgctgctcaaattttgtctatttctatacttttaacagccttaaggcattatgggtcaagggacaacactccaccacaggcaaggatctcgtcgtgggattcgtggccggagtggtgaacgtgctcttgacaacaccattatgggtggtgaatacccgtctcaaactgcagggggctaaattccgcaatgaggatatcgtgccaaccaattacaagggcataatcgacgccttccatcagatcattagggatgagggtatttcagccctatggaacggcactttcccctcacttctgttagttttcaaccccgcaatccagttcatgttttatgagggactaaagcgacagctgttaaaaaaacggatgaagctgagctcgctcgacgtctttataataggagccgttgcaaaggcaatcgctaccaccgtgacttatcccctgcagaccgtgcagtctatactaagattcggtcgacatcgactgaatccagaaaatagaactctgggctctctgagaaacattctgtatcttctccaccagcgcgtgaggaggttcggcattatgggcctgtataaaggcctggaagctaagctgcttcagactgtgttaacagcagccctgatgtttctcgtgtacgaaaaactcaccgcagccactttcacggtgatgggacttaagcgagcgcaccagcactag

SEQ ID NO: 241266 - DNA, 705 bp, synthetic construct
  misc_feature 1..705: note = Description of Artificial Sequence: Synthetic coding sequence
  source 1..705: mol_type = other DNA
atggcgtccgtcttgagttacgaatcgcttgtgcacgcggtggcaggcgcagtcggctctgtaactgccatgacggtctttttccctctggacactgcaagactgcgcttgcagggcgtcgttaacgtgttattaacgacgcctctctgggttgtgaatactcggttaaagctacagggagccaagtttagaaacgaggacatcgtgccaaccaactacaagggtatcatcgacgccttccatcagattattcgagatgagggcattagcgctctgtggaacggtacgttccccagcctcctgctcgtctttaatccagcgatacaattcatgttctacgaaggcctgaagcggcagctgctgaaaaagcgcatgaaactctcctctctagacgtctttattattggcgcagtggcgaaggcaattgctactactgtgacttatccactgcagaccgttcagagcatactgcggttcggcagacataggctgaacccggagaacaggactttgggttccttgcggaatatcctctatctgttacatcagcgcgtgcggaggtttggtattatggggctgtataaaggactagaggcaaagctattacagacagttttaacggcagctctcatgttccttgtttacgaaaagctgactgccgctactttcactgtcatggggctgaaaagggctcatcagcactag

SEQ ID NO: 241267 - DNA, 813 bp, synthetic construct
  misc_feature 1..813: note = Description of Artificial Sequence: Synthetic coding sequence
  source 1..813: mol_type = other DNA
atgattgacgaaaagagaaagagtaaaacaacacatatggtgctgctggagatcatcaaggaagaggggctgttagctccatatcggggttggtttcccgttatttcatccctctgctgctccaatttcgtatatttctatacattcaactctctgaaagctttgtgggtgaagggccagcactcaacgacaggcaaggacctggtcgtgggttttgtggccggagtggtgaacgtcctactcaccacccctctctgggtagtgaatacccgtttaaagctgcagggagccaaatttaggaatgaggatattgtccctaccaattacaaagggatcatcgatgcattccatcaaatcatccgtgacgagggaatctctgccctgtggaacggaacatttccatcccttctcctggttttcaatccagcaattcagttcatgttttacgaaggtctgaagcgccagttgctaaagaagagaatgaaactgtcttctctggacgtgttcatcataggtgctgtagcgaaagctatcgcaaccactgtcacttatcccttacagactgtgcaaagtatactacggtttggcagacaccgactgaaccctgagaacaggaccctgggctcccttcgcaacatactctatttactccaccagcgggtgcggaggttcggaatcatgggtctctacaaagggttggaagctaaactgctccagaccgttctaacggcagccctcatgtttctcgtgtatgaaaaactgacggccgcaacttttacagtgatggggttaaaaagggctcaccagcactag

SEQ ID NO: 241268 - DNA, 1086 bp, synthetic construct
  misc_feature 1..1086: note = Description of Artificial Sequence: Synthetic coding sequence
  source 1..1086: mol_type = other DNA
atgtttagttccgtggcccacctggctagggccaatcccttcaacaccccacatctgcagctggtgcatgatgggctaggagatctgagatcgagctctccaggtccaacaggccagcctaggaggcctaggaatctggcggctgcggcagttgaggaatattcctgtgaattcggctccgccaaatattacgctctttgtgggtttggcggagtgttatcttgtggcttaacacataccgccgtggtacctctggacttggtgaagtgccgtatgcaggttgatccccagaaatacaaaggcatcttcaatggctttagtgtcacactcaaagaggacggggtgcgaggactggccaaagggtgggctccgacattcctcggctacagcatgcagggcttatgcaaatttgggttctatgaggtttttaaggtgttgtacagtaatatgttaggtgaagagaatacttacctttggaggacgtcgctgtatctggcagcgagtgctagtgcagagttttttgctgatatcgcactggcgccaatggaggctgccaaggtgaggatccaaacccagcctgggtacgccaacaccttgagggatgcagcccctaaaatgtacaaagaggagggcctgaaggcgttttacaaaggcgtggcacccctgtggatgagacagattccctataccatgatgaagttcgcctgcttcgaacgtacagtggaagcactgtacaagttcgtggtgcctaagccaagaagcgagtgctccaagccagagcagctggtggttacatttgttgccggatatattgctggtgtgttctgcgcaattgtaagtcaccctgccgacagtgtcgtgagtgtgttgaacaaggagaagggttcctccgcttcactcgtcctgaagcgcctcggctttaagggcgtgtggaagggcctgttcgccagaataataatgatcgggacccttacagccctgcagtggttcatatacgatagcgtaaaggtctacttccgtctgcctagacctcctcctccagagatgcctgaaagcctcaagaaaaaacttgggctgacccaatag

SEQ ID NO: 241269 - DNA, 1776 bp, synthetic construct
  misc_feature 1..1776: note = Description of Artificial Sequence: Synthetic coding sequence
  source 1..1776: mol_type = other DNA
atggatgacctggacgctctgctcgcagatctggagagtactacctcacatattagcaagagaccagtgtttctgagtgaggagacaccttactcttatcctaccggaaatcatacatatcaggaaatcgcggtgcctccacctgtgccgcctccaccaagctcggaggcactcaacggcacaattctggacccgttggatcaatggcagccaagcagttctcggttcattcaccaacaacctcaatcgtccagtccggtttacggtagttccgcgaaaacgtccagtgtatcgaatcctcaggactccgtgggtagtccttgctctcgcgtgggagaggaggaacacgtgtactcattccctaacaagcagaagtccgcagagcctagccctaccgtgatgtccaccagtctcgggtccaatctctcagaacttgacagattgcttttagagcttaacgccgttcagcataaccctcccggatttccagccgacgaagccaatagttcccccccactgccaggcgcactgagtccactgtatggggtgcccgaaaccaacagcccccttggcggtaaagccggaccactcacgaaggagaaacctaaaagaaacggcggacggggtcttgaggacgtacggccatctgtggagtctctgctggacgaactagagagtagtgttcctagtcccgtaccagcgataacagtgaaccagggggaaatgtctagccctcagagggtgacatccacacaacagcaaaccaggatttcagccagcagcgccacgagggaactcgatgaactgatggccagcctctcagacttcaagatccagggtttggaacaacgcgctgacggcgagcgttgctgggctgctggatggccgcgagatggcggacgcagtagcccgggaggtcaagatgagggtgggttcatggcacagggcaaaacaggctcctcgagcccccctggcggaccccctaagcccggttctcaacttgattccatgctgggttcactgcagtccgacctcaacaaattaggcgttgcaacagtcgctaagggtgtatgcggtgcttgtaagaagcctatcgctggacaggtggttacagccatgggcaaaacttggcatccagagcactttgtgtgcactcattgccaggaggagatagggtctcggaacttcttcgaacgggacggccaaccttattgtgagaaggattatcacaatctgttttccccgagatgctattactgcaacggacccatattggacaaggttgtgacagctttagacagaacttggcacccagaacactttttctgtgcgcagtgcggcgctttcttcggtccggaagggtttcacgagaaggacggcaaagcctactgccgcaaggattattttgatatgttcgcgcctaagtgcggcggttgcgctcgcgctattctggagaactacatttccgctttaaacacactgtggcaccccgagtgcttcgtgtgcagggaatgtttcactccctttgttaatggtagcttttttgagcacgatggtcagccctactgtgaagtgcactatcatgagcgcagagggagtctgtgctctggctgtcaaaaacccattaccggccgatgcatcacagccatggccaagaaattccatcctgagcatttcgtctgcgctttctgtctgaagcagttaaataaaggaacctttaaggaacagaatgacaagccctactgtcagaactgttttctgaaactcttttgctag

SEQ ID NO: 241270 - DNA, 1086 bp, synthetic construct
  misc_feature 1..1086: note = Description of Artificial Sequence: Synthetic coding sequence
  source 1..1086: mol_type = other DNA
atgttttcttccgtggcccacctagcaagggcaaacccctttaacactcctcaccttcagctagtccatgatggtctcggcgatctgagaagctctagtcctgggccaactggccagcctcgcagacccaggaacctggcggctgctgccgtggaagagtattcttgcgagttcggcagcgcgaagtattacgccctgtgcggttttggaggcgtgctgagctgtggcctgactcacaccgcggtggtccccctggatttggtgaaatgcaggatgcaggtcgacccacagaagtataaagggatatttaacgggttcagcgtgactctgaaagaagatggggtaaggggtctagcaaaagggtgggcgcctacatttctgggttactctatgcaaggcctgtgcaagttcgggttctacgaggtgttcaaggtcctgtacagcaacatgcttggtgaagagaacacatacttgtggagaacatccctttacctggccgctagtgccagtgctgaattttttgccgacattgcattggcccctatggaggctgccaaagtcagaatacagacacaacctggttacgcaaacacacttcgtgacgccgcacccaaaatgtataaggaggagggactgaaggctttttacaaaggtgtcgcgccactgtggatgcgccagataccctatacaatgatgaaatttgcttgcttcgagcgcactgtggaggccctttacaagtttgtggttcctaagccccgttccgagtgttcaaagcctgagcaactggtcgtcacattcgtcgctggttacattgctggagtgttttgcgcaatcgtgagccaccccgctgattctgtggtgtccgtgctcaacaaagaaaagggcagtagcgcaagccttgttctgaaaagattgggctttaaaggtgtctggaaaggactcttcgccaggataattatgattgggacactgacagcactgcagtggtttatttacgactctgtaaaggtctactttcgactgccgcgacccccacccccagaaatgcccgaatctctgaaaaagaagctcggcctgacccagtag

SEQ ID NO: 241271 - DNA, 1086 bp, synthetic construct
  misc_feature 1..1086: note = Description of Artificial Sequence: Synthetic coding sequence
  source 1..1086: mol_type = other DNA
atgtttagctctgttgctcatctggcacgcgctaaccccttcaataccccgcatcttcaactggtccacgacgggttgggcgacttgaggagcagctctccaggccctactggccagcccagacggccaaggaatcttgctgcggcagcggtggaggaatatagctgcgaattcggatcggctaaatactatgcattatgtggtttcggtggtgttctctcttgcggcctcacacatactgccgtggtccccttagatctggtgaaatgtcgaatgcaggttgacccgcagaaatacaaaggcatttttaatggattctctgtgacccttaaggaggatggtgttagaggcttggccaaggggtgggcccctactttcttggggtactctatgcagggcctgtgcaaattcggcttctacgaggtgttcaaagtgttatacagtaacatgctgggcgaagaaaacacctacctttggagaacctctctttacctcgccgcatcggcgagcgccgaattctttgctgatattgcgctggcgccaatggaagccgctaaggtgcgaattcagacacagcccggatatgcaaacaccttgcgagatgcggctcccaaaatgtacaaagaggaaggactcaaagctttttataagggcgtggctcccctgtggatgagacaaatcccttacacaatgatgaaatttgcatgttttgagaggaccgtggaggctctttacaaatttgtggtgccaaaacccaggagcgagtgtagtaaacccgagcaactcgtcgtaaccttcgtcgcaggatatatcgccggtgtattttgcgctatagtgtctcatccggcagatagtgtagttagtgtcctcaataaagagaaaggcagctccgcgtccctcgtcctgaaacggctgggtttcaaaggggtgtggaagggcttgttcgcccgaatcattatgatcgggactctcacagctctacagtggtttatatatgattcagtgaaggtctattttcgactgccaaggcccccacctcctgaaatgcccgaaagcctcaagaagaagctcggactgacacagtag

SEQ ID NO: 241272 - DNA, 1089 bp, synthetic construct
  misc_feature 1..1089: note = Description of Artificial Sequence: Synthetic coding sequence
  source 1..1089: mol_type = other DNA
atgttctcctccgtggcgcacttggctcgggcaaacccatttaacacgcctcatctccagctggtgcacgacggtctcggcgatcttcgaagtagctctccaggtcccaccggacagcccaggcgaccaagaaatcttgccgcagctgccgttgaagagcagtatagttgtgactatggctcaggaagattcttcattctttgtgggcttggcggaataatttcatgtggtaccactcataccgctctggttcctctggacctggtgaagtgcaggatgcaagtggatccacagaaatacaagggaatctttaatgggtttagtgttaccctcaaggaagacggcgtgcgaggcctcgcaaagggctgggctccaaccttcctcggctattctatgcaggggctgtgcaagtttgggttttacgaagtctttaaggtgttgtactcaaacatgctgggcgaggaaaacacctatctgtggagaacttcactctacctggccgcatcagcgtctgccgaatttttcgcagatattgcactcgctccaatggaggctgcaaaggtgcgcatccagacccaacccggatacgcaaacactctacgcgacgctgctcccaaaatgtacaaggaggaagggcttaaagctttctacaagggcgtggccccactgtggatgaggcagatcccgtataccatgatgaaattcgcctgcttcgagcgaaccgtggaggcattatacaagttcgtagtccccaagccccgttcggagtgctccaagcctgagcaactcgtcgtgaccttcgtggctggttacattgctggagtgttttgtgctatcgtatcccatccagccgatagtgtggtgtctgtgctgaataaggagaagggctcctcagcttcattagtccttaagcgattgggtttcaagggtgtgtggaagggcctattcgcgagaatcatcatgatcgggaccctgaccgcgctacagtggttcatctatgatagcgttaaagtgtactttcggttacccaggccccctcctcccgaaatgcctgagtcactaaaaaagaaactggggctcacacagtag

SEQ ID NO: 241273 - DNA, 1086 bp, synthetic construct
  misc_feature 1..1086: note = Description of Artificial Sequence: Synthetic coding sequence
  source 1..1086: mol_type = other DNA
atgttttcctccgtggcccatctcgccagggccaacccatttaataccccacacttgcaattggtgcatgacggtctgggcgatctgcgctcctcctcccctggccctactggccagccacgcagaccaagaaatttggccgcagctgctgtggaggaatattcttgcgaattcgggtcagccaaatattacgcgctgtgcgggttcggaggcgtgctttcatgtggccttacacacaccgccgttgtaccattagacctggtgaagtgcagaatgcaggtcgatccgcagaagtataaaggaatcttcaacggcttcagcgtaactctgaaggaggacggcgtgaggggactggcaaaaggctgggcaccaacctttctcgggtattcaatgcaaggattatgtaagtttgggttttacgaggtgtttaaggtgctgtattccaatatgctgggcgaggaaaatacttacctgtggcgcaccagtttgtatctcgctgctagcgcatctgcggaattctttgccgacatcgccctcgctcctatggaagccgctaaagtacgcattcagacacagcctggttatgctaatacactgcgggatgccgctcccaagatgtataaggaagagggtctaaaggccttttataaaggcgtggcccctctctggatgaggcagataccctatacaatgatgaagtttgcctgcttcgagagaacggtcgaggccctctataaattcgtagtccccaaacccagatcggaatgctctaagccagagcagttagtggtgaccttcgttgccggttacatcgcaggcgtgttttgcgccattgtgtcccatcctgccgattctgttgtgtctgtgcttaataaggaaaagggttcctcggcgtcactcgtgcttaagcgactggggtttaagggagtttggaagggactgtttgccaggattattatgatcggcacactcacagcactgcagtggttcatatatgactccgtgaaagtgtattttcggcttcccagacctcccccaccagaaatgccagaatcgctcaaaaagaagctggggcttacccagtag

SEQ ID NO: 241274 - DNA, 897 bp, synthetic construct
  misc_feature 1..897: note = Description of Artificial Sequence: Synthetic coding sequence
  source 1..897: mol_type = other DNA
atgtcagcaaaacctgaagtgtctttggtgcgggaggcgagccgccaaatcgtcgcaggcggatcagcgggtcttgttgaaatatgccttatgcatcctcttgacgtggtgaagacgcggtttcagattcagaggtgcgccaccgaccccaactcctataaatcactagtcgacagtttccgcatgatattccagatggaggggctgtttggattttataaaggcattctacctcccattttggcagaaacccccaagcgcgctgtcaagttctttaccttcgagcagtataaaaaactcctgggctacgtttcactgtctccggctctcacgtttgctatcgccggactgggaagcgggctgacagaagcgatcgtggtcaatccttttgaggtcgtgaaggtcggccttcaggctaatagaaatacctttgccgagcagccgtcaacagtaggatacgccaggcagatcatcaaaaaagaaggctggggcctccaaggactgaacaagggtttgacagccacactgggcagacacggggtctttaacatggtctactttggattttattacaatgtaaaaaatatgattccagttaataaggaccctatactggagttctggcgtaaattcggaatcggattgctttccgggaccatcgcctctgtaatcaatattcctttcgacgtagctaagtcccgaatccagggccctcagcccgttcccggagagattaagtacagaacttgctttaaaacaatggcaacagtttaccaagaggaaggcatcctggccctctacaaaggcttgctgcccaagatcatgcgtttaggacccggaggagccgtcatgctgttggtatacgagtacacttattcatggctgcaggagaactag

SEQ ID NO: 241275 - DNA, 900 bp, synthetic construct
  misc_feature 1..900: note = Description of Artificial Sequence: Synthetic coding sequence
  source 1..900: mol_type = other DNA
atgtcagctaagcccgaagtctcactggtgagagaggcaagtcgacagattgtcgctgggggatctgccggtctcgtagaaatctgcctgatgcacccactggatgtcgtgaaaacaaggttccagattcaacggtgcgccacggaccccaactcttacaaatccctggtggactcgtttcgcatgatctttcaaatggagggactttttggcttttacaagggaattctgccacccatccttgcagagactccgaagagggcggtcaaattctttactttcgaacaatacaaaaagctgctgggatacgtctctttatcccctgcactgactttcgcaatcgcgggactcggctcagggcttaccgaggctattgtggtgaatccatttgaagtggtgaaagtgggcttgcaggccaatcgcaatacatttgccgagcagccttccactgtcggctatgcacggcaaattatcaaaaaggaaggatggggactccagggcctcaataagggactcaccgccacactgggcaggcacggcgtttttaacatggtgtattttggattttattataacgtgaagaatatgattcccgtgaataaagaccctatactggagttttggcggaaatttgggatagggctgttgtccggaactatcgcaagtgtcattaacattcctttcgatgtcgccaagtctagaattcagggtccacagcctgttccaggtgagataaaatacagaacctgcttcaagacaatggccaccgtgtaccaagaggagggaatcctcgccctgtataaaggtctcttgcccaagattatgagacttgggccagggggagccgtgatgctgctcgtctatgaatatacctacagctggctgcaggagaattggtag

SEQ ID NO: 241276 - DNA, 963 bp, synthetic construct
  misc_feature 1..963: note = Description of Artificial Sequence: Synthetic coding sequence
  source 1..963: mol_type = other DNA
atggtgggatacgacccaaagccagatgggaggaataacaccaagttccaggtcgccgtggccggaagcgtcagcgggctggtcacccgtgccctcatctcacccttcgatgttattaaaattcgctttcagcttcagcacgaacgccttagccgcagcgatccaagtgccaagtatcacgggattttgcaggcaagccggcagatactgcaggaagaaggaccaacagctttctggaaggggcacgtcccagctcaaattctgtctattggttatggggctgtccaatttctaagttttgagatgcttacagaactcgtgcacaggggatcagtttacgacgcccgtgaattctcagtccatttcgtgtgtgggggattggctgcttgtatggctacgctgactgtgcacccagtggatgtactgaggaccagattcgccgctcagggagagccaaaggtgtacaataccctcaggcacgcagtgggcactatgtataggtctgaagggcctcaggtgttctacaagggcctggctcccacactcatcgctatctttccctatgctgggctgcagttctcatgttactccagtctgaagcacctctataagtgggctattccagctgaaggcaaaaagaacgagaacctgcagaacttgttgtgcggcagtggggctggggtgatctctaagacactaacctacccactcgacttattcaaaaaacgcctgcaggtgggtggattcgagcatgcccgagctgcgttcggacaagtgagacggtataaagggttgatggactgcgcaaaacaagttctccagaaggaaggcgcactgggttttttcaaagggctgagtccttctctgctcaaagctgcgctctcgaccgggtttatgtttttttcctacgagttcttttgtaacgtgttccattgtatgaatcgaacagctagtcagagatag

SEQ ID NO: 241277 - DNA, 963 bp, synthetic construct
  misc_feature 1..963: note = Description of Artificial Sequence: Synthetic coding sequence
  source 1..963: mol_type = other DNA
atggtgggatacgaccccaagcccgatggcaggaataataccaaatttcaggttgctgtcgctggcagcgtgtccgggctggtgactagagcactcattagccctttcgatgtcataaagatccgcttccagctccagcacgaaaggctgtctcgcagcgaccctagcgcaaaatatcatggcatcctgcaggccagccggcaaatactgcaggaggagggcccaactgccttttggaaaggccacgtcccagcccagatcttatcaattggctatggcgctgtacagtttttgagctttgagatgctcaccgagctcgtccatagagggtccgtctacgacgccagagaattttctgtgcactttgtatgtgggggactcgcggcatgcatggctaccttaacagtgcacccagtggatgtgctccgcacccgcttcgccgctcagggcgagcccaaggtgtataacacactgagacacgctgtcggcaccatgtacaggagcgaaggcccacaggtgttctacaagggattggcaccaactctgatcgcaattttcccatatgcaggtttgcagttcagctgttactcctcacttaaacacctttataagtgggcaatccctgctgaaggaaaaaaaaatgagaacctccagaaccttctgtgcggttcgggggcaggagtgatctctaagactttaacatacccactcgacctctttaaaaaacggctacaggtcggcggattcgagcacgctcgcgctgcctttggccaggttcgccgttataagggcctaatggattgcgccaagcaagttcttcaaaaagaaggagcactcggattttttaaaggattgtctccttctctgttaaaagccgcactctccactgggttcatgtttttctcctatgaattcttttgtaatgtttttcactgtatgaatagaaccgccagtcagcggtag

SEQ ID NO: 241278 - DNA, 792 bp, synthetic construct
  misc_feature 1..792: note = Description of Artificial Sequence: Synthetic coding sequence
  source 1..792: mol_type = other DNA
atggtaggctacgacccaaagccggacgggcgaaataacactaagtttcaggtggccgtggccggaagtgtgtctggcctggtcaccagagcactgatctcccctttcgatgtcattaaaatccgttttcagctgcagcatgaaagattaagcagatccgaccccagtgcaaagtaccatggcatattgcaagccagcagacaaatcttgcaggaggagggtcctacagctttctggaagggtcacgttcccgctcagatactgagtatcggctatggagcagtgcaggtttacaataccctgcggcacgcggtcggcaccatgtataggagcgaggggccacaggtgttttataaaggactcgccccaaccctcatagctatctttccttacgccggtttacaattcagttgctactcatccctgaagcacctttacaagtgggctattccagcagaaggcaaaaaaaacgagaacctgcagaatctcttatgcgggtccggagctggggtgatttctaagaccctgacttatcctcttgacctgttcaaaaagcggcttcaggttgggggatttgagcatgccagagctgcctttggtcaggttaggcggtacaagggccttatggactgcgccaagcaggttctgcagaaggaaggagctctcggattctttaagggcctgtcgccatctctgctgaaagctgcgctaagtaccggtttcatgttttttagctatgaatttttttgcaatgtcttccactgtatgaatagaacggcatcacagcgctag

SEQ ID NO: 241279 - DNA, 963 bp, synthetic construct
  misc_feature 1..963: note = Description of Artificial Sequence: Synthetic coding sequence
  source 1..963: mol_type = other DNA
atggtaggctacgatcccaagcctgatggtcgaaataacactaagttccaggtagccgttgcaggttccgtgtccgggctggtgacacgggcacttatctcaccctttgatgtaatcaagattagattccagttacaacatgagcggttgagcaggtctgatccaagcgccaaatatcacggcattcttcaagcttcccggcagattctccaggaagaaggtcctaccgccttctggaagggccacgtaccggctcagattctctccatcggatacggggcagtgcaattcctgtctttcgaaatgctgactgaactcgtgcacaggggaagcgtttacgacgccagagagttcagcgtgcacttcgtgtgtggtgggctggcagcctgtatggccaccctgaccgttcacccagtcgacgtgctccgtactagattcgctgcccaaggtgaacctaaagtgtacaacactctgcgtcatgcggtggggaccatgtaccgtagcgagggcccacaggtgttctacaaaggcctcgcccctaccttgatcgcgatctttccgtacgcgggtctccagttctcatgttattcctctcttaagcacctgtataaatgggcgatccctgcagagggaaagaaaaatgagaacctgcagaatctgctgtgcggttctggcgctggagttatctcaaagacactgacatacccactggacctgttcaaaaaaaggctccaggtaggaggattcgaacacgcaagggcggcatttgggcaggtgaggagatataagggtttaatggattgcgccaaacaggttttacaaaaggagggcgctctggggttcttcaaagggctgagcccctctttgcttaaggccgcactgtcaaccggcttcatgttcttctcctatgagttcttctgcaacgtgtttcattgtatgaaccgcaccgcaagtcagcgctag

SEQ ID NO: 241280 - DNA, 963 bp, synthetic construct
  misc_feature 1..963: note = Description of Artificial Sequence: Synthetic coding sequence
  source 1..963: mol_type = other DNA
atggtaggatacgaccctaaacctgacggaaggaacaatactaagtttcaggtagccgtggccggatctgtctccggtttggttacccgggctctcatctcgcctttcgacgtcataaagatccgcttccagctccagcatgagaggctgtcccggtcagacccctcggccaaatatcacggcattctgcaagcctcacggcagatcctccaggaggagggccctacggcattctggaagggtcacgtgcctgcccagatcctctccatcggatatggtgcggtccaatttttaagcttcgaaatgctcacagaactggtccaccggggttccgtttatgatgctagagaattcagcgtgcacttcgtctgtggaggactagccgcatgtatggccacattgaccgtgcatcccgtggacgtgctgcgtaccaggtttgctgcacagggcgagccaaaagtctacaataccttgaggcacgccgttggcactatgtacaggtccgaggggcctcaggttttttacaagggcttggccccaacccttatcgcaatcttcccgtatgctggtctgcagttctcgtgttactccagtctcaagcatttatataaatgggcaataccagccgaaggcaaaaaaaatgaaaatctgcagaatctcctatgtgggtccggtgccggagtgattagtaagaccctgacctaccctttggatctattcaagaagaggctgcaggtcgggggatttgaacacgcacgggctgccttcgggcaggttcggagatacaaaggtctcatggactgcgccaagcaagtgcttcagaaggaaggcgcactggggttcttcaaaggactcagtccaagtctcctgaaagcggctttgtctacaggattcatgttcttcagctacgagtttttctgtaacgtgtttcactgcatgaacaggacggcaagtcagcggtag

SEQ ID NO: 241281 - DNA, 963 bp, synthetic construct
  misc_feature 1..963: note = Description of Artificial Sequence: Synthetic coding sequence
  source 1..963: mol_type = other DNA
atggtgggctacgaccctaagcctgatggtcggaataataccaagtttcaggtcgccgtcgctggcagtgtgtccggacttgtgactcgggcactcatcagtcctttcgacgtcataaagattaggtttcagctgcagcacgagcgcctgtcaaggagtgatccatctgccaagtaccatgggatcttgcaggcttctcgccagatcctgcaagaggaaggacccacggctttctggaaaggccacgtgcctgcccaaattctatcaatcggatacggggcagttcagtttctgtccttcgagatgctcacggagctggttcatcgcggttccgtctacgacgctcgcgaattttctgttcatttcgtatgcggcggtctggcggcatgcatggctacattgacagtgcacccggttgacgtattacgcacgcggttcgcggctcagggagaaccgaaagtatacaatacactgagacatgctgtgggtactatgtaccgcagcgaaggccctcaggtattctacaagggtctcgctcccacccttatcgcgatattcccctacgccggtctacaattttcctgctactcctccctgaaacacttgtacaaatgggctattcctgctgagggcaaaaagaacgaaaatcttcaaaatctgctctgcgggtctggagccggtgtgattagcaagacactgacatatcctttggatttgtttaagaagcgcctgcaagtgggcggatttgagcacgcaagggccgctttcggtcaggtgcggaggtacaaaggcttgatggactgcgccaaacaagtgctccagaaggagggggctctcggtttttttaagggcctgagtcctagcctcctaaaggcagccctcagtaccggttttatgtttttcagctacgaattcttttgtaacgtgtttcattgcatgaatagaacagcaagtcagcgctag

SEQ ID NO: 241282 - DNA, 2028 bp, synthetic construct
  misc_feature 1..2028: note = Description of Artificial Sequence: Synthetic coding sequence
  source 1..2028: mol_type = other DNA
atggccgcagccaaagtcgcactcaccaagagggccgatccggcagagcttaggaccatttttctcaaatacgcttcaattgaaaagaatggcgaattcttcatgagtcccaatgactttgtcacccgttatcttaatattttcggagagagccagcctaatcctaaaaccgtcgaattgctgagtggagtcgtggatcagacgaaggacggcctgatatctttccaagagttcgtcgcatttgaatcagtgctctgcgctcctgacgctctttttatggtggcttttcagctgtttgataaagccggaaagggggaggtgaccttcgaggatgttaagcaggtgttcggccagacgactatccaccagcatatccccttcaactgggactctgagttcgtgcagctgcacttcgggaaggagagaaaacgccaccttacctacgccgaattcacccagtttctgctggaaattcaattggagcatgccaagcaggccttcgtgcagagagataacgccagaaccggcagagtgacagcgattgacttccgcgacattatggttacaatccggccacatgtgctcaccccctttgtggaagaatgcttggtcgccgctgccggtggcactacatctcaccaggtttctttttcctacttcaatggctttaactctctgctgaacaacatggaactcattagaaagatttactccacactggctggtacccgaaaggatgtggaggttactaaggaagaattcgttcttgctgcacagaagtttggacaggtgactcccatggaggtggatattctgtttcaattggcagatctctatgaaccccgaggccgaatgactctggccgatattgaaaggatcgctcctctcgaagaggggactctccctttcaacctggcagaggcccagagacagaaggcaagcggcgactccgcacggccagtgctcctgcaggttgcagagtcagcctatcgcttcggcctgggcagcgtggctggcgctgttggggctactgcggtgtacccaatcgatcttgtcaaaacacgaatgcagaatcaaagatccaccggatcctttgttggggagctgatgtataagaattcattcgattgtttcaaaaaagtgctgcggtatgaaggctttttcggactgtatcgcggattacttccgcagctgttaggagtggcaccggagaaagccattaaactgacggtaaatgacttcgtgagggataagtttatgcataaggatgggagtgtgccactggctgctgaaattctcgcgggtgggtgtgctggaggctctcaggtcatcttcacgaatcctttagagatcgtaaagatccgccttcaggttgcaggcgaaataactaccggtcctcgagtgtcagccctgtctgtcgtcagggaccttggattcttcgggatatataagggtgcaaaagcgtgctttcttcgggatatccctttttctgccatctactttccatgctacgctcacgtcaaggcatctttcgcaaacgaggacggacaggtcagtcctggaagtctcctcctggctggagctatcgcaggaatgcctgcagcctccctcgtgactcctgcggatgttattaagactagactgcaggtggccgcaagggctggccagacaacttacagcggcgtgatcgattgttttagaaaaattctgagggaagagggtcctaaagccttgtggaagggagccggagccagagtgttccggtcttctccccagtttggggtcacgctactgacctatgaactgctgcagagatggttttacatcgactttgggggtgtcaagccgatgggcagcgagcctgtgcccaagtcccgtattaacttacccgctcctaaccccgaccacgtagggggatataagttggcagtagccaccttcgcaggcattgagaacaagtttggcctgtacctgcctttgttcaaaccttccgtgtctaccagcaaagctatcggtggcggtccctag

SEQ ID NO: 241283 - DNA, 2031 bp, synthetic construct
  misc_feature 1..2031: note = Description of Artificial Sequence: Synthetic coding sequence
  source 1..2031: mol_type = other DNA
atggctgctgcaaaggtggctcttaccaagcgagcggaccctgcggaactgcgaacaatatttctcaagtacgcatccatagaaaagaacggtgaatttttcatgtccccaaacgattttgtcacacggtacctgaatatctttggcgagagccaacccaaccctaaaaccgtcgaacttctctccggcgttgtggaccagacaaaggacggattaatttccttccaggagttcgtcgcttttgaatccgttttgtgcgcacccgacgcgttgttcatggtggcgttccagctcttcgacaaggccggtaagggggaagttaccttcgaggatgtaaagcaggtcttcggacaaacaactatccaccagcatattcccttcaattgggactccgaatttgtgcagttacacttcgggaaagagaggaaacgccaccttacatacgccgaattcacccagtttttactggagattcagctggagcacgccaaacaggcattcgtgcagagggacaatgccagaacaggaagggtgactgcgatagatttcagggacatcatggtgactatccgacctcacgtgcttacacccttcgtggaggaatgcctagtcgctgcagcagggggtacaactagtcatcaggtgtcgttcagttacttcaacggattcaattctctcctgaataatatggagctgattcgcaagatctattcgactctcgcaggaacacgcaaggatgtcgaggtgacaaaagaggagttcgttctggccgctcaaaagttcgggcaggttaccccaatggaggttgacattctgttccagctcgcagatctgtacgagccaaggggacgcatgactctggccgatattgagaggatagctcccttggaagaggggaccctgccttttaatctagcagaggctcaaaggcagcagaaggcctccggggatagcgctcgccctgttctattgcaggtggctgaatcagcctatcgcttcggcctggggtctgtcgcgggagcagtcggtgcaacagcagtctatcctatcgacttggtaaaaaccaggatgcagaatcagcgaagcactggctctttcgtgggggaattaatgtataagaacagctttgattgtttcaaaaaagtgctccgatacgagggattttttggcctctacaggggtctgctgccgcagctgctgggagtggctccggagaaagccattaaactgaccgttaacgattttgtccgcgataaattcatgcacaaggacggttctgtacccctggcagctgagatacttgccggaggctgtgccggtggttcgcaggtgatttttaccaacccgctcgagatcgtgaaaattcgcctgcaggtagctggagaaattacaacaggaccgcgagtgtcagcactaagtgtggtaagagatctcggatttttcgggatctacaaaggggcaaaggcttgtttcttgcgggacattccattttctgcaatatattttccctgttacgctcatgtgaaggctagctttgcaaacgaggatggccaggtgagtcccggatctctgctactcgccggagccatagccggtatgccagccgcaagcctggtcactcctgcggacgtcatcaagactcgacttcaggtggctgctcgtgccggacaaaccacctactctggggtaatcgactgttttcgtaagattcttcgagaagagggacctaaggcactttggaagggggctggagctcgggtgttcaggagcagtcctcagtttggggttactcttctgacatatgaactgctacagcgatggttttatattgatttcggtggggtgaagcctatgggaagtgagccagtcccaaagtctagaatcaatttgccagctcctaaccctgaccacgtaggtggatacaagctcgccgtcgccacattcgctggcatcgagaacaagtttggtctgtacttgccactgttcaaaccctccgtgtccacttctaaagccatcgggggaggcccttag

SEQ ID NO: 241284 - DNA, 1704 bp, synthetic construct
  misc_feature 1..1704: note = Description of Artificial Sequence: Synthetic coding sequence
  source 1..1704: mol_type = other DNA
atggaggatgtgaaacaggtctttggtcaaacgactatccaccagcatattccttttaactgggatagcgaattcgtgcaactgcacttcggcaaggagcgaaagcgtcacctgacatacgcagaattcacccagtttttgctggagatccagctagagcacgccaagcaggctttcgttcagagggataatgcacgcacagggagggtgacagcaattgactttcgtgatatcatggtgaccatccggccacatgtgcttactcccttcgtggaggaatgtctcgtggccgcagccggtggaaccacatcgcaccaggtctcattctcctactttaacggattcaatagcctgttgaacaatatggaactcatcaggaagatctattctactctggccggtactagaaaggacgtggaagtgacgaaagaagagttcgtgctcgccgctcagaaattcggccaggtgactccaatggaggtggacattttgtttcaacttgccgatctatacgagcccagaggaagaatgaccttggccgacatcgagcggatcgcacccctggaggaaggtacactgccgttcaacctcgccgaggcacagcgtcaaaaagcttctggggacagcgctcgacccgtacttcttcaagtagccgaaagcgcctataggttcgggttaggtagtgtggccggtgccgtgggggctaccgctgtgtacccaattgacctagtcaaaacccggatgcagaaccaacgcagtaccggatccttcgtaggcgagcttatgtacaagaacagtttcgattgtttcaagaaagtgctccgatacgaagggttctttggtttataccgcggtctgctacctcagctgctcggtgtggctcctgaaaaggctatcaagctgaccgtgaatgactttgtgagagacaagtttatgcataaggatgggagcgtgcctctggctgctgaaatcttggctggcggttgtgccggtggatcccaggtcatcttcaccaatccactagagattgttaagattagactgcaggtggctggggagattacgacaggtcctagggtgagtgccctgtctgtcgtgcgggatctcggattctttggaatctacaagggggcaaaagcttgctttctgcgagatattcccttctcagccatctatttcccttgttacgcccacgtgaaagcatccttcgcaaacgaggatggccaggtgtctcccggaagccttcttttggcaggagcgatcgccggaatgcccgcagcaagtctcgtcactcccgctgacgtcattaagacacgcttgcaagtcgcagcacgggcaggccagactacctacagcggggtgatcgattgtttccgaaaaattcttcgtgaagagggaccaaaagctctctggaagggggctggagctagagtgtttaggagttctccacagttcggggtgacactactgacgtatgagctgcttcagcgttggttctatatagactttgggggagtgaaaccgatgggaagtgaaccagtgcccaagtcacgcatcaacttaccagctcccaacccagatcatgttggcggatataagcttgcagtagcaacctttgcagggatagagaataagttcggactgtacctgcctttgtttaagccctccgtgtctactagcaaggctatcggcggtgggccatag

SEQ ID NO: 241285 - DNA, 561 bp, synthetic construct
  misc_feature 1..561: note = Description of Artificial Sequence: Synthetic coding sequence
  source 1..561: mol_type = other DNA
atgaaacatatgctggctgcgtctgctggagaggtggtcgcttgtttgataagggtcccttctgaggtcgtcaaacaaagggctcaggtgtctgctagcaccaggacatttcagatattttcgaatatcctgtacgaagaggggatccagggcctgtacagaggttacaagtcgaccgtcctcagagaaattccgttcagcctggtgcaattccctctgtgggaatctctgaaggccctgtggagttggaggcaggaccacgtggtagactcatggcagtctgcagtctgtggcgcttttgctgggggattcgcggcagccgttaccacgcctcttgacgtggcaaagaccaggatcaccctggcaaaagccggatcaagtacagccgacggaaacgtgctgagcgtgctgcatggagtctggcggtctcagggactcgcaggactttttgccggagtttttcctagaatggcagcaatctccctcggtggttttatcttccttggggcatatgatcggactcattctctcctgctcgaggtcgggcgaaaatctccctag

SEQ ID NO: 241286 - DNA, 825 bp, synthetic construct
  misc_feature 1..825: note = Description of Artificial Sequence: Synthetic coding sequence
  source 1..825: mol_type = other DNA
atggaccgacctgggttcgtggctgcgctggtggccggaggagtggctggcgtcagcgtcgacctcatcctgtttcctttggatacaataaaaacacgcctgcagagcccccaagggttttctaaggctggcggattccacggtatatacgctggagtgcctagcgccgctatcggctctttccccaacgcagcggctttttttattacatatgaatacgttaaatggttcttgcacgcagattcttcttcctaccttacgcccatgaagcacatgttggcagcatccgcaggtgaagtggttgcctgcttgatccgggttcccagcgaagtcgtgaaacagcgggctcaggtaagcgcatctaccaggacctttcagatcttttcgaacatcctgtatgaggaggggattcaaggcctgtaccgagggtataaatctaccgtgttaagggaaattcctttttctcttgtgcagttccccctgtgggagagcttgaaggctctttggagctggagacaggaccatgtggtggatagttggcaaagcgcagtgtgcggtgccttcgcaggcggatttgctgccgcagttacgaccccactggacgtagccaaaacaagaattacactggccaaggccggatcctccactgcggatggcaacgttctgtccgtcttacacggggtctggaggagtcaaggactggccggacttttcgctggcgtgtttccacggatggcagcgatatccctcggcggatttatttttcttggggcatacgataggacccactctctgctcctggaggtcggcagaaagagtccctag

SEQ ID NO: 241287 - DNA, 66 bp, synthetic construct
  misc_feature 1..66: note = Description of Artificial Sequence: Synthetic coding sequence
  source 1..66: mol_type = other DNA
atggaccggcctggatttgtggccgcactggtgctgttgcacttcctctctcctatgaatatgtag

SEQ ID NO: 241288 - DNA, 477 bp, synthetic construct
  misc_feature 1..477: note = Description of Artificial Sequence: Synthetic coding sequence
  source 1..477: mol_type = other DNA
atggagggcaaaaggaagttagagggcaagccactgaggttccgaggtgtgcaccacgctttcgccaagatcttggccgaaggcggtataaggggcctgtgggccggatgggtccctaacatccagcgggctgcacttgtcaatatgggggatctgacaacctatgacactgttaagcactatttggtgttgaatacccccctggaggataatatcatgacccatggcctctcatccctgtgctctggactggtggcgtctattctaggaacgcccgcagacgttattaagtctcggatcatgaaccagcctagagacaagcagggcagagggttactgtataaatcttctactgactgtctcatccaggcagtgcaaggagaggggttcatgagtttgtataagggctttctgcctagctggcttcgcatggccgctgtgatcgttaattcttcacgcagccaactgaaagtgtag

SEQ ID NO: 241289 - DNA, 972 bp, synthetic construct
  misc_feature 1..972: note = Description of Artificial Sequence: Synthetic coding sequence
  source 1..972: mol_type = other DNA
atgtcagtccccgaagaagaggaaagattattacccctgacccagagatggccaagggcaagtaaattcctcctgtccggttgtgctgccaccgtggctgaattggccacatttccacttgatcttaccaaaacacgactgcagatgcagggagaggccgctctggccaggctgggcgacggcgctcgcgaatcggcaccctatcgcggaatggtgcggaccgcccttggtataattgaggaagaaggattcttgaagctatggcaaggtgtgaccccggctatatatcgccacgttgtatattctgggggtcgaatggtaacttatgagcacctgcgtgaagtcgtctttggtaaatctgaggatgaacactaccccctctggaagtccgtgatcggcggaatgatggccggagtgattggccagttccttgccaacccaactgacctggtcaaagtccagatgcaaatggagggaaagcgtaagttggaaggcaagccgctccggttccggggagtgcaccacgcattcgccaagatccttgctgaagggggaatccgaggcctgtgggccggttgggtgcctaatatccagcgggcagcactggtgaatatgggagacctgaccacctatgacacagtgaagcactacttagtgctgaataccccgctggaagataatattatgacacatggcctgtccagtctgtgcagtgggttggtggcgtctatcttagggacaccagccgacgtcattaagtcaagaatcatgaatcagcccagggacaagcagggacggggtctgttatataaaagctccacagactgtctgattcaggccgtccaaggcgaagggttcatgtccctgtataagggcttcttgcctagctggctcaggatgacgccttggagcatggtcttttggctgacctacgaaaagatccgagaaatgagcggcgtgagtccattttag

SEQ ID NO: 241290 - DNA, 738 bp, synthetic construct
  misc_feature 1..738: note = Description of Artificial Sequence: Synthetic coding sequence
  source 1..738: mol_type = other DNA
atgagtgtacctgaggaggaagaacggctcctgcctctcacccagagatggcctcgcgcttctaagtttctcctttctggttgtgccgcaaccgtggcagagttagctacctttcccctggacttgactaagaccagactgcaaatgcaaggggaggccgcattagctcgcctaggtgatggcgcacgggaatcggccccttaccgtggaatggtgagaaccgctttgggaatcatagaggaggagggattcttgaagctctggcaaggtgtaacacctgcaatctacagacacgtggtgtactctggaggcagaatggtaacttatgaacaccttcgcgaagtggtcttcggcaagtcagaggatgagcattatcctctctggaagtcagtgatagggggaatgatggccggagttataggccagtttttagccaatcctacagacctggtcaaggtgcagatgcagatggagggaaagcgcaagctggaaggaaaacccctgcggttcaggggtgtgcaccacgcctttgcaaagatcctggccgaaggtggaattagaggcttatgggctggttgggtgcccaacattcaacgcgctgctctcgtgaacatgggagatctgaccacctatgatacagtgaagcactatctggtcttgaatacgcccctggaagataacatcatgactcacggcctcagctctgatttggtggggtcccataaagcaatccagtag

SEQ ID NO: 241291 - DNA, 297 bp, synthetic construct
  misc_feature 1..297: note = Description of Artificial Sequence: Synthetic coding sequence
  source 1..297: mol_type = other DNA
tagaacatgggagatctgaccacctatgataccgtgaagcattatctggtgttaaatacaccacttgaagacaacattatgactcacggtctatctagtctttgcagcgggctggtggcctcgatcttgggcacacctgccgatgttatcaagtcccgtattatgaaccagccccgtgataaacaggggaggggcctactgtacaagagcagtacggattgcctaatccaagcggtgcagggcgaggggtttatgagtctctacaaagggttcttaccgtcatggctacgcatgtag

SEQ ID NO: 241292 - DNA, 450 bp, synthetic construct
  misc_feature 1..450: note = Description of Artificial Sequence: Synthetic coding sequence
  source 1..450: mol_type = other DNA
atgtccgaatgcccacttatcctttacatccacaaacacatcgatacttactcccagagttacctctttaacgacctgttttatcccgtctactcgggagggcgaatggtgacatatgagcatcttagagaagtcgtgttcggcaaatctgaagatgagcactatcccttgtggaaatccgtgatcggcggaatgatggccggagtgatcggccagttcctggcaaatcccactgacctcgtgaaggtccagatgcaaatggagggcaaacgaaagctggaaggcaagcccctaagattccggggagtgcaccacgctttcgctaagattctggccgaagggggaattaggggactgtgggctggctgggtacccaacatccagcgcgctgctctggtgaatatgggcgacctcaccacttacgacactgtcaagcattatctggtgtag

SEQ ID NO: 241293 - DNA, 480 bp, synthetic construct
  misc_feature 1..480: note = Description of Artificial Sequence: Synthetic coding sequence
  source 1..480: mol_type = other DNA
tgaatggaggggaagagaaagcttgaaggaaagcccctacgctttaggggcgtgcaccacgcttttgcgaaaattctggccgagggcggaattcggggtctgtgggcgggatgggtgccaaacattcagagagcggcattagtgaatatgggagatctcactacatacgacactgtgaagcattatctggtcttgaacacccctctcgaggataacattatgacacatgggctcagctctctgtgtagtggtctggtcgcgtcaatcctgggcacacctgctgacgtaatcaagagtaggatcatgaaccagcccagagacaagcaggggagggggctgctttataaatctagtacggattgcctgattcaagccgtacaaggggaaggttttatgagcctgtacaaaggttttctcccctcctggctccgcatggcggcagtaatcgtgaatagtagccggtcccaacttaaagtgtag

SEQ ID NO: 241294 - DNA, 714 bp, synthetic construct
  misc_feature 1..714: note = Description of Artificial Sequence: Synthetic coding sequence
  source 1..714: mol_type = other DNA
atgtacctctaccttatgaagatgccagccgcataccaagtatactcaggaggcagaatggtgacttacgaacatcttcgggaagtcgtgttcggcaaaagcgaggacgagcattaccccctgtggaagtccgtcattgggggtatgatggccggagtgatcggccagttccttgccaatccgaccgatcttgttaaggtgcaaatgcagatggagggtaagagaaaattggaaggaaagcccttgagattccggggagtccaccacgctttcgccaaaattttggccgaaggcggaatccggggactctgggcagggtgggtgcctaatatacagagagcagccttagttaacatgggcgatcttacgacctacgatacagttaagcactatcttgttttgaacacacctctagaggacaacattatgacccatgggctgagtagcctgtgttctggactggttgcctcgattctcggaacaccagccgacgttatcaagagcagaatcatgaaccagcccagagacaagcagggcaggggactgctgtacaagtcgagtactgattgtcttatacaggctgtgcaaggagagggttttatgtctctatataaaggattcctgcccagctggctacgtatgactccgtggagtatggtgttttggcttacttacgaaaaaatccgcgagatgagcggtgtctcacccttctag

SEQ ID NO: 241295 - DNA, 1095 bp, synthetic construct
  misc_feature 1..1095: note = Description of Artificial Sequence: Synthetic coding sequence
  source 1..1095: mol_type = other DNA
atggagttagagggacgcggtgccggtggggtggctgggggacccgcagctgggccaggtcggagcccgggtgagtcagcacttctggatggttggctgcagcgaggagtgggcagaggggcaggtggaggtgaggctggcgcttgcagacccccagtccggcaggaccccgactcaggccctgattatgaagcactgccagctggcgctactgtgacaactcacatggtcgcaggcgctgtagctggtatcctggagcactgtgttatgtatcccatcgattgtgtcaaaacacggatgcagagtctgcagcccgaccccgctgcaagataccgtaatgtcttggaggcattgtggaggatcatccgaacagagggcttgtggaggcctatgcgaggtctgaacgtaactgcgactggagctggtcctgcccacgccctttatttcgcgtgttatgagaaacttaaaaagacgctcagcgacgttatccatccagggggtaactcccatatagccaatggggcagcaggctgcgttgccacactgctccacgatgccgctatgaatcccgctgaggtggtcaagcagcgtatgcaaatgtacaatagcccatatcacagagtcactgactgtgtgagggcagtatggcagaacgagggagcgggtgccttctatagatcttacactactcagctgacgatgaatgtccctttccaagctattcattttatgacgtatgaatttctgcaggaacattttaacccacagaggcgttataatccctcaagccatgtgctgtcaggtgcatgcgccggagccgtcgccgcagctgccaccactcccctggatgtctgtaaaactctcctcaacacccaagaatctttggccctcaactcacacattaccggacatatcaccggaatggctagcgcattccgtaccgtgtaccaggttggcggtgtaacagcctattttaggggagtgcaggcgcgagtgatataccaaataccaagcacggccatcgcttggtccgtgtatgaattcttcaagtatcttattactaagagacaggaggagtggcgggctggaaagtag

SEQ ID NO: 241296 - DNA, 678 bp, synthetic construct
  misc_feature 1..678: note = Description of Artificial Sequence: Synthetic coding sequence
  source 1..678: mol_type = other DNA
agaggtgcggctgggtggtcccattgtcaccacgcccatgggggacgacggaggggaagagacccaggcgcactgcgggacgtgccacatagactgcgacagggggctgcaggctgtgtggctacactgctgcacgatgccgcaatgaatcctgccgaggtcgtcaaacagaggatgcaaatgtacaactcgccataccatcgcgtcactgattgtgtcagagctgtatggcaaaatgagggggcaggcgctttctaccgaagctacaccactcagctcactatgaacgtgccgttccaggccatccacttcatgacctacgagttcttgcaggaacacttcaatccccagaggcgctacaaccctagctcccatgtcctgagcggcgcttgcgcaggggctgtcgccgcagcagcaaccactcctttggatgtgtgtaagaccctgctgaatacacaggaaagtctggccctcaattcccacataactggtcacatcaccgggatggcctcagcgttccgcactgtttatcaggttgggggagtcaccgcctacttcagaggcgtgcaggcccgtgtgatctaccagattccgagcacagccatcgcttggtcagtctatgagtttttcaaatacctcatcactaagaggcaggaagagtggcgggcaggaaaatag

SEQ ID NO: 241297 - DNA, 876 bp, synthetic construct
  misc_feature 1..876: note = Description of Artificial Sequence: Synthetic coding sequence
  source 1..876: mol_type = other DNA
atgagtgccctaaattggaagcccttcgtgtacggaggattagctagtatcacggccgaatgtgggacatttccaatcgacctcactaaaacgcggctgcagattcagggccaaactaacgatgccaaattcaaggaaatcagatatcgcggaatgcttcacgcactcgttcgaattggaagagaggagggcctgaaggccctttatagtgggattgctcccgctatgctgcggcaggctagctatgggaccatcaaaattgggacctaccagagcctcaagagactattcatcgaacggcctgaagatgagaccctcccaattaatgtgatctgcgggattcttagcggagtgatttcaagcacaattgcgaaccctacagacgtgctcaaaataaggatgcaggctcagtccaatacaatccagggaggaatgatagggaatttcatgaatatctaccagcaggagggcacgcggggactgtggaagggggtgtccttgaccgcacaacgtgctgccattgtcgttggggttgagcttcctgtgtatgatatcacgaagaagcacctcattctgtctggcttgatgggcgacacggtttacacccacttcctgagttccttcacctgcggccttgctggcgcactggcctctaaccctgtggatgtggtacgcacaaggatgatgaatcagagagttctgagggacggccgatgttccggatatacggggaccttagactgcttactgcagacctggaagaacgagggctttttcgctctttacaaaggtttctggccaaactggctgcgtttaggcccttggaatatcattttttttgtgacgtacgagcagctgaagaaactcgatctgtag

SEQ ID NO: 241298 - DNA, 651 bp, synthetic construct
  misc_feature 1..651: note = Description of Artificial Sequence: Synthetic coding sequence
  source 1..651: mol_type = other DNA
atgttacgccaggcctcgtacgggacaattaaaataggtacatatcagagcctgaagagactgtttatcgagaggccagaagatgaaacactgccaatcaatgttatctgcggaatcctctcgggagttatctcctccacaatcgctaaccctaccgatgtgctgaagatccgcatgcaagcccagtcaaatactatccagggaggcatgattggcaacttcatgaatatctaccagcaggagggaactagaggcctttggaagggggtctcactcactgcgcaaagagccgcaattgtcgtgggagtggagttgcctgtctacgatataactaagaagcatctgatcctgtccggcctcatgggcgatacagtgtacacccatttccttagcagcttcacgtgcggtctggccggagcactggcgagtaatcctgtggatgtggtcaggaccagaatgatgaaccagagggtgctgcgggacggcaggtgctccggatacacaggaaccctagactgcctgttacaaacatggaaaaacgaaggatttttcgccctctacaagggattctggccaaattggctaagactgggcccatggaacatcatctttttcgtcacttacgagcagctgaagaagctggatctgtag

SEQ ID NO: 241299 - DNA, 723 bp, synthetic construct
  misc_feature 1..723: note = Description of Artificial Sequence: Synthetic coding sequence
  source 1..723: mol_type = other DNA
atgctgcatgctctggtgagaatcggaagagaagaaggattaaaagccctatactcaggcatcgctccggcaatgcttcggcaggcgtcctatggcacaatcaagataggcacctaccagtccctgaaacggttattcatcgagagacccgaagacgagaccctgcctattaatgtaatctgcgggattttatcgggcgtaatcagctccactatagccaaccctacggacgttctaaaaattcgcatgcaggcccaatctaacaccatccagggaggaatgattgggaattttatgaacatttaccagcaggagggcacgaggggactatggaagggagtttctctaaccgcccagcgcgcagccattgtagttggggtcgaattacctgtgtacgacattactaagaaacacttgattctgtccgggttaatgggcgacacagtgtacactcattttttgtcttcctttacttgtggactcgcaggagctcttgcctctaatcccgtggacgtggttcggactcggatgatgaaccagagagttctccgcgacggcaggtgcagtggatacacaggaactctggactgcctcctgcaaacatggaagaacgagggattttttgctctgtataaaggattctggcccaactggctgcgcctgggtccctggaacattattttcttcgtgacatacgaacaactcaagaaactggatttgtag

SEQ ID NO: 241300 - DNA, 948 bp, synthetic construct
  misc_feature 1..948: note = Description of Artificial Sequence: Synthetic coding sequence
  source 1..948: mol_type = other DNA
atgaccggtcagggccaatctgcgtctgggagtagtgcctggtcaaccgtgtttcgtcacgttcgctacgaaaatctaatcgctggcgtgtcgggtggagttttgtccaatctcgcgcttcaccctctggacctcgtgaaaataaggtttgccgtatctgatgggctagagcttcggccaaagtacaacggaattttacattgtctgaccacgatttggaaattagacgggctgcgtggactgtaccaaggtgttactcccaatatatggggcgctggcctgagctgggggttatactttttcttctacaatgccattaagtcgtacaagacagaagggcgagccgagcgattggaggcaacggagtatttagtgagcgccgctgaagccggagctatgaccctctgcatcacaaatcctctgtgggtgacaaagacccggctgatgttacagtacgatgcagtcgttaacagcccgcacagacagtacaagggtatgtttgacacactggtgaagatatataaatatgagggggtgagaggtctgtataagggattcgtgcctggattattcggaaccagccatggagccctgcagtttatggcttacgagctgctgaagctcaagtacaatcagcatatcaacagactccccgaagcccaactgagtacagtcgagtacatttcagtagccgctttgtctaagatattcgctgttgcagctacatacccctaccaggtggttagagcacgcctgcaggaccagcatatgttttatagcggcgttattgatgtgataacaaagacttggagaaaggaaggcgtgggaggattctacaagggaatagctccaaacctgattcgagtgacccctgcttgttgcatcactttcgtcgtgtacgagaacgtgtcccattttctactggatctacgagagaaaagaaaatag

SEQ ID NO: 241301 - DNA, 900 bp, synthetic construct
  misc_feature 1..900: note = Description of Artificial Sequence: Synthetic coding sequence
  source 1..900: mol_type = other DNA
atgaccggtcaaggtcagagtgcctccggctcctctgcctggagcgggggtgttttaagcaatttggccctgcatcctctagacctggtcaagatacgattcgcggtgtcagatgggctcgagctcaggccaaaatataacggaattctgcactgccttaccactatttggaaactagatggactcaggggattataccagggtgtcaccccaaatatttggggcgcaggcctatcatggggtttgtacttctttttctacaatgctatcaagtcatataaaaccgaaggaagagccgagagactcgaggcaactgagtatctggtgtccgctgcggaagctggcgctatgactctgtgtataaccaatcccctgtgggtcactaaaacccggcttatgttacagtatgacgctgtagtcaattcaccgcatagacagtacaaggggatgttcgacacactagtgaagatctataagtatgagggtgtgcggggtctgtacaaagggtttgtaccgggtctcttcgggacttctcacggcgctctgcaattcatggcgtacgaactgctgaaactcaagtacaaccaacacatcaaccggctgcccgaagctcaactctctactgtagaatacatctcagtcgccgctttgtccaaaatctttgccgttgccgcaacgtatccgtatcaggtcgtcagagccaggctgcaagaccagcacatgttctactccggcgttatagatgttattactaagacatggaggaaggaaggagtcgggggattctataaaggcattgctcccaatttgatcagggtgactccagcctgctgcattacgtttgtggtatacgagaacgtttctcacttcttgctggacctcagggagaagaggaagtag

SEQ ID NO: 241302 - DNA, 552 bp, synthetic construct
  misc_feature 1..552: note = Description of Artificial Sequence: Synthetic coding sequence
  source 1..552: mol_type = other DNA
atgaccctctgcataacgaatccattgtgggttacaaagaccagactcatgctccaatatgatgcggttgttaacagtcctcatcgccagtacaaaggaatgttcgataccctggtgaaaatttacaagtatgagggcgtgcggggattgtataaaggatttgtgcctggccttttcgggacaagccacggagctctgcagttcatggcctacgagctccttaagctcaaatataaccagcacattaacagacttccagaggctcaattgagcactgttgagtatatctctgtggccgcactatccaagatttttgcagtggctgcaacctacccttatcaggtggtgcgtgccaggctgcaggatcaacacatgttttactccggagtaattgatgtgatcactaaaacctggcgaaaagagggcgtgggtgggttctacaaagggatcgccccaaatctgattcgagtgacacccgcatgctgcatcacttttgtggtgtatgaaaacgtttctcatttcctgctggacctaagggagaagaggaagtag

SEQ ID NO: 241303 - DNA, 966 bp, synthetic construct
  misc_feature 1..966: note = Description of Artificial Sequence: Synthetic coding sequence
  source 1..966: mol_type = other DNA
atggccaccggtggccagcagaaggagaacacactgctccatctgttcgcgggtggctgcggtgggactgtaggagcgatatttacgtgcccactggaggtcataaagactagactgcagagctccaggttagctttaagaacagtatattatcctcaagtacacttgggcaccatatctggtgccggtatggtgagacccacctccgtaacgcccggactattccaggtcctcaagtctatcctggagaaagagggcccaaaaagtctttttcgcggtttgggacccaacctagtcggggtggccccatcacgggctgtctacttcgcatgctactcaaaggcgaaggaacaatttaatgggattttcgtgccaaattccaacatcgtgcatatctttagtgccggatcagccgcttttattaccaacagtcttatgaatcctatttggatggttaagacaagaatgcagctggaacaaaaagtcaggggatcaaaacagatgaacacgctgcagtgtgccaggtacgtgtatcagacagaggggatccggggattttataggggattgacggcttcttacgctggtatcagtgaaaccatcatctgcttcgctatctatgagtcactgaagaagtacctcaaggaggctccgttggcctcaagtgcgaatggcacagaaaagaattccaccagcttttttggactgatggctgctgccgctctcagcaaggggtgcgcatcttgcattgcttatccacacgaagtgataagaacaagactccgggaagagggcactaaatataaaagcttcgtgcagacggcaaggctggtattcagagaggaaggatatctggctttttacaggggcctgtttgctcagctgatccgccagatccccaacactgccattgtgctgtcaacatacgaactgatcgtctatctgcttgaggaccgcacccaatag

SEQ ID NO: 241304 - DNA, 915 bp, synthetic construct
  misc_feature 1..915: note = Description of Artificial Sequence: Synthetic coding sequence
  source 1..915: mol_type = other DNA
atggagacggtccctcccgctgttgatttggtcttgggcgcaagtgcctgctgcctggcatgtgtcttcactaacccccttgaggttgtcaaaaccagactgcagctccaaggcgagctgcaggccaggggaacctatcccaggccataccacggctttatcgcctccgtggcagccgtggcacgcgctgacggcttatgggggctgcaaaagggtctcgctgccggactgttgtatcaggggctgatgaatggggttcgtttctactgttactctcttgcctgccaggccggactgactcagcaaccaggcggaactgtcgtggccggtgcggtcgcaggggcactgggggcattcgttgggtctccagcttatctgatcaaaacccaactccaggcccagactgtggccgctgtggccgtgggccatcagcataatcaccagacagtcctgggagctttggaaacaatttggaggcagcagggtctgctaggcttgtggcagggcgttggcggtgctgtgccgagagtaatggtggggagtgccgctcagctggccacttttgccagcgccaaagcatgggtccagaagcagcaatggttgcctgaggattcttggctggtcgccctggctggaggaatgatttcatctatcgccgtggtggttgtaatgacacccttcgacgtcgttagcacacggctctataatcagccagttgacactgccggtcggggtcaactatatggcggtctaactgactgcatggtgaagatctggcgacaggaaggacccttggccctttataagggcctgggccctgcctatttgaggctggggcctcacaccatcctgagcatgcttttctgggacgagctgcgcaagctggcagggagagcccagcacaaagggacttag

SEQ ID NO: 241305 - DNA, 888 bp, synthetic construct
  misc_feature 1..888: note = Description of Artificial Sequence: Synthetic coding sequence
  source 1..888: mol_type = other DNA
atggatttcttgatgagcggccttgccgcttgtggcgcttgtgtctttaccaatccactggaggttgtgaagacaagaatgcagctgcagggtgagctgcaggcccctggtacttatcaacgccactatcgaaatgttttccacgcgtttatcacaataggtaaggtggacggactggcggctctgcagaaaggtttggcgccagcactcctttatcagtttttaatgaacgggattcggcttgggacatacggtttagccgaggccggaggttacctgcacactgctgaaggtacccattccccggctcgatctgcagcagccggagcgatggccggagtgatgggagcctatcttggtagccctatctacatggtaaagactcacctccaggcccaggccgctagcgaaattgcagtcgggcatcaatataaacatcaaggcatgtttcaggccctcacggagatcgggcagaaacatggtttagtgggactatggcgaggagccctaggaggtctgccccgtgtgatcgtcggatcctccacacagctttgcacattctcgagcacaaaagatttactttcccagtgggagatttttcctccacaatcttggaagctggcactcgtcgccgctatgatgagtggaattgctgtggtccttgccatggccccattcgacgttgcatgtacgcgactgtacaatcaaccaactgacgcacaaggcaaaaaccgagtgcctaaattcagcgctacatcatgctctgcctcagccccactcctgggaaccaaggatgtacgcatagttaaagggcagactggccatcagctatttaaggtgacacaagccccagggtgctcccccatcctgttaggaacacagtcatag

SEQ ID NO: 241306 - DNA, 876 bp, synthetic construct
  misc_feature 1..876: note = Description of Artificial Sequence: Synthetic coding sequence
  source 1..876: mol_type = other DNA
atggatttcttgatgagtggactagcagcctgcggagcatgtgtgttcaccaaccctctcgaagtggttaagacgagaatgcagctccaaggcgagctccaggctccaggaacctatcaaagacactacagaaatgtattccacgcattcattacaatagggaaggttgacggattggctgccctccagaaaggactagccccagctctgctgtatcaattcctgatgaacggtattcggctggggacttatggtctggccgaagccggaggttatttacatactgccgaagggacacactcccccgctcgatccgccgctgccggagccatggcaggagtcatgggtgcatatcttggtagccctatatatatggtgaaaacgcacttgcaggcacaggctgcatccgagattgctgtgggccaccaatacaagcatcaggggatgttccaggcgctcacagagatcggacagaaacacggcttagtaggactgtggaggggcgcactgggcggtctgccccgtgtaatcgttgggagctctacacagctgtgtactttctcatctaccaaggatctgcttagtcagtgggaaattttcccaccgcaatcatggaaactcgcgctggtggctgcgatgatgagcggcatagccgttgtcttggcaatggccccttttgacgtggcctgtacacggttatacaatcagccaacagatgcccagggaaagggcctgatgtaccgagggatcctggatgctctgctacagaccgctagaacagaagggatattcggcatgtataaagaaccatcaccacaggtgctcagcaatattatgcaatgcttctccgctttcacaggtgatcagagatgctag

SEQ ID NO: 241307 - DNA, 915 bp, synthetic construct
  misc_feature 1..915: note = Description of Artificial Sequence: Synthetic coding sequence
  source 1..915: mol_type = other DNA
atgatccaaaatagtcgaccttcactgctgcagccacaggacgtgggagacaccgttgaaacccttatgctgcatccagtgatcaaagcctttctgtgtgggagcatctccggaacatgcagcacacttctcttccagccactggatctgttaaagactcgattacaaacgctgcagccctcagatcacggcagccgcagagtgggaatgctagccgtattgctgaaggtggtgcgcaccgagtcactcctgggactgtggaaaggaatgagtcccagcattgttagatgcgtgcccggagtcgggatctactttggaactctgtattcccttaagcaatactttctgcggggtcatcctcccacagctttggagtctgtgatgcttggtgtaggcagtcggagcgtcgccggagtgtgcatgtcccctatcaccgttataaagactcgatatgagagcggcaagtatggctatgaaagtatctacgcggctctgcgctccatttaccactcggagggccacagagggctgttcagcggtcttacagccactctccttcgcgacgcgcctttctccggcatctacctaatgttctacaaccaaacgaaaaatatcgtgccgcatgatcaggttgatgctactttaatcccgatcacaaatttcagctgtgggatcttcgccggtatcttagcatccctagtgacacaacccgctgacgtgatcaagacccacatgcagctgtatccattaaaattccaatggattgggcaggctgtcactctgatttttaaagactatggtctgaggggatttttccagggtggaattccacgcgcattgagaaggacactaatggccgctatggcttggaccgtttatgaggaaatgatggcgaaaatgggacttaaaagttag

SEQ ID NO: 241308 - DNA, 1671 bp, synthetic construct
  misc_feature 1..1671: note = Description of Artificial Sequence: Synthetic coding sequence
  source 1..1671: mol_type = other DNA
atgccacccgagaggaggcggagaatgaaacttgatagaaggactggagcgaagcctaagcggaagcccggaatgagaccagattggaaggcaggcgcagggcctggagggcctcctcagaaaccagccccatcttcccagcgtaaaccccctgctaggccgagtgctgctgctgccgctatcgcagtcgctgcggctgaagaggagaggagactgagacaaagaaacaggttgcgactggaggaggacaagcccgcagtggagaggtgtctggaggagcttgttttcggagacgtcgagaatgacgaggacgcgttgcttcggcgactgaggggacctcgcgttcaagaacacgaggattccggcgatagcgaggtggagaatgaagcaaaaggcaactttccacctcagaagaaacccgtatgggtagatgaggaggacgaagatgaagaaatggtcgacatgatgaataatcgattcaggaaagatatgatgaagaatgcctccgaaagcaaactcagtaaagacaatctgaagaaacgattaaaggaagagtttcagcacgccatggggggagtgcccgcttgggccgagactacaaaacgcaagacatcaagtgatgacgagagcgaagaggatgaggatgaccttctgcaaaggacaggtaactttatatctaccagtacgagtctgcctcgtgggatacttaagatgaagaactgccagcatgcaaacgccgagaggccgactgtagctagaatcagtagcgtccagtttcaccctggcgcacagatcgtgatggtcgccggtctggataacgccgtgtctttattccaggtggatgggaagactaatcccaaaatccagtccatctacttagagcgattccctatctttaaggcctgcttctccgcaaatggagaggaggtgttggctaccagcacgcattcgaaagtgttgtatgtctatgacatgctagccggaaagctgatccctgtccatcaagtgcgtggactcaaagaaaagatcgtccggtccttcgaggtgtcacccgatggcagttttttgttgatcaacggaattgccggatacttacacctgctagctatgaaaacaaaggagctgataggatctatgaaaattaatggtcgtgtagccgcatcaaccttttcctctgactccaaaaaagtgtacgcctctagcggcgacggagaggtgtacgtttgggatgtcaacagcaggaagtgcttaaatcgtttcgtggatgagggaagcctttacggtcttagcattgcaacaagccgtaacgggcagtatgtggcctgtggaagcaactgtggggtggtcaacatttataatcaggactcctgcctgcaagaaactaatcccaaacccatcaaggccatcatgaatttagtgacgggtgttacctccctgacattcaatccaaccaccgagatactggccatagcgtcagagaaaatgaaggaagcagtgaggctagtacatctcccttcttgtacagtgttctcgaactttccagttataaagaacaaaaatattagtcatgtgcacaccatggacttttcgcccaggtctgggtacttcgctcttggcaacgagaaaggaaaagccctgatgtatcggctacatcactactccgacttctag

SEQ ID NO: 241309 - DNA, 1080 bp, synthetic construct
  misc_feature 1..1080: note = Description of Artificial Sequence: Synthetic coding sequence
  source 1..1080: mol_type = other DNA
atggctgaccaggatccggcagggatcagccctcttcagcagatggtggcctcgggaacaggcgctgtagtgacatctctctttatgacccccttggatgtcgtcaaagtccgactacaatcacagcggcctagcatggcatctgagttgatgccctcgagccgcttatggagccttagctataccaaactgccgtccagtctgcagtctacaggcaagtgcctcctgtattgtaacggggtgttggaaccactgtatctatgtcctaacggcgcacgttgcgccacatggtttcaagaccctacgagatttacagggacaatggatgctttcgtcaagatcgtccgccacgagggcacgcgcaccttgtggtctggtctaccagccacgctggtcatgacagtgccggctacggccatttatttcacggcctatgaccagctcaaggctttcttgtgcggccgagcccttaccagcgacttatatgcaccaatggtcgccggtgcattggcacggctgggcaccgttaccgtgatatcacccctcgagctcatgaggaccaaactacaggcacagcacgtgtcctacagggaacttggggcatgcgtaaggacagctgtggctcaaggcggttggagaagtttgtggctcggttggggcccaactgcgctacgggatgtgccctttagtgcgctctactggtttaattacgaactggtgaaaagctggctcaatggcttccgtccaaaagaccaaactagcgtaggtatgtcgtttgttgcaggaggaataagcgggaccgttgcagctgtattaactctgccctttgacgtggtaaaaacacagcgccaggttgcgctcggggcaatggaagccgtccgtgtaaacccacttcacgtggactccacttggctgctgcttagaaggatccgtgctgaaagcggcacgaaaggacttttcgccggattcctcccaagaatcataaaagcggcaccctcatgcgcaattatgataagcacttacgagttcggcaagtcctttttccaacgccttaaccaggacagactccttggcggttag

SEQ ID NO: 241310 - DNA, 1011 bp, synthetic construct
  misc_feature 1..1011: note = Description of Artificial Sequence: Synthetic coding sequence
  source 1..1011: mol_type = other DNA
atggccgatcaggaccctgcgggaatttccccactgcagcagatggtcgcctctggaaccggcgcagtggtgacgtcattgtttatgactccactggacgtagtcaaggttcggctacaatcccagaggcctagcatggcatccggcaagtgcttactctattgcaatggagttttggagcccctctatctttgtcccaatggcgctcgctgtgccacatggttccaggacccgacccggttcactggcacaatggacgcatttgtgaaaattgtgagacacgaaggcacacggacgctatggtctgggttacctgcaacactggtaatgaccgtccctgccactgctatatatttcactgcctacgaccaacttaaggcattcctttgtgggagggcattgacatccgacctgtacgctcccatggtggcaggtgcactggccaggctcggtaccgtgaccgttatcagtccactggagcttatgaggactaagttgcaggcgcaacatgtgtcttaccgtgaacttggagcctgcgtacgcaccgcggtggcacaaggtggctggaggagtctgtggctcggttgggggcctacggccctgagggacgtcccgtttagcgcactgtattggtttaactatgagcttgtgaaatcttggctgaacggctttaggccaaaagaccaaacctctgtgggaatgagtttcgtggctgggggaatcagcgggacagttgcggcagtgctgactctccccttcgacgtcgtgaaaacccaaagacaagtcgccctgggcgctatggaagcagttagggtgaatcccttgcacgtagacagcacatggttgctcctgcggaggattcgggctgaatcaggcactaagggcctgttcgctggttttctccccaggataatcaaggccgctccttcctgcgccataatgatctccacctacgaattcggaaaaagcttttttcaacgactgaatcaagatcgcctgctgggaggttag

SEQ ID NO: 241311 - DNA, 1017 bp, synthetic construct
  misc_feature 1..1017: note = Description of Artificial Sequence: Synthetic coding sequence
  source 1..1017: mol_type = other DNA
atggatcccgaaactcggggacaggaaatcatcaaagtcactcctctgcagcagatgcttgccagctgcacaggcgcaatcttaacctctgtcattgtcacaccactagacgtagttaagattaggctgcaggctcagaataacccactccccaaagggaagtgctttgtgtattctaacggtctcatggaccatctgtgtgtgtgtgaggagggcggtaataaattgtggtacaagaagcctggcaacttccagggtactctggatgctttctttaagattatacggaatgaagggatcaagagcttgtggagcgggcttcctccgactctcgtgatggccgtgccggcaaccgtgatctattttacctgttatgatcagttgtccgctctcctgcggagcaagctgggagagaatgagacctgtattccaatcgtggcagggattgtggcaagatttggagcggtgactgtgatctcccctcttgagctgattcggacaaagatgcagtcaaaaaaattcagctacgtcgaattgcatcgcttcgtaagcaagaaggtatcagaagatggctggatctctctgtggagaggctgggccccaactgtattgagagacgttccattttctgcaatgtattggtataactacgaaatccttaagaagtggctctgtgaaaaatcagggttgtatgagccaacctttatgatcaatttcacatctggagcactcagtggctccttcgcagcggtggctacactgccgttcgatgttgttaagacacagaagcaaactcaattatggacatacgaatctcacaaaatctctatgcctctgcatatgtccacatggataattatgaagaatatcgtcgcaaagaatgggttcagcggcctgttttccggcctcattcccagattgatcaagatcgccccagcctgtgcaatcatgatttccacttacgagttcggaaaggccttttttcagaagcagaatgtgaggcgtcagcagtattag

SEQ ID NO: 241312 - DNA, 1113 bp, synthetic construct
  misc_feature 1..1113: note = Description of Artificial Sequence: Synthetic coding sequence
  source 1..1113: mol_type = other DNA
atgggcgctcagccaggggagccacaaaacacctgttctcggatacaaaccctgtttcgcagggtcaagaccttgctgatcaaggctcctccacctccccaaccacccccaccaccaccctcatggaaccctggatgcacccacgtatacggttacgcgttcggccatatgcacgacaataaccttgaacacctgccctcccagcaggtgctggataccggcgagcagctgatggttccggtagaggttctagaggtggataataaagaggccttgtggaagtttctcctgtctggtgcaatggccggagcagtgtcccgaactgggaccgcccctctcgaccgagcaaaagtttatatgcaggtctactcttctaagaccaactttactaacctcctgggaggtcttcaatccatggtccaggaggggggattcaggtctttatggagaggtaatggtatcaacgtgctcaaaattgctcctgaatatgcaattaagtttagtgtgtttgagcagtgcaaaaattacttctgcggaatccagggtagtcctccttttcaagagcgtttacttgctggatcactggccgtagccattagccagacactcattaatcctatggaggtgctgaaaactaggcttactctgaggagaacaggccaatataaggggctgcttgattgtgccagacaaattctccagcgggagggcacccgggctttataccgcggatacctcccaaacatgcttggcatcatcccctatgcctgcacagacctagccgtgtatgagatgctgcagtgcttctgggtcaaatctggtagggacatgggcgatcctagtggactggtttccctgagcagcgtcacactgtccactacttgcgggcagatggcgagttatcctctcaccttagtcaggacgaggatgcaggctcaggacaccgtggaggggtctaacccaactatgaggggtgtgctgcaaaggatcctagctcagcagggctggctgggcctatatcgcggaatgacacccacacttttgaaggtcctcccagctggtgggatctcttatgtcgtgtatgaggctatgaagaagactttagggatctag

SEQ ID NO: 241313 - DNA, 729 bp, synthetic construct
  misc_feature 1..729: note = Description of Artificial Sequence: Synthetic coding sequence
  source 1..729: mol_type = other DNA
atgggagcacagcccggtgaaccccagaacacgtgctctcggattcagactctgtttaggagagtgaaaacattactgatcaaagctccaccgcctcctcaaccgcctcctccgcctcctagctggaatcctggatgtacccatgtgtatgggtacgcctttggccatatgcatgataataatctcgagcatctaccctcacagcaggttctcgacaccggagagcaacttatggttccagtggaggttctggaagttgacaataaggaggctctctggaaatttctgctttccggcgctatggccggagccgtcagcaggaccggaaccgctccactggaccgagcaaaagtgtacatgcaactgctaggcaggctgcggcaggagaatagattaaatctcggtggcggaggttgttccgagccccgttcacccgataggacccctgcctgggcgacggagagcaccccccctcgacgaactagcccaacatgttgggggggataccgggcatggagccggagagctgctagtgctccctgcggtggcgctactgctagcacatgttccagactgctgctgtctatgccgagctcttcaccttacagttcgtcagcccgaatcacttctgtggaatacaaggggcctcgtcccagcagatctgtatctctgctggccccatggctgtggccatccccccgaccatcgtctacaccctggcgatgctag

SEQ ID NO: 241314 - DNA, 957 bp, synthetic construct
  misc_feature 1..957: note = Description of Artificial Sequence: Synthetic coding sequence
  source 1..957: mol_type = other DNA
atgggcaatggggtaaaagaaggtcccgtgagactgcatgaggacgctgaggccgtgttaagctcgtctgtctcttccaagcgggatcatcggcaagtcctgtcctctctgttgtctggagcactggcgggtgccctagctaagaccgcggttgccccacttgacagaaccaagattatctttcaggtttctagtaagcgatttagtgccaaggaagctttcagggtgctgtattacacctatttgaacgaggggtttttgagcctctggcgtgggaacagcgccacaatggtgagagtggtgccctatgccgctatacagttctcagcccacgaggaatataagcggatcctgggctcctactatgggtttcgcggtgaggctcttcctccctggcctcgcttgttcgcaggcgctctggccggtacaactgctgcaagcttgacttatccgctggatcttgtaagagccagaatggcggtgactcccaaagagatgtatagcaacatcttccatgtgttcatccgcatcagcagagaagagggcctaaaaacactctaccacgggttcatgcccactgtgctcggcgtgataccatacgctggactctcattctttacatacgagactctaaagtcgttacaccgagagtattctggaaggagacagccttacccctttgagagaatgatcttcggggcttgcgcaggcctcattgggcagtcagctagttatccccttgatgttgtgcgcaggcggatgcaaacagctggagtcacgggatacccgcgagcatcaatagccaggacccttagaacaattgtcagagaggaaggcgcagtgcgagggctgtataagggtctatctatgaattgggtgaaaggcccaattgcggtgggcatttcctttactactttcgacctgatgcagatcctgctaagacacctgcagtcctag

SEQ ID NO: 241315 - DNA, 1011 bp, synthetic construct
  misc_feature 1..1011: note = Description of Artificial Sequence: Synthetic coding sequence
  source 1..1011: mol_type = other DNA
atgtctgtgctatttttttatatcatgcgatataagcagagtgaccctgaaaaccctgacaatgatcggttcgtgctcgctaaaatcgccactagaaaggcatgtgggctagccttggccaagctcggctatgcaaacaatcgggtcgtggtcctggatggcgacactcgctacagcactttcagcgagatcttcaacaaagaataccctgaaagatttattgagtgttttatggccgagcagaacatggtgtcagtggccttaggctgcgcgtctagaggaagaactattgccttcgcgtctacatttgcggctttcctaacccgagcgttcgaccacattcggatcggcggattggcggagtcaaatatcaacatcattggctcccactgtggggtctctgtaggagatgatggagcttcccagatggccctggaggatatcgccatgtttaggaccatccctaagtgcaccattttttatcctacagatgctgtcagtaccgagcatgccgtagcccttgccgctaatgccaagggcatgtgcttcatcaggaccacacgtcccgaaacgatggtgatttacacaccacaggagaggtttgagattggacaagcaaaagtgctgaggcattgtgtctccgataaagtaaccgtgattggcgcaggcatcaccgtttacgaggcactcgctgctgccgatgaactgagtaagcaggatatttttatcagagttatagatctatttaccatcaaaccattggacgtcgctacaattgtgagcagcgcaaaagcaaccgaaggtcggattataaccgtggaggaccactacccacagggcggaatcggggaagcagtctgtgcagcagtgagcatggacccagacattcaggtccactccctggccgttagtggggtcccgcaatccggcaaatcagaggagctgttagacatgtacggcatatccgccagacatattattgtagctgtaaagtgcatgctgctaaattag

SEQ ID NO: 241316 - DNA, 870 bp, synthetic construct
  misc_feature 1..870: note = Description of Artificial Sequence: Synthetic coding sequence
  source 1..870: mol_type = other DNA
atggccacatggcgaagagatggcaggctgactgggggtcagcggttgttatgtgccggtttggctggcactctttctctcagcctaactgcaccgctggagctggccgcttataggaagttcgtagtcttgtttactgatgacctgggccacatcagccagtggtcctcaattatggcgggtagtctggccggaatggtgtccacgattgtgacttatcctaccgacctcattaagacccgccttataatgcagaacatactcgaacccagctatcgtggactcctccacgccttctccaccatctaccagcaagagggattcctggctctatatagaggggtttctcttacagtcgtcggtgccttgccattttcagctggctccctgctggtctacatgaacctcgagaaaatctggaatggccctcgtgatcaattcagtttgcctcagaactttgctaacgtgtgcctggcagcggcagtgacccagacccttagtttccccttcgaaacagtcaagagaaaaatgcaggcccaatccccttacttgccacactcgggaggggtggacgtgcacttttccggagcagtcgactgctttcggcagattgtgaaggcccaaggagtgctcgggctgtggaacggattgaccgcgaaccttcttaaaattgtgccgtactttgggatcatgttttccacttttgagttctgtaagcggatctgtctgtatcagaatgggtacatcctcagtccgttgtcctataagcttactcccggtgttgaccagagcctgcagccacaggagctgagagaactcaagaagttttttaagacacggaagcccaaacctaaaaagccaactctgtag

SEQ ID NO: 241317 - DNA, 681 bp, synthetic construct
  misc_feature 1..681: note = Description of Artificial Sequence: Synthetic coding sequence
  source 1..681: mol_type = other DNA
atggctacatggcggagagacggaaggctgacagggggtcagcggctgctctgtgctggcctggcagggacgctgtcactgtcccttaccgccccactggaactggccactgtactagctcaggtgggcgtcgtgaggggacacgctcgcggtccgtgggctaccggtcacagagtgtggagagccgagggcctacgtgccctctggaaagggaacgctgtcgcttgtctgcggctgtttccctgtagtgctgtgcaactcgcagcctatcggaaattcgtggttctattcaccgacgatctggggcatattagccaatggtcctccattatggccggatcactggctgggatggtcagcaccatcgtgacgtaccctacagatcttatcaagacaaggttaatcatgcagaatattcttgagccctcatataggggtctcttgcacgctttcagcacaatctaccaacaagagggttttttagccctgtatcgaggcgtgagtttgacggtggtgggaagtgagcctctcccgcctacacagtggcgcagccgttgcccatttctgcggtctagtggtctgctgcccgcagatagcgaggggccaggtggacccggagcattagagtggattgacagccagttcacagaggacagttctattttttggaactatgtgtag

SEQ ID NO: 241318 - DNA, 945 bp, synthetic construct
  misc_feature 1..945: note = Description of Artificial Sequence: Synthetic coding sequence
  source 1..945: mol_type = other DNA
atggaggacaaaaggaacatccagataatcgaatgggagcatctcgataaaaagaagttttatgtattcggggtggccatgaccatgatgattcgagtatccgtgtacccttttactttaattcggactcgcctgcaggtccagaaaggaaagagcctttatcatgggacgttcgacgcatttatcaagatcctgagggcagacgggataacgggactataccgaggcttcctcgtgaacacattcacattaattagcggacaatgttacgtgacgacctatgaattaacaagaaagttcgtggccgattatagtcagtcaaataccgtgaagagcctcgttgcaggtggttcggcttccctcgtggcacaaagcattacggttcctatcgacgttgtgtctcagcacctcatgatgcagaggaaaggggaaaagatgggaagattccaggtgcggggaaatccagaggggcagggagtcgtggccttcggacaaacaaaggatattattaggcagattttgcaggctgacggactccggggtttctaccggggttacgttgcctcacttcttacatatatccccaactcggctgtctggtggcctttttatcacttctatgcagagcagctctcttatttatgcccaaaggagtgtccccacattgtgttccaggcagtctctggccctctggcagcggcaaccgcttccatccttaccaaccccatggatgttattcgaaccagggtacaagtggaaggaaaaaattccatcatcctcacttttcgccagcttatggccgaagaaggcccatggggtcttatgaaagggctgagcgcacggatcatctctgctacacccagcactatcgttattgtagtgggctatgaatccctgaaaaaactgtcattgaggcctgagcttgtggattcccgccattggtag

SEQ ID NO: 241319 - DNA, 489 bp, synthetic construct
  misc_feature 1..489: note = Description of Artificial Sequence: Synthetic coding sequence
  source 1..489: mol_type = other DNA
atggaggacaagcgaaacatccagatcatagaatgggaacatttggacaaaaaaaagttctacgtgtttggagtagctatgacaatgatgattcgagtgtccgtatatccctttactctgatccgcaccagactccaggtccagaaaggaaagtcactttatcacggaacatttgatgccttcatcaagatcttacgcgcagatggaatcacaggcctgtacagaggattcttggtgaatacattcacacttataagtgggcagtgttatgtgaccacttacgaattgactaggaagttcgtcgctgattatagtcagtcaaacacagtcaaaagcctgatggccgaagaagggccatgggggttaatgaaaggtctgagcgcacgaatcattagtgccactcctagtaccatcgtgattgttgtaggttatgagagcttgaaaaagctgtcattgcggccagaactcgtcgactcccgccactggtag

SEQ ID NO: 241320 - DNA, 876 bp, synthetic construct
  misc_feature 1..876: note = Description of Artificial Sequence: Synthetic coding sequence
  source 1..876: mol_type = other DNA
atggaagataagcgtaacattcaaattattgagtgggaacatctggacaagaagaagttttacgtgtttggtgtcgccatgactatgatgatccgggttagcgtgtacccctttacacttatacgtacacgtctacaagtccagaaagggaagtcactgtatcacggcaccttcgatgccttcattaaaattctgcgggcagatggcattactggtctgtatcgcggtttcctggtgaatacatttactctgattagcggtcagtgttatgtgacaacctacgaactgactcgaaaatttgtggcagactactcccagtccaatactgtgaaatcactcgtggcaggtggctccgcttccttggttgcacaatcgattaccgtgcgtggaaaccccgagggacagggcgtcgtggccttcggccagaccaaagatatcattcggcagattctccaggcagacgggctcaggggattttaccgaggctacgtggcgtcccttctgacctacattccaaatagtgcagtgtggtggcctttttaccatttttacgcggagcagctctcatacctatgtcctaaagagtgcccacatattgttttccaggcggtgagcggacccctggctgcagctaccgcctcaatcctgaccaaccctatggatgtcatacgcacacgtgtgcaagtggaaggcaaaaacagcattatcctaacgtttaggcagctgatggcagaggaaggcccatgggggctgatgaaaggcttgagcgctagaatcatcagcgccacgccttctactattgtcatcgtggtgggatatgaatctctgaaaaaactgtcacttcgcccagagctggttgattcgcgacattggtag

SEQ ID NO: 241321 - DNA, 741 bp, synthetic construct
  misc_feature 1..741: note = Description of Artificial Sequence: Synthetic coding sequence
  source 1..741: mol_type = other DNA
atggtgaagatctatcgccatgaatcactgctgggattcttcaagggtatgtccttcccaatagcttccatcgccgtcgtcaattctgtcctgttcggagtctacagtaatacattgttagtgttgaccgccacaagccaccaggagaggcgggcacagccacccagttatatgcatatctttctcgccggttgcacaggcggtttcctgcaggcttattgtctggcgcctttcgaccttataaaagtcagactgcagaaccagactgaacccagagcccagcccggttccccgccacctcgctaccaggggcctgtgcattgcgccgcaagcatttttcgagaagagggacccagagggttattccgtggggcttgggccctgacactgcgagacacccccacagttggtatctattttatcacatacgagggtctgtgccgccagtatactcctgaggggcagaatccttccagcgcgaccgtcctcgtagctggaggctttgccggtatagcctcttgggtagccgcaacaccccttgacatgattaagtccaggatgcagatggatggactccgacgtagagtttaccaaggcatgctggactgtatggttagttccattcgacaagagggccttggcgttttctttcgaggggtaacaatcaacagcgctcgcgcatttccagtaaatgccgtgaccttcctgtcatacgagtatctgctgaggtggtggggatag

SEQ ID NO: 241322 - DNA, 795 bp, synthetic construct
  misc_feature 1..795: note = Description of Artificial Sequence: Synthetic coding sequence
  source 1..795: mol_type = other DNA
atgcccgtcgaggagttcgtcgctggctggataagtggggctcttggtctggtgctggggcatccttttgatactgtgaagctactcggtttctttaagggcatgtcatttcctattgcgtcaattgcagtggtcaattccgttttgttcggtgtttacagtaatacactgctcgtgcttacagctacttcacaccaagaaagacgggcacagcctcctagctacatgcatatctttcttgccggttgtacgggcggattccttcaagcctactgcctcgcaccgttcgacctgataaaggttcggctacagaatcagaccgaacctagggcacagccaggctctccgcctccacgatatcagggtcccgtgcactgtgctgcttccattttcagagaggaaggaccccgtggcttgtttaggggagcatgggcactcacactcagggacacccctacggttggcatctactttattacgtacgagggtctctgcaggcagtacactcctgagggacagaatcctagcagtgcgactgtgcttgtagccggaggcttcgctggtattgcctcctgggtggctgcaacaccactggatatgatcaagtcaaggatgcagatggatggactcagaagaagagtataccaggggatgctggactgcatggtgtctagtattcgtcaggaagggcttggagtcttttttaggggcgtaaccataaattccgccagggctttccctgtgaatgccgtgacattcctaagttacgaatacctgttgagatggtggggctag

SEQ ID NO: 241323 - DNA, 555 bp, synthetic construct
  misc_feature 1..555: note = Description of Artificial Sequence: Synthetic coding sequence
  source 1..555: mol_type = other DNA
atggtgaagatctatcgacatgaaagcgcatactgcctagcaccattcgacctgatcaaagtgcgccttcagaaccagacggaacccagagcacaacccggatctccccctccaaggtaccagggtcccgtgcactgcgcagcctctatctttagagaggagggaccacgcggtctgttccgaggtgcctgggccctgacgttaagagacacccccaccgtcggaatctatttcataacgtacgaaggtttgtgtcggcagtacacacccgaggggcagaatccttcatcagccacggttctggtggcaggcggtttcgcaggtatcgctagctgggtggccgctaccccccttgatatgatcaagagccgcatgcagatggacggcctgcgacgaagagtctatcagggaatgctggattgtatggttagcagcattagacaggagggtctgggagtgtttttccggggtgtgaccattaatagcgcacgcgcattccctgtcaatgctgtgacctttctgagctatgagtacctgttacgatggtggggctag

SEQ ID NO: 241324 - DNA, 867 bp, synthetic construct
  misc_feature 1..867: note = Description of Artificial Sequence: Synthetic coding sequence
  source 1..867: mol_type = other DNA
atgcctgtcgaggaatttgttgcaggttggatctctggagctttaggcctcgtgctggggcacccatttgatacggtgaaggtgagactgcagacacaaacaacctatcgcggtattgtggattgtatggtgaagatctatcgtcacgagagccttctgggtttcttcaagggaatgtcttttcctatcgccagcatagcagtggtcaacagcgtcttgtttggcgtttacagtaatacactgctggtattgacagcaacttcccaccaggaacggagagcacagcccccatcttacatgcacatcttcctggctgggtgtaccgggggattcctccaggcctactgcctcgctccctttgacctgattaaagtgcgccttcaaaaccaaaccgagcccagagcgcagcctggatcaccccctcccaggtaccagggtccagtacactgcgccgcatctattttcagggaggaggggccacggggacttttccgtggagcatgggccctgacacttagagacacccctaccgtgggtatatactttatcacctatgaggggctgtgccgacaatacacccccgaggggcaaaacccaagtagcgccaccgtcctcgtggccggaggttttgcaggtatcgcgagctgggtcgccgctactcccttggatatgattaaaagccgtatgcagatggatggactccggcgtagggtgtatcagggcatgctcgattgcatggtgtcatccattcgccaggagggcctcggagtgttcttcagaggtgttaccattaactcagcgagagccttccctgtgaatgccgtaacatttcttagctacgagtacctgctgagatggtggggctag

SEQ ID NO: 241325 - DNA, 741 bp, synthetic construct
  misc_feature 1..741: note = Description of Artificial Sequence: Synthetic coding sequence
  source 1..741: mol_type = other DNA
atggttaaaatctataggcatgaatcactgcttgggtttttcaagggcatgagcttccccatcgcatccattgccgtggtgaactctgtgctgttcggagtctattccaacacgcttctggttctcaccgctacgtcacaccaagagcgacgggctcagccacccagctacatgcatatattcctggcgggttgcacagggggattcctgcaggcctattgtcttgccccattcgacctgatcaaggtaaggctccagaatcagaccgagccacgtgcacaaccaggttctccaccgccacgctatcagggtcctgtccattgtgcggcttccatctttcgcgaagaaggaccgcgtggtctgtttaggggagcctgggcgttgacactacgtgacacaccgaccgttggcatctacttcatcacttacgaagggctgtgcaggcagtacacaccggagggccaaaatccttcttctgccactgtcctggtagccggtggatttgccggtattgcttcttgggttgcggctaccccactcgatatgataaagtctcgcatgcaaatggatggactgcgcaggcgcgtgtatcagggcatgctcgactgtatggtgtcttccatcagacaagagggactgggtgttttcttccgcggagtgactatcaatagtgcgagggcctttcccgtgaatgcggtgacgttcctcagttatgagtacctgttgaggtggtggggctag

SEQ ID NO: 241326 - DNA, 867 bp, synthetic construct
  misc_feature 1..867: note = Description of Artificial Sequence: Synthetic coding sequence
  source 1..867: mol_type = other DNA
atgcccgtggaggagttcgtggccggttggataagtggcgcattgggtttggttctgggtcacccatttgacacagtgaaggtgcggcttcagacccagacaacttatcggggaattgtggactgcatggtgaagatctacagacatgagagcttattggggtttttcaaggggatgtcctttccaattgcttcgatagccgtcgtgaactctgtgttgtttggcgtctacagtaataccctcctggtcctgacagcaaccagccaccaagagcgtcgcgcacagccaccttcctacatgcacattttcctcgcaggatgcacaggtggctttctgcaggcatactgtctggcccctttcgatttgataaaagtgagattgcagaatcaaaccgaaccacgggctcaacccggatcccccccaccccgatatcagggccctgtgcattgcgctgccagcatctttcgcgaggagggccctcggggtttgtttagaggcgcttgggccctgacccttcgcgatacacccacagtcggcatctacttcatcacctacgaggggctgtgtaggcaatacacaccagagggacagaatccatcttctgccacagttctcgttgcaggtggattcgcaggcattgcttcctgggttgcagccactccgctcgatatgattaaatcgagaatgcaaatggatggactccggaggcgcgtctaccagggaatgctggattgtatggttagctccattaggcaggagggccttggtgtgttcttcagaggagttacgattaattccgctcgcgcatttcctgttaacgcggtaacttttctatcttacgagtacctcttacggtggtggggctag

SEQ ID NO: 241327 - DNA, 357 bp, synthetic construct
  misc_feature 1..357: note = Description of Artificial Sequence: Synthetic coding sequence
  source 1..357: mol_type = other DNA
atgccagtcgaagagttcgtcgcagggtggataagcggcgctcttggactagtcctcggacatcccttcgacacggtcaaggtccgtttgcagacccagaccacatacagggggatagtggactgcatggtcaagatataccgccacgagtctctgctaggtttttttaaggggatgtcctttccaattgcctcaatcgccgtagtgaatagcgtcctcttcggggtttactccaacacgcttctggtcctcactgctacctcccaccaagaaagacgagctcagccaccgtcctatatgcacattttcttagctggctgcactgggggatttttgcaggcgtattgtttggcatag

SEQ ID NO: 241328 - DNA, 1257 bp, synthetic construct
  misc_feature 1..1257: note = Description of Artificial Sequence: Synthetic coding sequence
  source 1..1257: mol_type = other DNA
atgcatccccgacgacccgatggctttgacggccttggatatcgcggaggggctagggatgagcaaggctttggcggagcgttccccgctagatctttctccaccgggagcgacctgggtcactgggtaactacgccccctgacatccctggctcccgcaacttacactggggagaaaagtcccctccctatggtgttccgactacttcaacgccttacgagggacccacagaagagccattctcctccggcggtgggggatccgtccaggggcagagctcagaacaactaaatagatttgcaggctttggcataggcctagcaagtctctttacggaaaatgttcttgcccatccatgcatcgttttgcgccgacaatgtcaggttaactaccacgcccaacattatcatctgacacccttcacagttatcaatatcatgtatagttttaacaaaacacagggcccacgcgctctgtggaaaggaatggggtctacatttattgttcagggggtaacattgggcgctgagggcatcattagtgaatttactcctctacctcgcgaggtgttgcataagtggagcccgaagcagatcggcgagcacctcttgttgaaatcacttacttacgtagtggcaatgcctttttacagtgcaagcctgattgagacagtccagagcgaaataattagggataatactgggattctggagtgcgtcaaagaaggcataggaagggttataggaatgggtgtgcctcactctaagagactgctccctttgttgtctctcatcttccctacagtattgcatggggtgctccattatattatttcttcagtcatccagaaattcgtactcctgatcctgaaacgcaagacatataattcgcacttggcagagtccacctctcctgtgcaatctatgctggatgcatactttcccgagctaatcgccaactttgccgcttccctgtgttctgatgttattctgtacccactggagaccgttttacacaggctgcatattcaaggcacacgcaccatcatcgacaacacagatctgggctacgaggtactgcccattaacactcagtatgaggggatgagggattgtatcaataccatccgccaggaggagggagtcttcgggttctacaaagggttcggagccgtgatcatccagtataccttacatgctgctgttcttcagattaccaagatcatttacagcacccttcttcagaataacatctag

SEQ ID NO: 241329 - DNA, 1014 bp, synthetic construct
  misc_feature 1..1014: note = Description of Artificial Sequence: Synthetic coding sequence
  source 1..1014: mol_type = other DNA
atgcacccgaggcgtcctgatggattcgacgggttagggtaccgcggtggcgcaagagacgaacagggttttggcggtgctttccccgcaagatcctttagcacagggtcggatcttgggcattgggttactacgcctcccgacatccccggtagccggaatctgcattggggcgaaaaatcccccccatacggtgtgcctactactagtacgccctacgagggtccaacggaagaacccttttctagcggtgggggaggatccgtgcaagggcaatcttctgagcagctaaacaggttcgccggatttggaattggcttggccagtttatttaccgagaatgttctggcgcatccctgcatagtccttaggcgacagtgccaggtcaactatcacgcccagcattatcatctcaccccttttactgttatcaatattatgtattcattcaataaaactcaaggtcctagagcattgtggaaggggatgggctctacgtttattgtgcagggtgtgaccctcggagccgaggggattattagcgagtttacccccctgcctcgggaagtactgcacaagtggtctccaaaacagattggagagcatctcctgctgaaaagcctgacctacgttgtggccatgccattttattccgcctctttaatcgagacggtgcaatctatgctggatgcttactttcccgagctaatagcaaatttcgccgcttctttgtgttccgatgtgatattatacccgcttgagacagtcctgcatagattgcacatacagggtactcgcacaatcattgacaataccgatttgggctacgaggttctacctataaatactcagtatgagggaatgcgggattgcatcaatactatccgccaagaggagggtgtatttggcttttataaggggttcggggctgtgattattcagtacaccctccatgctgctgtcctgcaaataaccaaaatcatctattcgactctgctccagaacaacatctag

SEQ ID NO: 241330 - DNA, 819 bp, synthetic construct
  misc_feature 1..819: note = Description of Artificial Sequence: Synthetic coding sequence
  source 1..819: mol_type = other DNA
atgtactcttttaacaagacccaagggccacgagcgctgtggaagggtatgggatcaacgtttatcgtccagggtgttacgctgggcgctgaagggataatcagtgagttcacccccttaccacgagaggtgcttcataaatggtcgccaaagcagataggcgagcacttgctgcttaagtctctcacctatgtagttgcgatgcccttctactcagccagcttgatcgagacagtgcagtccgagattatacgcgacaataccggcattctggaatgtgtcaaagagggcatagggagggttattggcatgggagtgccacacagcaaaaggttactgcctctgctcagcctgatatttccaaccgtgttgcacggggtcctgcactacattatcagctccgtcatccagaagtttgtgctgctgattctgaagaggaagacctacaatagtcacctggctgagtccacttcaccggttcagtcgatgcttgacgcctactttccagaattgattgcaaacttcgccgcttcgttgtgctccgacgtcattttgtaccctctggagacagtcctgcaccgactccacatccagggcacaaggactatcatcgacaacacggacctcggctacgaagtcctacctatcaacactcagtacgaagggatgcgggactgtataaataccatcaggcaggaggagggcgtgttcgggttttacaaagggttcggagctgtgatcattcagtatacgcttcatgcagcagtgctgcagataaccaagattatctatagcacattactccaaaacaatatctag

SEQ ID NO: 241331 - DNA, 618 bp, synthetic construct
  misc_feature 1..618: note = Description of Artificial Sequence: Synthetic coding sequence
  source 1..618: mol_type = other DNA
atgcctttctacagtgcttctctgatcgagactgtacaatcagaaatcatccgtgataacacaggcattctcgaatgcgttaaagagggaatcggcagagttataggaatgggggttccccatagcaagcgcctccttccgttgcttagcctaatatttccaaccgttctacatggggtgctgcattacatcatttcctccgtgatccagaagttcgtactgttaatcctgaagcggaagacttacaactctcatctcgctgaatccacctcccccgtgcagtccatgctcgacgcttatttccctgaactgattgcaaacttcgccgcatctttgtgctctgatgtgattctgtacccgctcgagactgtgctgcatagattacatattcagggcacgcggactataattgacaacacagatctcggctacgaggtgctacccataaacacccagtatgagggtatgcgcgactgcattaatacgattagacaagaggagggggtgtttggcttctataaaggattcggcgcagtgattatccaatacacgttacatgccgcagttctccaaatcaccaaaatcatctattctactctgctccagaataacatttag

SEQ ID NO: 241332 - DNA, 984 bp, synthetic construct
  misc_feature 1..984: note = Description of Artificial Sequence: Synthetic coding sequence
  source 1..984: mol_type = other DNA
atgaagactgagcaactcaatcgctttgccggtttcggaattggattggcttctctgttcaccgaaaacgtcctggcccatccatgtattgtgctgcggagacagtgccaagtgaactatcacgcacagcattaccatttgactcccttcactgttatcaatatcatgtactcattcaacaaaacacagggaccccgtgccttgtggaaaggaatgggtagtacattcatcgtgcagggtgtgactctgggtgccgagggcattatttctgaattcaccccattgccgagagaggtgctgcacaaatggagccccaaacaaataggtgaacatctattgctgaagagtttaacgtatgtcgtcgcgatgccattttacagcgcaagccttatcgagactgtgcagtctgaaataatccgcgacaatacgggtatcttggagtgcgtaaaggaaggaatcggacgtgtaataggaatgggcgtaccacactccaaacgactcctgcctttgctgtctctcatttttccaactgtgctgcacggggtcctgcactacatcatctcgtcagtgatacagaagttcgtgctgctcatcctgaaacggaaaacatataattcacacctggccgagtccacatctcccgtccaaagcatgttggatgcctatttccctgaactcattgccaacttcgccgcatctttgtgttccgatgtgatcctgtaccccctagaaactgtactccaccgcctgcacatccagggcacccgaacaatcattgacaataccgacttgggttatgaagtgctgcctatcaacacacagtatgagggtatgcgggactgcattaacaccattagacaggaggagggtgtgttcggcttttacaaagggttcggagccgttatcatccagtacaccctgcacgctgccgtccttcagataaccaagatcatttactctaccctgctgcaaaataacatctag

SEQ ID NO: 241333 - DNA, 771 bp, synthetic construct
  misc_feature 1..771: note = Description of Artificial Sequence: Synthetic coding sequence
  source 1..771: mol_type = other DNA
atgggctccaccttcatcgtgcagggcgtaacgctgggcgcagagggtatcatttccgaatttacccctctgccccgagaggtgctgcacaaatggtccccaaagcaaataggcgagcatttgcttctgaagtcgctcacttatgtagtcgcaatgcccttctatagtgcatccctgatagagactgtgcaaagcgagatcatccgcgacaatacgggaatcctagagtgtgtgaaggagggcatcggacgggtgattggcatgggagtacctcactctaagagattgttgcctctcttatcgctcattttccccacggtgttacatggcgtcctccactatatcatctcctccgtcatccagaaatttgtgctgctgatcctgaaacgcaaaacctacaattctcatcttgcagagagtacctctcctgtgcagagtatgctggatgcttacttcccagagcttattgcaaatttcgcagctagcttgtgctccgatgtgatactttacccgctagaaacagtgctgcatcgtttgcacattcagggcacgaggaccataatcgataacactgatctgggctatgaggttctgcctatcaatacacaatacgaaggaatgcgcgactgcatcaataccattcggcaggaagagggagtgttcggtttttacaagggttttggagccgtcataattcagtatacccttcatgccgcagttctgcagattacaaagatcatctattcaacgctgttacagaacaacatctag

SEQ ID NO: 241334 - DNA, 819 bp, synthetic construct
  misc_feature 1..819: note = Description of Artificial Sequence: Synthetic coding sequence
  source 1..819: mol_type = other DNA
atgtactccttcaataagacacagggacccagagcgctctggaagggcatggggtctactttcatcgtgcagggggtgacattgggagccgagggcatcattagtgagtttacacctctgccacgtgaagtgctgcacaaatggtcccctaagcagattggtgagcacctgctcctcaagtccttaacctacgtggtcgcaatgccattctattctgccagcctcatcgagacagtacagagcgagattatacgcgacaatactggtattctcgagtgcgtgaaggaaggtatcggcagagtgatcggcatgggcgttccccatagcaaacgtctgctccccctgcttagcctgatatttcctacagtattgcatggagtcctgcactatataatttcttcagttatccaaaagtttgtgctgttgatcttaaaaaggaagacctacaattcccatttggccgagtcgacgtcccctgtgcagtccatgctggatgcttattttcctgaactcattgcgaatttcgctgcttctctgtgtagtgatgtgatcctgtacccccttgagacagtcctgcatcgcctgcacatccagggcacccgaaccatcatcgacaacacggacttaggctacgaagtgctgccaattaacacccagtacgagggaatgcgagattgtatcaacacgatccgacaggaggaaggggtgttcgggttttataagggattcggagcagtgataattcagtatacactccatgcagctgtcctccagataacaaagattatctattcaacactgctgcaaaacaacatctag

SEQ ID NO: 241335 - DNA, 2220 bp, synthetic construct
  misc_feature 1..2220: note = Description of Artificial Sequence: Synthetic coding sequence
  source 1..2220: mol_type = other DNA
atgagtagcgagagtaaagagcagcacaatgttagcccaagagattctgccgagggaaatgactcctatccatccggcattcatcttgaacttcagagggagtcctccacagactttaagcagttcgagacgaacgaccagtgccgcccttaccaccgcattctgatagaaaggcaggagaagtcagatactaacttcaaggagttcgtaatcaaaaaactgcagaagaattgccagtgctctcccgcaaaggcaaaaaatatgatactgggcttcctgccggtcttacagtggctccctaaatacgaccttaaaaagaatatcctaggtgatgtcatgtctggcctgatcgtaggcatcctgcttgtaccacagagcatcgcatatagtctgcttgccggacaggagcctgtgtatggactttacacttctttcttcgctagtatcatttacttcttgctgggtacaagtcgtcacatcagcgtgggcatattcggcgtgctttgcctcatgatcggcgagacagtggatagagaattgcaaaaggccggatacgacaatgctcattccgccccatccctgggcatggttagcaacggttcaacgttgctgaaccacacctctgataggatctgtgataagagttgttacgccatcatggtgggctctaccgtgactttcatcgcaggcgtttatcaggtcgcaatgggctttttccaggtgggctttgtttcagtgtatctgtcggatgccttgctctccggctttgtgacgggcgctagctttaccattctgacctctcaggcaaaatacctgctggggctcaacttgcctagaactaacggagtgggttcgctgatcaccacatggatccacgtgttcagaaatatccataaaaccaacctatgcgatctgattactagtctgttgtgcttactcgttctcctgcctactaaagagctcaacgagcactttaagagcaagctaaaggcacctatcccaattgagttggttgttgttgtagctgcaactcttgcatctcatttcgggaagcttcatgagaattacaattcatccatagctgggcacatccccacaggttttatgccccctaaggtgccagaatggaaccttataccaagtgtggctgttgacgcgatagctattagcatcatcgggtttgcaattactgtctctctcagcgagatgtttgccaagaaacacggttatacagtcaaagccaatcaggaaatgtacgccatcggattctgcaatatcatcccctctttttttcattgtttcacaacatctgccgcactggctaagactctggtgaaagaatccacggggtgtcatacccaattatccggcgttgttacagctttggtcttactgctggtgcttctcgttatagcccctctcttctacagcctccagaaaagtgttttgggtgtcattaccatcgtcaatctgaggggcgctttaagaaaattccgtgacttgcctaagatgtggtccataagcaggatggacactgtcatctggtttgtcactatgctcagctccgccttactaagtaccgagatcgggcttttggtcggcgtgtgtttttcaattttttgcgttatcttgcgaacacaaaaaccgaaaagctcactacttggcctcgtcgaggagagcgaagtctttgagagcgtgtcagcgtataagaatttacagataaagcctggtattaaaatattcaggttcgtggcacctctctactatatcaacaaagaatgtttcaagtcagccttgtacaagcagaccgtcaatccaattctcattaaggttgcttggaaaaaagccgctaagcggaagatcaaggagaaagttgtgacattgggcggaatccaggatgagatgtcagtgcagttgagccacgaccccctggagttgcacactatagtgatcgattgtagcgctattcaattccttgatactgctggtatccacacacttaaggaggtgaggcgggattatgaagcaattgggattcaggtgttgctggcccagtgcaaccccactgtccgcgactccttaactaatggcgagtactgcaaaaaagaggaggaaaacctgctattctatagcgtctatgaggctatggccttcgctgaagtgtctaaaaatcaaaagggcgtgtgtgtccccaacgggctgtccttatcctcagactag

SEQ ID NO: 241336 - DNA, 72 bp, synthetic construct
  misc_feature 1..72: note = Description of Artificial Sequence: Synthetic coding sequence
  source 1..72: mol_type = other DNA
atgagttccgaaagtaaagaacagcacaatgtcagtcccagggactccgctgaagggaacgactcctactag

SEQ ID NO: 241337 - DNA, 2295 bp, synthetic construct
  misc_feature 1..2295: note = Description of Artificial Sequence: Synthetic coding sequence
  source 1..2295: mol_type = other DNA
atgatcgagccctttggcaatcagtatatcgtagctagacctgtctattccactaatgcctttgaagagaaccacaaaaagaccggaaggcaccacaagactttcctggatcatctaaaagtgtgttgtagctgttcaccccagaaagccaaacgcatcgtcttgtccctgttcccgatagcttcctggctgccggcttacagactgaaggagtggttgttgtctgacattgtttcaggcatttcgactggcattgtcgcagtccttcaaggcctggcttttgctctgttggtcgatattccaccggtatacggattatatgcaagcttcttccctgccattatctacctgttctttggcactagtcgccatatttcagtaggaccatttccaatcctgagtatgatggtcggtctcgcagtgtccggcgctgtgagcaaggctgtgccggaccgcaacgctaccactcttggtctgcccaacaacagcaataacagttccctcctcgatgacgagcgggtacgcgtcgccgcagccgcatccgtgaccgtcctgtcagggatcatacagctggcctttggaatactcagaatcgggttcgtggtcatttacttgtctgagtcactgataagtggctttactacggccgcagctgtccacgttcttgtgtcccaactgaaattcattttccagctgaccgtaccatcgcacactgaccctgtgtctattttcaaagttctctactctgtgtttagccagatcgagaaaaccaacatcgctgatcttgtgacggctctgatcgtactcctcgtggtctctattgttaaggagattaaccaacgatttaaagataaactccccgtgccgatccccatagaattcatcatgacagtgatcgctgctggagtctcatacggttgcgacttcaaaaatcgctttaaggtggcagtggtgggcgatatgaaccctggcttccagcccccaataactccggacgtggagactttccagaatactgtaggagattgtttcggaatagctatggtggcgttcgccgttgccttctccgttgctagcgtgtactctctgaagtatgactaccctctagacggaaatcaggaattaatagccctgggcctaggcaacattgtttgcggcgtttttaggggattcgcaggctcgaccgccctctccagatccgcggtgcaggagagtaccggcggaaagactcagatcgcaggcctgataggagcaataattgtgttgatcgtggttctagctatcggcttcctcttagctccattacagaagtccgttctggctgctctggcattaggtaatctgaaaggcatgctcatgcaattcgccgaaattgggagattatggcgaaaagacaagtacgactgccttatttggattatgaccttcatttttactattgtgctgggtcttggcttggggctcgcagcctccgttgcatttcagttattgacaatagtgtttagaactcagtttcccaagtgctctactctggccaacatcggacgcaccaatatctataagaataaaaaggattattacgacatgtatgagcctgagggcgttaaaatctttcgatgtccctcccctatctacttcgccaacattggattctttagaaggaaactcatcgatgcggtgggcttctctccacttagaatccttcgcaaacgcaataaggccttgcgtaaaattcgtaaactgcaaaaacagggcctgctccaggtgacccctaagggctttatctgtaccgtagatacaattaaagactcggatgaggagctcgacaacaaccagattgaggttctggaccagcctattaacacgactgacctcccattccatattgattggaatgacgatctgcctctcaacattgaagttcctaaaatctccctgcactccctgatacttgacttctcagctgtttctttcctggatgtctccagcgttcgcggacttaaaagtattctacaagaatttatccggataaaggtggatgtgtacatagtaggcacggacgatgactttatcgagaagctcaaccgctatgaatttttcgatggcgaggttaagtcaagtatcttttttctcactattcatgacgccgttctccacatcctgatgaagaaggattatagtacatcaaagttcaacccaagtcaggaaaaagatggtaaaattgactttaccatcaatactaacggcggtctgcgcaatagagtgtatgaggttcctgtggaaaccaaattttag

SEQ ID NO: 241338 - DNA, 1956 bp, synthetic construct
  misc_feature 1..1956: note = Description of Artificial Sequence: Synthetic coding sequence
  source 1..1956: mol_type = other DNA
atgctcctgcgcaaaattataaagagacaggaggatatcattaggcatttctggatcatatctaagtgcgtggtggcgtcctggttacccgcttataggctgaaggaatggttactgtccgatatcgttagtgggatctctactgggatcgtagccgtgttgcagggccttgctttcgccctgctcgttgacatacctccagtgtacggtctgtacgcctccttcttcccagctatcatctacctcttttttggtacaagtaggcacataagcgtcggcccttttcccattctctccatgatggttggcctcgcagtctctggggctgtttctaaggcagtgcctgatcgcaatgccaccaccctggggctacctaacaacagtaacaacagctccttgttggacgacgagcgagtgcgcgtagccgctgctgccagcgtaaccgtcttaagtggtatcatccagctggcctttggaattttacggatcggctttgttgtgatctatctctccgagagccttatttctgggtttaccactgccgcagctgtgcatgtgctggtgtctcagctgaagtttatttttcagctgacagtcccatcccatacagaccccgtaagcattttcaaagtcctgtattctgtgtttagtcagattgaaaaaacaaacatcgcggacctcgtgaccgcactgatcgtactactggtcgtgtcaatcgtgaaggaaatcaaccaaagatttaaggataagctgcccgtgcctatcccgattgagtttataatgacagtgatagccgctggcgtgagctacgggtgtgactttaaaaacagatttaaggtggcagtggtcggcgacatgaacccgggtttccagccacctattacaccagacgttgaaacctttcagaacacggtcggtgactgctttggaattgcaatggtggccttcgccgttgcctttagtgtggccagcgtgtattctctcaaatacgactaccccctagatggaaatcaggagctgattgctcttgggctcggaaacattgtttgcggcgttttccgcggattcgccggatccactgccctgagcaggtcagccgtccaagaatccaccggcggaaagacccagatcgcagggcttattggtgccatcattgtgcttatagtcgttttggcaatcggcttccttctcgctccactacaaaagagtgttctagcagccctcgcgcttggcaatctgaaaggaatgctgatgcagtttgcggagatcggacgcctatggcgaaaagacaaatacgactgcctcatctggatcatgacattcatatttaccattgttttaggtttaggactcggcctggccgcttccgtcgcctttcagttgttgaccattgtcttccgaactcaattccctaaatgttccaccctggctaacattggcaggaccaacatatataagaataagaaggactactatgacatgtatgagcccgaaggcgtgaagatttttagatgcccttctcctatatactttgccaatattgggtttttcaggcggaaactgattgacgcagttggttttagcccgctacgaatcctgcgtaagaggaacaaagctctgaggaagatccgtaaactgcagaagcagggactccttcaggtgaccccaatcctgcaggagtttattaggattaaagtggatgtgtatatcgttggcactgatgatgactttatagagaaattgaataggtacgaattcttcgatggcgaggttaagagttccatctttttcctaactatacacgatgcagtcttacacatccttatgaagaaggactattccactagtaaatttaatcctagtcaggagaaagacggtaaaatcgactttaccatcaacactaatgggggtttaaggaatcgtgtttatgaagtccccgtggagactaagttttag

SEQ ID NO: 241339 - DNA, 363 bp, synthetic construct
  misc_feature 1..363: note = Description of Artificial Sequence: Synthetic coding sequence
  source 1..363: mol_type = other DNA
atgattgaaccctttggcaatcaatatattgtcgcccgacccgtatactcgacaaatgcattcgaagaaaatcataagaaaacaggaagacaccacaaaacatttttggaccatctgaaagtgtgttgcagttgttcaccacagaaggccaaaagaatcgtcctgtctctttttccaattgccagttggctacctgcctaccgcctaaaggaatggctgttgtccgatatagtttccggaatctccactggcatcgtggcggtgcttcagggcctggcttttgcactgctggttgatatccctccagtctacggtctgtacgccagtttctttccagccatcatttacctgttttttggctag

SEQ ID NO: 241340 - DNA, 2343 bp, synthetic construct
  misc_feature 1..2343: note = Description of Artificial Sequence: Synthetic coding sequence
  source 1..2343: mol_type = other DNA
atggcagctccaggcggtagaagtgaaccacctcagctaccggagtactcctgtagctacatggtgagtagacccgtctattcagagctggcttttcagcagcagcatgaacgcaggctgcaggaacgaaagacgcttcgcgaaagcctggcgaagtgttgctcatgttcccgcaagagggcgtttggtgtgctcaaaaccttagtccctattctggagtggctacctaagtaccgggtcaaggaatggctgttgagtgacgtaatctcaggagtgagcacaggccttgtcgccacgctccaggggatggcatacgcactgctggccgcagtccctgttgggtatgggctgtactcagccttcttcccgattttgacatacttcatattcggcacgtcccggcacattagtgtgggtccattcccagttgtctccctgatggtaggctccgtcgtcctgagcatggccccagacgagcattttttggttagcagtagtaacggcacagtgttaaatacaacaatgattgacaccgctgcaagagataccgccagagtactgatcgcatctgcgcttaccctacttgtcggcattatccagctgattttcggcggtttgcagatagggtttattgttcggtacctggctgatcctctggtgggagggtttaccacagccgctgccttccaggtactggtgtctcaattgaagatcgttttgaacgtatcaaccaaaaattataatggagtgctcagcattatctacacattggtggagatatttcagaatattggggatacgaacttggctgatttcacagctggactcctgaccatcgttgtttgcatggccgtgaaggagctcaatgatagatttaggcacaaaatccccgtgcccatccccatcgaagtgatcgtcacaatcattgctaccgctatttcatacggtgctaacctcgagaaaaattacaatgcaggaatcgtaaagagtatccccaggggttttctgccaccagagctcccgccagtgtcgctgttctcagagatgctggctgcctccttttcaattgcagtggtcgcctacgctatcgccgtgtctgtcgggaaagtgtacgctacaaaatacgactacaccatcgacggaaatcaggaatttatagccttcggaatatccaacatctttagcgggttctttagctgttttgtagccactacggcgctgtccagaacagccgtccaggagagcactggagggaagacccaagtggctggcattatctctgctgccattgttatgatagcaatcctggctctggggaagctgcttgaacctctgcagaaaagcgtactggcggcagttgttatcgccaaccttaaggggatgttcatgcaactgtgcgatataccacgcctgtggaggcagaacaaaatcgacgcagttatctgggtgtttacttgcatcgtttccataattcttggcctcgatctgggacttctggctggccttatctttggcttactaacagtggtgttgagagtgcaattccccagttggaacggtttgggtagcattcccagtaccgacatttataagagcacaaagaactacaagaacatcgaagagccacaaggagtcaaaatcctgcgattttcctcccctatattttatggcaatgtggacggattcaaaaaatgcattaagtctactgttggctttgacgccattagagtgtataataagcggttgaaggccctgagaaagattcagaaattgatcaagagcgggcagctccgcgcaactaagaatggtatcatctcggacgcagtgagcaccaataatgcattcgagccggatgaagatatcgaagacctcgaagagctcgacatccctaccaaggaaatagaaatccaggtggactggaactcagaactgcctgttaaagtcaacgtacccaaggtgcctattcattcgctggttttagactgtggagcaataagcttcctcgacgtggtgggtgtacgctccctgagagtgatagttaaggaattccagcggattgacgttaacgtgtattttgcctccctgcaggattacgtcatcgaaaaacttgagcagtgtgggttcttcgacgataacatcaggaaggataccttcttcctgaccgtgcatgacgctatcctgtaccttcagaatcaagttaaaagccaagaaggacaaggcagcatcttagagaccatcacccttattcaggattgtaaggatacacttgaacttatcgaaacagaactgaccgaggaggaactggacgttcaggatgaagctatgagaacgctcgcgagctag

SEQ ID NO: 241341 - DNA, 396 bp, synthetic construct
  misc_feature 1..396: note = Description of Artificial Sequence: Synthetic coding sequence
  source 1..396: mol_type = other DNA
atggctgccccagggggaagatcggagccgcctcagctgcccgagtacagctgtagttacatggtgtcacgccctgtgtacagcgagctcgctttccaacagcagcatgaacgtcggctgcaagaaagaaagactctccgtgagagtttggccaagtgttgtagctgtagccgaaagcgcgcatttggggtgctgaaaaccctggttcccatacttgagtggttacctaaatacagagtgaaggagtggctactgtccgacgtgatctctggggtttccaccgggttagtggccacactgcaagggatggcatatgccctgttggccgctgttccagtcggttacggattgtatagtgccttttttccaatcctcacctattttatttttggatag

SEQ ID NO: 241342 - DNA, 1026 bp, synthetic construct
  misc_feature 1..1026: note = Description of Artificial Sequence: Synthetic coding sequence
  source 1..1026: mol_type = other DNA
atgaggcatgggctcgccgtcccctcagtccttgctgcagttgtcatcgccaatctgaaagggatgtttatgcagttgtgcgacataccccgactgtggagacagaacaagatcgacgcagtgatctgggttttcacttgtatcgtgtcaattatcctggggttggatcttgggctcctggctggtctgatatttgggctgctcaccgtcgtactcagagtacagttcccttcgtggaacgggcttggatccatcccttccactgacatttataagtccactaagaattataagaatatcgaagagccccagggggtgaagatcctacgcttctccagcccaattttctatgggaacgtggacggttttaagaagtgtatcaaatcaacagtgggcttcgatgccataagggtctataataaaaggctcaaggccctgcggaagattcagaagttaattaagagtggtcagctccgcgctacgaaaaacggcattatttctgatgcggtgagcactaacaacgccttcgagcctgacgaagacattgaagacctggaggaattggacattccaacgaaagagatcgagatccaggtcgattggaactccgagctgcccgtgaaagtgaacgtcccaaaagtgccaatccacagcctcgtgctggactgtggcgcaatctcatttcttgacgtggtgggcgtgcgctccctacgtgtgatcgtgaaggagttccagagaatcgacgttaacgtgtatttcgcatctctgcaggactatgtgatcgaaaagcttgagcagtgtggcttcttcgatgacaatattagaaaggatacattttttctgactgtccacgacgccatcttgtaccttcagaaccaggtaaaaagccaagagggacagggtagcattctggagacaataacattgatccaggactgcaaagataccctagagttgattgaaactgagttgaccgaggaagagctcgacgtccaagatgaagccatgcgcactctggcaagctag

SEQ ID NO: 241343 - DNA, 1050 bp, synthetic construct
  misc_feature 1..1050: note = Description of Artificial Sequence: Synthetic coding sequence
  source 1..1050: mol_type = other DNA
atgatcgccattctggctcttggtaaattgctagagccccttcagaagagtgtgctggctgctgtcgtgattgccaatctcaagggaatgtttatgcagctgtgtgatattccacgcctgtggcgtcagaataagattgacgcggtgatctgggtgtttacctgcatcgtatcaattattcttggcttagatctcggcctgctcgctggactcatatttgggcttttaaccgtggtcttgagagtacaattccccagttggaacggcttgggtagtattccgtccaccgacatctataaaagtacaaaaaattataagaacatcgaggagcctcagggggtaaagattctaagattttccagcccaatcttttacgggaacgtcgacggatttaagaagtgcattaaaagcaccgtcggattcgacgccattagggtgtataacaaaaggttgaaagctctgaggaaaatacaaaaactcattaagtccggtcagctgcgggcaacaaagaacggcatcatatccgatgcagtcagcaccaataacgcatttgagcccgatgaagatattgaggacctggaggagctcgatattcctactaaggaaatcgagatccaagtagattggaactccgaactgcccgtaaaagtgaacgttccgaaagtcccaatccattcacttgtgttagattgtggggctatctcattcctggacgtggttggggtaaggagcctgagagttatcgttaaggagttccaacgtattgacgttaacgtttactttgccagtctgcaagattatgtcattgagaaactggagcagtgtggtttctttgacgacaacataagaaaggacacctttttccttaccgtacatgacgctatcctttaccttcaaaatcaggtaaaaagccaggaggggcaaggaagtattctggagaccatcaccctcattcaggactgtaaggacaccctggagctaattgaaacggagcttacggaagaggaactagacgtccaggacgaagccatgagaaccctggcaagttag

SEQ ID NO: 241344 - DNA, 1104 bp, synthetic construct
  misc_feature 1..1104: note = Description of Artificial Sequence: Synthetic coding sequence
  source 1..1104: mol_type = other DNA
atgcgtcatggactggcagtccctgtagccggaattatcagcgccgcaatcgtgatgattgccattttagccctggggaagctgctggagcccctgcagaaatccgtgcttgccgcagtggtgattgctaatctaaaagggatgttcatgcagctgtgtgatattcccaggttgtggagacagaataagattgacgctgtgatttgggtgtttacttgcatcgtcagcataatcttaggcctggacttaggactgctggcaggactgattttcggtctgcttaccgtggtattgagagtgcagttccctagctggaacgggcttgggagtatcccttccaccgacatttacaagtccacgaagaactataagaatatagaagagcctcagggcgtcaagatcttaaggttttcctcccctatcttttacgggaacgtggatgggtttaaaaaatgcataaagtccacggtaggctttgatgctattcgtgtctataacaagagacttaaggccctccgaaaaattcagaagctgattaagtccgggcagctacgggcaactaagaatgggatcatttctgatgcagtgagtacaaacaacgccttcgaaccagacgaggacatcgaggatttggaggagctggacatccctactaaggaaatcgagatccaagttgactggaacagcgagctccccgtcaaagtgaatgtacctaaagtcccaatccattccctagttctggactgtggtgccatcagttttctggatgtcgttggcgtccggtccctgcgggtgatcgtaaaagagtttcagcggattgatgttaacgtgtactttgcctctcttcaagactacgttatcgaaaaactggagcaatgcggtttctttgatgacaacattcgaaaagacaccttttttctgaccgtccacgacgccattctctatctccagaatcaggttaaatcgcaggaaggccaaggctcaattttagagactatcactctaatccaggactgcaaagacacgttggagctaatcgagacggagcttaccgaggaggaactggatgtgcaagacgaagccatgcgtacgctcgccagttag

SEQ ID NO: 241345 - DNA, 2235 bp, synthetic construct
  misc_feature 1..2235: note = Description of Artificial Sequence: Synthetic coding sequence
  source 1..2235: mol_type = other DNA
atggaccacgcagaagagaacgaaattctggctgccacccagcggtattatgtggaaaggcctatcttcagccacccggtgttacaggaaaggctgcacactaaggacaaggtgcctgattccattgccgataagcttaagcaggcatttacatgtactcccaagaagatccgcaacataatctatatgttcttgcccatcactaagtggcttcctgcctacaagttcaaggaatacgtgctgggggatctagtgagcgggataagtaccggtgttctgcaactcccacagggccttgcattcgccatgctggccgcagtacccccaatttttggcctctatagctccttttatcccgtgataatgtactgtttcctgggtacatcgcggcatatttcgatcggtccgttcgcagttatctcattaatgatcggtggggtggccgtccgactagtgccagacgatattgtaatccccggtggagtcaatgctacaaatggcacggaagcaagagacgctttacgcgttaaagtcgccatgtccgtgactctgctgtctgggattattcagttttgcctgggggtgtgccgttttggatttgtcgcaatctatctgactgagccactcgtgaggggcttcactaccgcagctgccgtccacgtgtttacaagcatgctcaaatatttgtttggagtgaagacaaaacggtactccggaattttctccgttgtctactctacggttgccgtgttgcagaacgtgaagaacctgaatgtgtgctccctaggagttggcctgatggttttcggcctactcctcggcggtaaggagttcaatgaacggttcaaggaaaaactgcctgccccaattccactggaattctttgccgtggttatggggactgggataagcgcaggttttaacttaaaggagtcctataatgttgatgttgttggcactctccctctcggactgttgcctcccgctaaccctgacacatctttattccacctcgtgtatgtggatgctattgctatagcgattgtgggtttttccgttacaattagcatggcgaagacactcgccaacaagcacggctatcaggtggatgggaaccaggagctgatcgctcttggactttgcaatagtattggcagtctttttcagaccttcagcatctcctgctccctcagccgcagcctggtgcaagaaggcacgggtggcaagacgcagctggctggatgcctcgccagcttaatgatcttgcttgtgatcctcgccacaggatttcttttcgagtccctgccgcaagccgttctgtcagctatagttatcgtgaatctcaagggtatgttcatgcagttcagcgatctgccctttttctggaggacaagtaaaattgaattaactatttggcttactactttcgttagctccctgtttctgggcctcgattacggactgatcacggccgtgatcattgctctgctgacagtcatataccgaacccagtccccctcttataaggtgctcggcaagctgccagagaccgatgtttatattgatattgacgcttacgaagaagtcaaagaaattcccggaattaaaatcttccagatcaatgccccaatctattacgctaattccgatctctactccaacgccctcaaaagaaagactggggtgaacccggcagtaatcatgggggcaaggcgcaaagccatgagaaagtatgctaaggaagtgggtaacgctaacatggccaatgcaacagtggtgaaggcagacgcagaagtcgatggtgaggatgccacaaagccggaagaggaagatggcgaggtaaaatacccacctatcgtaattaagtcaactttccccgaggagatgcagagattcatgcccccaggagacaacgttcacacagtgattctcgacttcacgcaggttaacttcattgacagtgtgggcgtcaagacacttgccggaatcgttaaagagtatggagatgtcggaatttatgtatatctggctgggtgttctgctcaggtagtgaacgacctgacccgcaaccgattctttgaaaatccagccctgtgggaactgctctttcattcaattcacgacgcggttctcgggagccaacttagagaggcattagcagaacaggaggcttctgcccctccatctcaggaggatttggagcccaatgcaacacccgctaccccggaagcatag

SEQ ID NO: 241346 - DNA, 2058 bp, synthetic construct
  misc_feature 1..2058: note = Description of Artificial Sequence: Synthetic coding sequence
  source 1..2058: mol_type = other DNA
atggatcacgccgaggagaacgagatcctggcggcaacccagaggtactacgtggaacggcctatcttttctcaccctgtgctgcaggaaaggctgcatacaaaagacaaggtccctgacagtattgcagataaattgaaacaggctttcacctgcacaccgaaaaagatccggaatatcatctatatgttcctgcccatcacgaaatggcttcctgcctataagtttaaggagtacgtgctgggcgatctggttagcggcatttcgactggcgtgctgcagctccctcagggattggccttcgccatgctcgctgcagtgcccccaatctttggcctttactcgtcattctatcccgtcatcatgtactgcttcctcggtactagcaggcacatcagtatcggtccgttcgctgtcatctctctcatgatcggcggtgtcgctgtgagactcgtcccagacgacatcgtgatcccaggcggagtaaacgcaacaaatggcacagaggctcgcgacgctctgagagtgaaagttgccatgagcgtgactctcctgtcaggaattatccagttctgcctgggtgtgtgccgattcggtttcgtcgcaatttatctcacagagccactggtgcgcggtttcaccaccgctgcggcagtgcatgtgttcacatccatgctgaagtacctttttggggtgaagaccaagcgctacagtggtatattctcggtggtctacagtaccgtcgctgtactccaaaacgtcaagaatctgaacgtgtgcagtttgggggttggcctcatggttttcggcctccttctgggagggaaagagtttaacgagcggtttaaagagaagcttcccgctcccatcccactcgaattctttgccgtagtcatgggcaccggtatctccgctggctttaatctcaaggaatcatataatgtggatgtcgtgggaacgctacctctaggcctgctgcccccagctaatccagatacatcgctcttccacctggtctacgttgatgcaatcgctatagctatcgtggggttttcggtgaccatatcgatggctaaaacactcgctaataaacacggttatcaagtagacggcaatcaagaactaatagctctcggactgtgtaacagtatcggctcactgttccagactttctcaatcagctgcagtctctcccggtctctcgtgcaagagggaactgggggaaagactcaactggccggatgcctcgccagcctgatgatcctgttagtcatattagctacaggtttcctctttgagtcactccctcaggcagtcctgagcgcgatagtcattgtaaacttgaaaggaatgttcatgcagtttagcgacctcccatttttctggaggaccagcaaaattgagctgacgatttggttgacgacatttgtgagttcgctgttcctgggcctggattacggcctcatcactgccgttattatcgcgctcctaactgtgatttaccggactcagtcccccagctacaaggtgctgggaaaacttcctgaaactgacgtgtacatcgatatcgatgcttatgaggaggtgaaagaaattcccggaatcaagatctttcagattaatgcacctatatattacgcaaactcagacctctactcaaacgcccttaagaggaagacaggagtgaatcctgctgtgatcatgggggctcggaggaaggccatgcgcaaatacgcaaaagaagttgggaatgcaaacatggcgaacgcaacagtggtaaaagccgacgcagaagtggacggggaagatgcaacgaagccggaagaggaggacggtgaggtgaagtatccccctattgttatcaagagcacgttccccgaggaaatgcagcgtttcatgcctcccggtgacaatgtgcatacagtgatcctcgatttcacacaggtcaatttcatcgactctgtcggtgtgaagactctcgcagggatcgtgaaagagtacggcgacgtggggatctatgtgtacctggcgggatgctcggcgtttattcaaagatag

SEQ ID NO: 241347 - DNA, 534 bp, synthetic construct
  misc_feature 1..534: note = Description of Artificial Sequence: Synthetic coding sequence
  source 1..534: mol_type = other DNA
atgggcgcaaggagaaaggccatgcggaagtatgccaaagaagtggggaatgcgaacatggctaacgctaccgtggttaaggccgatgccgaagtggacggggaggacgctactaagcccgaagaggaggatggggaagtgaaatacccacctatagttatcaaatccaccttcccagaagagatgcagcgctttatgcctcccggagacaatgtgcatacagtcattctagacttcactcaggtgaactttattgacagtgttggggtgaagaccttggccggaatcgtcaaggaatacggggacgtcggcatttatgtgtacctcgcgggttgttctgcacaggtagtgaacgatctgactcgtaatagattctttgaaaaccctgccctctgggagctgctgttccactccattcatgatgcagtactaggatcacagttgagagaagcactggcagagcaggaagctagcgccccaccatcccaggaggatctggagcctaacgccactccggcaacccccgaggcctag

SEQ ID NO: 241348 - DNA, 1008 bp, synthetic construct
  misc_feature 1..1008: note = Description of Artificial Sequence: Synthetic coding sequence
  source 1..1008: mol_type = other DNA
atggaccacgcggaggagaatgaaattttggctgccacccagcgttattatgtcgaacggccaatcttctctcaccccgtcctgcaggagaggctgcacaccaaagataaggtgccagactctatagctgacaagttaaagcaggcttttacgtgcaccccaaagaaaatccgaaacattatctacatgtttttgccaattacaaagtggctacctgcatacaagtttaaggaatatgtcctgggagacctggtgtctggaataagtactggggtgcttcaacttcctcagggcctggcgtttgccatgctcgctgctgtgcctcctatctttggactgtactcgtctttttatccagtaattatgtactgctttctggggaccagcagacatatctccataggcccttttgccgtcatatccttaatgatcggtggtgtcgcggtgagacttgtcccagacgacattgtgattcctggtggagtcaatgcaacgaatggcactgaagccagagatgcactgcgcgtaaaggtggcaatgtccgtgacccttttatctggaattatccagttctgcctcggggtttgtaggtttggtttcgtcgccatatatttgacagaaccactcgtgcggggatttacgaccgcagcagccgtgcacgtcttcacgtccatgcttaaatacctttttggggtgaaaactaaacggtattcaggcatcttcagcgtggtgtattctacggtggcagtgctccagaatgtcaagaacctgaacgtctgttctttgggcgtcggtctgatggtgtttgggctgctgctcggcggaaaggagtttaatgagcgctttaaggaaaagctcccagccccaatccctctggagttctttgccgtggtgatggggaccgggatcagcgctgggttcaacctgaaggaatcctacaacgtggacgtcgttgggactctgccgctggggttccacacagagatgactaggcggtggcgcccatag

SEQ ID NO: 241349 - DNA, 2145 bp, synthetic construct
  misc_feature 1..2145: note = Description of Artificial Sequence: Synthetic coding sequence
  source 1..2145: mol_type = other DNA
atggaccacgctgaggaaaatgaaatattggccgcaacacagcggtattacgtagagcgcccaatcttctcccaccccgtccttcaggaacggctacatactaaagacaaagttcctgactctattgctgacaagctaaagcaagcgtttacatgtacccccaagaagatcaggaatatcatttacatgtttttacctatcactaagtggcttcccgcttacaagtttaaggagtacgtcctgggtgacttagtttcaggcatttcaaccggagtgcttcagctgccccagggactggctttcgccatgttagccgcagtgccccctatctttggattgtactcaagcttctaccccgtgattatgtactgctttcttggcactagtcggcacatttcgattgggcctttcgccgtaataagtctcatgattggcggtgtggccgtgcgattggtgccagacgatattgtaattccaggcggagttaacgccacgaatgggacggaggcccgagacgccctaagagtaaaggtggccatgtccgtgaccctgttgtccggtatcatccagttctgcctgggcgtctgtcgtttcggcttcgtggccatttatctgaccgagcctctggtgcgcggtttcacgacagccgctgccgtccatgtattcactagtatgctgaaatacctctttggagtgaagacaaaaaggtactcaggaatcttttccgttgtatactccactgttgctgtcctgcagaatgtgaagaatctcaacgtctgttctttaggcgtgggcttgatggtgtttggattgctgctcggcggaaaagagttcaacgaaagattcaaggaaaaactgcccgctcctatccctctggagttcttcgctgtggttatgggcaccgggatctcggccggtttcaacttaaaagagtcatacaacgtggatgtcgtcggcactttgcctctgggcctgcttcccccagcaaaccctgatactagtctgtttcacctggtctacgtcgatgcgatagctatcgcaattgtcggattctctgtgactatttctatggcaaagacgttggcaaacaagcacggataccaggttgatggcaaccaggagctcatcgcactcggcctgtgcaatagtattggtagcctgtttcagaccttcagtatctcctgttcactgagtcgtagccttgtccaggagggcaccgggggaaaaacacagttagcaggatgcttagccagcctgatgattctgctggttatactcgccacaggctttctcttcgagagcctgccccagacaatttggctcacaaccttcgtttccagtctgtttctaggcctggattatggcctgatcactgctgtgataatagctttgcttaccgtcatctatcgaacacagtcaccctcttataaggtgcttggcaagcttcctgagacggatgtgtacatcgacattgatgcctacgaagaggtcaaggagatccccggaatcaaaatcttccagatcaatgcgccaatttactatgccaatagcgatctgtacagcaatgctctgaagcgcaaaacaggtgtgaatcccgctgtaatcatgggcgctaggagaaaagcaatgcgaaaatatgctaaagaggtgggtaatgcaaacatggccaatgcaacagttgtgaaggccactcaggacgctgaggttgatggggaagatgctaccaaaccagaggaggaggacggtgaagttaagtatcccccaatcgtgatcaaatcgacctttcccgaagagatgcagaggtttatgccgccaggcgataacgttcacaccgtgatcttggacttcacccaggtcaatttcatcgactctgtgggggtgaaaacgcttgcgggtatcgtgaaagaatatggagacgtgggtatctatgtgtacctggctggctgctctgcacaggtggtgaatgacctgacacgcaaccggttttttgagaatccggctctttgggaattactgtttcattcaattcacgacgctgtcctcggttcgcagctgagggaggcacttgcagagcaggaggcctcagctccgcctagtcaagaggatctggaacccaatgcaacacccgcaacaccagaagcctag

SEQ ID NO: 241350 - DNA, 2241 bp, synthetic construct
  misc_feature 1..2241: note = Description of Artificial Sequence: Synthetic coding sequence
  source 1..2241: mol_type = other DNA
atggatcacgctgaggagaacgaaatcctcgccgctacccagcgctactacgtggagcgtcctatcttctcccatccagtcctgcaagaacgcctgcataccaaagataaggtaccagacagcattgcggacaaattaaagcaagcattcacgtgcacaccgaagaaaattaggaacattatctatatgtttctgcctattaccaagtggctaccagcttacaagttcaaggagtacgtcctcggagatctggtctccggaatcagcaccggagtcctgcagctcccccagggactggcctttgccatgttagctgcagtgccacccatcttcggactctattctagcttttacccagttattatgtactgtttcctaggtacatcccggcacatttcgatcggacccttcgctgtgatctccctgatgattggcggagtggccgtccgtttggttcctgacgacatcgtcattcccggaggagtcaatgctactaacggaacggaagcccgagacgccttgagagttaaggtggccatgagtgtcaccctgctgagcggcataattcagttttgtctgggggtttgcagattcggctttgtcgcaatttatctcacagagccacttgtgaggggctttactaccgcagcagctgtccatgtatttacgagtatgttaaagtacctgttcggggtgaagacaaaacgctactctgggattttctctgtggtgtattcaactgtggccgtgcttcagaatgtcaaaaacctgaatgtttgctcgctcggtgtaggactgatggttttcgggcttttactcggcggaaaggagttcaacgagaggttcaaggagaagctgcctgcaccaatccccctggagttctttgcagtggtgatggggaccgggattagcgcgggattcaacctgaaggaatcttataatgtggacgtggtgggaacactgcctctcggtctgctgccacccgctaacccagacacctccctgttccacctcgtttatgtagacgccatcgcaatagcgattgttggcttctccgtcaccatttcgatggccaaaaccttggcgaataagcacgggtaccaagttgacggaaaccaggaactgattgccctggggctctgtaactccataggctccttgttccagacatttagtatctcatgcagcctgtccagaagtctcgtgcaggagggaaccggagggaagacacagctcgcgggttgcctagctagcctgatgatactactggtcatcctggccaccgggttcctctttgagagtctcccccaggctgttctgagcgctattgttatcgtgaatcttaagggtatgttcatgcaatttagcgatctgccatttttctggcgaacatccaaaatagagttgacaatttggttaacaaccttcgttagcagcttgttcctgggcctcgactatggcctgatcaccgctgtgatcatcgcgcttctcacggtgatttaccggacacaaagccctagttacaaggtattaggaaagctgccggagaccgatgtgtacattgacatagatgcctacgaagaggtgaaggaaattccaggcattaagatctttcagataaacgcacccatttactatgctaactccgatctgtacagtaatgcattgaaaagaaaaaccggggtgaatccagcagtgataatgggggcaagacgcaaggctatgcggaagtatgctaaagaagtgggaaatgcaaacatggcaaacgctacagtggtaaaggccacacaggacgctgaagtggatggcgaagatgccactaagccagaggaggaggacggggaggttaagtaccctcccattgttatcaaaagcaccttccccgaggaaatgcaacgtttcatgccacccggagacaatgttcatacggtgatactcgactttacccaggttaacttcatcgactcggtgggagttaagacgcttgctggtatagtgaaggagtatggagacgtagggatctacgtttatcttgcaggctgtagtgctcaggtggtaaacgatcttacaagaaacaggttctttgaaaatccagctctgtgggagctcctcttccattccatccatgatgccgtactgggctcgcagctgagggaggctctcgccgaacaggaagcttccgctccacccagtcaagaagatctagaacccaatgccactcccgctactcctgaagcgtag

SEQ ID NO: 241351 - DNA, 2124 bp, synthetic construct
  misc_feature 1..2124: note = Description of Artificial Sequence: Synthetic coding sequence
  source 1..2124: mol_type = other DNA
atggaccacgctgaggaaaatgaaattctagccgctacacagcggtactacgttgaacgtccaatcttcagtcatcccgtactccaagaaagattacacaccaaagacaaagtgccagactctatcgccgataagctgaagcaggccttcacgtgcactccaaagaaaattagaaatattatctacatgtttctgcccattaccaaatggctcccggcttacaagttcaaagaatatgtgttgggagatcttgtcagcgggatttctactggagtgctacagttgcctcaagggccttttgccgtaatcagccttatgattgggggtgtcgcagtgcggctggtgcccgatgatatcgtaatccctggcggtgttaacgcaaccaacgggaccgaagcacgtgatgcccttagagtgaaggttgccatgtctgtcacactcctgtctggcattatccagttctgtttaggtgtgtgtcgatttggatttgtggcaatctacctgacagagcctctggttcgcggatttaccaccgccgctgcagtgcatgtttttactagcatgctgaaataccttttcggagtgaagactaagaggtattccggcatatttagtgtggtgtactctacagttgcagttctgcagaacgtcaagaatctcaatgtttgttctctgggggtgggactcatggtgtttggcttgctactcggcggaaaagaattcaatgaacgttttaaggaaaaactgcccgctccaattccgctcgagttttttgctgtggtcatgggaacgggaatctcagctggattcaatctgaaagagagttacaacgtagacgtggttggaacactccccctgggtttactgcccccagcaaaccccgacacaagcctgttccatctcgtgtatgtggatgccatcgcaattgcaatcgtcggattctccgtgacaatttcaatggcaaagaccttggccaacaagcacggatatcaggtggatggcaatcaggagcttatagctttgggcctctgcaattcaattgggagcctgttccaaacattctccatctcctgtagtctttcaaggagccttgtgcaggaaggcacgggtggaaaaacacaacttgccggttgcctggctagtctcatgatattgttggtgattctggctacaggctttctgtttgagagtcttcctcaggccgttctaagcgctatcgtgattgtcaatctgaaaggaatgttcatgcagttctctgatctcccattcttttggcggacctcaaagatagagctcactatctggctgactacattcgtaagctcactgttcctgggtcttgattacgggctaatcactgctgttatcatcgcactgttgaccgttatatacagaacacagagcccgtcctacaaagtcctgggaaagttgcccgaaaccgacgtatatattgatatcgacgcctacgaggaagtgaaggagataccaggtataaagatcttccagattaatgctcctatctactacgcgaactccgacctctattctaacgcacttaaacgcaagaccggcgtgaacccggctgtaataatgggggctcgcagaaaggccatgcggaaatatgccaaagaggttgggaacgccaacatggccaatgcaactgtggtaaaggcggatgcagaagttgacggcgaggacgcaaccaaaccggaggaggaagacggggaggtgaaatatccccctatcgtgatcaagagcacttttcctgaagagatgcagcgtttcatgccccctggggataacgtacacactgtgatactggattttacccaggtgaattttattgactctgttggagtgaaaactctggcaggtatagtaaaagagtatggtgacgtggggatctacgtgtacctcgctgggtgctctgcacaggttgtgaacgatctcactagaaataggtttttcgaaaatcccgcactttgggaactgctcttccacagtatccatgatgcagtccttggctcgcaactgcgggaggccctggcagaacaggaagcatccgctcctccctcgcaggaagatctggagcccaacgcaacgccagccaccccggaagcatag

SEQ ID NO: 241352 - DNA, 2139 bp, synthetic construct
  misc_feature 1..2139: note = Description of Artificial Sequence: Synthetic coding sequence
  source 1..2139: mol_type = other DNA
atggatcacgccgaagaaaatgagatcctggccgctactcagcgttattacgtggaacgccctatcttttctcaccctgtacttcaggagaggctacacaccaaagacaaagtacccgactccatagcagataagctgaagcaggccttcacctgtacccctaagaaaataaggaacattatctacatgttcctgcctattactaaatggctgcccgcttataagtttaaagagtacgttttgggcgaccttgtctctgggatttccacaggagttttgcagctccctcagggactggcattcgcaatgctggccgctgtgcctccaattttcgggttatatagctccttttatcccgttataatgtactgcttcctgggcacctccaggcatatttccatcgggccattcgccgtgatttccttgatgattggtggcgttgccgtgaggctggtcccagacgacatcgtcatcccaggtggtgttaatgcgacgaacgggaccgaggccagagatgctttgcgagttaaggtggctatgtcagttactcttcttagcggcatcattcagttttgcttaggcgtttgtcgctttgggtttgtagcaatctatctcaccgagccactagttcggggatttactaccgctgcagctgtgcacgtatttaccagtatgttgaagtacttgtttggagttaagaccaaacggtacagcggtatcttctccgtcgtgtattctactgttgctgtcttgcagaacgtcaaaaatctgaacgtatgctcgctcggcgtagggctgatggtgtttggcctgcttttggggggaaaagaatttaatgagcgctttaaggagaagttacccgctccaattcccctggagttcttcgccgtcgtgatggggaccggcatcagcgcaggttttaatttaaaggagtcctataacgtggacgttgtgggaacgctgccgctgggcctgctgcccccagccaaccccgacacatctctgttccacctcgtgtatgtggacgccatcgcaattgctatcgttggattctccgtgaccatcagcatggccaagaccctggccaacaagcatgggtaccaggtggacgggaaccaggagctgatcgcactgggcttatgtaactcaatcggatctctattccaaacatttagcatcagctgtagtctgtcccggagcctagtgcaggagggaactggtggaaaaacccagttagcagggtgcctagccagtctgatgattctgctggtgatcctggccacgggcttcctattcgagagtctgccccagacaatctggctgacaacatttgtctccagcctttttttaggcctcgattacggcctgatcacagcggtcataattgcactgctgactgtgatataccgaactcaaagcccgagttacaaagtgcttggtaagctcccagagactgatgtttacatcgatattgatgcctacgaagaagtgaaagaaatcccaggaataaagatcttccaaatcaacgcccctatctactacgccaactccgatttgtacagcaacgcactgaagcggaagacaggggtcaatcctgcagttattatgggagcccgtcgcaaggctatgaggaagtacgccaaggaagtgggcaacgcaaacatggctaatgccactgtggttaaagccgatgctgaggtggacggggaggatgctaccaagccagaggaagaggatggagaagttaagtatcctcccatcgtgattaagtctacttttcccgaggaaatgcaacgatttatgccacctggcgataatgtccacacggttatcttggacttcacacaggtgaatttcatcgacagcgtcggggtgaaaacgttggcaggaatagtgaaggaatatggagatgtcggaatctacgtgtacctggccggttgctcagctcaagttgtgaatgacctgactaggaaccgattcttcgagaatccagctctgtgggagctgcttttccactcaatccatgacgccgtattgggatctcaactgcgggaagcactggctgagcaagaagcctcagcaccccctagccaggaggatctcgagcccaacgcaacacccgcaacccctgaagcatag

SEQ ID NO: 241353 - DNA, 1551 bp, synthetic construct
  misc_feature 1..1551: note = Description of Artificial Sequence: Synthetic coding sequence
  source 1..1551: mol_type = other DNA
atggaccacgccgaggagaacgagatactggccgcaacacagcgctactacgtcgagagacctatcttttcgcatccggtgctccaggagcggctgcataccaaggataaggtccctgacagtattgccgacaagctgaagcaggcgtttacttgtactccaaagaagatccggaatattatctatatgtttctgccaatcacaaaatggctgcctgcttataagtttaaagagtacgttttgggcgacctggtgtccggcatctcaactggcgtgctgcagctcccacagggcttagcgttcgccatgttggccgcagtacctcctatatttggcctatactcttctttctaccctgtcataatgtactgtttccttgggacttcacggcatatttctatcggccctttcgccgtcattagtctgatgatcgggggagtagccgttagactggtacccgacgatattgtgattcctggcggagtgaatgccactaatggcacagaagccagagatgctctgagagtcaaagttgccatgagtgtgactctcctttcgggcattatccagttttgcttgggcgtgtgtagatttggcttcgtggccatctacttgaccgagccactggttcggggtttcaccactgccgcagctgtacatgtgtttacaagtatgctgaagtatctctttggagtgaaaaccaaaaggtattcagggatttttagcgtagtatactcaaccgtggctgtcctgcaaaacgtgaaaaatctcaacgtgtgtagcctaggcgttggcctgatggttttcggtttgcttctgggcggaaaagaattcaacgaaaggttcaaggaaaagctgcccgcaccaattcctcttgaattcttcgccgtggttatggggactgggatctcagctggctttaatctaaaggagtcttacaacgtcgacgtggtgggaaccctgccccttggtctcctgcctcccgcaaatcccgacaccagcctgttccatcttgtttatgtggacgctatcgcaatcgctatcgtgggtttcagcgttactatttccatggccaaaactctggcaaacaaacatggctaccaggtcgatgggaatcaagagctcatcgctctcgggctgtgtaacagtattggcagcctctttcagacattttccataagctgtagcctgtcaaggagcctagttcaggagggaaccgggggtaagacccagttagccggatgcctcgcatcacttatgatcttactcgtgattctggccactggctttttgttcgaaagtctaccacaggctgtgctctctgctatagtcatagtgaatctgaagggtatgttcatgcaatttagtgacctcccattcttctggcgaacctccaagatcgaattgaccatctggctgacaacgttcgtttcgagtctgttcttagggctcgattacggacttatcaccgctgtgattatcgcactgctcaccgtgatctaccggactcagagcttccataccgagatgacaagacgctggaggccgtag

SEQ ID NO: 241354 - DNA, 1422 bp, synthetic construct
  misc_feature 1..1422: note = Description of Artificial Sequence: Synthetic coding sequence
  source 1..1422: mol_type = other DNA
atggatcacgcagaggagaatgagatactggccgcaactcaacgctactatgtggagcgtcccatcttctcgcaccccgtgctccaggaacggctccacacgaaagataaggtgcctgattctatcgctgacaagctaaagcaagccttcacatgtacacctaagaaaatccgcaatatcatctacatgtttttgccaattacaaaatggctgcctgcctacaaatttaaagagtatgtactcggtgacttggtcagtgggataagtactggcgtgttgcagctgccccagggcctcgctttcgccatgcttgccgcagttccccctatcttcgggctgtattccagtttctatcctgtcataatgtactgttttctaggtacctcaaggcacataagtatcgggccttttgctgtgatctccttaatgattggaggcgtcgctgtgaggctggtgcccgatgatatcgtaattcctgggggagtgaacgccactaatgggaccgaagctagagacgccctccgggtgaaggtcgccatgtcagtgacacttttgagcggaatcatccagttttgtcttggggtatgtagattcggcttcgtggcgatttatttaacagagcccctggtgcgcggattcaccaccgccgctgcagttcacgtcttcactagcatgctgaaataccttttcggagtgaagactaaacgctactctggcatcttttccgtcgtctatagcacagtcgcagttttgcagaatgtaaagaacctgaatgtatgtagccttggcgtgggactgatggtgttcgggctgctcttgggcggtaaagagttcaacgaaagattcaaggaaaaattgcccgctccgatccccctagaatttttcgccgttgtgatgggcacgggcatcagtgcgggattcaatctcaaggagagctacaacgtagatgtggtgggtacactgccattgggactcctcccaccagctaacccagatacgagtctgtttcaccttgtatacgtggatgctattgcgattgccatcgttgggttctctgtgacgatctcaatggccaagaccctcgccaacaaacacggctaccaggtggacggaaaccaggagctgattgcgttagggctgtgcaatagcatcggatctttgttccagaccttcagcattagttgttccctgagcagatccttagttcaggagggaacagggggtaagacccaactggccggttgcctcgcctccctcatgatcctgttagtgatcttggcgacagggttccttttcgagagcctgccccaaacgatttggttgactacctttgtgagctcattgtttctcggactcgattacgggctaatcacagctgttattattgctctgctgaccgtgatctaccgcacccagaggtag

SEQ ID NO: 241355 - DNA, 2139 bp, synthetic construct
  misc_feature 1..2139: note = Description of Artificial Sequence: Synthetic coding sequence
  source 1..2139: mol_type = other DNA
atggaccacgctgaggagaacgagattttagctgcaactcagaggtattacgttgagaggcccatattttcccatcccgtgctccaggaacggttacatacgaaggacaaggtgccagattccatcgccgataaactcaagcaagcttttacatgtactcctaagaaaattcgcaacatcatctacatgtttctccctatcaccaaatggctgccggcatataaattcaaagaatatgtcctcggcgatctggtttcgggcatctcaaccggagttctccaactgcctcagggcctcgcgtttgccatgttggccgctgtccccccaatattcggactgtattcaagcttctacccagtgattatgtattgctttctgggtacctctagacacataagcatcggcccattcgccgtcatctcgctgatgatcgggggtgttgccgtccggctggtccctgacgatatcgtgatcccaggaggagtgaatgcaacaaatggcactgaagctagggatgcactgcgcgtaaaggtagccatgtccgttacgctcctgtcagggattatacaattctgtctgggggtgtgtcgctttggctttgtagcaatctatctgacggagcccctggtgagggggttcaccaccgctgccgcagttcacgtcttcacgtctatgctaaaatatctgtttggagtgaaaaccaagcgatactctggaattttctctgtggtttatagcaccgtggccgtcctccagaatgttaagaatttgaatgtttgctctcttggcgttgggttgatggtgttcggcctgctgctgggcggaaaagagttcaacgaaagattcaaagagaagcttccagcacctatcccactggagtttttcgctgtggtgatgggtaccgggatttccgctggattcaatttaaaagagagctacaacgtggacgttgtagggactctcccccttgggctgctgccaccagcaaaccccgatactagcttgttccatctggtgtacgtggatgctatagctattgcaatcgttggtttctctgtaaccattagcatggccaagacactggccaataagcacggctatcaggtagacggcaaccaggagctgattgcgcttggcctgtgcaactctatcgggtccctcttccaaactttttccatctcctgttcactcagccgatcgctcgtacaagagggtacaggtggaaaaacacagctagcaggctgcctagcctcattgatgatcctgctggtgattctggccactggctttttgtttgaaagccttccccagactatttggttgaccacttttgtgagcagcctcttcttaggactggattacggcctcatcaccgctgtgatcattgcactgctgacagtgatctaccggactcagtcaccctcctataaggtcctggggaagctcccagaaactgatgtctatatcgatattgacgcttatgaagaggtaaaggaaatacctgggattaaaattttccaaattaatgccccaatttattatgctaattccgacctgtattctaacgcactgaagaggaaaactggcgtcaaccccgctgtgattatgggtgcgcgtaggaaggccatgcgaaagtatgctaaggaggtcggcaacgccaacatggccaatgccaccgtggttaaggcagacgctgaagtggacggcgaagacgcaaccaagcccgaggaagaagatggggaggtgaaatacccgcctattgtgatcaagagcaccttcccggaggagatgcagcggtttatgccccctggtgataatgtgcacaccgtgatcctggatttcacacaggtcaacttcatcgactctgtgggcgttaaaacactggccggtatcgtcaaagagtacggcgatgtgggcatatacgtctatcttgccggatgcagcgcacaggtggtgaacgacttgactagaaataggtttttcgagaatcctgcattgtgggagctgctctttcacagcattcatgatgccgtccttgggtcccaactccgggaagctctcgccgagcaggaagctagtgcaccgcctagtcaggaagacctggagccaaacgcgacgccggctacccccgaggcctag

SEQ ID NO: 241356 - DNA, 1344 bp, synthetic construct
  misc_feature 1..1344: note = Description of Artificial Sequence: Synthetic coding sequence
  source 1..1344: mol_type = other DNA
atggaccatgcagaggagaatgaaattctggcagccacccagaggtattacgtggagagacctattttcagccatcctgttctccaggaacggttgcacacaaaagacaaggtgcctgattcaatcgcagataaactgaagcaggcctttacctgcactcccaaaaagataaggaatatcatttacatgtttttgcctattacgaagtggctacccgcatacaaattcaaggaatatgtgctgggggacctggtcagcggaatatcaacaggtgtcctgcaactgccccagggtttggcttttgcgatgctagctgctgtccctcccatctttggtttgtactcatctttttacccggtgatcatgtactgtttcttgggaacaagccggcacatttccattggtccattcgcagtgatcagcttgatgatcggcggagttgctgtacgcctagttccagacgacatcgtgattcctggcggtgttaatgcaactaacggcacggaagctcgcgacgcgcttcgggttaaggtggccatgagtgtaacattactgtcgggaataatccaattttgcctgggggtctgcaggtttggattcgtcgccatttaccttactgagccactggtgagagggttcacaacagctgccgctgtacatgtttttacctctatgcttaagtatctgttcggagttaaaacaaaaagatactccggaatttttagcgttgtgtattccaccgtagccgtcctacaaaacgtcaagaacctgaacgtgtgcagcctgggcgttggacttatggtatttggcttactacttggagggaaagagtttaacgagcggtttaaagagaaactgcccgctcctatcccactcgagtttttcgcagtagtcatgggtaccggcatctcggctggcttcaaccttaaagagagttacaacgtggacgtcgtcggcacactccctctggggcttctcccgcctgctaaccctgatacatcactcttccatctggtctatgtcgatgccattgctatagccatagtcggcttcagcgttactatcagtatggccaaaactctggcaaacaagcacggataccaggtggatggaaaccaggaattaatcgccctgggtctgtgcaattcaattggcagcctttttcagaccttctccatttcatgcagtctgtctcgatcactggtacaggaggggaccggcggtaaaacccagactatctggctgacaacatttgtgagcagcctctttctcggccttgactatggattgattactgccgtcatcatcgcactgctgactgtgatatatcggacccagcgttag

SEQ ID NO: 241357 - DNA, 1956 bp, synthetic construct
  misc_feature 1..1956: note = Description of Artificial Sequence: Synthetic coding sequence
  source 1..1956: mol_type = other DNA
atggggttggccgacgcgtccggtcctagggatacccaagcccttctctctgccactcaagccatggatctgcgacgaagagattaccacatggaacgcccactattaaatcaggaacacctggaggagctgggacggtggggcagcgcgccaagaacccaccaatggcggacctggctccagtgcagcagggctcgcgcttatgcactgctgctgcagcacttgccagtgcttgtttggcttccaagatatcccgtgagagactggttgctgggcgatctcttgagtggcctctcagtggctataatgcagcttccacaaggcctggcctacgctctcctggccggtcttcccccagttttcggattgtactctagcttttaccccgtcttcatctacttccttttcggcacaagtcggcacatttcggtcgtacttgaagtgtgttggaagctgcctcaatccaaggttgggactgtcgtgactgctgccgtggcaggagtcgtccttgtggtggtgaaactgctgaacgacaagctccaacagcaactgcccatgcccattcctggcgaattgctgacactgataggtgctactggaattagctacggtatggggttgaagcatcggtttgaggtcgacgtagtgggaaatatccctgccggattagtccctcccgtcgctcctaatacccaactgttcagtaagctggtcgggtccgcttttaccatagcagtagtaggcttcgctatagctattagcttaggcaaaatatttgccctgcgacatggttatagagtagacagcaatcaggaattggtcgcacttggattgtctaacctcattggtgggatcttccaatgctttccagtgagctgctctatgtccagatccctggttcaggaatccacaggaggcaatagccaggtagcaggggcaatctcatccttatttatattgcttataatcgtcaagcttggggagctgttccacgacttacccaaagcggtacttgccgcaattataatcgtgaatcttaaggggatgttgcgacaactgagtgatatgagaagtttgtggaaagccaatagggccgacctcctgatttggttagtgacattcaccgccaccattctgctgaacctggatctaggcctggtagttgccgtcattttcagtctgctcctggttgtcgtgcgcacccaaatgccccactactctgtcctgggacaggtcccggatacagacatctatcgggacgtagcggaatactcagaggcgaaggaggtgcgaggggtgaaggtcttcaggagctctgcaacagtctacttcgctaatgctgagttttactccgacgccctgaagcagcggtgtggcgtggacgtcgacttcctgatcagtcagaaaaagaagctgctcaaaaagcaggagcagctcaagttaaagcagcttcaaaaggaggagaagcttaggaagcaagccgctagtcctaagggggcttctgtgtctattaacgtgaacaccagcctcgaagatatgaggtctaataacgtggaggactgtaagatgatggtctcgtcaggggacaagatggaagatgccactgcaaatggccaggaagactcaaaagctcccgatggatcaacccttaaagccctgggcctgcctcagcccgacttccatagcctcattcttgacctaggtgctctcagctttgtagacaccgtgtgcctgaaatccctgaaaaatatattccacgacttcagagaaattgaagtcgaagtatacatggccgcttgccactctccagtcgttagccagctcgaggctgggcatttctttgatgctagcatcacaaagaaacacctcttcgcgagtgtgcatgacgctgtgacctttgctcttcagcatccaagaccggtccccgatagcccagtgtctgtgacacgattatag

SEQ ID NO: 241358 - DNA, 2217 bp, synthetic construct
  misc_feature 1..2217: note = Description of Artificial Sequence: Synthetic coding sequence
  source 1..2217: mol_type = other DNA
atggacctgagacggagagattatcacatggagcgccctcttctcaaccaggagcatctagaggagcttggtcgttggggatctgcccctaggacacatcagtggaggacgtggctgcagtgttctagagcccgagcttacgctctgctcctgcagcacctacctgtcctcgtttggctgcctcgctatcctgtgcgggactggctactcggggatctcctgtctggactctccgtcgccatcatgcagctacctcagggactagcctacgctctactggctgggctcccccctgtattcgggctgtatagcagcttctatcccgtttttatttatttcttgtttggaacctcgagacacatcagtgttggaacatttgcagttatgagtgtaatggtgggatcggtaaccgaatcactggccccacaggccctgaatgattcaatgattaacgagaccgcccgtgacgctgcccgagtacaggtggccagcaccctatccgtccttgtgggcctgtttcaggtcggcttggggctcattcatttcggattcgtggtgacttacctgtccgagcccctggtccgcggatacaccactgctgctgctgtccaggtatttgtatcccagcttaagtatgttttcggattacatctctctagccactcgggtcccctgtctctcatctacacagttctggaagtttgctggaagctgccacaatccaaagtggggaccgtcgttacagccgctgtggcaggagtagtcctggtcgtggtgaagctgctgaatgataagcttcagcagcagctgcctatgcccatccctggcgaactgctcaccctaataggcgctaccggcattagttatggaatgggactgaaacacagattcgaagtggacgtcgtgggcaatatacctgctggcctggtcccccctgtcgcacccaatactcaactgttctctaaattagttggatctgcgttcacaatagccgtcgtaggattcgcaatagccatatccttgggcaagatttttgctctgagacacgggtaccgggtggacagcaaccaggaattggttgccctcggtctttcgaatttgatcgggggtattttccaatgcttccccgtctcctgtagcatgagcaggtctctggtccaggagtcaacaggaggaaattcacaggtggctggggctatcagctctctttttatcctgcttatcatcgttaaactgggagagctgttccatgacctcccaaaagctgtcctcgccgctattatcattgtcaatctgaagggaatgctgcgtcagttgagtgacatgaggtccctgtggaaagccaatagggccgacctgctgatctggctggtgacatttactgccacgatcctgttaaacctcgatttagggcttgtggtcgcagtaatcttctcactgctattagtggtggtgaggacccaaatgccacattacagtgtgcttggccaggtccccgataccgacatttatcgtgacgttgccgaatattccgaagcaaaggaggtgcggggtgtcaaggtgttccgaagcagcgctaccgtgtattttgccaacgcagagttttacagtgacgctcttaagcagcgttgcggagttgatgtggattttctaatatctcagaagaagaagctcttaaagaaacaggagcaactgaaacttaagcagttacagaaggaagagaaactgcgaaagcaggctgctagcccaaagggggcaagtgttagcattaatgtgaatacttctcttgaggacatgagaagcaataatgttgaggactgcaagatgatgcaggtgagctcgggtgataaaatggaggacgcaacagctaacgggcaggaggactccaaggcccctgatggttccaccctcaaggccctaggccttcctcaacctgattttcattccctcattctggacctgggtgctctctccttcgtggacaccgtctgcctgaaatctctcaagaatatcttccatgacttcagagaaattgaggtcgaggtctatatggccgcttgtcatagtccagtcgtctctcagttggaagccggtcacttctttgatgcttcaatcaccaaaaaacacctcttcgcctccgtccatgacgcggtgacatttgccctgcagcacccacgtcccgtaccagactcaccggtctcagttacacgtctttag

SEQ ID NO: 241359 - DNA, 2223 bp, synthetic construct
  misc_feature 1..2223: note = Description of Artificial Sequence: Synthetic coding sequence
  source 1..2223: mol_type = other DNA
atgggacttgccgacgctagcgggcctcgcgacactcaggccctgctgtctgccactcaggcgatggacctccgaaggagggactatcacatggaacgtccactgcttaaccaggagcacctcgaggagctggggaggtggggcagtgcccctagaacccaccagtggcggacatggcttcagtgctcgcgggctagagcctatgccttgttgcttcagcacttgcccgtcctcgtttggttgccgaggtacccggttagagactggcttctgggcgacctcctgtctggattatcagtggccattatgcagctgccacagggcctggcgtacgcccttctggctggcctgcctcccgtctttggactttacagttcattctaccctgtgttcatctacttcctcttcggtactagtcgtcacatatctgtcggcacatttgctgtaatgagtgtcatggtggggtcagtgactgaatcactggcaccgcaggccttaaacgacagcatgatcaatgagaccgcgagagacgctgccagggtgcaggtggctagcaccctgtcggtgctcgttggcctgttccaggtagggctgggattgatccatttcggattcgtcgtcacctacctgtctgagcccctggtccggggatacactacagccgctgctgttcaggtctttgtgtcccagcttaaatatgtattcggcctccacctgtccagccattcaggaccgctgagcttaatatacactgtgctggaagtatgttggaaactgccacaaagcaaggtgggcacagtcgtaactgcagctgtggctggcgtcgtcctggtcgtggtgaaattactaaacgataagctgcaacagcagctgcccatgccgatacccggtgagcttctgacccttatcggagccaccggaatctcttacggcatgggtttgaaacacagatttgaggtagatgtggtgggcaatatccctgctgggctcgtgcccccagtggcacccaatacacagctattctctaaacttgtaggctcagctttcactatagctgtggtgggattcgctattgccatcagcttgggaaagatcttcgctcttaggcacggctaccgagtggactccaatcaggaactggtagctttaggactttccaatctcattggcggaatctttcagtgctttccagtatcctgcagcatgtcacgcagcctggtgcaagaatccacgggcggtaactctcaggttgccggagctatcagttctttattcatcctacttattatcgtgaagctaggtgagctgtttcatgatttgcctaaggctgtcttggccgctatcataatcgttaatttgaaggggatgctgagacagctaagcgacatgcgtagcctgtggaaggcgaatcgggctgatttgctgatttggctggtcacgtttaccgcgaccatcctccttaatttggacctgggtttagttgtggctgtgatattctccctcttactggtggtcgtccgcactcagatgccccactacagcgtgttaggccaagtccccgataccgacatttatagggatgtcgctgaatattccgaggcaaaggaagttcgcggagtgaaggtctttcggagcagcgccaccgtgtactttgcaaatgcagagttctactcagacgcactgaagcaaagatgtggagtggacgtcgattttctcatcagccagaaaaaaaagttactgaaaaaacaggagcagctcaaattaaagcagcttcaaaaggaagaaaagttgagaaagcaggcgggaccactgctcagtgcctgcctggcacctcagcaggtctcctcgggagataagatggaagacgcaactgctaacggtcaggaagattccaaagcaccggatgggtccactcttaaggccctggggctgccccagcccgactttcactctctgatcctggatctgggagccctctcttttgtggacactgtatgcctgaaaagtcttaaaaatatctttcatgatttccgagagattgaggtggaggtgtatatggctgcttgccactccccggttgtcagtcagttggaagccggacactttttcgatgcaagcatcacaaagaagcatctgttcgcttccgtacacgatgcagtcacattcgctcttcagcatccgagaccggtgccagattcgcctgtctccgtgacacggctgtag

SEQ ID NO: 241360 - DNA, 2280 bp, synthetic construct
  misc_feature 1..2280: note = Description of Artificial Sequence: Synthetic coding sequence
  source 1..2280: mol_type = other DNA
atgggtctggccgacgcctcgggcccacgcgacactcaggctctgctgtctgctacacaggctatggatctccgacggcgagattaccacatggaacggcctctacttaaccaagagcacctggaggagttgggcaggtggggatccgccccacgtacgcatcagtggcgtacatggcttcaatgcagcagggccagggcctacgccctcctgcttcagcatctccctgtcttggtgtggcttccaaggtaccctgttcgagactggctgttgggggaccttttatctggtctgtccgttgccattatgcagctacctcagggcttggcctacgcactgctggctgggctgcctcctgtcttcggattatactcatccttctatcctgtgtttatctatttcttgtttggcacaagtcggcatatatctgtgggtacatttgctgtgatgagcgtcatggtgggaagcgtgacagagtctctggctccacaggccctgaatgattcaatgattaatgaaactgccagagatgccgcacgggttcaggtcgccagtacactctcagttctcgtgggcctgttccaggtgggattaggcctcatacatttcggctttgtagtcacctacctgtctgagccactcgtcagagggtatactactgccgctgctgtccaagtcttcgtgtctcagctgaagtacgtgttcggcctgcatctgtcatcacatagtggaccactgtcactaatttataccgtgctggaagtctgttggaaacttccccagtccaaggtcggtaccgtggtcacagccgcagtggctggggtcgtgttagtggttgttaaactccttaacgacaaactgcaacagcagctgccaatgcctatacctggcgagctactgacactgattggtgcgaccggaatctcgtatggaatggggctcaagcatcgctttgaagtggacgtagtggggaatatacctgcgggactggtcccgccagtagccccaaatacgcagctgttttcaaagctggtggggtcagcttttacaattgccgtcgtcgggttcgccattgccattagtctaggaaaaatcttcgctctcaggcacggttacagagttgacagcaaccaggaactcgttgccctcgggctgagcaacctcatcggcggaattttccagtgcttcccagtctcttgtagtatgtccaggtccctggttcaggagtccaccggtggtaactcccaggttgccggagccatctcaagtctgttcatcctgctgatcattgtcaagttgggagaactgttccatgatctgcctaaggcagtcctggctgccatcatcattgtgaacttgaaaggaatgctccggcagctctcagacatgagatccctgtggaaagccaatagggctgacctgctcatttggctcgtgaccttcactgcgacaatcctcctgaacctggacttgggcctagtggtcgccgtgatcttttcacttttgctggtggttgtcaggacacagatgccccactacagtgtacttggacaggtaccggacacggacatttaccgcgacgtcgctgagtactctgaggctaaagaagttcggggagtgaaagtgtttcggtcctctgccactgtgtactttgctaatgctgaattttactcagatgccctaaagcagaggtgtggcgtggacgtggactttttgatttcccagaaaaaaaagttgctgaagaagcaagagcagcttaaactaaaacagctgcaaaaagaggagaagctgagaaagcaggctgcttcccccaagggtgcctcagtaagtatcaatgttaacacaagtcttgaggacatgcggtccaacaatgtcgaagattgcaagatgatgcaggtgtcctccggggacaagatggaagatgctactgccaatggccaagaggactctaaggcacccgatggcagtacactgaaggccctgggcctgccacagccagatttccatagtctgatcctagatctgggcgctcttagtttcgtcgatactgtctgtttgaagtctctcaagaacattttccatgactttcgggaaattgaagttgaggtgtatatggcggcttgtcacagccctgtggtttcacagcttgaagccggacacttcttcgatgctagtattacaaaaaagcatctgttcgcttctgtacacgatgctgtcacctttgccctgcaacacccgagaccagtccctgatagtcccgtctccgtgactaggttgtag

SEQ ID NO: 241361 - DNA, 2277 bp, synthetic construct
  misc_feature 1..2277: note = Description of Artificial Sequence: Synthetic coding sequence
  source 1..2277: mol_type = other DNA
atgggtctggcagatgctagtgggcctcgagacactcaagctctattgagcgcaacccaggcgatggacctgcgccgtcgtgattaccatatggagcgcccattattgaaccaggagcacttggaggagttaggtcggtggggcagtgcccctcggacacaccagtggagaacttggctgcagtgttcaagggctcgcgcttacgcactgttgttgcaacaccttccagtcctcgtgtggctccctcggtaccccgtgagggattggctcctgggagatttgctctctgggctctcagttgccatcatgcaactaccacagggcctcgcgtacgctttgctggcagggctcccaccagtatttggcttgtacagttccttctatcccgtttttatctactttctgttcggcacttcacgccatataagtgtgggtacctttgcagtgatgtctgtgatggtgggaagcgttacagaatctctggccccacaggcactcaacgacagcatgatcaacgagactgcccgagatgcggcaagagttcaagtggcgtctactctgtccgtcttagtagggttgttccaggtggggctcggactgattcattttggatttgtggtcacgtatctttctgagccactcgtgcgtggctacacgaccgcagcagccgtccaagtcttcgtgagccagctgaagtacgtttttggccttcacttgtctagccactctggccctctgtcgttgatatataccgttctggaagtttgttggaagctgccccaatccaaagtgggcacagtcgtaacagctgctgtggccggtgttgttctcgtggtagtgaagctcctgaatgacaaactgcagcagcagcttccgatgccaataccgggagagctccttacgttgatcggagccacaggcattagctacggaatggggttaaaacatcggttcgaggtggatgtggtcggaaatattcctgccggacttgtcccgccagtggccccaaacacccagctctttagtaaactggttgggtccgccttcacgattgcggtggtaggatttgccattgcaataagtctgggaaagatctttgccttacggcacggttaccgcgttgactcgaatcaggaactcgttgcgttggggctctcgaatctcatcggaggaatttttcagtgtttccctgtgagctgcagcatgagtagatccctggtgcaggaaagtacagggggaaattctcaggtggcgggagccatctcttccctttttattcttctcattatcgtgaagctgggcgaactgttccacgatctaccgaaggccgtgctggccgcaattattatcgttaacctcaaggggatgttgagacagcttagtgatatgcggtcactatggaaggccaatcgcgcagacctgctgatttggttagtgactttcacagctaccattctgctcaatctggatctgggcctcgtggtggcggtgatcttctcactgctgctcgtggtagtacgtactcagatgcctcactattcggtcctcggtcaggtgcccgatacggacatctacagggatgtggccgagtacagcgaggcaaaggaagtgcgcggtgtcaaagtgtttagatcttccgccaccgtttattttgccaatgccgagttctattccgatgccttaaaacaaaggtgtggggtggacgtcgattttcttataagccagaagaagaagctgctgaaaaagcaggaacaattaaaactgaagcaacttcagaaggaggagaagctgcgaaagcaggcagctagtcccaaaggggcttcagtgagcattaatgttaatactagcctcgaagacatgcggtctaacaatgtggaggactgtaagatgatggtctcttctggggataaaatggaagacgcgaccgccaacggccaagaagattctaaggccccagacggctccacactgaaggcccttggcctcccacagccagacttccactcactcatcttggatctaggcgcattatccttcgtcgacactgtctgtcttaagagcttgaagaatatctttcatgactttcgggaaatcgaagtggaggtgtatatggccgcatgtcactcccctgtggtgtcacagctggaggccggacatttctttgatgcatctattacaaagaagcatttattcgcctcggtgcatgatgccgtgacctttgctctgcaacatccaagaccagtgcccgactctcccgtctctgtgactcggctgtag

SEQ ID NO: 241362 - DNA, 2262 bp, synthetic construct
  misc_feature 1..2262: note = Description of Artificial Sequence: Synthetic coding sequence
  source 1..2262: mol_type = other DNA
atgggactggccgatgcatcagggccacgagacacacaagccctcctatctgctacacaggccatggatctgaggcgacgcgactaccacatggagaggccattgcttaatcaggaacacctggaggaactgggccgttggggatccgctcccagaacccaccaatggaggacatggttgcagtgtagcagagcgagggcatatgccttgctcttacagcatcttcccgtgctagtctggctgcctcgctaccctgttcgcgattggctccttggagatctgttgtcgggattgtcagtggcgatcatgcagctaccacaggatcttctgagccgccttcattgttaccattcaaccctgggcctcgcctacgcactgttggcaggccttcccccagtgttcggactttacagttctttttatcccgtgtttatctactttctctttggaacctcccggcacatcagcgtgggcactttcgccgtcatgagtgtaatggtcggaagtgtaactgaatcacttgcaccgcaggccctgaacgacagtatgatcaacgagactgctcgggacgccgcacgagttcaggtggcctcaactctgagtgttctggtggggctcttccaggtgggattaggtctcatacatttcggctttgtagtgacctacctgtccgaaccattggttcgaggctacacgaccgccgcagcggtgcaggttttcgtgtcccagctgaagtacgtttttgggttacatctgagctcccatagtggaccattatcattaatctacacagtactagaagtgtgttggaagctgccccagagcaaggtcggcacagtagtgaccgcagcagtcgcaggtgtggtcctcgtagtggtcaaactgcttaatgacaaactccagcagcaactgccgatgcccatccccggtgaattgctgacacttataggtgcgaccgggatatcgtacggcatgggcttgaagcacagatttgaggtcgatgtggtaggcaacattcccgctgggctcgtccctcctgtggcaccaaacactcagctgttttccaaattggtgggctccgccttcaccattgccgtagtcggtttcgctatcgccatatcattggggaaaatctttgcacttcggcacggatatcgggttgatagcaaccaggaattggtagccctagggctgtcaaacctgatcggcggtattttccagtgtttcccagtgtcctgttctatgagccgcagcctggtgcaagaatcaactggcggaaattcacaggtcgctggagcgatttcttcactctttatcctccttatcatcgtcaaactcggcgagctgttccacgacctccctaaagcagtactggcggctattataatagtaaacctaaagggcatgcttcgccaactgtccgatatgagatctttgtggaaggcaaaccgagccgacctgcttatttggttggtcacctttacagcaacaattctcttaaacctggatctgggtctggtcgtggcagtgattttctctttactgctggtggttgtgcgcacacaaatgcctcactactccgtacttgggcaggtccccgatactgacatttatagagacgtagccgaatacagcgaggcaaaggaagttcgcggagtaaaggtatttcgtagctctgccacagtgtacttcgcgaacgccgagttttactccgatgccctgaagcagcgatgtggggtggacgtggactttctgatttcccagaagaagaaactgctcaaaaagcaagagcagctcaaactcaagcaactgcagaaggaagagaagctgaggaaacaggccggacccttgctcagcgcctgcttggcccctcagcaagtgtccagcggtgacaagatggaggacgctacggccaacggacaggaggacagtaaagcgcctgacggctcaaccctcaaggctctgggactgcctcagcctgatttccacagtctgatcttggatcttggggcactgagctttgtggacaccgtctgtttaaaatccttaaaaaacatattccacgattttcgtgagattgaggtcgaggtgtatatggccgcatgccactctcctgtcgtttctcagttggaagccggtcacttcttcgacgcaagtattactaagaaacacctgttcgcctctgtccacgatgccgtaacgtttgccctgcagcacccacgcccagtccctgacagccccgtgtctgtgacaagactgtag

SEQ ID NO: 241363 - DNA, 2172 bp, synthetic construct
  misc_feature 1..2172: note = Description of Artificial Sequence: Synthetic coding sequence
  source 1..2172: mol_type = other DNA
atgggacttgcggatgcctccggaccgagggacacacaggcgctgctgtctgcaacccaggctatggatctgcggagaagagattaccacatggaacggccactcctgaaccaagaacacctagaggagctcggtcggtggggctcagcacccagaacccatcagtggcggacctggttgcaatgtagcagagctcgtgcttacgcgcttctccttcaacacctcccagtcctggtttggctgcctaggtaccctgttagggattggcttctcggagatttactgtccggcctgtcagtggcgatcatgcagcttccccagggccttgcatacgccctgctagcaggactccctcctgtgttcgggttgtactctagcttctacccagtgtttatctacttcctctttggcacttctaggcacataagtgtggcaacacccggtcccctaccactcttgacagctccaggccgtccgaccggcggtgccggacccgatcctctaaggctgagggggcacctgccagtaaggacatcctgtcctaggctgtatcactcctgctcctgtgccggactccggctgaccgcccaggtgtgtgtttggccacctagcgaacagccactgtgggctacagtccctcaccttcttctggaagtatgctggaaacttcctcagtcaaaagtggggaccgtcgtgacagccgcagtggctggggtagtgctcgtggtcgtgaaactgctgaatgacaagttgcaacagcagcttcccatgcctattcctggagagcttctgaccctgatcggggctaccggtatcagctacgggatgggacttaagcaccgcttcgaagtggatgttgtgggaaatatcccagccggactcgtgccaccagttgcccctaacacccagctcttctcaaaactcgttgggtcagccttcactatcgccgtcgttggtttcgcaattgccattagcctcggcaagatctttgcccttagacatgggtacagagtggattcaaaccaagagttggtcgctctgggtctgtcaaatctgatcggaggaattttccagtgcttccctgttagctgtagcatgtcacgaagtctggtccaggaaagcaccggaggcaatagccaggttgcgggtgccatttccagcctcttcatcctgttgatcattgtcaaactgggagaattgttccatgacctgcctaaagcggtcctcgccgcaattattattgtgaatcttaagggcatgctgaggcagcttagtgacatgcggagtttatggaaggccaacagagctgatcttctgatatggctcgtgacctttaccgctaccatactcctgaatcttgatctaggactggtagttgccgtaatttttagtctcctgttggtggtggtgcgcactcagatgcctcactatagtgtgttgggccaggttcccgacactgacatataccgcgacgtggctgagtactccgaagccaaagaggtaagaggcgtgaaggtcttcagatcctctgctaccgtgtacttcgccaacgctgagttctacagtgatgcactgaagcagcgctgcggggtcgacgttgattttctaatatcacagaaaaaaaagttactaaagaagcaggagcaactcaaactcaagcagcttcagaaagaggagaagctgagaaaacaggctgcatcccccaagggcgcaagtgtcagcatcaatgtcaatacatccttagaggatatgagaagtaataacgtcgaggattgcaagatgatgcaggtctcctccggggataaaatggaggacgcaacagcaaatggccaagaagattccaaagcgcctgatggatctacgctcaaggccctgggactgccgcagcccgactttcattcgttaattctggatctaggcgctctgagctttgtagacactgtgtgtctcaagtcactgaagaatatctttcatgacttcagagaaatcgaagtggaggtgtacatggccgcttgccacagccccgtggtgtcgcagttggaggcaggtcacttcttcgacgcttccatcactaagaagcatttatttgcgtccgtacacgatgccgtgacattcgcactgcagcacccccgaccagttccggattctccagtctccgtgacaaggttgtag

SEQ ID NO: 241364 - DNA, 1941 bp, synthetic construct
  misc_feature 1..1941: note = Description of Artificial Sequence: Synthetic coding sequence
  source 1..1941: mol_type = other DNA
atgcgggcacctggcgcaggggctgcctccgttgttagcctggcactgctctggttgctcggactcccttggacttggtccgcagccgctgccctcggggtttatgtcggctcgggcggatggagattcttgagaatcgtgtgtaaaactgctagaagagacctctttggtctgtcagtgctgatcagggtgcgcctggaactccgccgacatcaacgggcagggcatacaattcctaggattttccaggcggtggtgcagcggcagcctgagagattagcattagtcgacgccggaacaggagagtgttggactttcgctcagctggacgcatatagtaacgccgtggctaacttattccgacagctcggtttcgcgcctggagatgtagttgcaatatttttggaaggcagacccgaatttgtgggactgtggctaggtcttgccaaggcgggtatggaagctgcacttctaaacgtcaacctgcggcgtgagcccctggccttttgcctggggacaagcggcgctaaggctctgatcttcggcggagaaatggtggccgcagtagctgaagtctctggccatcttgggaaatcactgattaagttctgttcaggggatcttggaccagaaggaattcttccagatacccatctgctggatcctttgctcaaagaggcttcaacagctccactggcgcagattccttccaaaggtatggacgacagactgttttacatctatacctctgggaccactggccttcccaaggccgcaatagtggtgcacagcaggtactatagaatggctgcttttggacatcatgcttacagaatgcaggcagcagacgtgttatatgattgcctgcccctatatcatagcgccggtaacattatcggagtgggccagtgtctgatatacggccttactgtggtgctgagaaagaaattctcggcatccaggttttgggacgactgtattaagtataattgcaccgtggtgcagtacattggagaaatatgtagatacttgctgaagcagccggtgcgcgaggctgaaaggcggcatagggtacgtcttgccgtaggtaacgggttaaggcccgcaatctgggaagagtttacagaaagatttggggtaagacagatcggagaattctatggtgccactgagtgcaactgcagtatcgccaatatggatggcaaggttggctcatgtggatttaactcacgaatcctgccgcatgtgtaccccatccggctggtgaaggtcaatgaagatactatggagttgctgagagacgcacaggggctgtgtattccatgtcaggccggagagcctgggctgctggtcggccagatcaaccagcaggacccactcagacggtttgacggttatgtgtctgagtcggcgacaagcaaaaagattgcacattccgttttctctaagggggatagcgcctacttgtccggagacgtgctagtcatggacgagctggggtatatgtatttcagagaccgtagcggcgacacattccgctggcgcggtgaaaacgtgtccaccacggaagtggagggtgtgctttctcgactccttgggcagaccgatgttgccgtctacggagtcgccgtccctggcgtcgaggggaaggcagggatggccgctgttgccgatccccatagcttgctcgacccaaacgccatctaccaggagctgcagaaggtgttggcaccatacgctaggccaatcttcctccgcctgctaccacaggtggatacaactggtacgttcaaaatccagaaaactaggctgcagcgggaggggtttgacccacggcagactagtgatagactcttcttccttgatctgaaacagggccattaccttccgctgaacgaggctgtttacacacgaatctgcagcggcgcatttgccctgtag

SEQ ID NO: 241365 - DNA, 723 bp, synthetic construct
  misc_feature 1..723: note = Description of Artificial Sequence: Synthetic coding sequence
  source 1..723: mol_type = other DNA
cctgagtttgttggtctgtggctaggattggcaaaggctggcatggaagccgcattactgaacgtaaacttgcgccgtgagccactggctttctgcttgggaacttctggtgcgaaagcgttgattttcggcggagaaatggtggccgcagttgctgaggtttcaggccatctgggtaagtccttaatcaaattctgttctggtgatctgggcccagagggcatcctgcctgatacacaccttctggacccactactcaaggaggcatccactgcccctcttgcacagatcccctctaagggcatggatgatagactattctatatctatacatcagggacaaccggactgcctaaagctgccatcgtcgtgcacagtaggtattaccgaatggccgcattcgggcaccatgcctaccgcatgcaggccgctgacgtgctttacgattgcttgccactgtatcattccgccggaaatattatcggggtcggccagtgtcttatctatgggttgaccgtcgtgctgcggaaaaagttttctgcctccaggttttgggatgactgtattaagtacaattgtacttggcatggaccttcgtggacggaaaaattggaaccccagcgcaatccttgcctcagcgctgccctggttcccctgtgcctccccccactgcctgcctttcaacctctgtcaccctctattcctgtcccagtttggccctag

SEQ ID NO: 241366 - DNA, 1941 bp, synthetic construct
  misc_feature 1..1941: note = Description of Artificial Sequence: Synthetic coding sequence
  source 1..1941: mol_type = other DNA
atgcgcgcacctggagccggtgccgctagtgtcgtatctcttgctttgctctggctgctgggactcccatggacatggtccgcggctgccgcactgggcgtctacgtgggctccggcggttggcgctttcttaggatcgtgtgcaagaccgctcgaagagacctgtttgggctctctgtgctgatccgagtgcggctagagctccgtagacaccagagagctgggcatacaattccccgaatctttcaggccgtggtacagcgacagcctgaaagactggcactcgtcgacgcaggcacaggggagtgctggacctttgcccaactggatgcttactctaacgccgtcgctaatttgttcaggcaactgggtttcgctcccggagatgtggtcgcaatatttctggaaggacggcctgaattcgtggggctttggcttggcctggctaaggccggaatggaagctgctctcctgaacgtcaacttacgcagggagccactcgccttctgcttgggcacgtctggggctaaggcactgatttttggaggggaaatggttgctgcagtggctgaagtgagtggacacctcggaaaaagtctcattaagttttgcagtggcgatctaggcccagaaggtatcctccccgacacgcatttattagaccctctgttgaaggaagcctctaccgcgcctctggcacagatccccagcaaggggatggacgatagactgttttatatctatacgtcgggcacaaccggtttgcccaaagccgcaatcgtggtgcatagccgctattatcggatggctgcttttggtcaccatgcgtaccggatgcaagctgccgatgtgttgtatgactgtctgcctctctatcactctgctggtaacattattggggtcggacagtgcttaatctacggacttaccgtagtgctccggaagaaattcagcgctagccgcttctgggacgactgcataaaatataattgcaccgttgtccagtatattggagaaatatgtagatacctgctcaagcagcccgtgagggaagccgaacggagacatcgggtgcggctggcagtgggaaatggtcttaggcctgccatttgggaagaatttactgagcgattcggcgtgagacagattggcgaattttacggggcaacggaatgcaattgtagcattgcaaacatggatggcaaggtgggtagctgcggctttaacagcaggatattaccacacgtttatcctatccgactggtcaaagtgaacgaagacaccatggagctgttacgcgatgcacagggactctgtattccctgtcaggcaggggaacccggacttctggtaggacagataaaccaacaggacccactacggagatttgacggctacgtttcagagagtgccacgtctaagaaaattgcccattccgtcttctctaagggcgattctgcgtacctcagcggagacgttcttgttatggacgagctgggctacatgtacttcagggatagatcgggggatacgtttcggtggcgaggagaaaacgtgtccacgaccgaggtagaaggcgtcctatctagactgctggggcagaccgacgtggcggtgtatggtgtggctgtgcccggagtggaaggaaaagcaggtatggcagcggtcgcggacccacattcgctactcgatcctaatgccatctatcaggagcttcagaaggtgctcgcaccgtacgcccgtcccattttcctgagattgcttccacaggtggacacaactgggacctttaaaatccagaagactagactgcagcgcgagggtttcgatccgcgacagaccagcgatagattgttctttctcgacctgaaacaggggcattatctgccattgaatgaggctgtttacacaagaatttgttctggggcttttgctttatag

SEQ ID NO: 241367 - DNA, 1863 bp, synthetic construct
  misc_feature 1..1863: note = Description of Artificial Sequence: Synthetic coding sequence
  source 1..1863: mol_type = other DNA
atgcttagtgccatttacactgttttagccggtctacttttcctgccactacttgtgaatctgtgctgtccctacttcttccaagacatcggctattttctgaaagtagccgctgtgggacgtcgtgtgagaagttacggcaagaggcgtccagcccgaactatcctcagagccttcctggagaaggcaagacagactccccataagccattcctcctgtttcgagacgagacattgacctatgcccaagtcgaccgcagatccaatcaggtggcgcgtgccttgcacgatcatctgggtttacgccagggcgattgtgtcgctctcctgatgggaaacgaacccgcttacgtctggctgtggttggggctggtgaaattagggtgtgcaatggcctgcctgaattataatattagagctaaatcgctgctgcattgttttcaatgctgtggcgcaaaggtgctcctggtatccccagagttgcaggctgccgtggaggagatcttgcctagcttaaagaaggacgacgtctccatttactacgtgagtaggaccagcaatacagacggaatcgatagctttctggacaaggtcgacgaggtgagtactgagccaatccccgagtcctggcgttcagaggtcacgttctctacacccgctctctacatatacaccagcgggaccacagggctgccaaaggcggctatgataacccaccagcgtatttggtatggtacagggttaacgtttgtctcaggcctgaaggccgacgatgtaatctacatcacactccccttttaccactccgcggcactactgatcggaattcatggctgtattgtggcaggcgcaactttggcgttaaggacaaaattttctgcctctcagttctgggacgactgtcggaagtataatgttacagtcattcagtatatcggtgagctccttaggtatctttgtaattcacctcagaaaccaaacgacagggaccacaaggtacgtctggcactgggtaacggtctccgcggtgacgtctggaggcagttcgtgaagagattcggtgacatttgcatttacgagttctacgcagctaccgaaggcaatattggctttatgaattacgcacgtaaagtgggggcagtggggcgagtgaattatttacagaagaagatcataacctatgacttgattaaatatgacgtcgagaaggacgagcctgtccgcgatgagaatggatactgtgtcagagtgcctaaaggagaggtagggctgttagtctgtaagattactcagctaactccttttaatggatatgcaggcgcaaaagcccagaccgaaaagaaaaagctcagagatgtcttcaagaaaggagacttgtacttcaactcgggggacctccttatggtcgaccacgaaaactttatctactttcacgatcgggtgggggacacattccgctggaaaggcgagaacgtggctacaactgaggtagctgatactgtgggcctagttgattttgtgcaggaggtgaacgtttacggtgtgcacgtacccgatcacgagggacgaatcggaatggcttctattaaaatgaaggagaatcacgagttcgacggcaagaaactgtttcaacatatagctgactacctccccagttatgccaggcctagatttttgcggatccaggatactatcgaaataaccgggacctttaaacacaggaagatgaccttggtggaagaaggcttcaatccagcggtgatcaaggacgctttgtatttcctcgatgatacagccaaaatgtatgttcccatgactgaagacatctataatgccatctcggctaaaacactgaagctgtag

SEQ ID NO: 241368 - DNA, 1704 bp, synthetic construct
  misc_feature 1..1704: note = Description of Artificial Sequence: Synthetic coding sequence
  source 1..1704: mol_type = other DNA
atgctgtctgccatttatactgtcctggccggacttctctttctgccgctgctcgtgaatctgtgctgtccttactttttccaggacatcggatattttctgaaagtagcagcagttggcaggcgagttcgctcatacggtaagcggagacccgcacgcacgattctgagagccttcttggagaaggcgcgacagactccacacaaacccttcctgttattcagagatgaaacgctcacctacgcccaagtagacaggaggagcaatcaggtcgccagggcattgcatgaccacttgggtttaaggcagggtgattgtgtggcattactcatgggcaatgagccagcttacgtgtggctgtggctcggactggtgaaactagggtgtgccatggcgtgcttaaattacaacatccgagcgaaatctctgctgcactgtttccagtgctgcggggctaaagttttgcttgtctctcctgagctccaggcggcagtggaagagatcctgcctagtctcaaaaaggacgacgtttctatttactatgtgtcacggactagtaacacggacggtattgattcctttctggacaaggtggatgaggtctcaactgagcctatacccgagtcgtggagatcggaggtgacatttagtacccccgctctgtacatttatacctccggcaccacgggtgcgactttggcactcaggactaaattcagcgcgtctcagttctgggacgattgtcgtaagtataatgttacggtgatacagtacattggggaactgttaagatacttgtgcaactcaccccagaagcccaatgacagggaccacaaggtccgccttgcactcgggaacgggcttagaggagatgtgtggcgacaatttgtgaagaggttcggggatatttgtatctatgaattctacgcagccaccgaaggcaacatcggcttcatgaactacgctcggaaggtcggcgctgtgggaagagtaaattatctgcagaaaaaaatcatcacctacgatctgataaagtatgatgtcgaaaaagatgaacctgtccgcgacgaaaacggctattgtgtacgtgtgcctaaaggcgaggtcggactgctggtgtgcaaaattacgcagctgacgccattcaacggatacgctggggctaaggcccagacagaaaagaaaaagttgagagatgtgtttaaaaagggcgatttatattttaattctggggacctcctgatggttgaccacgaaaatttcatctacttccacgatcgtgtcggggacaccttcaggtggaaaggcgagaacgttgccaccaccgaggtggctgatacagtgggcctcgtcgacttcgtgcaggaggttaatgtgtacggggttcatgtccctgatcatgaagggagaatcggtatggcctccattaaaatgaaagagaaccacgaatttgatggcaaaaaactgttccagcatatagcagattatttaccatcttacgcaaggccaaggttcctccggatccaggatacaattgagatcacaggtacattcaaacacagaaagatgacacttgtcgaagaaggtttcaaccccgctgtgatcaaggatgcactgtactttttagatgatacggcaaagatgtatgtgccaatgacagaggacatctacaacgcgatctccgcgaaaactcttaaactctag

SEQ ID NO: 241369 - DNA, 2436 bp, synthetic construct
  misc_feature 1..2436: note = Description of Artificial Sequence: Synthetic coding sequence
  source 1..2436: mol_type = other DNA
atgccaaaacctcccaaacctcgtaataacctcgaagacaggcataatccagggattcaaggcagacgggaacatcggccagggcctggccgtgtcagagctgccagctctccagggggatcagcaccccgagcagaacggcgactgtggggcgagggatgggagtctggcgcagccccacacccacattcttccagggtatcagctctgagaccatgcggagttgtgggggcttgggtcggcatgggtgtatgccagcgaaccagagccccatggaaagaaaaaagtcagctcgaaagggctgcgctggggtttcggaaggggggaagcgggatgttcgcttccggatggaatcagacagtccctattgaagaggccggatcgatggctgctctgcttttattacccctgctattgttgctgcctctgcttcttctgaaacttcacttgtggccccaattacggtggctaccagctgacttggccttcgccgtgagagccctctgttgcaagcgagctttaagagcccgagctttagcagcggctgctgccgaccccgagggaccagaaggcggatgctcattggcatggcgactggctgaattagcccaacagcgagctgctcacacattcctgatccatggctcacgtcgttttagttactcagaggcggagagggagagcaaccgcgctgcaagggcgttccttagagctttaggttgggactggggaccggacggtggagacagcggcgaggggtcagcaggcgagggtgaacgagcggctcccggagctggggacgcagcagcagggagcggggcagaattcgccggaggagacggggctgcaagagggggaggtgctgccgctccattgtccccaggcgctacagtggcacttctcttgcctgctgggcctgaattcctgtggctgtggttcggcctggctaaagccggtctacggacagcatttgtccccaccgcgctgagacgaggccctctgctccactgccttagatcctgtggcgctagggcccttgtcctagccccagagtttctcgaaagcctggagcctgacctgcctgcactgagggctatgggactccacctgtgggccgcaggcccaggcacccatcctgcagggattagcgacttattagccgaggtctcggccgaagtcgacgggccagtgccgggttatctgtcaagcccacagagcattacagacacatgtctctacatctttacctccggcacaactggacttccaaaggctgcaagaatttctcacctgaagatactgcagtgtcagggcttttatcagctgtgtggtgtacaccaagaggatgttatctatctggccttgcccctgtaccacatgagcggctccctgctaggtattgtcggatgtatgggcatcggcgctaccgtggtgctgaaatctaaatttagtgcagggcagttttgggaggactgtcaacagcaccgggttacagtgttccaatacataggagagttatgtagatacctcgtcaaccaaccgccttccaaggctgagcggggacacaaagtacggctggctgtcgggagcgggttgcgccctgacacctgggagcggtttgtacggcgttttggcccactgcaggttttggagacctacggactgacggaaggcaacgtagctactatcaattatacaggacaacggggagccgtcggccgagcctcatggctttataaacacatctttcccttcagcctgatccgctatgatgtcactacgggcgagcctataagggatcctcaggggcattgtatggccaccagccccggagaacccggactgctcgtggcaccggtgagccagcagtctcctttcctaggatatgcgggaggccctgagttagcccagggtaagctgctgaaagatgtcttccggccaggtgacgtgttctttaacaccggagatctgctggtgtgtgatgatcagggctttctaaggttccacgatcgcactggggacacattcagatggaaaggagaaaatgtcgctaccactgaagttgccgaggtctttgaagccctcgatttcctgcaagaggtgaatgtgtatggcgtaactgtgccagggcacgaaggacgggcaggcatggctgcgctagtgctcagacctccccacgcactagacctgatgcagttgtatactcacgtgtccgagaacctacccccatacgccagaccgcgttttctgcggctgcaggaatcgctcgccacgacagaaacgttcaagcagcaaaaggtgcgcatggcaaacgaaggcttcgaccctagcacgctttctgatcctctctacgtgctggatcaagcagtgggcgcatacttgcccctcacaactgctcggtattccgcactgctggcaggcaacctgagaatatag

SEQ ID NO: 241370 - DNA, 2193 bp, synthetic construct
  misc_feature 1..2193: note = Description of Artificial Sequence: Synthetic coding sequence
  source 1..2193: mol_type = other DNA
atgggcgtgtgccagcggacccgggctccatggaaagagaagtctcaattggagagagcagccctcggatttcgcaagggtggatccggcatgttcgcctctgggtggaaccaaaccgtgcctatcgaagaagcaggaagtatggctgccctgctcctgcttcctctgttgttactgttaccattattgttgctgaaactgcacctttggccccaacttcgatggctccctgctgacctcgccttcgctgtgcgggctttgtgctgcaaaagggctttgagggcgagagcacttgctgccgctgcagcagacccggaggggccagagggtggatgttcactggcgtggaggcttgctgagctggcacaacaaagagctgcacacacattcttaatacacggatctaggcggttctcctacagcgaagcggaaagagagtccaaccgcgctgctagggccttcttacgtgcactcggatgggattggggcccagacggaggagactcaggtgagggttccgctggagaaggcgaaagagctgcccctggcgctggtgatgccgcagctggctccggtgccgagtttgctggtggcgatggcgctgcgaggggagggggagccgctgcacctcttagtcctggcgctacagtagccctgcttctgccagccggacctgagttcctgtggctgtggttcggcctggctaaagctgggttacggactgcgttcgtccccactgccctccggaggggcccactcttacactgtcttagaagctgtggggcaagagcacttgtactcgccccagaatttctggaatcgctggagcctgacctaccggcactccgtgctatgggtctgcacctgtgggccgcaggcccagggacccatcctgccggaatcagtgatctgctcgctgaggtatccgccgaggtggatgggcctgtccctggttatcttagtagcccccagtccattacagacacttgtctctacattttcacaagcggtacgacaggacttcctaaggctgcccgaatcagtcacttgaagattctgcagtgtcaaggcttttaccagctctgcggggtgcaccaagaggatgtgatctatctcgcgctgcccctgtaccacatgagcgggtctctcctcggaatcgtcgggtgcatgggtatcggcgcaacagtggttctgaaaagcaagttctccgcaggccagttctgggaggactgccagcagcaccgtgtgaccgtcttccaatacatcggagaactctgcaggtatcttgttaatcagccccctagtaaggctgagagaggccacaaagtgagactggcagtgggatctgggctccggcctgacacatgggagcggttcgtcagaaggtttgggccactgcaagtgctggagacctacggtttgacagaaggcaatgtagccacaatcaattataccgggcagaggggggcagtgggaagggcaagctggctctacaagcatattttcccgttcagcctgatccggtatgatgttaccactggggaaccaattcgggaccctcaggggcactgtatggccaccagcccaggagaacccggtttactcgttgcccctgtgtcacaacagtccccattcctgggatacgcgggtgggcctgaactcgcccagggaaagcttttgaaggatgtcttccgccctggcgacgttttctttaatacaggggatctgttagtttgtgacgatcaggggtttttgagattccatgatcggacaggcgacacctttcgatggaagggcgaaaacgtagcaacaactgaggtcgcggaagtctttgaggcgctggattttctgcaagaggtgaacgtttacggtgtcacagtccccggacatgaaggacgcgctgggatggccgcactcgtcttgagacctcctcatgccctggacctcatgcagctctatacacatgtgagcgaaaacctgcccccatatgctcgccctcgcttcctgaggttacaggagagtttggctacaacagagactttcaagcagcagaaggttcggatggctaacgaaggctttgacccaagcaccttgtccgatcctctctatgtcctggatcaagcagtgggtgcgtaccttccgctgacaaccgcccgatacagcgccctccttgctgggaatctgcgcatctag

SEQ ID NO: 241371 - DNA, 1932 bp, synthetic construct
  misc_feature 1..1932: note = Description of Artificial Sequence: Synthetic coding sequence
  source 1..1932: mol_type = other DNA
atgctactgggcgctagtctggttggggttctactttttagtaagctcgtgctgaagctgccctggacacaggtcgggttcagcctgctttttctgtacttgggcagtggcggatggagattcatcagagtgtttataaagaccattcgtcgagacatcttcggaggcctcgttttgttaaaagtcaaggcaaaagtgcgtcagtgtctgcaggaaaggcgtaccgttccaatcctgtttgcctccaccgtgcggagacatcctgacaaaaccgctttgatcttcgaggggaccgacacgcactggacttttaggcagttagacgagtacagcagtagcgtcgccaacttccttcaggcacgagggctagcttccggggatgtggccgctatttttatggagaataggaacgagtttgtcgggttatggttgggcatggcaaagctgggagtagaggccgcactgatcaataccaacctgcgcagagacgccctgctgcactgtcttacaaccagcagagccagggctctcgtctttggctccgaaatggcctctgccatatgcgaagtgcatgcatcactggaccccagtctgagcctgttctgttctgggtcttgggagcctggggctgtcccgccttcgacagaacacctggacccactgctgaaggatgcacccaagcatctcccatcatgccccgacaaaggattcacagataagctgttttacatttatacatcaggtaccaccggactacctaaagctgccatagtagtccattcacggtactacaggatggccgcattggtgtactacggatttcgtatgaggccaaatgacatcgtttacgactgcctgcctctgtaccactcagctgggaacatcgttggcattggccagtgtctgctgcacggcatgacagtggttattagaaaaaaattcagcgctagccgcttctgggacgattgtatcaagtataactgtactattgtccagtacatcggggagctgtgccgttacctccttaaccaacccccaagagaggccgaaaaccagcatcaagtccggatggccctcggaaatggcctccggcaatctatctggactaatttcagtagccgcttccatatccctcaggtagccgagttctacggcgctactgaatgcaactgcagcctcggcaacttcgattcacaagtgggagcctgtgggttcaatagccggattctttccttcgtctaccccatcagattggtgagagtgaatgaggataccatggagctcattcgcggacccgacggtgtctgtattccttgtcaaccaggggagcctggacagctggtgggcagaataatccagaaggatcctctcagaaggttcgatgggtacctgaaccagggcgcaaataataagaaaatcgctaaggacgtatttaaaaagggagaccaggcctacctgactggggatgttctggtcatggacgaactaggatatctctattttagggacagaacaggtgacacattcaggtggaagggcgaaaacgtctcaactaccgaagtcgagggtacattatctcgcctgcttgatatggctgatgttgctgtgtacggcgtggaggtacccggaacagaagggagagctggcatggcagcggtggctagtcctacgggaaactgcgatttggagcgcttcgctcaggtcttggagaaagagctgcctctatacgcacgaccgatttttctgcggctgctcccagagcttcataagaccgggacctacaagtttcagaagacagaactgcgcaaggaaggtttcgacccggcaatcgtgaaggaccctctcttttacctggatgcccagaaggggaggtacgtgccgttagatcaggaggcatattcaagaatacaggctggggaagaaaaactgtag

SEQ ID NO: 241372 - DNA, 714 bp, synthetic construct
  misc_feature 1..714: note = Description of Artificial Sequence: Synthetic coding sequence
  source 1..714: mol_type = other DNA
atgcctttgacactaagtaccctcctccagccaggtcgcatctggaccggaaggcgagcagcggagcctactccgggacataacgctgcctggtctctgtcaggcggtggagctgcagttttacaggccggtgccgaaactgcactggacccaggcggaattctccccgtggtgcccctgctgggcatttggcgactggccctccatccaggactgcatcaggatcatcaggcttatctgaccggggacgttttggttatggacgagctgggctatctctacttcagagaccgcaccggggatacattccggtggaaaggtgagaacgtcagtacgactgaagtggagggaacgctctcccggctcctcgacatggccgacgtggccgtctatggggtggaggtgccaggaaccgaggggagggccggaatggctgctgtcgccagtccaaccgggaactgcgatttggagagatttgctcaggttctggaaaaagaactacccctgtatgcccgacctatcttcctgcggctgctgcctgagctccataaaactggcacttacaaatttcagaaaaccgaattgagaaaggaaggctttgacccagcgatcgtgaaagacccactgttctatctggatgcccagaagggcaggtatgtgcctcttgatcaggaggcttactcccggattcaagcaggagaggaaaagctgtag

SEQ ID NO: 241373 - DNA, 2073 bp, synthetic construct
  misc_feature 1..2073: note = Description of Artificial Sequence: Synthetic coding sequence
  source 1..2073: mol_type = other DNA
atgggcgttcggcaacagctggctttactgctgttgttgctcctactgctctggggattagggcagcccgtgtggcccgtcgcagtggcactcactctccggtggctcctcggggacccaacatgttgtgtgctgcttggtctggctatgctggctcgcccttggctgggaccttgggtccctcacggattatcactggccgcagctgctctggcactgacactgttgcccgcacgcctgcccccaggactgagatggcttccagccgacgtaatcttcctggctaagatcctacatctgggcctaaagatccgaggctgcctctctcgccaaccaccagacaccttcgttgatgcgttcgaacgccgagcccgagcccaaccaggccgtgccctgcttgtttggacgggcccaggtgccggtagcgtcacttttggagagctggatgcgcgagcatgtcaggccgcttgggcgctgaaagcagaactgggagaccctgcaagtctatgcgccggagagcccaccgctttactggttttagctagccaggcggtccctgcactgtgtatgtggctaggactcgctaagttgggctgtcctaccgcttggattaatccccacggacgagggatgcctctggctcactccgtactgtcaagcggtgcgagagtgttagtggtggatcctgatctgcgagaatcattagaggaaattctcccgaaactccaggccgagaatattagatgtttctacctttcccacaccagccctacaccaggcgtgggcgctctgggagctgcactggatgcagcaccatcacatcccgtccctgcagacctccgtgccggtatcacatggcgcagtcctgcgctgtttatctacaccagtgggacgacgggcttgcccaagccagcgattctcacccacgagcgcgtcctccagatgagcaagatgttatctctctcaggcgctacagcagatgacgtggtctatactgtgctgccattgtatcatgtgatgggactggtagtcgggatcctggggtgcttagatttaggagctacctgcgtcctggccccaaaattcagtacgagctgtttctgggacgactgcagacaacatggagttacggtgatcctgtatgtgggcgagcttttaaggtacctatgcaatatccctcagcagccggaggatcgcacccacaccgtgcggctggcgatgggtaatggtctgcgggctgatgtctgggaaaccttccaacaacgctttggcccaatccgcatctgggaggtgtacggctctactgagggtaatatgggtctggtgaactacgtaggtaggtgcggagcattagggaagatgtcctgcctgctcagaatgctcagccctttcgaacttgttcagtttgatatggaggccgcagagccagtgcgagacaaccaggggttttgtatccctgtcgggctgggagaacctggcctgcttctgacaaaggtcgtctctcagcagccttttgttgggtatcgaggacctcgggaattgtccgaacgcaaattggtgagaaatgtgcggcagtcaggcgacgtttactataacaccggagatgtccttgcaatggacagagaagggtttctttactttcgcgaccgcttgggggacacgtttagatggaaaggcgagaatgtgtccacccatgaggtggaaggcgtcctgagccaggtggacttcctgcaacaagtgaacgtgtacggcgtctgcgtgcctgggtgtgagggtaaggtgggcatggccgctgtgcagctcgctcctgggcagacttttgatggagaaaaactttatcagcatgtcagagcatggttgcccgcatatgcaactccacacttcatccgtatccaggacgccatggaagtcacgtccacatttaaactgatgaaaacacgccttgttcgggagggctttaacgtgggcatcgtagtggatccacttttcgtcttagacaatcgggctcagtcattcagaccccttacggccgagatgtatcaagccgtgtgtgaaggaacctggcgattgtag

SEQ ID NO: 241374 - DNA, 1950 bp, synthetic construct
  misc_feature 1..1950: note = Description of Artificial Sequence: Synthetic coding sequence
  source 1..1950: mol_type = other DNA
atggagaatgatccaagtcgcaggcgagaatccatatcactgacccccgttgctaaggggctcgagaacatgggtgcagattttttggaatctttagaagagggtcagctaccgaggtccgatctgagcccagccgagattaggagcagctggtctgaagctgctccaaaacccttctctcgctggagaaacctgcagcccgctcttagagcacgctccttttgccgcgaacacatgcagctgttccgttggattggtacaggcttgttgtgtaccggcttatctgctttcctcctggtggcttgtcttcttgacttccagagggccctagcactgttcgtgctgacctgtgtggtcctgacctttctggggcacagactcctgaagaggctactgggacccaagcttcgacgcttcttgaagccccagggccacccgcgtctgttactgtggtttaagcgaggtttagcccttgcagctttcctgggtttagttctttggctgtcccttgacacgagtcaacgacccgagcaactggtgagcttcgctggcatctgtgtctttgtcgctctgctgttcgcgtgcagtaagcatcactgtgccgtttcctggagagcagtttcttggggcctgggcctgcagttcgtgttgggccttctggtgattaggactgaaccaggttttatcgctttcgagtggctgggcgagcagatcagaatatttctgtcatatactaaagccggatcctcatttgtgttcggagaagcgctggttaaggatgtgttcgcttttcaggtcttgccaataatagtgttcttctcctgcgtaatttccgttctgtaccatgtggggctgatgcagtgggtaatactgaagatagcttggcttatgcaagtgactatgggcaccaccgccaccgagactctaagcgtcgccggtaacatatttgtgtctcagaccgaagccccactccttataagaccatacctcgccgacatgaccctttctgaagtccacgtggtcatgaccggcggatatgcaacaattgccggttctctgctgggtgcctacatctctttcggtattgatgccacatcactcattgccgcttccgtgatggcggcaccgtgcgcgttagcactgtctaaactggtgtaccccgaggtggaagagagcaaatttcggcgagaggagggtgttaagttgacatacggcgatgctcaaaacctgatcgaagcagcctctactggcgctgccatctcagttaaggttgtcgccaacatcgctgctaatctgattgcttttttggcagtgctcgatttcatcaacgccgcactgtcttggctcggggacatggtcgacatccaggggcttagcttccagctgatttgcagctacatattgcgtcccgttgcatttttgatgggcgtggcatgggaagactgtcccgtggttgccgagctgctgggcattaaactgtttcttaatgagttcgtagcctaccaggatcttagcaaatacaaacagcggagactagccggagcagaagaatgggtgggggacaggaagcagtggatttccgtgcgagccgaagtacttacgaccttcgccctgtgtgggtttgcaaatttcagttccatcgggatcatgcttggcggtcttacctccatggtgccacaacgtaagtcagatttcagccagatagtattgcgtgccttgttcaccggcgcatgtgtgtccctggtaaatgcttgtatggccggaatcctgtacatgcccaggggggcagaggtggattgtatgagcctgctaaacactactctgagctcctccagttttgagatctaccaatgttgtagagaagcattccaatcagttaacccagaattctcgcctgaggccctggataactgttgtagattctacaatcataccatctgtgcacagtag

SEQ ID NO: 241375 - DNA, 528 bp, synthetic construct
  misc_feature 1..528: note = Description of Artificial Sequence: Synthetic coding sequence
  source 1..528: mol_type = other DNA
atggaaaatgacccaagccgcaggcgcgagagcatcagcctgacacccgtagcgaagggtctcgaaaacatgggagctgatttcttggaatctttggaagagggtcagctgcccaggtccgaccttagtccagccgaaatcaggtcatcctggagcgaggccgctcccaaaccattctcgagatggaggaatcttcagccagctctgcgggcacgcagcttttgtcgtgaacacatgcaactttttcgctggattggcactgggctgttgtgcacgggcctgagcgccttcctgttggtggcctgtttactcgattttcaacgggcacttgcgctctttgttctgacctgcgtggtgctaacttttctgggacatcggctgctgaagcgcctgctgggtcctaaactgcgcagattcctgaaaccccagggccacccacggctcctactatggttcaaaagggatccacgaccctggtccaaggaggggccaaatcagtacctccctcaaatcacatggacagtgtag

SEQ ID NO: 241376 - DNA, 1950 bp, synthetic construct
  misc_feature 1..1950: note = Description of Artificial Sequence: Synthetic coding sequence
  source 1..1950: mol_type = other DNA
atggagaacgaccccagccgtcggagggagagcatcagccttacccccgttgccaaggggctggagaatatgggtgcagactttttagagagtttggaggagggacagctgcctagatccgatctgagcccagccgagatccgcagttcatggtcagaagccgctccaaaacccttctcccggtggagaaacttacagcccgctttaagggcccgatctttctgccgcgagcatatgcagttgtttcgttggatcggaacagggcttctttgcaccggcctgagcgcctttttgctggtggcctgtctgctcgacttccaacgtgccctcgctctgttcgtgctgacctgtgtagtcctgacgtttcttggtcacagattgttgaagcgattactgggccctaagctcagacggtttctcaaaccccaagggcatcctcgcctacttctatggttcaagcggggactagccctcgctgcattcttgggattagtgctctggctgagtctggatacatcacagagaccagagcagctggtctctttcgcagggatatgtgtcttcgtcgccctgttgttcgcctgctctaagcatcactgtgcagtctcatggcgtgccgtgtcctggggactcggcctccagtttgtcctcgggctcctggtcatccggactgaacctggattcatcgcattcgaatggctgggtgaacaaatccgcatatttctgtcctacaccaaagcaggtagtagcttcgtgtttggggaggccctcgtgaaagacgttttcgcttttcaggttctaccaattattgtctttttcagttgtgtaattagcgtgctgtatcacgtgggtctgatgcagtgggtcatattgaaaatcgcctggttaatgcaggtcactatgggtactacagccaccgaaacattgtcagtggccggtaatatcttcgtgagccagaccgaagcacccctgctaattcgtccatatcttgccgatatgaccttatccgaagtgcatgtggttatgacgggcggatacgccacaatagctggctccctgttaggcgcttatatctcctttggcatagacgccacctctttgatcgcagcatctgtcatggcggctccttgcgccctagccctatcaaagctcgtttaccctgaagtcgaggagagtaaattcaggcgagaggagggtgtgaaattgacatacggcgacgctcaaaatcttattgaggcagcttcaactggagcagccatctctgtcaaggtcgttgcgaatattgctgcaaatttaatagcattcctggctgtccttgattttatcaacgcggctctgagctggttgggcgatatggtagacatccaggggcttagcttccagctgatctgttcctacattttgaggccagtggcctttctgatgggggtggcctgggaggactgtccagtggtagctgaactcctgggtatcaagctttttttgaatgagtttgtggcctaccaggacctgagcaagtacaagcagaggcggctggccggagctgaagaatgggtcggcgatcgcaaacaatggatctccgtacgggctgaggtactgactaccttcgcactttgtggattcgccaacttcagctccattggcatcatgcttggaggcctgacgagcatggtcccacaacgaaaaagtgatttcagccagatcgtgctgagggccctgttcacaggagcctgtgttagtcttgtgaacgcctgtatggctggcattctgtatatgcccagaggagcagaggtggactgtatgtctctgctcaataccactttgtcaagctcttccttcgagatttatcaatgctgccgtgaagcattccagagcgtcaatcccgagttctctcccgaggcactcgacaactgttgtagattctataatcatactatctgtgcgcaatag

SEQ ID NO: 241377 - DNA, 1632 bp, synthetic construct
  misc_feature 1..1632: note = Description of Artificial Sequence: Synthetic coding sequence
  source 1..1632: mol_type = other DNA
atggagaatgacccatcaaggcggagggagtcaatcagtctgaccccggtggctaaaggactggagaatatgggcgctgatttcctggagtccctcgaggagggacagctacctaggtctgacttgagccctgcagagatccgatcgagttggagcgaggcagcccctaaaccgttctcgcggtggcgcaatctccaacccgctttgcgagccagatccttctgtcgagagcacatgcaattatttcgctggattggcacgggactgctctgcactggcctgagcgctttcctcctggttgcctgtctcttagacttccagagagcgttggccttgttcgtcctgacctgcgttgtccttactttcctggggcacagacttctcaagcggctgctggggccaaagcttcgtcgctttctgaaaccccagggacaccctaggttactgctatggtttaaacgcggattagcgctcgcggcatttctgggactcgtcctgtggctgagcttggatacatcccaacgtccagagcagctggtgtcatttgcaggcatctgcgttttcgttgctctgctgtttgcttgcagcaagcaccactgcgcagtctcttggcgagccgtatcctggggcctaggcctgcagttcgtgctggggctactggtaatccggactgaaccaggattcattgctttcgaatggctgggagagcaaataagaatattcctcagttacaccaaagctggatcttcatttgtgtttggggaggccctcgtcaaagacgtgttcgcatttcaagttcttcctatcattgtgttcttcagctgcgtgataagtgtcttataccacgtgggtctcatgcaatgggtgatcctgaagattgcctggctcatgcaggtcaccatggggactaccgcaacagagacgctctcagttgcagggaacatttttgtcagccagactgaggcaccccttctgatcaggccttacttggctgacatgacccttagtgaggttcatgtggtgatgactggagggtacgctaccatagccggttccctgttaggggcatacatctctttcggcattgatgccacctccctgatagcggctagcgtcatggctgctccttgcgcgctcgctctgtccaaactggtctacccagaggttgaagaatccaagttccgcagggaagagggtgtcaagctaacttatggcgatgctcaaaacctgatcgaagctgctagcacgggggctgcgatctccgttaaagtagtagctaatattgcagcaaaccttattgccttcttagcagttttagatttcattaacgctgccttgtcctggctgggggacatggtggatattcaggggctaagctttcaactcatttgcagctatatcctgcggcctgttgcatttctgatgggtgtggcatgggaggactgcccagtggtggccgaattgctgggtatcaagttgttcctgaatgagtttgtcgcctatcaggatctgtctaagtacaaacagaggagacttgctggcgcagaggagtgggtgggcgaccgcaaacagtggatatctaggaggggattagccatgctgactcgcctcgtgctgaactcttggccatag

SEQ ID NO: 241378 - DNA, 1911 bp, synthetic construct
  misc_feature 1..1911: note = Description of Artificial Sequence: Synthetic coding sequence
  source 1..1911: mol_type = other DNA
atggaaaacgatccatctagacgcagggagagcattagcctcacacccgtggccaaaggcctggagaacatgggcgcagactttctcgagagcctcgaggagggtcagttacccaggagtgacctgagcccagctgagatcaggtctagctggtcggaggccgctccaaagcccttctcaagatggcggaacctccagcctgctttacgcgctcggtccttttgtcgagagcacatgcagttgttccggtggatcgggacggggttgttatgcaccggcctttctgccttcctcctagtagcttgcttactcgattttcagcgcgcactcgcactgttcgtgctcacatgcgtggttctgacatttctggggcatcggcttttgaaaagactcttaggtcccaagttaagacggttccttaagcctcagggccatccaagactgcttctgtggttcaagcggggtctggctttggctgcctttctggggctagtgttgtggttaagcctggatacatctcaaagacctgagcagttggttagcttcgccggaatctgtgtcttcgtggctctgctgttcgcttgttccaagcaccattgtgcagtgagctggcgcgctgtttcctggggtctcggcttgcagttcgtgctgggtctgctcgtgatacgtacagaaccgggttttattgcgttcgagtggttgggcgagcagatcaggatctttctgtcatacaccaaggccggatccagcttcgtgttcggcgaggcactggttaaagatgtattcgctttccaagtcctcccaatcatcgtgttcttttcctgcgtcatctccgtactatatcacgttggcctgatgcaatgggtaattctgaagattgcctggctaatgcaggtgaccatgggcaccactgctaccgaaacattaagcgtcgcgggaaatatcttcgtctctcagaccgaagccccattgttgattcgtccatatctcgctgacatgacactgtcagaagtgcacgttgtcatgacaggcggatatgctaccattgccggatcacttcttggagcctatatttcctttggaatagatgcaacaagccttatcgctgccagtgtgatggctgcaccctgtgccttggccctgtcgaaactggtataccccgaagttgaagagagcaagttcaggcgggaggagggagtgaaactgacctatggtgatgcccagaatctgatagaggccgctagtacgggagccgcaatcagtgtcaaggtcgtggcgaatatcgcagcgaatctgattgccttcttagctgttttggatttcattaacgcagcgctgagttggctcggtgacatggttgatatccagggcttatcgttccagctgatatgcagttacatccttcggccagtcgctttcctcatgggagtggcctgggaagattgtcccgttgtagccgaactgctcggcatcaagctgtttttgaatgaatttgtcgcttatcaggatctctccaagtataagcagcggcgactggctggtgctgaagagtgggtcggggaccggaaacagtggatcagtgttcgcgctgaagttctgacaacttttgctctttgtgggttcgctaatttctcttcgattggcattatgcttggcggactgaccagcatggtgcctcaacgcaaatctgatttttcccaaatcgttttaagggcactgtttaccggcgcttgtgtgagcttggtgaacgcctgcatggctggcattctttatatgccacgaggcgcagaggtggactgtatgtccctcttgaacaccacactgtctagctccagctttgagatctatcaatgctgcagagaggcgttccagcgcatatttaagtctacacccgctgaaagccaaccatag

SEQ ID NO: 241379 - DNA, 864 bp, synthetic construct
  misc_feature 1..864: note = Description of Artificial Sequence: Synthetic coding sequence
  source 1..864: mol_type = other DNA
atgcagctcttcagatggattgggacgggacttctgtgcaccgggctgagcgccttccttctagttgcctgcttgctggactttcagagggccctggctttgtttgtccttacatgtgttgtcctgacattcctgggtcaccggcttctaaaacgtttgctcgggccaaagctccgacgctttcttaaaccacagggacatcctcgactgctgctttggttcaaacgcggactggcgctggccgcattcctgggtttggtgctttggctgagcctagatactagccagcgaccggaacagctggtgtcatttgctggcatctgtgtcttcgttgccctgctgttcgcctgctccaagcatcattgcgctgtctcctggcgggctgtaagttggggtctgggtttgcaattcgtattaggcctgctggtgatccggacggaacccggattcattgcgttcgaatggcttggggaacaaatacggattttcctgagctacaccaaggcgggatcatctttcgtgtttggggaagcgctcgtaaaggacgtgtttgccttccaggtgttacccattatcgttttcttctcctgcgtgatctccgttctataccacgtgggtctgatgcaatgggtgattctcaagattgcctggctgatgcaggttacaatgggtaccaccgcaacggaaacactgtcagtagctggaaacatctttgtgtcacagacggaggctcctcttttgatccgcccatatctggccgatatgacattaagcgaagtgcacgtggtgatgaccgggggatacgctacaatcgctggtagcttactgggtgcctacatctctttcggacttgaaaagctgtag

SEQ ID NO: 241380 - DNA, 1452 bp, synthetic construct
  misc_feature 1..1452: note = Description of Artificial Sequence: Synthetic coding sequence
  source 1..1452: mol_type = other DNA
atggaaaatgatccatcaagaagaagagagtctatctccctcaccccagttgccaagggcctggaaaatatgggcgcagactttcttgaatccctggaagaagggcagctgcctaggtctgacctcagtccggcagaaattagatcttcttggagcgaggcagctcccaaaccattcagcagatggcgaaatctccaaccagccttgcgagctcggagcttttgccgtgagcacatgcagctgtttagatggataggcacaggtttgctgtgcacggggttgagcgctttcctgctggtggcctgcctactggactttcaacgtgccctggcattgtttgtgctgacctgtgtcgtactgacattcctgggccaccgcctgctaaaaaggctcctgggccctaaactaagaaggttcctcaagccccaaggccaccccaggttgctgttgtggttcaaacggggtctcgccctggctgctttcctgggcttagtgctgtggctttccctggatacaagccaacgccctgagcagctggtctcttttgcagggatttgcgtgtttgtagctctccttttcgcatgttcgaagcaccattgtgccgtgagttggcgagcagtgagttggggacttggactgcagtttgtgcttggcctactagtcattcgaaccgaaccagggttcatcgcgtttgaatggctcggcgaacagatacggatcttcctgagttacaccaaagcaggctcctcttttgtcttcggagaggccctcgtaaaagatgtttttgcatttcaggtgcttcctatcattgttttctttagctgcgtcatatccgtcctttaccacgtgggcctcatgcagtgggtgattctgaaaattgcctggctgatgcaggtgacaatgggaaccaccgcaacagaaaccctgagcgtggctggaaatatctttgttagccagaccgaggctcctttgctgatacgcccatatctcgctgatatgacgctctcagaagtccacgtggtcatgaccggcggatacgccaccatcgcgggttccctgctgggagcttacatctccttcggtgtccgcgcagaagttttgactaccttcgccctgtgcggttttgctaatttttccagcatcggcattatgctcggcggactgacaagtatggtcccacagaggaagagtgactttagccagattgtgctgagggccctgttcacgggggcttgtgtctcactggtgaatgcctgcatggcaggcattctgtacatgcccagaggagccgaggtagattgtatgtccctgctgaacacaactttgtcttcttcttctttcgagatatatcaatgctgccgtgaggctttccagagtgtgaacccggagtttagccccgaagcgctggacaactgctgcagattctacaaccataccatctgtgcacaatag

SEQ ID NO: 241381 - DNA, 1977 bp, synthetic construct
  misc_feature 1..1977: note = Description of Artificial Sequence: Synthetic coding sequence
  source 1..1977: mol_type = other DNA
atggagaaagcgagcggacggcagtctatcgccctgtctaccgttgagacaggcacagtcaatcccggactagagctaatggagaaggaggtcgaacccgagggatccaagcgaacagatgcacagggacattctttgggcgatgggctgggcccaagtacctatcagagacgcagccgctggccattttctaaagcccgatcattttgcaagactcatgcttccttgtttaagaagattctcctcgggcttctgtgtctggcctatgctgcctaccttcttgctgcttgtatcctgaattttcagagagcacttgccctgtttgttattacatgtcttgtgatattcgttttagtgcatagtttccttaaaaaactgttaggtaaaaaactgacccgctgtctgaaaccgttcgagaatagccgcttacggctctggaccaagtgggttttcgcaggggtctctctcgtaggactgattctctggttagcactggacaccgcccaaagaccagaacaactcatccccttcgctgggatatgtatgtttatccttatattattcgcctgctctaagcatcatagtgccgtctcgtggcggacagtgttctcaggacttggtctgcagtttgttttcggtatcttagttattcggactgacctgggctacactgtctttcaatggctcggagagcaggtacaaatctttttgaattatactgtagccggttcgtctttcgtcttcggagatacgctggtcaaagatgtttttgcttttcaggctctgccaataattatctttttcggatgcgtcgtatctattctttattatctcggcctggtccagtgggtagtgcaaaaggttgcttggttcctccagataaccatgggtacaacggccaccgagaccctagccgtcgcgggaaatatcttcgtcgggatgaccgaggcacctttactgatcaggccctatctcggcgacatgaccctctcagagatacatgctgtcatgaccggaggctttgcaacgataagcggcaccgtattaggagcattcattgcattcggagtggacgccagctctctcatcagcgcttctgtgatggccgcaccctgtgcgctggcctcctcaaagcttgcctacccggaagtggaagagagcaaatttaagagcgaagaaggcgtcaagctacccagggggaaagagagaaatgtgcttgaagcagctagcaatggggctgttgacgcaatcgggctggcaaccaacgtcgctgcaaacctcatagctttcctcgcagtcctcgcctttatcaatgcagccctgagttggcttggcgagctcgtggacatccaggggctgacattccaagttatttgctcgtatctgcttcgccctatggtgtttatgatgggcgtggaatggaccgactgtcccatggtagccgagatggtcgggattaagttcttcatcaatgagttcgtcgcctatcagcagttgagtcagtacaagaataaaaggcttagcggcatggaagagtggatagagggggaaaagcagtggatatcagttagagccgaaataatcacgaccttctccctttgtggcttcgccaacctcagcagcattggaatcacactggggggactcaccagcatcgtgccccaccgtaaaagcgacttgtcaaaggtggtggtgcgcgctcttttcaccggcgcatgcgtctccctgatttcagcttgcatggcaggaatcctgtatgttcctaggggggcagaagctgactgcgtctcattccctaatacatctttcaccaatcgtacctatgaaacatatatgtgttgcagagggctttttcagagcacgtccctgaatgggaccaaccctccctcattttcgggtccatgggaggacaaagaattttcagcgatggccttgaccaattgttgcggtttttacaataatactgtctgtgcctag

SEQ ID NO: 241382 - DNA, 2076 bp, synthetic construct
  misc_feature 1..2076: note = Description of Artificial Sequence: Synthetic coding sequence
  source 1..2076: mol_type = other DNA
atggagctgcgttctaccgccgcacccagagctgaaggctactctaacgtcggctttcagaacgaggaaaattttttagaaaatgagaatactagcggcaacaattctattcgttccagagcagtgcaaagccgggagcacaccaatacaaagcaggatgaggaacaggtcactgtcgagcaggactcacccagaaacagagagcatatggaagacgacgacgaggagatgcagcagaaaggctgcctggagcggagatacgacaccgtttgtgggttctgccggaagcacaaaactacactgaggcatatcatatggggtatcctactagcagggtatctggtgatggtaatatccgcctgcgtcctgaactttcaccgggctctgcctctttttgtaataaccgtggccgcaatcttctttgtggtttgggatcatctcatggcaaaatacgagcacaggatcgacgaaatgctgtcacctggacggagattgttgaactcacactggttttggctgaaatgggtcatatggtcgtctctagtactcgcagtgatcttttggcttgcttttgatacagcaaaattagggcagcaacagcttgtgagcttcggtggcctgatcatgtatattgtgcttctgttcttgttcagcaaataccccaccagggtatattggaggccggtgctgtggggcattggcctgcaatttctgctcggtctcctcatccttcggacggaccctggttttattgcttttgactggttaggacgacaggttcagacctttcttgagtacactgacgcaggcgcatccttcgtttttggggagaagtacaaggatcacttctttgcatttaaggtccttcccatcgtggtattttttagcacagtaatgtctatgctctactatctggggctcatgcagtggataattagaaaagtggggtggatcatgctcgtgacgaccggtagttccccaattgaaagtgtcgtggcatctggcaacatcttcgttggccagacggaatcgccgctgcttgttcggccatatctgccttacatcacgaagagtgagttgcatgcaataatgaccgccggattctcgacaatcgccggttcggtgctcggtgcttatatatcgttcggggttccatcctctcacctgctaacggctagtgtcatgtccgctcctgcatcattggctgctgctaaactgttttggccagagactgagaagcccaaaatcaccctgaagaacgcgatgaagatggagagcggggactcagggaaccttctggaagctgctacacagggggctagctcctcaataagtctagtggctaacattgccgtcaatcttattgcattcctggcactgttaagctttatgaacagcgctttatcttggtttgggaacatgtttgattaccctcagctgtcttttgaactcatctgtagctacatcttcatgcctttttcgttcatgatgggcgtggaatggcaagactctttcatggtagcacggttgattggatacaagacctttttcaacgaattcgtggcttacgagcatctcagtaaatggattcatctccgcaaagagggaggtcccaaattcgtgaacggagtgcagcaatatatcagcattaggtcagagattattgcaacatacgcactgtgtggattcgctaatatcggctcattggggatcgtaatcgggggtttaacaagtatggcccctagtaggaaaagagacatcgcttcgggagccgtgcgcgcacttatcgcagggacagtggcctgcttcatgaccgcttgcattgcaggaatactttcttcaaccccggtcgacatcaattgccatcacgtcttggaaaatgctttcaacagcactttccctgggaataccacaaaggtgattgcttgttgccagtccctcctgagttccactgtagctaaggggcctggagaagtgattcccggtgggaaccactctctgtatagtttaaaaggttgttgcaccctgcttaacccttctaccttcaactgcaatggcatcagtaacacgttctag

SEQ ID NO: 241383 - DNA, 1869 bp, synthetic construct
  misc_feature 1..1869: note = Description of Artificial Sequence: Synthetic coding sequence
  source 1..1869: mol_type = other DNA
atggaagatgatgatgaggaaatgcagcaaaagggatgtctggaacgtagatacgacacggtttgtggtttctgccgaaaacataagaccacacttaggcatatcatttggggaatcctcttggcagggtacttggttatggtcattagcgcctgcgtcttaaactttcacagggccttgcccttgttcgttattaccgtcgcagccattttctttgtggtatgggatcacctgatggcaaagtatgagcaccgcatcgatgaaatgttgtctcctggcagaaggctgctgaatagccattggttctggctgaagtgggtcatttggagctctctcgtgcttgcagtgatcttttggctcgcctttgacaccgccaaattgggacaacaacagctggtgagtttcggtggacttattatgtatatcgtccttttgttcctgttcagcaaatacccaaccagagtgtactggcgtcctgtcttgtgggggattgggttacagtttttgctcgggctactaatactcagaaccgaccccggattcatcgcatttgattggcttgggaggcaggtccaaacctttcttgagtacactgacgccggagcgtcttttgtgtttggagaaaagtataaggaccacttttttgcgttcaaggtcctgcctattgttgtgtttttctccactgtgatgtcaatgctgtactatctgggcctcatgcagtggataattcgcaaagtggggtggatcatgctagtgaccactgggagctcccccatcgaaagcgtagttgcatctggcaatattttcgtgggtcagaccgagagccctctattagtgcgcccttacctaccgtacataacgaagtctgagctgcacgcaatcatgaccgctggattcagcactattgccggttctgtcctaggagcttacatcagtttcggtgtaccaagtagtcaccttttaaccgcgtcggtgatgagcgcaccggcttcactggccgcagccaaactgttctggcccgaaactgagaaacccaaaataacactcaaaaacgccatgaaaatggaatctggcgacagtggaaacctcttggaggccgcaacacagggcgcatctagttccattagcctggtggcaaatattgccgtgaatctgatcgcctttctcgcacttttgagttttatgaacagcgcgctatcatggtttgggaatatgttcgattacccacagctgagtttcgagctaatttgcagttacatctttatgccatttagtttcatgatgggcgtggaatggcaggactcttttatggtagctagactcatcggctataagactttcttcaatgagtttgtggcatacgaacatttaagcaagtggattcatttaaggaaggagggtgggccaaaattcgtgaacggtgtccagcaatatattagtatcaggtcggaaatcattgcgacttacgcgttgtgcggttttgcgaatataggcagcctcgggatagtgattggcggtctcacgtctatggcgccatcacgaaaaagggacatcgcgagtggggcagttcgggcattgattgccggaactgtggcctgctttatgaccgcatgtatcgctggaatcctgtcatccacacccgtggatattaattgtcaccatgttctcgaaaacgccttcaattctacattcccgggtaacacgactaaggtaatcgcctgctgccagtcactcctgtccagcacagtggctaagggccctggagaagtcatccctggcggtaaccattccctgtactccctgaagggatgctgtacactgctgaacccttctaccttcaattgtaatggcatcagcaataccttctag

SEQ ID NO: 241384 - DNA, 1608 bp, synthetic construct
  misc_feature 1..1608: note = Description of Artificial Sequence: Synthetic coding sequence
  source 1..1608: mol_type = other DNA
atgaggcgagaaagaacacggggtccacaggcatgggagttccctagtccaactaagtccgggtgtagcctacagagtctcagtagagatctgcgggaactgagggagggggaaaaacctgaggatcaggcggagactgaggagtcatggcaggggctcgcccgaaaaacaccaggaaaagcctgtgccccagaggggggaagctgccagccaggaaaaaccgagaacaccatcactatgactacgagtcaccagccccaggacaggtataaggcggtgtggctgattttttttatgctgggcctgggcaccctgctgccttggaacttttttatgacagctacgcaatatttcaccaataggctggatatgtcacagaacgtctctttggtgactgcagaactcagtaaagatgcacaggcctcagcggcaccagccgcacccctgccagaacggaacagtctgtcagccattttcaataacgtcatgacactatgtgcaatgctgcccctgttgctgttcacttatcttaattcatttctccatcagaggattcctcagtctgtccggattcttggcagcctggtggcgatcctattagtgtttctgatcacagctatccttgttaaggtgcagctcgatgcccttcccttttttgtgatcacgatgattaaaattgtcctcattaacagctttggtgcaatattacagggctccctctttggacttgccggacttttacctgcaagttacacagcgcctatcatgagcggtcaaggtctggcaggattcttcgcatcggtggccatgatttgcgccattgctagcggatctgaactcagcgagtccgcgttcggctactttataacggcttgcgccgttattatcctgactatcatatgttatctcggcttacccaggttggagttctatcgctattatcaacagctgaagctggaaggcccaggcgagcaggagactaaactcgacttgatcagcaaaggagaggaaccccgagcgggtaaggaggagtccggagtttccgtgagtaattctcagcctaccaatgagagccatagtatcaaagcgattttaaagaatattagcgtgttagcgttttctgtctgtttcatattcaccataaccattggaatgtttcctgcagtcacagtggaggtaaagtcttctattgctgggtcctctacctgggaacgctactttatccccgtgtcttgttttctgacattcaacattttcgactggctggggagatctcttaccgccgtattcatgtggccaggtaaagacagcagatggttaccaagcctggtcctcgctagactggtgttcgttcctttgcttttgctctgtaatatcaagcccaggcgctacctgaccgtggttttcgagcatgatgcctggtttatctttttcatggcagctttcgcattttccaacggctatctcgcgagtctatgcatgtgttttggccctaagaaagtcaagcccgcagaggctgaaacggcgggtgccatcatggccttcttcctatgcctcgggctagccttaggagcagtgttctcgtttcttttccgtgcaattgtgtag

SEQ ID NO: 241385 - DNA, 1371 bp, synthetic construct
  misc_feature 1..1371: note = Description of Artificial Sequence: Synthetic coding sequence
  source 1..1371: mol_type = other DNA
atgaccacgtctcaccagccccaggacagatataaagctgtgtggcttatcttttttatgcttggcctgggtaccctgttgccttggaatttcttcatgaccgcaacacagtacttcaccaataggctggacatgagccaaaatgtcagcttggtgaccgccgaactgtccaaagacgcacaggcttcagccgctcccgcagccccattgcccgagcgtaactcactgtctgccattttcaacaacgtgatgaccctctgtgccatgctgccccttctgctgttcacttatttaaacagtttcttgcaccaacgtatcccacaatccgttaggatactgggtagcctcgtggcgatcctgctggtgtttcttatcactgccattcttgtgaaagtgcagcttgacgctcttccattctttgtaattaccatgataaagatagtcttgatcaacagcttcggtgctatcctgcaaggatctctgtttgggctggcaggcctgctgcccgcatcatatactgccccaataatgtctggccagggcctcgccggttttttcgcctccgtcgcaatgatctgtgcgattgcctcaggctccgaactgagcgagagcgcctttggttactttatcactgcgtgcgcagtgattatactgaccattatatgctatttaggcctgccacgattagaattctatcggtattaccagcagctaaaactcgaaggcccaggtgaacaggagactaaactggacctgatctccaaaggcgaagagccgagggccggtaaagaggaaagcggagtgtctgttagcaatagccagccaactaacgaatctcatagtataaaggccattctcaagaatatcagcgtcctggcgtttagtgtatgcttcatcttcaccattactataggtatgttccccgcagttaccgtggaagtgaaatcctcaattgccggttccagtacttgggagcggtacttcatcccagtttcatgcttcctgacatttaacatattcgattggctgggccgaagcttgactgcagtgtttatgtggccagggaaagatagccgatggctccccagtctcgtgttagcaaggctcgtgtttgtgccactgctgctgctctgcaatataaagcctcgacgataccttacagtggtgttcgaacatgatgcctggtttatcttttttatggctgcctttgctttttccaacggctatctggcttctttatgcatgtgtttcggcccaaaaaaggtcaagcccgcagaagccgagaccgctggggcaattatggcgttctttctatgtctcggcctggcactcggtgcggtgttctccttcctctttagggccatcgtgtag

SEQ ID NO: 241386 - DNA, 1371 bp, synthetic construct
  misc_feature 1..1371: note = Description of Artificial Sequence: Synthetic coding sequence
  source 1..1371: mol_type = other DNA
atgacaacaagccaccagcctcaggatcggtataaggctgtgtggcttattttcttcatgcttggacttggaaccctgctgccttggaatttttttatgactgcgacacaatacttcactaatcggctggacatgtcccagaatgtaagtttggtaacagcagagctgtcaaaagacgcgcaggcctcagccgcacccgcagcaccgctccccgagcggaattccctcagcgccatctttaataatgtgatgaccttatgcgctatgctgcctcttttgctgttcacctacctgaatagcttcctgcaccaacgcatcccccagagcgtcagaatcctgggctcattagtcgccattttgttggtcttcctgatcactgccatcctcgtgaaggtacagctggacgcacttccgttctttgtgatcactatgattaagatcgtgcttattaacagtttcggcgcaatcctgcagggaagcttatttggactggcaggactgttgcctgcctcttacaccgctccaattatgtcagggcaaggcttggctggtttcttcgcctccgtggcaatgatttgcgcgatcgccagcggatccgaactatccgaatccgccttcggctacttcatcacggcctgcgctgtaattatcctgacaattatttgttatctcggacttcctaggttagagttctaccgctattatcaacagctaaagcttgagggcccaggagagcaggagaccaagctggatttgatcagtaagggagaggaacctagggctggtaaagaagagtctggtgtgagtgtttccaactctcagcccaccaatgagagtcattcaatcaaggctattttgaaaaatatctcagtgctggccttttcagtctgtttcatcttcactatcactatcgggatgtttcccgcagtcaccgtagaggtcaagagcagcattgctgggagcagtacatgggagcgctactttattcccgtctcatgttttcttaccttcaacatttttgactggcttggtcggtccctgacagctgtattcatgtggccaggaaaggatagtaggtggctgccctctctggtgctggcacggttggtctttgtacctctgttgctgctctgcaatatcaagccccgacgatatcttacagtcgtattcgaacatgacgcttggtttatttttttcatggcagcattcgccttcagcaatggctatctcgcatccctctgtatgtgttttgggcctaagaaggtgaaacctgccgaagccgagactgccggtgcgattatggcattctttttgtgccttggtttggcacttggtgcagtattcagctttctgttccgggcaatagtgtag

SEQ ID NO: 241387 - DNA, 1371 bp, synthetic construct
  misc_feature 1..1371: note = Description of Artificial Sequence: Synthetic coding sequence
  source 1..1371: mol_type = other DNA
atgacaacctctcatcaacctcaggaccgatataaggcagtctggctgattttcttcatgctggggctcgggactctgctcccttggaacttcttcatgaccgccacccaatactttactaacaggctggatatgtcccagaacgtgtccctggtcacggcagagttaagtaaagatgctcaggcaagcgctgcccctgcagccccactaccagagcgcaacagcctttctgcgattttcaataatgtgatgacactttgcgcgatgctcccgctgctcctgttcacctatctgaactcattcctgcaccagaggatccctcagtcagtaaggatcttgggcagcttagtagcaatcctgctggtatttctcatcaccgctatcttggtcaaggtgcagctggacgccctcccctttttcgtgatcacgatgattaagatagttttaatcaacagcttcggtgcaatacttcagggtagcctcttcggcctggccggtctcctgccagctagctacaccgcacccatcatgtcagggcaaggtctggccggattctttgccagcgtagctatgatctgtgccattgcgtctggatctgaactgtcagagagcgcgttcgggtattttatcacagcttgcgcagtgattattctgacgatcatatgttacttgggactgccacgcctggaattttataggtactatcagcaattaaagctggagggtcccggagaacaggaaactaaactcgatctgattagcaaaggcgaagaaccaagagccggaaaggaggagagcggagtgtctgtatctaattctcaacctaccaacgaaagtcattctatcaaggccatcctcaagaacatttctgtcctcgcctttagcgtgtgttttatcttcaccataactattgggatgtttcccgctgtcaccgttgaggtcaagtcttccatcgccggaagctccacctgggagcgatattttattccggtaagttgctttctcacattcaatatattcgactggttgggccgtagtctgaccgccgtgttcatgtggcccggtaaggacagccggtggctcccttctcttgtactggccagattggtgttcgtgcctctgctgctgctgtgtaatatcaagccacgcagatacctgactgtggtctttgagcacgacgcctggtttatattctttatggccgctttcgctttctcaaacgggtaccttgcatctctctgcatgtgtttcggtcctaagaaagtgaaaccagctgaagctgagacagcgggagctattatggccttctttctatgcctcggactggcactcggggctgtgttcagtttcctttttcgtgccatcgtgtag

SEQ ID NO: 241388 - DNA, 1371 bp, synthetic construct
  misc_feature 1..1371: note = Description of Artificial Sequence: Synthetic coding sequence
  source 1..1371: mol_type = other DNA
atgacgacatcccaccaaccgcaggaccgctacaaagctgtatggctaatctttttcatgctgggtctggggaccttgcttccatggaatttcttcatgacggcgacccaatacttcacaaatcgtctcgacatgtcacagaacgtttcactcgtcacggctgaacttagtaaagatgcgcaggccagcgccgcacctgctgcacccttgccggagaggaactcattgagtgctatcttcaacaacgtgatgacgctgtgtgccatgttgcccctgctactatttacctatctcaacagtttcctccaccagagaatcccccagtccgtgaggatcttgggaagcctggtggccattttgctcgtgtttctgatcaccgctattctggtgaaagtgcagctggatgcactcccatttttcgtgatcaccatgattaagatcgtgcttattaattctttcggtgcgatcctccaggggtctctgtttggactggctggacttctgccagcctcttacacagcaccaattatgtccggccagggcttagccggttttttcgcctccgtagccatgatctgtgccattgcaagtggctccgaactatcggagtcagcctttggatattttattacggcctgtgccgtcataattctaactatcatctgctaccttggtctccccagactggagttctaccgttattaccagcaactgaagcttgagggccctggtgagcaagagacgaagctggatttgatctccaagggagaagagccccgagccggaaaagaggaatctggggtgtcggtgagcaatagtcagcctacgaacgaaagtcacagtattaaggccatactgaagaacatctctgtcctggcctttagcgtctgtttcatttttaccattacaataggcatgtttcccgctgtgacagtcgaagtgaaaagctcaatcgctgggtcgtccacctgggaacgctatttcatccccgtgagctgtttcctgacctttaacattttcgactggctgggacgatcattaacagccgtcttcatgtggccaggaaaggacagtaggtggctgcccagccttgtgcttgcaagactggtttttgtacccctgctgcttctttgtaatatcaagcctaggaggtatcttacagtcgtttttgagcacgatgcatggttcatctttttcatggccgctttcgccttcagcaatgggtacctcgcctctctgtgcatgtgttttggtcctaaaaaggttaagcccgctgaggctgagacggccggtgctatcatggcgttcttcctgtgtttgggattagcccttggtgccgtctttagctttctgtttagagccatagtttag

SEQ ID NO: 241389 - DNA, 1371 bp, synthetic construct
  misc_feature 1..1371: note = Description of Artificial Sequence: Synthetic coding sequence
  source 1..1371: mol_type = other DNA
atgaccaccagccaccagcctcaagaccggtacaaagctgtgtggctgatctttttcatgcttggacttggtactctgcttccctggaactttttcatgaccgccacccagtacttcactaataggttagatatgagccagaatgtgagcctggtgacggcggaactgtccaaggacgcacaggcatccgccgcacctgcagcgcctctgcctgagagaaactcactgtccgccatctttaacaacgtgatgaccctctgtgctatgctgcccttactgttgttcacatacctaaactctttcctccaccaacggattccccagagtgtccgcatcctggggtcgttagtggctattctcctggtcttcctgattaccgctatactcgttaaagttcagcttgacgcgctcccatttttcgtcataaccatgatcaagattgtgctgattaattcttttggggctattctccagggtagcttattcggactagccggtctgttgcccgcatcttataccgcacccatcatgtctggacaaggtctcgccggatttttcgctagcgtagccatgatttgtgccatagcatcaggctccgaactcagcgagtcagccttcgggtacttcataactgcctgtgcagtgattatcctgactatcatctgctatctgggcttgcccaggctggagttctatcggtattaccagcagttgaaactcgaagggccaggggagcaggaaaccaaattggaccttatctccaagggtgaagaaccaagggccggaaaggaggaatcgggggtctctgtgtcaaattctcagccaactaatgagtcacattccataaaagcaatactcaaaaatatcagtgtgctcgccttttcagtgtgttttatcttcaccattaccatcggcatgttccccgctgtgactgtcgaggtgaaaagctccatagcaggctcaagtacctgggagcggtattttatccccgtgtcttgtttcttgacatttaacatcttcgactggctcggccgatcacttacagccgtgtttatgtggcccggtaaagacagccgctggctcccatctctcgtccttgctcgccttgtttttgttcccctgttgctgctctgcaatatcaaaccacgtagatatttaacagtggtcttcgaacacgatgcctggttcattttcttcatggcggcatttgctttttcgaacggttatttagcctccctgtgcatgtgtttcggccctaagaaggtaaagcccgcagaggccgagaccgccggagccattatggccttttttctctgtctcggtctggctctgggcgcagtcttcagcttcctctttagagctatagtgtag

SEQ ID NO: 241390 - DNA, 1371 bp, synthetic construct
  misc_feature 1..1371: note = Description of Artificial Sequence: Synthetic coding sequence
  source 1..1371: mol_type = other DNA
atgacaacttcccaccaacctcaggacagatacaaggcagtttggctgatcttttttatgctcggtctgggtaccctgcttccatggaacttcttcatgaccgccactcagtacttcacaaatcgactcgacatgtcacagaacgttagtttggtgactgcagagctgagtaaagatgctcaggcatcagcagccccagctgccccattgccagaacggaattccctgagcgccattttcaacaacgtaatgacactttgtgcgatgctgcccttactcctgtttacatacctgaattcgttcctgcaccagcgtatcccccagagtgtcagaatattaggatccctcgtggccatactgctcgttttcctgatcactgctattctggtgaaggtgcaactggacgcgctacccttttttgtgatcaccatgataaagatcgtcctgatcaacagcttcggtgccatcctccaaggcagcctgttcggactggccggactgctcccagctagttacactgcacctatcatgagcggacagggtctggctggctttttcgcctctgtggccatgatatgtgctatcgcctcagggtccgagctgtctgagagtgcttttggttattttatcactgcttgtgctgtgattattctgaccattatttgttatcttggcctacctcggctggagttctaccggtattaccagcaactgaaactggaaggtcctggtgagcaggagacgaaactggaccttatcagcaagggtgaagaacccagagcaggcaaggaggagtctggcgtctcagttagcaactcgcaacccacaaacgaaagccattccattaaagccattttaaaaaatatctccgtgctggcattcagtgtgtgttttatctttacaattaccattggcatgtttcctgcagtcactgtcgaggtgaagtcctcaatcgctggctccagtacttgggagcggtattttatacctgtatcgtgctttctgaccttcaacatatttgattggttagggcgatcacttaccgccgtgtttatgtggcctggcaaggacagccgttggctcccgtccctggtgctggccaggctagtgttcgtcccactcctgctgttgtgtaatatcaagcccagaaggtacttaacagtcgtattcgaacatgacgcatggtttatattcttcatggctgccttcgccttcagcaacgggtatcttgcaagcctgtgtatgtgctttggccctaagaaagtaaagcccgctgaagcagagacagctggagccataatggccttctttttatgtttgggcctcgctttgggggcagttttttcttttttatttcgggcaattgtgtag

SEQ ID NO: 241391 - DNA, 1371 bp, synthetic construct
  misc_feature 1..1371: note = Description of Artificial Sequence: Synthetic coding sequence
  source 1..1371: mol_type = other DNA
atgacgacctcccaccagcctcaggacaggtataaggccgtttggctgatattttttatgcttggactgggaacgctcttaccatggaacttctttatgacagcaactcagtatttcactaataggttggatatgagccagaacgtgtcactggtcaccgctgaactgtctaaggacgcccaggccagcgctgctccagccgcaccactacctgaaagaaactctttgagcgccatctttaataacgtgatgacactttgtgcaatgctccccctgctgctgtttacctacctgaatagcttcctgcaccagcgcataccccaatccgtcagaatcctcggcagtctggtggcaatcctcttagtgtttctgattaccgccatcctggtgaaagtccagttggatgccttacccttcttcgtgattacaatgatcaagattgtgctgatcaattcgttcggcgcaatacttcaaggtagcctattcggcctggccggattactcccggctagttatactgccccaatcatgagtggccaaggtctcgcgggatttttcgcctcagtggccatgatatgtgcaatagcaagcgggagtgagctgtcagagtccgcattcgggtatttcatcactgcatgcgcagtgatcatacttactattatttgttatctgggtcttccacgcttggagttctataggtattatcagcaactgaaactcgaggggccaggtgagcaagagactaagctagacctcatatctaagggtgaggaaccacgagctgggaaggaagagtcaggagtcagtgtctctaatagtcaaccaactaatgagagccacagcattaaggctatcttgaagaacataagcgtgctggccttttcagtctgttttatcttcacaattacgattggcatgttcccagcggttacggtagaagtgaaatcaagcatcgccggaagttccacttgggagaggtactttattccagtctcctgttttctaacattcaacatctttgattggctgggcaggagcctcacagcggttttcatgtggcctggcaaggactccagatggctgccaagcctggtcctggcaagactggtctttgtgcccctcctcctcctgtgcaacatcaagccgcgacggtacctgaccgttgtgttcgagcatgatgcctggtttatatttttcatggctgctttcgccttcagcaatggatatctcgcctccctctgcatgtgcttcggcccaaaaaaggtcaaacccgctgaagctgagacggccggagccataatggcctttttcctttgcttgggcctggccttaggtgctgtcttttccttcctgttcagggcaatcgtctag

SEQ ID NO: 241392 - DNA, 1371 bp, synthetic construct
  misc_feature 1..1371: note = Description of Artificial Sequence: Synthetic coding sequence
  source 1..1371: mol_type = other DNA
atgaccacgtctcatcagccacaagaccggtataaagctgtgtggctgatcttcttcatgctgggactgggaaccctcctaccctggaattttttcatgactgcgactcagtatttcaccaatcgcctggacatgagccagaacgtgagcttggtgactgcagaactgagcaaggatgcccaggcgtcagccgctccagctgctcctctgccggaacgcaactcactgtcagccatctttaataacgtcatgaccctgtgcgctatgctgcccctgctgctctttacgtatctgaattcttttttgcatcagcgtataccccagagcgtacgaattctcggcagcctggtcgcaatattgctggtctttctgattacagctatcctagttaaggtacagttagatgctctgcccttctttgtgatcacaatgatcaaaatagtgctgatcaactctttcggtgctatacttcaggggtcactgtttggcctcgcgggactgctgcctgctagctacactgccccaattatgtcaggccagggtctggccggtttctttgccagcgtggcaatgatctgtgccatagcttccgggagtgagctgagtgagtccgcgttcggatattttataaccgcgtgcgccgtgatcatcctgactatcatttgttacctgggcctgccaaggcttgaattttataggtactatcagcagctgaagttggagggcccaggcgaacaggaaactaaactcgacttaatatcaaagggggaggagcctcgagccggtaaagaggagtccggcgtttcagtatcaaatagccagcccaccaatgagtcccactccatcaaagccatcctgaagaatataagcgttcttgcattctccgtctgcttcattttcaccatcaccatcgggatgtttcccgctgtcactgtggaagtgaagtcctcaattgcaggatcgagtacctgggaacgttatttcatccccgttagttgtttcctcacctttaacatattcgactggcttggcaggtctcttaccgccgtgtttatgtggcccggaaaggactcacggtggctcccttccctagtcctcgcacggcttgtattcgtgccactgctgctgctctgcaacattaagcccagaagatatctgaccgtagtgtttgaacacgacgcgtggtttatttttttcatggccgcttttgcctttagtaacgggtacctcgcttcactgtgcatgtgtttcggacccaagaaagtaaaacccgctgaggcggagacggccggtgccattatggctttcttcctctgcttggggctggccctgggggctgtgttcagcttcctgttccgtgcaatcgtgtag

SEQ ID NO: 241393 - DNA, 1371 bp, synthetic construct
  misc_feature 1..1371: note = Description of Artificial Sequence: Synthetic coding sequence
  source 1..1371: mol_type = other DNA
atgactacctcgcaccagccgcaagatagatacaaagcagtctggctgatcttttttatgctaggcctgggaaccctcctcccctggaatttctttatgacagctacgcagtactttaccaatagacttgatatgtcacagaatgtgtccttggtgaccgctgagctttctaaagatgcccaggcctctgcggctcccgctgcacccctgccagagcgcaattccctctccgccattttcaacaacgtcatgacactttgcgctatgctgcctctgctcctgttcacttatttgaatagctttctgcatcagcggatcccccaatccgtccggatcctgggcagcctggttgctattttattggtgtttctaatcactgctatcctggtaaaggtacagcttgatgctctgccatttttcgtgatcacgatgatcaagattgtgctcatcaactcattcggggctatcctgcaggggagtttattcggtttagcgggactgttgcccgcatcctacacagccccaattatgtctgggcaggggttggccggattttttgcgtccgtggctatgatttgcgcaattgcctcagggagcgagctatcagagtcagcgtttggctacttcatcaccgcctgtgccgttatcattttgactattatctgctacttgggcctccccagactggaattttacaggtattatcagcagcttaagttagagggtccgggagaacaggagactaagctggatctgatttctaaaggagaggaaccaagggccggtaaagaggagtcaggggtcagtgtgtcaaattcacaacccacaaatgagtcacactctatcaaagcgatacttaagaacatcagtgtgctcgcgttctcagtttgttttatctttactatcacaatcggaatgtttcctgctgtcactgtggaggtgaaaagctctatcgccggttccagtacatgggaaagatactttatccctgtttcttgctttctaaccttcaatatttttgattggctggggagatccctgactgctgtctttatgtggcccggaaaggactcaagatggttacctagtctcgtcctagcgaggttagtctttgtgccactcttgctactatgcaatatcaaaccacggaggtatttgaccgtcgtcttcgagcacgatgcatggttcatctttttcatggctgcctttgcgttctctaatggctacctggcgagtctgtgcatgtgcttcggaccaaagaaagtcaaaccagcagaagcggagaccgctggcgctatcatggcattctttctgtgcttggggctcgctctgggcgcagttttctctttccttttcagagctattgtgtag

SEQ ID NO: 241394 - DNA, 510 bp, synthetic construct
  misc_feature 1..510: note = Description of Artificial Sequence: Synthetic coding sequence
  source 1..510: mol_type = other DNA
atgagaagagaaaggacccgtggccctcaggcctgggaattcccaagtcctactaagagcggttgctcactgcagagcctcagccgatacaaggcggtgtggctgatcttttttatgctgggactcggcacgctcctcccctggaatttttttatgactgccacacagtatttcaccaaccggctggacatgtcccagaatgtttctttagtcaccgcagagcttagcaaggatgcgcaggcctctgcggctcccgctgcacccctgcccgaacgcaatagcctctctgctatattcaacaatgtgatgactctctgcgccatgctgcccctgctattgtttacttacttgaactctttcctacaccaaaggatcccccagagtgtgcggatactcggctccctagtggctattctcctggtgtttcttattactgcaatcctggtcaaagtacagctggacgctcttccttttttcgtgattactatgattaagattgtgctgatatag

SEQ ID NO: 241395 - DNA, 1371 bp, synthetic construct
  misc_feature 1..1371: note = Description of Artificial Sequence: Synthetic coding sequence
  source 1..1371: mol_type = other DNA
atggccagaggcgatgccccacgggatagctaccatctggtcggtattagtttctttatcttaggccttggtactctgctgccatggaatttcttcatcacggccataccttacttccaggctagacttgctggagcaggcaactctactgccaggatcctgtccacgaaccataccggacctgaagatgcatttaatttcaataattgggtgaccttactgagccaattgcctctgctgctgtttacactgcttaacagttttctttatcagtgcgttcctgaaacagttcgtatccttgggtcactactggctattctccttctctttgccttgaccgcagcccttgtgaaggtggacatgagccctggacccttcttctctattactatggcatccgtctgctttatcaattctttttctgcagtgctccaggggagcctctttgggcaacttggtacgatgccgtctacctactccacgctcttcctgtctggacagggcctggccggaatctttgccgctttggcgatgctgctgagtatggccagcggggttgatgccgaaacttctgccctggggtattttatcactccatgcgtcggcatcttgatgagcattgtctgctacctgagccttccccaccttaagtttgccagatattacttagccaacaaaagctcacaggcacaggcccaggagcttgaaaccaaagcggagctcctccagagcgacgagaacggaatccccagttctccccaaaaggtggctctgaccctagatctggacctcgagaaggagccagagagtgagccagatgagccgcaaaagcccggaaagcccagtgtgttcactgtcttccagaaaatatggctgaccgccttgtgcctggttttggtcttcaccgtcaccttatccgtgttcccagcaattactgccatggtgacaagctcaacgagtcctggtaaatggtctcagttcttcaatcctatttgttgtttcctcctcttcaacatcatggactggctgggcaggagcctaacgagctattttctgtggcctgacgaggatagtcggctcctgcccctcctggtatgtctgcgtttccttttcgtcccgcttttcatgctatgtcacgttccacagcggtcacgcttgccaatcctgtttccccaggatgcttacttcatcactttcatgctcctttttgctgtatctaacggctacctcgtcagcctgactatgtgcctagcacccaggcaggtgctgccacatgaaagagaggtggctggtgccctcatgacgttcttcctcgctctggggctatcgtgcggagccagtctctcgtttctctttaaagcattgctgtag

SEQ ID NO: 241396 - DNA, 1371 bp, synthetic construct
  misc_feature 1..1371: note = Description of Artificial Sequence: Synthetic coding sequence
  source 1..1371: mol_type = other DNA
atggccagaggcgacgctccacgggattcctaccacctggtgggcatctctttctttatcctcgggctcggcaccctccttccttggaattttttcataacagccatcccgtattttcaggctaggttagctggagcaggaaattctaccgccagaatcctctctaccaaccacactggccctgaagatgcttttaatttcaataactgggtgactctactatcacagctgccccttctgctgttcaccctgctgaatagttttctgtaccaatgcgtccctgaaactgtacggattcttggatcactcctggctattcttctgcttttcgcactgacagccgcattagttaaagttgacatgtcacctgggccttttttttctattacaatggcatccgtgtgtttcattaattccttcagcgcagtgttgcaaggctcactcttcgggcagctaggcacgatgccttcgacctattctaccctgtttctcagtggtcaggggctcgcaggtatcttcgccgctctggccatgctgctcagtatggcctccggagtggatgccgagacaagtgccctggggtacttcatcactccatgcgtgggtatccttatgtcaattgtgtgctacctcagcctcccccacctgaagtttgccaggtattacttagccaataagtcctcccaagcacaggctcaggagcttgaaaccaaggccgaactgttgcagtcagacgagaatgggattcccagctcaccgcagaaagtggcactgacactcgacttggacctggaaaaagagcccgagagtgagccagacgagcctcagaagcctggcaagccatcagtcttcacagtgtttcagaaaatctggctaacagccctgtgcttagtcctggtgttcaccgtaacactgtccgtgtttccagccatcaccgcaatggtgaccagcagcaccagcccgggaaaatggagccaattcttcaacccaatttgctgttttctgctgtttaacataatggattggctcgggcgtagcctgacttcatacttcctatggcctgatgaggacagcagacttctgccgctgcttgtatgcttgcgtttcttgtttgtgcctctgttcatgctctgccacgtgcctcagcgctctcggctacctattctctttccccaggatgcctacttcatcaccttcatgcttctcttcgctgtttcaaatgggtaccttgtctcactgacaatgtgcttggcaccacgacaggtgctgcctcatgagagagaggtcgccggagcgctaatgacattctttttagccctgggcctgagttgtggtgccagcttgtcatttctgttcaaagcattgctctag

SEQ ID NO: 241397 - DNA, 1371 bp, synthetic construct
  misc_feature 1..1371: note = Description of Artificial Sequence: Synthetic coding sequence
  source 1..1371: mol_type = other DNA
atggcccgtggagacgctccccgtgattcttaccacctggtagggatctccttctttatcctggggctcggtacccttctgccctggaatttctttataaccgcgattccttacttccaagcccgacttgccggagccggtaactctacagcgcgtatcttatcaacaaatcacaccggacctgaagacgcttttaacttcaataattgggttacacttctgtcccagctgccattgctcctgttcactctgctgaattccttcctgtatcaatgtgtaccagagacagtgagaattctaggctctctcttagccatcctcctgttatttgcacttactgccgctctggttaaagtggatatgtcacccggaccattctttagtatcacgatggccagcgtatgcttcataaattccttcagcgcggtcctacagggttcactgtttggccagctgggcaccatgcccagtacatattccactttattcctgagcggccagggcctcgctggtatattcgccgcattagctatgctcctgtctatggcatcgggagttgatgcagagacatctgccctgggttacttcatcacgccatgtgtcgggatactcatgtcaatagtgtgttatctgagtctccctcatcttaagtttgccagatactatctggcaaacaaatctagtcaagcacaagcacaggaactggagacgaaagccgagctcctgcaaagcgatgaaaacggaataccctcttcccctcagaaggtggctctcacactggatctggatctggagaaggagcccgagtcagagccagatgaaccccaaaagcccggtaaaccatccgtgttcactgtgtttcagaaaatttggttaactgctctgtgtctcgtcctggtttttacggtaactctgagcgtcttcccagccattactgctatggtcactagtagcacatcccccggtaaatggtcacagttcttcaatcccatttgctgtttcctcctgttcaacatcatggactggcttgggagatctctgacaagctacttcctctggcccgatgaagactccagattgctgcccctgctggtgtgtctgcggtttctgtttgtaccactgtttatgctatgtcacgttcctcagcgatcgcgcctgcccatactgtttccccaggacgcttactttatcacctttatgctgctgttcgccgtgagtaatgggtacctcgtgtccctgaccatgtgcctagctcctagacaggtccttcctcatgagcgggaggtggccggagctcttatgactttttttttggccctggggctgtcctgcggcgctagcttgtcattcctgttcaaagccttgctctag

SEQ ID NO: 241398 - DNA, 1428 bp, synthetic construct
  misc_feature 1..1428: note = Description of Artificial Sequence: Synthetic coding sequence
  source 1..1428: mol_type = other DNA
atggctgtggtaagcgaagatgacttccagcattcgtccaattctacttatcgaaccacgtcaagctcccttcgcgctgatcaggaggcactgcttgagaagctcctggacagaccaccccctggcctgcagcgacctgaagaccggttttgtgggacctatatcattttcttctcgctcggcatcgggtccctgctgccatggaatttctttatcactgccaaagaatactggatgtttaaacttcgcaactccagttcacccgcaacaggagaggaccccgagggcagcgacattctgaattactttgaatcgtatctggcagtggctagcactgtcccatctatgctttgcctagttgccaacttcctgttagtgaatcgagtcgctgtacatatacgggttctggcctctctgactgtgatactggctattttcatggtaattactgccttagtaaaagttgatacgtcttcatggacacgtggcttttttgcggtgactatcgtgtgtatggttattctgtccggtgcaagcacagtgttctcttctagcatatacgggatgacagggtcgtttcccatgcgcaactcccaggcccttatttccggcggagctatgggaggtacagtttccgcggtggccagccttgtggaccttgctgcgagctctgacgtccgcaattctgccttggccttcttcttaacggctaccgtgttcttagttctatgcatgggcctgtatctcttgttaagcagactagagtatgcccgatattatatgagacccgtgctcgcggctcatgtgttcagcggggaggaggagttgccccaggatagcctctctgctcccagcgtagcaagtcgctttatcgacagtcatacaccaccactaaggcccattctgaagaagactgcttcgttgggcttctgtgtaacctacgtgttcttcattactagtctcatttatccagccatttgtaccaatatagagtcgctgaataagggctccggaagcctgtggacgacaaagttcttcatccccctgaccacctttctcctgtataattttgcagacctttgtggccgtcagctgacagcatggatacaagtgccaggccctaacagcaaggcattacctggcttcgttctactgagaacttgcttaatacccctgtttgtgctatgcaactatcaacccagagttcatcttaagactgtggtgttccaatccgacgtgtatcctgcccttttgagctctctccttggattatccaatggatatctgagcaccctggcgctcctgtatggccctaaaatcgtcccccgtgagctcgccgaagcaactggagtggttatgtctttctatgtctgtctgggactgactctcggctccgcttgtagcacgctgttagttcatctgatatag

SEQ ID NO: 241399 - DNA, 1590 bp, synthetic construct
  misc_feature 1..1590: note = Description of Artificial Sequence: Synthetic coding sequence
  source 1..1590: mol_type = other DNA
atgagccaagatacagaagtggacatgaaagaggtcgagctgaatgagctggaacctgagaagcagcctatgaacgcagccagcggggctgcaatgtccctggccggtgctgaaaaaaatggcttggtcaaaatcaaggtggctgaggacgaggcagaagccgctgcggctgctaaattcaccgggctgtcaaaggaagagctgctgaaggtagctggtagccccggatgggtgaggacgcggtgggctctgctccttctgttctggcttggatggctaggcatgcttgccggtgcagtagttatcatcgtgagagcccctcgctgtagagagcttccggcacagaagtggtggcacactggcgcactctatcgcatcggggatcttcaggcatttcaaggccacggcgcaggcaatcttgctggcctgaaggggaggctggactaccttagttcccttaaggtgaaaggtctcgtgctgggccctatccacaagaatcagaaagatgatgtggcacagaccgacttgctgcaaatcgatcctaactttggttcaaaggaggactttgatagcctcttgcagtctgcaaagaagaagagtatccgtgtgatcctcgacctgacccccaactatagaggagagaatagctggttctcgacccaggtagatactgttgccacaaaggttaaagacgctctggaattttggctccaagccggagttgacggttttcaggtgagggacattgagaatctgaaagacgcttcatcctttctcgctgaatggcagaacatcaccaaaggatttagcgaagatcggttgctcatcgctgggacaaacagcagcgacctgcagcagatcttgtcactgctggagtccaacaaggacctcttgcttacttccagctatcttagcgactccgggtccaccggcgagcacaccaaatctctggtgacacagtatttgaacgcaactggcaatcggtggtgctcatggtccctgagccaggcacggttattaacaagtttccttcctgctcagcttctgaggctgtatcaattaatgctgttcacactcccaggaacacccgtgttttcttatggcgatgagatagggcttgacgccgctgccttgcccggtcagcctatggaagcacctgtgatgctctgggacgagtcatcctttcccgacattcccggagccgttagtgctaatatgacagtgaaagggcagtcagaggatcctggaagtctgctgagcctgttccgaagactctcagatcagagatccaaggagcgctctctcctccacggcgacttccacgcttttagcgccggtcctggcttgttttcatatatcagacattgggatcagaatgagaggtttctggttgtgttaaacttcggggacgtgggactctccgcaggtctgcaggcgtccgacttgccagcctccgcgtcgctgccggcaaaggcagatcttttattaagcacacagccgggaagggaggaaggcagccctctggaactggaacgactcaaattggagccccacgaggggctgctgctccgattcccatacgcagcatag

SEQ ID NO: 241400 - DNA, 1707 bp, synthetic construct
  misc_feature 1..1707: note = Description of Artificial Sequence: Synthetic coding sequence
  source 1..1707: mol_type = other DNA
atggagctacagcccccagaagcgtccatagccgtagtaagcattcccaggcagcttcccggatcacactctgaggccggagtccaagggctgtcagcgggtgacgattcagggacaatgtctcaggatactgaggtcgatatgaaggaggtagagctgaacgagctggagccagaaaaacagcccatgaatgccgcaagcggggcagccatgtccctggcgggtgcggaaaagaatgggcttgtgaagattaaagtcgccgaagatgaggccgaggctgccgcagccgcaaagtttactggacttagtaaagaagagctgctcaaggtggccggatcacctggatgggtcaggacgcggtgggctctgctgctgctgttctggcttggttggctcggaatgcttgcaggcgctgtcgtgataatcgtacgagctccccgatgccgggagttgcctgcccagaagtggtggcacaccggggcactttaccgaatcggagacctgcaggcttttcaggggcatggcgctggaaacctcgcagggctgaagggaaggcttgattacctctcctctctgaaggtaaagggcctcgtgctgggcccaatccataagaaccagaaggacgatgttgcacaaactgaccttttacagattgaccctaacttcggctctaaagaagatttcgacagcctccttcaatcagccaagaaaaaatccattcgcgtaatattggatctgacccccaactaccgaggtgagaattcttggtttagtacgcaggtcgacacggtcgcgaccaaagttaaggacgcgctggagttctggttgcaagctggcgttgacggctttcaggtgcgcgatatcgaaaatcttaaggatgccagcagtttccttgctgagtggcagaacataaccaaaggtttcagtgaggacagacttctgattgctggaaccaatagctccgacctacagcagattctatcgctcctggaatccaacaaagaccttctcctcacctcgagttatctgtctgattctgggtcgacgggggagcatacaaagagcctcgtaacacagtatctgaatgctacaggcaacaggtggtgttcttggagtctgagccaggccaggctgctcacttctttccttccggctcagctgttgagactgtatcagctcatgctatttactctgcccggtacccccgtgttttcctatggggatgagatagggttggatgcagcggctttgcctggacaaccgatggaagcacccgtcatgctgtgggacgaatctagcttcccagacatccccggagctgtgtcagctaatatgactgtaaaaggacaatccgaagacccaggttctttactgtcccttttccgtcgcctatctgaccagcgctcaaaagagaggagcctgctgcacggcgattttcacgccttctctgcaggtccaggactgttctcatacatcagacactgggaccagaatgaacgctttctggtcgtgctgaacttcggggatgtgggtttgtcagctggcctccaggctagcgatctgccagccagcgcctcccttccggcaaaagctgacctcctcctgagcactcagccaggcagagaggaaggctcacccctggaactggagcggctcaaattagaacctcacgaggggctcctgctacgttttccatatgccgcttag

SEQ ID NO: 241401 - DNA, 1893 bp, synthetic construct
  misc_feature 1..1893: note = Description of Artificial Sequence: Synthetic coding sequence
  source 1..1893: mol_type = other DNA
atggaattgcagccccctgaagctagtattgccgtggtgtcaattcctcgccagctgcctggaagtcactcagaggccggtgttcagggactgtccgctggcgacgatagtgagctgggaagccattgtgttgcccaaactggactggagttgcttgccagcggcgacccacttccatcagctagtcagaatgccgagatgatagaaacagggtcggattgcgtcacacaggccggactccagttgttggcgtcttcggaccctcccgctctggcttctaagaatgctgaagtgacaggaaccatgagtcaggacacggaagtggatatgaaagaagtggagttgaatgaattggaacctgaaaagcaaccaatgaatgcagcctctggcgctgctatgtccctggccggagcagaaaagaacggactagttaaaatcaaggtggcagaagatgaggctgaagccgctgccgcagcaaagtttaccggcttgagtaaagaggagctgctgaaagtggctggctcacccggatgggttcgaacgagatgggcccttctccttttgttttggctggggtggttaggtatgctcgccggagcagtggtgatcatagtgagagcgcctcgatgtagggaactcccggctcagaaatggtggcatactggggcactgtacagaatcggcgacttgcaggcttttcagggtcacggagccggtaacttggcgggacttaagggacgtctcgactatcttagctctctgaaagtgaaaggtttagtcctcggccctatccataagaaccagaaggacgatgtggctcagacggacctacttcagatagaccctaacttcggcagcaaggaggactttgatagcctgctgcaaagcgctaaaaagaagtctatcagggtgattttggatctgacgcccaactaccggggtgaaaactcgtggttttctacacaggtagacactgtcgccacgaaagtgaaggatgccctcgaattttggctgcaggcaggagtggatgggtttcaggtcagggacattgagaatcttaaggatgctagctcatttctcgcagaatggcaaaatataactaaaggattcagcgaggacaggctgcttatagcgggaactaattcctctgacttgcagcagatactgtcgctcctagaatccaacaaggacttactcctaacttcaagctacctgtcagactccgggagcaccggcgagcatacaaaatcactagtcacacaatacctgaacgccaccggaaatcgctggtgttcctggagcctcagtcaagctcggctgctgacatctttcctgcctgctcagctactgaggctatatcagttgatgctgttcactctgccagggactcccgttttctcgtatggagacgagataggccttgatgctgctgctctcccagggcagccgatggaggctccggtgatgttatgggacgagtcatcattcccggatattcccggtgccgtaagtgcaaatatgaccgtaaaaggtcagtcggaggaccccggtagcctgcttagtctgttccgcaggttgagcgatcagaggtctaaggaacggagtttgttgcatggcgatttccatgccttctcagcaggccctggcctgtttagttatatccgccactgggaccagaacgagcgatttctggtagtgctcaacttcggcgatgtaggcctgagcgcaggcctgcaggcgtctgacctccctgcctctgcttcattacccgctaaggcggacttgctgctgtcaacgcaacccggacgagaagaggggagtccactcgagctcgagcgcttaaagctcgagccccacgaggggttgctgctccgttttccatacgccgcttag

SEQ ID NO: 241402 - DNA, 1896 bp, synthetic construct
  misc_feature 1..1896: note = Description of Artificial Sequence: Synthetic coding sequence
  source 1..1896: mol_type = other DNA
atggagctgcagcctccggaggcatccattgctgtcgtatccatcccaagacaactgcctgggtctcactcagaggctggcgtgcagggtctttcagctggggacgatagtgaaacaggatccgactgtgtgacacaggccggactgcagctgctagcatcgtccgatcctccggcactagcctccaagaacgccgaagttaccgtggaaacaggctttcatcacgtctcacaggctgacatcgaatttttaacaagcattgaccccactgccagcgccagtggaagcgccggaatcacagggacgatgagtcaagataccgaagtggacatgaaagaggtggaacttaatgagctcgagccagagaaacagcccatgaatgctgcatctggcgcagctatgtccctcgctggtgctgagaagaatgggctcgtgaaaattaaggtcgctgaggatgaggccgaagcggctgccgcagccaagttcacaggtctaagtaaagaggagttgctcaaggttgccggatctccaggctgggtcagaacccgctgggcactgcttcttctgttctggctggggtggctcggaatgttagccggagccgtggtcattatcgtgagggccccacggtgtcgagaactcccggctcaaaaatggtggcacaccggggctctttatcgcattggtgatttacaggcatttcaggggcacggcgcagggaacctggctggcctcaagggacgactggactacctctcctcgttgaaagtgaagggccttgtactgggcccaattcataagaatcaaaaagacgacgtggctcaaaccgatcttctccagattgatcctaattttggttcaaaggaggacttcgattctctactgcagtccgcgaagaagaagagcattagggtcatcctggatctcaccccaaattataggggcgagaattcctggttttctacgcaggttgacactgttgcaacgaaggtgaaggatgccctggagttctggctgcaggcaggagtcgatgggtttcaagtccgggatatcgagaatctgaaagacgcatccagcttcctggccgaatggcagaacatcaccaaggggttttctgaagacaggttgctaattgctggtacaaacagtagtgatttacagcagatcttgtccctgttagaatccaataaggacctgctgctcactagctcatacctcagtgattccggcagtacaggcgagcacacgaaaagtctggtgacacaatacctgaacgccacaggcaatagatggtgctcatggtcgctgtcacaggcacggttgctgacatcctttctcccggctcagttgctgcgactgtatcagttgatgctgtttactctccccggtacacctgtgtttagctacggcgatgagatcggtctggacgcagctgcactccctggccagcctatggaagcccctgtcatgctttgggatgaaagcagctttccagacatcccgggagcagtgtctgccaacatgacagttaaagggcagtccgaggatccaggctcattgctctctctgtttcgccgactgagtgaccaacggagtaaagaacgttctctgctgcacggtgactttcacgcattctcagcgggtccagggctgttttcatacatccgacactgggatcagaatgagcgctttttggtcgtgcttaatttcggcgacgtgggcttgtccgctgggcttcaagcttccgatctccccgcaagtgcctccttgcccgctaaggcagacttattgctttcaacgcagccaggacgcgaggaagggtctcccttggaactggagcgcctgaagctggagccacatgaaggcctgttgctgcggttcccctacgccgcatag

SEQ ID NO: 241403 - DNA, 1986 bp, synthetic construct
  misc_feature 1..1986: note = Description of Artificial Sequence: Synthetic coding sequence
  source 1..1986: mol_type = other DNA
atggaactgcagcctcctgaggcatccattgccgtcgtgagcattccacgccagctgcccggaagtcacagcgaagccggagtgcagggcctctctgccggagacgactcagaactgggtagccattgtgtggcccagaccgggctggagctcttggcaagcggagatccactccctagtgctagccagaatgccgaaatgatcgagactggatcggattgcgtgacacaggctggactgcaactgcttgcttccagcgatcctcctgctctggcatcaaaaaatgctgaagtcacagagaccgggttccatcatgtttcccaggcagacatcgaatttcttaccagcatagatcctaccgcttctgcctctgggtccgcgggtataaccggaacaatgtcacaagacaccgaagttgacatgaaagaagtggaactcaacgaactagagccggagaagcagccgatgaatgcagcctctggagccgcaatgtcccttgccggagcagagaagaatggacttgtgaaaataaaagttgcggaagacgaagccgaggccgcagctgctgccaaatttaccgggctgtccaaagaggaactgcttaaagtggccggatccccgggatgggtaagaactaggtgggcacttctgttgcttttttggctgggctggttggggatgttagcaggtgccgtggtcataatcgtgcgtgctccacggtgtagggagctgcccgctcagaaatggtggcatacgggagccctctataggatcggagaccttcaggcattccaggggcatggtgccggaaacttagctggcctgaaaggcaggctcgattacctgagttctctcaaggttaagggattagtgctcggccctattcacaagaatcaaaaggatgatgtggcgcagactgacctattgcaaatcgatcccaatttcggcagtaaggaagactttgacagcctgctacaatctgccaagaaaaagtctattagggtgatcctagatctgactccaaattaccgcggtgaaaatagttggttttctacccaggtcgataccgtagctacaaaggttaaagacgccctggaattctggttgcaagccggtgtggacgggttccaagtgcgtgatatagagaacctgaaggacgccagctccttcctagctgaatggcagaatatcaccaaagggtttagcgaggatcgtctgctgatagcaggcactaattcctccgacctacaacagattctttccctcttagaaagcaacaaggatctgctgctgactagtagttatctgtccgattcaggatctacaggggaacataccaaaagtctcgttacgcagtatctcaatgccactggtaatagatggtgcagctggagcctctctcaggccagacttctgacttcattcctgccggctcagctgctccggctgtatcaactcatgctgttcactctcccaggcacacccgtgttctcttacggggatgagataggcctggacgctgctgcactgcccggacaaccaatggaggctcccgtgatgctctgggacgagtccagtttccctgatatacccggagcagtgtcagctaatatgacagtcaaaggacagtcagaagatcctggatcactactgagcttgtttaggagactgtccgatcagaggtccaaggaacgctcactgcttcacggtgattttcatgctttttctgcagggcctggcctattcagctatatcaggcattgggatcagaatgagagatttctcgtggtgctcaactttggcgatgtgggcctttctgcaggactgcaggccagcgatctccctgcgtccgcatctctgcctgccaaggcagatctgctgctgagcacccagcccggacgggaagaagggtccccacttgagctggagaggttaaagctggagccacacgagggactcctcctgagattcccttacgccgcttag

SEQ ID NO: 241404 - DNA, 1536 bp, synthetic construct
  misc_feature 1..1536: note = Description of Artificial Sequence: Synthetic coding sequence
  source 1..1536: mol_type = other DNA
atgtctcaggatactgaggtggatatgaaagaggtagagctgaacgagctcgaacccgaaaaacaaccaatgaatgccgcaagtggcgctgcaatgtctctcgccggagccgaaaaaaacgggctagtgaaaattaaagtggccgaggatgaggccgaggccgcagccgctgcaaaattcaccggcctgtccaaagaggaacttctgttctggctgggatggctcggtatgctagccggagccgtcgtgatcatcgtgcgcgcaccccgttgccgtgagctgcccgctcagaagtggtggcacaccggcgctctgtataggattggcgatcttcaggctttccagggccacggggctgggaatcttgctggtcttaaagggcgtttagactacctgagtagtctgaaggttaaaggcttagtactggggccaattcacaaaaatcagaaagatgatgtggcccagacagacttgcttcagattgaccctaacttcggcagcaaggaggattttgatagcctcctgcagagcgcaaaaaagaagtcaattagagtgattcttgatctaaccccaaactatcggggagaaaattcctggttttcaacccaggtcgatacggtggctacaaaagtgaaggatgcacttgaattctggctgcaggcaggcgtggatggtttccaggtgagagacatagaaaatttgaaagatgccagtagcttcctggccgaatggcagaatattacaaagggattttctgaagataggctgcttatcgccggaacaaattcatctgatctccagcaaatcctgtcgctgctggagagtaataaagacttgttacttacatcctcatacctgtccgactctggcagcaccggcgagcacacgaagtccctggtgacccagtacctcaatgctacaggaaaccggtggtgttcctggtccctttctcaggctaggctgctcacgtcattcctcccagcccagctgctgaggctgtatcagcttatgttgttcacacttcccggtactcctgttttttcttatggtgatgagatcggcttagatgcggcagcccttcctggacaaccaatggaggcccctgttatgctgtgggacgaatccagttttcctgacataccaggggctgtatccgcaaatatgacagtgaaaggtcagtccgaagacccaggctcactccttagcctattccgacggctgtcggaccaaaggagcaaggaaagatcccttttgcacggggacttccacgcttttagcgcgggacccggactctttagctatatacggcactgggaccagaatgaacgcttccttgtggtgctcaacttcggagatgtgggcctctctgcaggcctgcaggccagtgatctaccagcaagcgcctcattgcctgccaaggctgatctgctgctctcgacccagcctgggagggaggagggttcacccctcgagcttgagcgactgaaactggaaccccacgaggggctgctgctgagattcccctatgccgcttag

SEQ ID NO: 241405 - DNA, 408 bp, synthetic construct
  misc_feature 1..408: note = Description of Artificial Sequence: Synthetic coding sequence
  source 1..408: mol_type = other DNA
atgtctcaagacaccgaggtggacatgaaagaagtcgagctgaatgagctcgaaccagaaaaacagcctatgaacgccgcaagcggagctgccatgtcgctggcaggcgcagaaaagaacggcctcgtaaagataaaagtagccgaggatgaggctgaggctgcggcagctgcaaaatttactgggctgtcgaaggaggagcttcttaaggtggctggcagtccaggctgggttcgaacgcgatgggctcttttgcttttgttttggttggggtggctggggatgctagccggtgcagttgtcattatcgtgcgggcacctagatgtcgggagctgccagcccaaaaatggtggcacactggagccctgtacaggattggcgatctgcaagcctttcagggacactag

SEQ ID NO: 241406 - DNA, 2058 bp, synthetic construct
  misc_feature 1..2058: note = Description of Artificial Sequence: Synthetic coding sequence
  source 1..2058: mol_type = other DNA
atggcggaagataaatcaaagagggattccatagagatgagcatgaagggatgccaaaccaataacgggttcgttcataacgaggatattctagagcagacccccgatccaggatccagcactgataacctcaagcatagcacaaggggcatactgggcagtcaggaacctgatttcaaaggcgtgcaaccttatgcaggaatgcccaaggaagtcctatttcagtttagcgggcaggcccgataccggatccctcgtgagatcctgttctggcttactgtggccagcgtcctcgttctgatcgctgccacgattgctatcattgcgctgagcccaaaatgtctggattggtggcaggaaggacccatgtaccaaatttatccaagaagcttcaaggactccaacaaggatggaaatggagatctgaaagggatccaggataaactggattatattaccgccctgaacatcaagactgtttggatcacttctttttacaaatcctcacttaaggacttccgctatggagtggaggacttccgtgaggtggatccaatatttggcactatggaagacttcgagaaccttgtcgccgcaatacacgacaagggattaaagttgataattgacttcatccccaaccacacttcggacaaacacatatggtttcagctgtcacgcactcggaccggtaagtacacggactattatatttggcatgattgcacacacgagaatggcaagaccattcctcccaacaattggctgtcagtgtacggtaatagcagttggcattttgacgaagtgaggaaccagtgctacttccatcaattcatgaaggagcagcccgaccttaattttagaaatcctgatgtacaggaagagattaaagagatcctccgattctggctgactaagggagtagatggattttctctggacgcagtcaaatttctcttggaggctaaacatctgagggacgaaatccaggttaataaaacgcagattcctgatactgttacgcaatacagtgaactctatcatgactttacaaccactcaggtgggtatgcatgatatcgtgcggtccttccgccagacaatggaccaatactcgacagagccaggcagatatcgctttatgggcactgaagcttatgccgaaagcatcgacagaaccgtgatgtactatggactccccttcatacaggaagcagattttcccttcaacaactatttgtccatgttagataccgtaagcggcaacagtgtgtacgaggtgattacatcatggatggagaacatgcctgaaggcaagtggcccaactggatgatcggaggcccagacagtagcagacttactagcaggctgggtaatcagtacgtaaatgtgatgaatatgctgcttttcactctgcccggtactcctatcacttattatggcgaagaaatcggtatggggaacatcgtggctgctaatctcaatgagagctatgatatcaatacacttaggtccaaaagtccaatgcagtgggacaactccagtaatgccggatttagcgaagcctccaatacctggctacccacaaattctgactaccatactgtgaacgtcgatgtccagaaaacacagccaagaagcgcgttgaagctgtatcaagacctgtccctgctgcacgccaacgaactgttactaaaccgcggttggttctgccatttgaggaacgattcccattatgttgtatacacacgcgagctggatggcatcgaccgaatcttcatcgtggtattaaacttcggggaatcaaccctgcttaacttgcataatatgatatcaggcctgcccgctaagatgaggattcgcctgtccactaactccgccgataaaggctctaaggttgatacttcgggtatctttctcgataaaggtgagggtttaatcttcgagcacaacaccaagaacctcttgcacaggcagacggccttcagggacaggtgcttcgtgtcaaacagggcgtgctactcgagtgttctgaacatcctatatacaagctgctag

SEQ ID NO: 241407 - DNA, 1866 bp, synthetic construct
  misc_feature 1..1866: note = Description of Artificial Sequence: Synthetic coding sequence
  source 1..1866: mol_type = other DNA
atgaaaacattctggtctagacctagaatacagttctcaggccaagcaagatatcgcataccaagggaaatattattctggctgaccgtcgcaagcgtgctggttctgatcgccgctacaattgccatcattgccctgtctccgaaatgcctggactggtggcaggagggtcccatgtatcaaatttatccacgctcattcaaagactcgaataaggacgggaatggagatctgaaaggcatacaagataagcttgattatataactgctcttaacattaagacagtatggatcacctctttctataagtcgtcactgaaggacttccgctatggtgtcgaagacttccgcgaagtggacccaatctttgggacaatggaagacttcgaaaacctggtggctgctatccacgacaagggactgaagctcatcatcgatttcattccgaaccacacctccgacaagcatatatggttccagttatcccggactcgaactggtaaatacactgattactacatatggcacgattgtacccatgaaaacgggaaaacaatccccccaaataattggctcagtgtgtatggtaatagtagttggcacttcgacgaagtgcgaaatcagtgctacttccaccagttcatgaaggagcaaccggacctgaactttagaaaccctgacgtccaagaagagattaaagaaattctcaggttctggctgacaaagggcgtagacggctttagtctggacgccgtcaagtttctgctagaggctaaacacctgcgagacgagattcaggtcaacaagacacaaatacccgacaccgtgactcagtacagcgagctgtaccacgacttcacgacaacccaagtgggcatgcacgacatcgttcgcagtttcagacagacaatggaccagtactccactgagcccggacgctataggttcatgggtacggaagcttatgccgaatcaatcgacagaactgtcatgtactatggcctgccatttatccaagaggcagattttcctttcaacaattacctgtctatgctcgatacagtttcgggaaacagcgtttacgaagtaatcacttcatggatggagaatatgcctgaaggcaaatggcccaattggatgattggcggaccagatagtagtcgacttacatctagactggggaatcagtacgtgaacgttatgaatatgctgctcttcacccttccaggaacccccattacctattatggcgaagaaatcggtatggggaacattgtggctgctaatctgaatgagagctacgacatcaacactctgcgaagcaaaagcccgatgcaatgggacaacagctccaacgccggattcagtgaggcatccaacacgtggttacctactaattccgactaccacacggtcaatgtggatgtccaaaaaacccaaccacggtctgctttaaagctgtatcaagacctctctctcctacatgcaaacgaactgttattgaacagggggtggttttgtcacttgcgcaatgactctcactacgtggtctataccagagaattagacgggatcgatcgtattttcatcgtggttttaaactttggggagagcacgctgttaaaccttcataatatgatctccggactacccgctaagatgagaattcgcctttctacaaacagcgccgataaaggaagtaaggtggacacgtcggggatcttcctcgacaagggcgaggggcttatctttgagcacaacaccaaaaacctgctgcatagacagaccgcttttagggaccgttgtttcgtctcaaacagggcctgctactccagcgtgctgaacatcctatatacatcatgttag

SEQ ID NO: 241408 - DNA, 1656 bp, synthetic construct
  misc_feature 1..1656: note = Description of Artificial Sequence: Synthetic coding sequence
  source 1..1656: mol_type = other DNA
atggccgaggataaatctaagagggatagtattgagatgtcaatgaaaggttgccagacaaacaacggcttcgtgcacaacgaagatatccttgagcagactcccgacccaggttcctctactgacaatttaaagcactcgacgcggggtatcctaggctcacaggagcctgacttcaagggcgtacagccgtatgctggcatgcctaaggaagtgttattccagttctccggtcaggcccgatatcggatcccacgggagattctcttttggctgactgtagcttcagttctggttctgattgccgcaacaatcgccattattgcattaagccccaaatgtctggattggtggcaggaggggcctatgtatcagatttatcctcgcagctttaaagacagcaacaaggacggaaacggagatttgaaaggcatccaggataagctggattacattaccgccctgaacatcaagacagtctggataacatccttctataagtcctctcttaaagattttcgctatggagtcgaagattttcgggaggtagatccaatattcggaaccatggaggacttcgagaacctggtggccgctatacacgacaagggcctgaaactcattatcgatttcattcccaaccacacaagcgacaaacatatttggttccagctttcacgtacccggaccggcaagtataccgattactacatatggcatgactgcacacatgagaatggcaaaacaatcccccctaacaactggcttagcgtgtatggaaatagctcttggcacttcgacgaggtgcgcaatcagtgttatttccaccaattcatgaaagaacagccagaccttaactttaggaatcccgacgtgcaggaggagattaaagagatactcagattttggctgaccaaaggcgtggatggttttagtctggacgctgtgaagttcttgctcgaagctaagcatcttagagacgaaatccaggtcaataagacgcagatccctgacactgtcacccaatactccgaactctaccacgactttacaaccacccaggtaggtatgcacgatatagtgcgatcgtttagacagactatggaccaatatagtacagagcctgggaggtaccggttcatggggaccgaggcctacgctgagagcatagacagaactgtgatgtattatggactgcctttcatccaagaggccgatttccctttcaataactatctgagtatgctggacaccgtaagcgggaactccgtgtacgaggttattaccagttggatggagaacatgcccgaaggaaaatggcctaattggatgatcgggggacctgacagttccaggcttacctcacggcttggaaaccagtatgtaaatgttatgaacatgctgctgtttacgctccctggtacaccaattacctactacggagaagagatcggcatgggcaatatagtggcagccaatctgaatgaaagctacgatataaacaccttgaggagtaagagtcccatgcagtgggacaacagctccaacgccggattctccgaagcatcaaacacttggctgcctaccaacagtgattaccacactgtcaatgtggatgtcctgctgagacatccttgttcttccgcagtggcatag

SEQ ID NO: 241409 - DNA, 1524 bp, synthetic construct
  misc_feature 1..1524: note = Description of Artificial Sequence: Synthetic coding sequence
  source 1..1524: mol_type = other DNA
atgggttgctggggtagaaacaggggcagactgttgtgcatgttggccctcacctttatgtttatggttttggaggtcgtggtcagcagggtcacctcctctctcgcgatgctatcagactcattccacatgctgagtgatgtgttggcactggtggtggcactcgtggctgaacgcttcgcacgaagaacacacgcaactcagaaaaacacatttggatggataagagccgaggttatgggtgcactggtgaacgccatcttcttgaccggtctgtgcttcgccatcctgctggaggcaatcgagcgcttcatcgagccacacgagatgcagcagcccctggtggttctcggagtgggtgttgcaggactgctggttaatgttttgggcctgtgcctgttccatcaccattctggcttttcgcaagactctgggcatggccattcacacggtggtcacggccatggccatggcctgccaaaagggcctcgtgttaaaagcacgcggcctgggagctcagacatcaatgtggctcctggagagcagggtcccgaccaggaggagaccaatactctcgttgccaatacgtctaatagcaacggattgaaactggaccccgcagatcccgaaaaccctaggagtggagacacagtggaagtccaggtcaatggaaacctagtgagggagccagatcatatggagctggaggaagaccgcgctggacagctcaatatgcggggagtttttctgcacgttctcggcgatgccctgggtagtgtcatcgtcgtggtgaatgccctcgtgttctattttagctggaagggttgttcagaaggcgatttctgtgtgaatccatgctttccagatccctgcaaggcttttgtggagatcatcaattccacccacgcatccgtatacgaagctgggccatgctgggtcctctacctcgaccctaccttgtgcgttgtcatggtgtgtatcttgctatatacaacctatccactcctcaaggagagcgcgctgattttactgcaaacggtgccaaaacagattgacatacgcaacctaattaaagaactacggaacgtggaaggggtagaagaggtccatgaactacacgtctggcagcttgctggaagtaggataattgctaccgcccatattaaatgtgaggatccaacatcctatatggaggtggcgaagacaatcaaagatgtcttccacaaccacggaattcacgccaccaccatccagcctgaatttgccagcgtaggatcaaagtcttccgtcgtgccgtgcgagcttgcctgtcgtacacagtgcgctttgaaacagtgctgcggcaccctgccacaggccccatcgggcaaagatgctgagaagaccccagcggtgtcaatttcctgcctggaactgtcaaacaacttagagaaaaaaccacgcaggaccaaagccgaaaatatcccagctgtcgtcatcgagattaagaacatgcccaataaacagccagaaagtagcctgtag

SEQ ID NO: 241410 - DNA, 1119 bp, synthetic construct
  misc_feature 1..1119: note = Description of Artificial Sequence: Synthetic coding sequence
  source 1..1119: mol_type = other DNA
atggaggccaaagagaagcagcacctgctagatgccagacctgcaatcaggtcctacacgggatccctgtggcaggaaggagccggatggatacccctgcctcgccctgggctcgatctgcaagcaatagaactggctgcccagagcaaccaccattgtcatgcgcagaaaggcccagattctcattgtgatcccaaaaagggaaaggcgcagcgacagctctacgtcgctagtgccatatgcttactgtttatgattggcgaagtagtgggcggatacctggcacattctttggccgttatgacagacgctgctcacctcttaaccgatttcgccagtatgctaatcagcctgttctccctctggatgagctccaggcccgctacaaaaactatgaacttcggatggcagcgcgctgagatccttggcgcactcgtgtctgtcctttcaatatgggtcgtgacaggcgtgctggtttaccttgccgttgaaaggctgatcagtggggactacgaaatagatggcggaacaatgctcatcacttccggatgtgctgtcgcggtgaacatcatcatggggctcactctacaccagagtggtcatggacattctcatgggaccaccaatcagcaggaagagaatccatctgtgcgggctgccttcattcacgttatcggcgatttcatgcagtctatgggagtcctggttgctgcatacatactctacttcaagccggagtataagtacgtggatccaatctgtacatttgtattctctattctggtgcttggaaccacactgacaatcctcagagatgttatacttgtactgatggagggcactccgaagggcgttgattttaccgccgttagggacctgttgttgtccgtggaaggcgtcgaagcgttgcactccctgcacatctgggccttaactgttgctcagcccgtgttgtccgtgcacatcgccatcgcacagaatactgacgctcaagctgtgctaaagaccgctagttcacggttgcagggcaagtttcactttcataccgttactatccagattgaggattatagtgaggacatgaaggactgccaggcatgccaaggcccatcagactag

SEQ ID NO: 241411 - DNA, 972 bp, synthetic construct
  misc_feature 1..972: note = Description of Artificial Sequence: Synthetic coding sequence
  source 1..972: mol_type = other DNA
atggaggcaaaggagaaacagcacttgcttgacgctaggcccgcaatcaggtcctacaccggaagcctgtggcaagagggggcaggctggataccgttacccaggcccggactcgatcttcaggcaattgagttagcggcacaaagcaaccaccactgccatgcgcagaagggaccggactcccattgtgacccaaaaaaggggaaagcacagaggcagctctatgttgcatctgcaatttgtctgttattcatgatcggtgaggtggtcgaaatcctgggagcgctagttagcgtcctgtcaatctgggtcgtgacaggagtgcttgtttatctggcggtggaacggttgatttccggcgattacgaaatcgacgggggaacaatgttgattacctctggctgtgccgtggccgtgaacattattatgggactaaccctgcaccagtctggacacggacacagccatggcacaaccaatcagcaggaggaaaacccatccgtgcgggcagccttcatccatgtgatcggcgacttcatgcagtctatgggcgtcctggtggcggcttacatcctctatttcaaacctgaatataaatacgtggatcctatttgcaccttcgtattttctatactagttcttggcaccaccctgactatcttgcgcgacgtgatcctcgttctgatggagggaacaccaaagggggtggattttaccgcggtcagagatttactactgtccgtggaaggagtggaggccctgcactctctgcatatatgggctctgacagtggcacagcctgtgctctccgtgcacattgccatagctcagaacactgacgctcaagctgtcttgaagactgcaagcagccggctgcaagggaagtttcatttccacactgtgactattcagattgaggactatagcgaggatatgaaagactgccaggcctgtcagggccctagtgactag

SEQ ID NO: 241412 - DNA, 345 bp, synthetic construct
  misc_feature 1..345: note = Description of Artificial Sequence: Synthetic coding sequence
  source 1..345: mol_type = other DNA
atggggccaagaaggcggtcgcgtaaacctgaggcacccaggcggagatcaccgtccccgactcccacccctgggcctagtcgacgaggtccatctttgggtgccagcagtcaccagcattccagacgtcggcaaggctggctgaaagagatcagaaaactgcaaaagtccactcaccttctgatcagaaagctccccttttcaaggctagcggctgaagcgtttctcgtccatctctttgaagacgcatacctgctcacactgcacgctggacgcgtaacactattcccaaaggatgtgcagctggctcggaggatcagggggctagaagagggcctaggctag

SEQ ID NO: 241413 - DNA, 300 bp, synthetic construct
  misc_feature 1..300: note = Description of Artificial Sequence: Synthetic coding sequence
  source 1..300: mol_type = other DNA
atgccttttcaccattgtcaccgggacccactgccacctcctggactcaccccagagcgcttgcacgcacgaaggcagctgtatgccgcatgcgctgtttgctttgtgtttatggctggcgaagtggtggggggttatctcgcccattccctagctattatgacagatgccgctcatcttctcgccgatgttgggagcatgatgggatccctgttctcattgtggttgagcactagaccggctacacgcacaatgactttcggctggcacaggagcgaaacactcggcgctttggcctag

SEQ ID NO: 241414 - DNA, 723 bp, synthetic construct
  misc_feature 1..723: note = Description of Artificial Sequence: Synthetic coding sequence
  source 1..723: mol_type = other DNA
atgcccttccaccactgtcacagggatccactgccccctccgggtctgacccctgaacgcctccacgccagacggcagctttatgctgcctgcgctgtctgttttgtctttatggcaggggaagttgttggtgggtatttagcccactcgcttgctatcatgaccgatgccgctcaccttcttgccgatgtgggcagtatgatgggctccctgttttctctttggctgtccacccgcccagcgacccgcacgatgacatttggctggcatcggagtgaaacactcggcgctctggcgagcgtggtatccctgtggatggtcacagggattctcctttacctggcctttgtgagactcctacatagcgattaccatatagaaggcggtgcaatgctgctgacggcaagcatcgccgtttgcgcgaacctgctgatggcatttgtcctgcatcaggcaggcccaccccattcacatggcagtagaggcgcagagtatgcgcctctggaggaaggtcctgaggagcccctgcctctggggaatacaagcgtgcgtgcagccttcgtgcatgtactcggcgatctgctccagtcctttggcgtgcttgcagcctcaattttgatctatttcaagccacaatacaaggctgcggaccctatttcaacatttctgttcagcatatgtgcactgggctccaccgcccctactctacgcgacgtcctgtag

SEQ ID NO: 241415 - DNA, 1152 bp, synthetic construct
  misc_feature 1..1152: note = Description of Artificial Sequence: Synthetic coding sequence
  source 1..1152: mol_type = other DNA
atgcgagtggcggctggggctcgcggagaaaatatcgagcatcttaaattaagactcgaggctaggccccctacacttcttctattcaccgaaccgagcgagccattgcctgaagaatccaaacccgtggagatgccttttcatcattgtcacagagatccactgccacccccaggcctgaccccagagcgtttgcatgcgagacgacaactgtacgcggcttgtgcagtatgcttcgtctttatggcaggcgaagtggttggagggtatttggcccatagcctggcaatcatgaccgacgccgcacacctgcttgccgacgtggggagcatgatgggctcactgttcagtctctggctatctaccagacctgcgacaaggactatgacattcgggtggcaccgctctgagaccttgggcgcactggctagcgtggtgagcctgtggatggtgactggcatactgctgtacttggctttcgttcggttgctgcacagcgattaccacatagaggggggagccatgcttctcacagcgagtattgccgtgtgcgccaacctgttaatggcctttgtcctacaccaggctggcccaccacatagccacggcagccgtggcgctgagtatgccccattggaggaagggccagaagagcccctgcctctcggaaatacctctgtgcgggctgcttttgtccacgttttgggagacctcctccagtcctttggcgtgctggctgcctccatactgatctacttcaaacctcagtacaaagcagcagaccccatcagcacgtttctcttctccatttgtgccctggggtcaaccgcaccgacacttagggacgttcttcgcatccttatggaagggacgcccagaaacgtcgggtttgaacctgtccgggacactctcctcagtgtgccgggagtgcgcgctacacatgagctgcacctgtgggccctgactctcacatatcacgtggcgagtgctcacctggctattgattcaacagcagatcctgaagccgtactggccgaagcatctagccgactgtatagtcgttttgggttctcatcctgtaccttacaagtggagcagtaccagcctgagatggcccagtgtcttcgctgtcaagaaccaccgcaggcctag

SEQ ID NO: 241416 - DNA, 336 bp, synthetic construct
  misc_feature 1..336: note = Description of Artificial Sequence: Synthetic coding sequence
  source 1..336: mol_type = other DNA
atgcccttccaccactgtcatagggatccgttgccccctcctggcctgacacccgagcgacttcacgccagaagacaactctatgccgcttgcgccgtttgctttgtctttatggcaggagaagttgtgggcggatatcttgcccattctctagccatcatgaccgacgccgcacatctcctggctgacgttggtagcatgatgggctcgctgtttagcctgtggttgagcactcggccagccacaagaacgatgacttttggctggcatagatcagaaacgctaggggctctcgctagtgttgtctccctctggatggtaacagggatcctttag

SEQ ID NO: 241417 - DNA, 1290 bp, synthetic construct
  misc_feature 1..1290: note = Description of Artificial Sequence: Synthetic coding sequence
  source 1..1290: mol_type = other DNA
atggcaggttccggagcgtggaagcggctaaaatcgatgctacgcaaggatgatgctcccctattcctgaacgacacctcggcattcgacttctccgacgaagcaggagatgaagggttatcaaggttcaataagctccgagtcgtggtagccgacgacgggtcagaagctccagaacggccagttaacggggcacatcctacgctgcaggcggatgacgattccctccttgatcaggacctacccctgacaaattcccagctctctttgaaagtcgatagttgcgataactgttctaagcagcgcgaaatcctaaagcagcgcaaggtcaaagccaggctgaccattgccgctgtcctgtacttgctgtttatgattggagagcttgtcggcggatacattgcgaactctttggctatcatgacagacgcccttcacatgctcactgacttgtccgctattatcctcacactgctggcattgtggctctcttccaagtccccaaccaagaggttcactttcggctttcatcgtttggaggtcttgtcagcaatgattagtgtgcttctagtttacatccttatgggtttcctgctctatgaggcggtccagaggaccattcatatgaactacgagatcaacggagatattatgctaataaccgcagctgtgggggttgccgtcaacgtgatcatgggattcttactcaatcaatcaggccaccgacacagtcactctcacagcttgccctctaacagtcctacgcgcggtagcggttgtgaacgcaaccacggacaagactcccttgcagtgcgcgctgccttcgtgcatgcactcggagacttggtacagagcgtgggcgtcctgatagccgcttacattattcgtttcaagcccgagtacaaaatcgctgacccaatttgcacctatgtcttcagcttactcgtagcgtttactacctttagaatcatctgggataccgtagttattattttagaaggggtcccatcacacttgaacgtggattacatcaaggaagctctgatgaaaatcgaggacgtgtacagcgtcgaagacctaaacatttggtcactcacaagtggaaaatcaactgcaatcgtgcatatacagctgatccctggctcctccagcaagtgggaagaagtccaaagcaaagcaaaccatctgttgttgaacacctttggtatgtatcgttgcacgattcaactgcagagctacaggcaggaagttgaccgtacttgcgctaattgtcagtctagcagtccctag

SEQ ID NO: 241418 - DNA, 357 bp, synthetic construct
  misc_feature 1..357: note = Description of Artificial Sequence: Synthetic coding sequence
  source 1..357: mol_type = other DNA
atggaagagaagtatggcggtgacgtactggccggtcccggaggcggagggggtctgggaccagtcgacgttccatctgcgaggcttaccaaatatatagtgttgctgtgttttacaaaatttctgaaagccgtgggattgttcgagtcctacgatctcttaaaggccgtccatattgttcaattcattttcattctgaagcttggcacagccttctttatggttctctttcagaagccttttagttcaggaaagacaatcaccaagcatcagataatcggcagcctcaaaatccctggcaggaaagaatttaaagacaagaaattgaacgatcctagaaagctcgtgggcaattag

SEQ ID NO: 241419 - DNA, 2298 bp, synthetic construct
  misc_feature 1..2298: note = Description of Artificial Sequence: Synthetic coding sequence
  source 1..2298: mol_type = other DNA
atggaggagaagtacgggggagacgtgctggctggtcccggaggtgggggtggcctcggaccagtggacgtccccagtgcacgcctgaccaagtacatcgtgcttctctgcttcacaaagttcttgaaggctgtcggcctgtttgaatcatatgatctcctcaaggctgtacacatcgtccagttcatcttcattctgaaattgggcactgccttctttatggtgctgttccaaaagccgtttagcagcggtaaaacaattaccaagcatcagtggataaagatctttaaacacgccgttgcaggctgtattatttctctactgtggttttttggcctgaccctgtgtggaccgcttagaaccctgttactgttcgaacactctgacatcgtggtcatctcgctgcttagtgtcctctttacatcctccggaggtggacccgcaaagaccagaggcgctgccttctttatcatcgctgtgatatgtctgttgttgttcgacaatgatgacctgatggccaagatggccgagcacccagagggacaccatgactccgcgcttacccatatgctgtatacagccatcgctttcctgggtgttgccgatcataaaggaggcgtgctactgctggtgcttgctttatgctgtaaagtgggcttccataccgcttcccggaaactcagcgtggacgtcggcggagccaaaaggctccaggctctgtctcatcttgtctcggtactcctgttatgtccttgggtaatagtgctgtccgtgaccacggagtccaaggtggaatcttggttttccctgattatgccctttgcaacagtcattttctttgtcatgattctggacttttatgtagacagtatttgttccgtcaagatggaggtcagcaaatgcgctaggtatggcagtttccctatattcatctccgcactgctgttcggcaatttctggacacatccgattacggatcagctgcgcgctatgaataaggccgcacatcaagagtcgaccgagcacgtgctctcaggaggggtggttgtcagtgcaattttctttatcctcagtgctaacatcctaagttcaccctctaaaaggggccagaaaggcactctgattggctactctccggagggaacacctttatacaattttatgggcgatgctttccaacattcatcacagtccatccctcgatttatcaaagaatcactgaaacagatcctagaggagtccgacagccgtcaaatcttctacttcctttgcctgaatctcctctttactttcgtggagctgttctacggggtgttaacaaattccctgggattaatcagtgatgggtttcatatgctcttcgattgttcggccctcgttatgggactgttcgcagccttgatgtcccggtggaaagcgactcggatattcagctacggctacggtaggatcgagatcctctctgggtttatcaatgggcttttccttattgtcatcgctttcttcgtatttatggagtcagtggcacgccttatcgaccctcccgaacttgacacacatatgttaactccggtctccgtgggaggcctgattgtcaatctcataggaatctgtgctttctcccatgctcactcgcacgcgcacggcgcaagtcaagggagctgtcattcttcggatcacagccattctcaccatatgcatggtcacagcgaccacggacatggtcatagtcacggctctgcaggcggaggaatgaatgcaaacatgagaggtgtcttcctgcacgtcctcgcagataccctgggctccattggggtgattgtctctacagtcctgattgaacagttcgggtggtttatcgccgacccgttgtgctctctgtttatagccatcctcatatttctctcagtggtgccgttgatcaaagacgcttgtcaagtcctccttctgcgcctcccacccgagtatgagaaagaacttcacattgcacttgaaaaaatccagaaaattgagggccttatatcctatcgtgatccccacttctggaggcactcagcatcgattgtggcaggcacaatacacatccaggtgacctctgacgtgttagaacaaaggatcgtgcagcaagttacaggcattctgaaagacgctggagtgaacaacctgaccatacaagtcgagaaggaagcctactttcagcacatgagcgggttgagcaccggctttcacgacgttcttgcaatgacgaagcagatggagtcaatgaaatattgtaaggatggcacctacatcatgtag

SEQ ID NO: 241420 - DNA, 1083 bp, synthetic construct
  misc_feature 1..1083: note = Description of Artificial Sequence: Synthetic coding sequence
  source 1..1083: mol_type = other DNA
atgggggacgcatttcagcattccagtcaatcaattccaagattcatcaaggagtctcttaaacaaatcttggaggaaagcgattcccgccagattttctatttcttatgcttgaacctgctgtttaccttcgtggagctcttttatggagttctgaccaacagccttggcttaatcagtgacggctttcatatgctctttgattgttcagctctggtgatgggtttgtttgcagcacttatgtcaaggtggaaagctacaagaatttttagttacggctacgggagaatcgagatactgtctggcttcatcaatggactctttctgattgtcattgccttttttgtgtttatggagtccgtggcccgtttgatagacccacccgaactcgacactcacatgctgacgccctgccactctcacgctcatggggctagccaggggtcttgccattcctcagaccactcccactcacatcacatgcatggacactcagaccacggtcacgggcattcacacggaagtgccggaggtgggatgaatgcaaacatgaggggcgtatttctgcatgtgttggctgatacattggggagtattggtgtaattgtgtctaccgtgcttatcgaacaatttgggtggttcatcgccgaccctctttgttcactgttcattgctattctgatatttcttagcgtcgttcctctgattaaggatgcatgccaggtgctgctgttgaggttgccaccagaatatgaaaaagagctgcatatagctctggagaaaattcagaaaattgaaggtttgattagctatcgggaccctcacttttggagacacagcgcgtctatcgttgctggcaccatccacatccaggtgactagcgatgttctcgaacagagaatcgtgcagcaggtaaccgggatactgaaagatgccggtgtcaataatctcactatccaggtggagaaagaggcctatttccagcacatgtcaggtctgtcaaccggcttccatgacgtgttagcaatgaccaagcagatggagtccatgaagtactgtaaagatggaacatacatcatgtag

SEQ ID NO: 241421 - DNA, 1386 bp, synthetic construct
  misc_feature 1..1386: note = Description of Artificial Sequence: Synthetic coding sequence
  source 1..1386: mol_type = other DNA
atggggaccatccacctatttcgaaaaccacagcgctcattctttggcaagctccttcgagaattcagactggtggcagccgacaggcgaagctggaaaatcttgttgttcggggtgatcaaccttatctgcacagggtttctgctcatgtggtgttcaagcactaactccatagctctcaccgcatacacttatttgaccattttcgacttgttttcactgatgacctgcttgatctcatactgggtgacattgcgcaagccatccccagtttactctttcggatttgaacgccttgaggttttggccgtatttgcatccacagtgttggcacaactgggtgcgttgtttatcttgaaagaatctgctgagaggttcttggaacagcctgagattcacacagggagattgctggtgggcacatttgttgcactgtgcttcaatttgtttactatgctttcaattaggaataaaccattcgcctacgttagcgaagccgcaagtacatcgtggctccaggaacacgtggccgacttgtctaggtcactctgcggcataattcccggactgtcatccattttcctgccccgaatgaatccatttgtcctgattgatctcgctggggctttcgcactctgcatcacatatatgctcatcgagatcaacaactactttgcagtggacactgcgtcagcaatcgcaatcgccctgatgacttttgggaccatgtatcccatgtcggtttacagtgggaaagtcttgctacagaccaccccgccacacgtgatcggacagctggataaattgatcagagaagtctcaactttggatggcgtgctcgaggtgcggaacgagcacttctggacactcggctttgggagtctggctggttccgtccacgtgaggatacggagggacgctaacgaacagatggtgcttgcacacgtcacgaaccgcctgtataccctcgtctccacactcacggtccagatttttaaggatgactggatcaggcccgcactactgtccggtcctgtggcggctaacgtgctaaacttttccgaccatcacgtaataccgatgcccttattgaaaggaaccgatgatctcaacccagttacgtcgactccagccaaaccatcatccccccctcccgaatttagcttcaacacccctggcaaaaacgtcaatccagtgatcctgctcaacactcagacacgaccctatggcttcggtctgaatcatgggcacactccttattcaagcatgttgaaccagggtctaggagtccctggcattggcgcaacccagggtctgcgtactggttttaccaatatacccagccgctatggcaccaataaccgaattggccagcctcggccttag

SEQ ID NO: 241422 - DNA, 795 bp, synthetic construct
  misc_feature 1..795: note = Description of Artificial Sequence: Synthetic coding sequence
  source 1..795: mol_type = other DNA
atgaacccattcgtgttgatagacctggccggagcattcgctttatgtatcacctacatgttgattgagatcaacaattattttgctgtcgacaccgcgtccgcaatagcgattgcactgatgacttttggcaccatgtatcccatgtctgtgtactctggtaaggtactactgcagactacaccgcctcatgtgatcggtcagcttgacaaactcataagagaagtgtcaacccttgatggcgtgcttgaggttcgaaatgaacacttttggacgcttggttttgggtctctcgcaggatcagtccatgttcggatccgcagagacgcgaatgagcaaatggtgctggctcatgtgactaatcgcctgtacacattggtttccacactgactgtgcagatattcaaggacgactggatccgaccagcccttttgtcagggcctgtggcggcaaatgtcctgaacttctcggatcaccacgttatcccgatgccactcctcaaaggcactgatgatctaaatcctgtgaccagtactccagccaagccttcttcccccccacctgaattctcctttaacactccaggaaaaaacgtgaatccggtcatcctactgaatactcagactcgtccctacggatttggactgaaccatgggcacactccctattcctcaatgctcaatcagggtctgggagtacccggtattggggctacacagggactccggaccggatttactaacatcccctctcggtacggaactaacaatagaatcggccagcccaggccctag

SEQ ID NO: 241423 - DNA, 1506 bp, synthetic construct
  misc_feature 1..1506: note = Description of Artificial Sequence: Synthetic coding sequence
  source 1..1506: mol_type = other DNA
atggggacaatacatctgtttagaaagcctcagcgttccttctttggaaaactgcttcgggagtttcgcctggtggctgcagatagacgcagctggaaaatcctcctgtttggagtaattaacctgatctgtactggatttcttttaatgtggtgttcaagtacaaattcaatcgcattgacagcctacacatatctaaccatttttgacctgtttcgggatggggttagccccttttggttgggatggtcccagacaccggatttaaagtggagtacgcatttgggcttgccgaaatgctgggataataggagggagcttccatgtctgtctaattctttgatgacctgtttgatctcctactgggtaacccttcgcaagccctccccagtttactcatttgggttcgagcggctagaagtgctcgcagtctttgcttccactgtcttggcacaactaggcgcattgttcatcctcaaggagagcgctgaaagattcctggaacaaccagaaattcacacgggccgtctgctcgtgggtacttttgttgccctatgcttcaaccttttcaccatgctctcgatcagaaacaagccctttgcctacgtgagcgaagcggcatcaacaagttggctgcaggaacatgtagcagacctctcacggagcctgtgcggaatcatccctgggctgtctagcatcttcctgccaaggatgaaccccttcgtgctcattgacttagccggagctttcgccctgtgtatcacctacatgctgattgaaattaacaactactttgccgtggacacagcctcagccattgcaatcgccctaatgaccttcggcactatgtacccaatgagcgtatatagcgggaaggtgctcctgcagactacaccaccacacgttatcggtcagctggataaactaattcgggaggtgagtactttagatggagttctggaagttcgcaacgaacacttctggactctgggcttcggatctttagctgggtcagttcacgttagaattagaagggatgctaatgaacagatggtgctggctcacgttactaatcgattgtatacattagtgtcaacactgactgtacagatttttaaagacgactggatcagacccgctctgctgtctggtcccgtagctgcgaacgtcctcaactttagcgaccatcacgtgattcccatgcccttgctaaaaggcaccgacgacctaaaccccgttactagtacgcccgcaaaaccgagcagcccaccacccgagttttcattcaacacccctggaaaaaacgtaaacccggtgattctactgaacactcaaacaaggccgtacggcttcggcttaaaccacggccacactccgtactccagcatgctcaaccagggcctgggcgtcccagggattggggctacccagggattgagaactgggttcactaatatcccctccagatatggtacaaacaaccggatcggacaaccgaggccttag

SEQ ID NO: 241424 - DNA, 1164 bp, synthetic construct
  misc_feature 1..1164: note = Description of Artificial Sequence: Synthetic coding sequence
  source 1..1164: mol_type = other DNA
atgacttgccttatatcatactgggtgacgctgcgtaaaccgtccccagtgtatagtttcggatttgaaagactggaagtgctcgcagtattcgccagtactgttttagcacagctcggtgcactgttcatcctcaaggaatcagccgaacgctttctcgagcaacccgagatccacaccggcaggttactggtggggaccttcgtggccctgtgctttaacctctttacgatgctatccattcggaataagccgtttgcttatgtctctgaggccgcttctacctcctggctccaagagcatgtggcagacctgtcgcgcagtctgtgcggtataatccctggacttagcagcatcttcctgcctcgcatgaatcccttcgtgctgatagatctcgccggagccttcgctctgtgcataacctatatgctgatcgagattaataattacttcgccgtcgacacagcttcagccattgcgattgcattaatgacatttgggaccatgtacccaatgtcagtttacagcgggaaggtgctgctgcagacaacacccccacacgttataggacagctggacaagctgatcagggaagtgtcaacactggacggtgttcttgaagtgagaaacgagcacttctggaccctcgggttcgggagcctggccggtagcgttcatgtgaggattcgtcgagatgccaatgagcaaatggtgctcgctcacgttactaatagactttacactctggtatcaactctcacagtgcagatcttcaaggatgattggatcagacctgccctgctgtctggtccagtcgcagcaaatgtcctcaatttctccgaccatcacgtgatccccatgcctctcctaaaagggacagacgacctgaatcctgtgacctccacacctgctaaaccctcttcaccccctccagaattctcgttcaatactcccggaaagaacgtaaaccctgtaatcttgctgaacacccaaacacggccttacggtttcgggctgaatcacgggcataccccatacagctcgatgctgaatcaaggcctgggggtcccgggaatcggcgctacccaagggctgcgtactggctttaccaacattccctctcggtatggaacaaacaacagaatcggacagccccgtccctag

SEQ ID NO: 241425 - DNA, 1317 bp, synthetic construct
  misc_feature 1..1317: note = Description of Artificial Sequence: Synthetic coding sequence
  source 1..1317: mol_type = other DNA
atggggaccattcatctgtttcgcaagccccagcgctcttttttcggcaaactactgcgagagttcaggctggtggcggcagatcggagaagctggaagatacttctgtttggcgtcattaacctgatatgcaccggtttcctgttaatgtggtgcagttccaccaatagtattgccctcacagcgtatacctacttgacaattttcgatttgttctcacttatgacctgcttaatcagctattgggtgaccctgagaaagcccagccccgtgtacagcttcgggtttgaaaggctggaggtcctggccgtctttgcatctactgtgctggcccagctgggcgctctattcattctcaaagaaagcgctgagcggttcctggagcagccagagatccataccggcaggttacttgtcggcaccttcgtcgctctgtgctttaaccttttcaccatgttaagtatccggaataagccttttgcctacgtaagtgaagcagcttcaacaagctggctgcaggagcatgtcgcagacctgagccgatcactctgcggcatcattcctgggctgagcagcatcttcctgccacggatgaacccttttgtcctaatagatctagccggtgctttcgcactctgtatcacttacatgctcattgagataaataactattttgctgtggatacagcatcggccattgccatcgctttaatgaccttcggcactatgtatcccatgagcgtgtactccgggaaagtgctgcttcagactactccaccccatgtcattggacaactagataaactcatccgtgaggcgggtagcgttcatgtcaggattcgaagagacgcgaacgaacagatggtcttggctcatgtgacgaatcgactgtacaccctcgtgagcaccctcacggttcagattttcaaggatgattggattagacccgctctgctatcaggccctgttgcagcaaacgttctgaatttctctgaccatcacgtgatccccatgcccctgctgaagggcaccgatgacttaaaccccgtgactagcacccctgccaagccaagcagccctccgccagaatttagcttcaacacacctggcaaaaatgttaatccagttatactgttaaacactcagactcgtccctacggcttcgggttgaatcatggacacacaccatactcctcgatgctgaatcagggactcggcgttccgggaatcggcgcaacacagggtctccgcactggctttaccaacattccatctagatacggtacaaataacagaatcggtcaacctcggccatag

SEQ ID NO: 241426 - DNA, 1299 bp, synthetic construct
  misc_feature 1..1299: note = Description of Artificial Sequence: Synthetic coding sequence
  source 1..1299: mol_type = other DNA
atgagctggaagattctgcttttcggggtgataaacttaatctgtaccgggttcttattaatgtggtgctctagtactaattcaatcgctcttactgcatatacctatctgaccattttcgacctgttcagcctgatgacctgtctgattagctattgggttactctccggaagccctcccccgtgtatagctttggcttcgagcgacttgaagtcctcgccgtgttcgcttcaacagttctggctcagcttggggcactattcatcctgaaagagtcagctgaaagatttctcgaacaaccggagatccacacaggcaggctgctggttggtaccttcgtagccctgtgctttaaccttttcaccatgctgagtattaggaataaaccgttcgcctacgtgtctgaggcggctagcacgtcatggctgcaggaacatgttgcagacctgtcacgcagtctctgtggcattatccctggtctctcaagcatcttcctgccccgaatgaacccatttgtgctgatcgatctggctggagctttcgccctttgtatcacatatatgctcattgaaattaataattactttgcagtggacaccgcttctgcaattgcaatcgcacttatgacatttggcaccatgtatcctatgtccgtgtactctggcaaagttcttctccaaactactccgccacatgtgatcggacagctcgacaaactgatacgggaggtatctaccctcgatggcgtgctggaagtgcgcaatgaacatttttggacactgggattcgggagcttggcgggatccgtacacgtgagaatccggagagacgccaacgagcagatggttctggcacatgtgaccaatcgtttatacaccctggtaagtaccctgactgtacaaatctttaaggatgactggattcgtcctgcactactctctggcccagtggcagcgaatgtcctgaatttctccgaccaccacgtgattcctatgccacttttaaaaggcactgatgacctcaaccccgtgacatccacacctgccaagccctcgtctccgccacctgagttctcatttaatacgccaggcaaaaatgtgaaccctgtaatactgctaaacactcagacacgtccatacgggttcggcctgaaccacggacacacgccatattcaagtatgctgaatcaagggttgggcgtcccaggaattggcgctacccaaggactccgcacaggttttaccaacatacccagcagatacggcacaaataatcgaatcggtcagcccaggccatag

SEQ ID NO: 241427 - DNA, 1131 bp, synthetic construct
  misc_feature 1..1131: note = Description of Artificial Sequence: Synthetic coding sequence
  source 1..1131: mol_type = other DNA
atgcttcctttgtcaattaaggatgacgagtataaacccccaaaatttaatctgtttggcaaaattagtggatggttcaggtcgatcttgtcagataaaacctctagaaatctcttcttcttcctgtgcctgaatctgtcatttgcctttgtcgagttgctctacggcatttggagcaattgcctcggattgatctcggacagcttccatatgtttttcgacagtactgctatccttgccggtctagcggctagcgttatctcaaaatggcgcgacaacgatgccttctcatacggctacgttagggctgaggttctcgcgggatttgtaaatggattgtttctcatcttcaccgccttcttcatcttctcagagggcgttgagcgcgcactggcccctcctgatgtccaccacgaacgcctgttgctcgtcagtatcctgggcttcgttgtgaatctcattggtatttttgtgttcaagcacgggggacacggccactcacatgggagcggccatggtcacagtcatagtctgttcaatggggctctggaccaagcacatgggcatgtagaccactgccattcccatgaggtcaagcatggcgcagcccacagccacgaccacgcacacgggcacggtcacttccactctcatgacggccctagcttgaaggaaaccaccggtccctcaagacaaatcctgcagggggtttttctccacatcctggccgacacgttgggatctatcggcgtgatcgccagtgccatcatgatgcagaactttggccttatgatcgccgatcctatctgcagtattcttatagcaatcttgattgttgtgagcgtgatcccgctcctacgggaaagtgtgggcattctcatgcagagaacccccccacttctagagaacagcttgccccagtgttatcagcgggttcaacagctccaaggagtttatagcttacaggaacagcacttctggactctgtgttctgacgtctatgtaggaactcttaagctgatcgtggcccctgatgcagatgccaggtggatcttgtcgcagacccacaacatcttcacacaggcgggagttcgccaactgtacgtccagatcgatttcgccgctatgtag

SEQ ID NO: 241428 - DNA, 273 bp, synthetic construct
  misc_feature 1..273: note = Description of Artificial Sequence: Synthetic coding sequence
  source 1..273: mol_type = other DNA
taagttatcccactccttagagagtctgtcggtattctgatgcagagaaccccaccgctgcttgaaaacagtctcccacaatgttatcagagggtgcaacagctgcagggcgtttattcgctgcaggaacagcacttctggaccctatgttcagacgtttatgttggcactctcaagctaatcgttgccccagatgccgacgccagatggattctgagccaaacccataatatattcacccagaagctcgaagaggagaacgagaacctgtag

SEQ ID NO: 241429 - DNA, 1131 bp, synthetic construct
  misc_feature 1..1131: note = Description of Artificial Sequence: Synthetic coding sequence
  source 1..1131: mol_type = other DNA
atgctccccctgtctattaaagacgatgaatataagccacccaaattcaatctgtttggtaaaatttcggggtggtttcgcagcatactttccgacaagacctctaggaacctcttcttctttttatgtctaaatttgagcttcgcttttgtggaactgctgtatggaatatggtctaattgtctgggtctgatatcggacagttttcacatgtttttcgacagtacggccattctcgcgggattggctgcaagtgtgatcagcaagtggcgtgacaatgacgccttcagctatggatatgtgcgggctgaggttcttgccggattcgtcaacgggctgttcctgatttttactgcattcttcatctttagtgaaggagtggagcgggcattagcacctccggatgttcatcacgagcggcttttgttggtgtccattttaggatttgtggtcaatttgatcggaatttttgtgtttaagcatggcggacatggacacagccatggatccggacacggacactcccattctctgttcaacggggctctggatcaggcccatgggcatgtagatcattgccactcccatgaagtcaaacacggtgccgcacactcacacgaccacgcccatggtcacgggcacttccattcccacgacggcccatccctcaaagaaaccaccgggccaagccgtcagatcctgcaaggagtgttcctgcacatcttggccgataccctagggtccatcggagtcatagcatctgcaattatgatgcagaactttggcctgatgatagccgacccaatttgctccatactgatcgccatcctgatcgtggtcagcgttatccccctcttacgggaaagtgtcgggatccttatgcagcgcacccccccactgctggagaattctctgccccagtgttaccagcgcgttcagcagctccaaggagtgtactctctccaagagcagcacttttggacactttgctcagacgtctacgtggggacacttaagttgatcgtggcacccgacgccgacgctaggtggatcctgagccagacgcacaatatattcacgcaggcaggcgtgagacagctctatgtccagatcgatttcgccgcaatgtag

SEQ ID NO: 241430 - DNA, 963 bp, synthetic construct
  misc_feature 1..963: note = Description of Artificial Sequence: Synthetic coding sequence
  source 1..963: mol_type = other DNA
atgtaccattgtcactctggctccaagcctacagagaagggagcgaatgagtatgcttatgcgaaatggaagttatgctctgcatcggctatttgtttcatttttatgatcgcagaggtagtgggcggtcatattgcgggaagccttgctgtagtgacagacgccgctcacctgttgatagatcttacatctttccttttatctctatttagtctgtggttgagtagtaagccgccatcaaagcggctcacgtttggctggcatagagcagaaatactgggggctctcctgtcaatcctctgcatttgggtcgtgaccggagtactggtgtatttagcctgcgaaagactgttatatccggattatcagatacaggccaccgtgatgatcattgtttcttcctgtgccgtggcggctaatattgtgctcactgtggtattgcaccagcgttgccttggacacaatcataaagaggtacaggctaacgcatcggtccgcgcagctttcgtacacgccctaggcgatctctttcaaagtatatccgtgttgataagcgccctgattatctatttcaagccagagtacaagattgcagatccaatttgcaccttcatattctccatcctggtgctggccagcacaatcactatcttgaaggatttttctatactgcttatggagggggttcccaagtctctgaactacagcggcgtcaaagagctaattttagccgtggacggtgttctgtccgtgcatagcctacacatctggtctttaactatgaatcaggtgattctttcagcccacgtggccactgcggcttctagggatagccaggtcgtgaggagggaaattgccaaggccttgtctaagagcttcaccatgcacagcctaacaatccaaatggaatcaccagtcgatcaggaccccgactgtcttttctgtgaagacccttgtgattag

SEQ ID NO: 241431 - DNA, 1110 bp, synthetic construct
  misc_feature 1..1110: note = Description of Artificial Sequence: Synthetic coding sequence
  source 1..1110: mol_type = other DNA
atggagttcctggagcgcacatacttggtgaacgacaaagccgctaagatgtacgcttttactctagagagcgttgaactgcagcagaaaccagtcaacaaggatcagtgtcccagggaacggccagaagagctggagagcgggggtatgtaccattgccactctgggtctaagcctacagagaaaggcgctaatgagtacgcctacgccaagtggaaactgtgctcagcatcagccatttgttttatctttatgattgcggaagttgttggaggacatatcgccggatcgttggctgtagtgacagatgcggctcatttactcattgacctgacttcctttttgctgagcctgttttcactctggttaagtagcaaacccccttccaagcgactcacctttggctggcatagggcagagatattgggagctctgttgagcatactgtgtatctgggtcgtaactggggtgttggtatacctcgcatgtgaaagactcctctatcccgattaccagatccaggcaactgtgatgatcatcgtctctagctgcgccgtggccgctaacattgtcctcaccgtggtgcttcaccagagatgcttggggcacaaccacaaggaggtgcaggctaacgcatctgttcgtgcggctttcgtacatgcccttggagacttgtttcaatccattagcgtcctgatcagtgcccttatcatatattttaagcccgaatacaaaattgccgacccgatttgtacgtttatttttagcatccttgtgttagccagcactatcacgatcttgaaggacttcagcatcttactaatggagggtgttcccaagagcttgaattattccggcgtaaaagagctgatcttagccgtcgatggcgtgctgagcgttcactcacttcacatctggagtttaacaatgaaccaggtgattttgtctgcacacgtggctacagcagcctcccgggatagccaggtggtgaggcgggaaatcgctaaagcattgtctaaatcctttacaatgcacagtcttaccattcagatggagtctcctgtagatcaggaccccgactgcctcttttgcgaagatccatgtgactag

SEQ ID NO: 241432 - DNA, 1458 bp, synthetic construct
  misc_feature 1..1458: note = Description of Artificial Sequence: Synthetic coding sequence
  source 1..1458: mol_type = other DNA
atgggcaggtactcagggaagacatgtcgactcctgtttatgctggtgctgaccgtagcgttttttgtcgccgaactggtgtccggttatctagggaatagcatagccctgttgtccgactcgtttaatatgttgagcgatttgataagtctgtgtgtggggctgagcgccggatatatcgcccgacgtccaacaaggggattttcagccacctacgggtatgcacgcgcagaggtggtgggagctttgtcgaatgctgtgtttcttacagcactctgtttcacgatctttgtggaggccgtcctaaggctcgcgcgaccagagcggatcgatgatcctgaactggtgttaatcgtgggtgtgttaggcctactggtgaacgtggtcggccttctcatctttcaggattgtgccgcatggtttgcatgctgccttcgtggaaggagcagacggctccagcaaagacagcagctcgccgaaggctgtgtgcctggagcatttggagggccacagggtgctgaggaccctagacgagccgctgaccccaccgccccaggtagcgactccgcagttactttaagaggcaccagcgtcgaaagaaagcgggagaaaggtgcaaccgtctttgccaatgtagccggtgattccttcaacacacagaatgagcctgaggacatgatgaaaaaggagaagaaatccgaagcattaaatatccggggtgtactcttgcacgtgatgggcgacgccctcggttccgtggtcgtggtcatcacggccataattttctacgttctgccacttaaatctgaggacccttgcaattggcagtgctacatcgacccctcgcttaccgtcctgatggtgatcataatactcagttctgcattccccttgattaaagagacagctgctatacttttacaaatggtacccaaaggggtcaatatggaggaattgatgtcaaaactgtccgcagttcctggtatctcttcagtgcacgaagtgcacatctgggaattggtgagcggcaagattattgctaccctgcatattaagtacccaaaggaccggggttatcaggacgccagcaccaagattcgggagatcttccaccacgctgggatacataacgtgacaattcagttcgagaacgtagacctgaaggaaccattggaacagaaggatctgctgcttttatgcaacagcccttgcatcagtaagggctgcgccaaacaactgtgctgtccacctggcgcacttcctctggcacacgtcaatgggtgcgctgagcataacggaggcccaagtctggatacatacggatccgacggcctgtcaagaagggacgctcgcgaggttgccatcgaggtgtcgctggatagttgcctgagcgatcacggccagagcttgaataagacgcaggaggaccagtgctatgtgaatcgaacacacttctag
